United States Patent Application Publication US 2011/0183924 A1 - sequence listing, part 264

SEQ ID NO: 744731 - protein, 650 aa, Homo sapiens
GPSRLSSRPALAGGFPFIHPSPPPPSTRGQGRISSPSTCLGPWTSLLALPVSGEKLLCSPCGCNPLAGILHLNWLVMEASLGIQMDEPMAFSPQRDRFQAEGSLKKNEQNFKLAGVKKDIEKLYEAVPQLSNVFKIEDKIGEGTFSSVYLATAQLQVGPEEKIALKHLIPTSHPIRIAAELQCLTVAGGQDNVMGVKYCFRKNDHVVIAMPYLEHESFLDILNSLSFQEVREYMLNLFKALKRIHQFGIVHRDVKPSNFLYNRRLKKYALVDFGLAQGTHDTKIELLKFVQSEAQQERCSQNKSHIITGNKIPLSGPVPKELDQQSTTKASVKRPYTNAQIQIKQGKDGKEGSVGLSVQRSVFGERNFNIHSSISHESPAVKLMKQSKTVDVLSRKLATKKKAISTKVMNSAVMRKTASSCPASLTCDCYATDKVCSICLSRRQQVAPRAGTPGFRAPEVLTKCPNQTTAIDMWSAGVIFLSLLSGRYPFYKASDDLTALAQIMTIRGSRETIQAAKTFGKSILCSKEVPAQDLRKLCERLRGMDSSTPKLTSDIQGHASHQPAISEKTDHKASCLVQTPPGQYSGNSFKKGDSNSCEHCFDEYNTNLEGWNEVPDEAYDLLDKLLDLNPASRITAEEALLHPFFKDMSL

SEQ ID NO: 744732 - protein, 107 aa, Homo sapiens [sequence omitted]

SEQ ID NO: 744733 - protein, 107 aa, Homo sapiens
MACYGSQPPRWTPLILDSWCQNHCTQINCKQEQSFNGNFKQEDENPEAFLSRIVTGDETWFYQYNPEDKVQSEQWLPRGGSGPVKAKADLPRAKVVGIVFWDTYFAC

SEQ ID NO: 744734 - protein, 254 aa, Homo sapiens [sequence omitted]

SEQ ID NO: 744735 - protein, 67 aa, Homo sapiens
MEGTLNTSEHQKEQTLVTPSLRTITLTARVGGFILEVSETKNPPIPDTQWPLGGFHQGSGPGLGLDE

SEQ ID NO: 744736 - protein, 365 aa, Homo sapiens
GTRAIFTTGQGASAVGLTAYVQRHPVSREWTLEAGALVLADRGVCLIDEFDKMNDQDRTSIHEAMEQQSISISKAGIVTSLQARCTVIAAANPIGGRYDPSLTFSENVDLTEPIISRFDILCVVRDTVDPVQDEMLARFVVGSHVRHHPSNKEEEGLANGSAAEPAMPNTYGVEPLPQEVLKKYIIYAKERVHPKLNQMDQDKVAKMYSDLRKESMATGSIPITVRHIESMIRMAEAHARIHLRDYVIEDDVNMAIRVMLESFIDTQKFSVMRSMRKTFARYLSFRRDNNELLLFILKQLVAEQVTYQRNRFGAQQDTIEVPEKDLVDKARQINIHNLSAFYDSELFRMNKFSHDLKRKMILQQF

SEQ ID NO: 744737 - protein, 365 aa, Homo sapiens; identical to SEQ ID NO: 744736

SEQ ID NO: 744738 - protein, 71 aa, Homo sapiens
EKVHIPGLANGCASWGEEWRGGLVQAAGHLPSLKAQACELAFLCHNSLTTAGLRHQLTLPHNPGACKGIWI

SEQ ID NO: 744739 - protein, 893 aa, Homo sapiens
HEGPRSWGAWTRPRSAGTMTLARFVLALMLGALPEVVGFDSVLNDSLHHSHRHSPPAGPHYPYYLPTQQRPPTTRPPPPLPRFPRPPRALPAQRPHALQAGHTPRPHPWGCPAGEPWVSVTDFGAPCLRWAEVPPFLERSPPASWAQLRGQRHNFCRSPDGAGRPWCFYGDARGKVDWGYCDCRHGSVRLRGGKNEFEGTVEVYASGVWGTVCSSHWDDSDASVICHQLQLGGKGIAKQTPFSGLGLIPIYWSNVRCRGDEENILLCEKDIWQGGVCPQKMAAAVTCSFSHGPTFPIIRLAGGSSVHEGRVELYHAGQWGTVCDDQWDDADAEVICRQLGLSGIAKAWHQAYFGEGSGPVMLDEVRCTGNELSIEQCPKSSWGEHNCGHKEDAGVSCTPLTDGVIRLAGGKGSHEGRLEVYYRGQWGTVCDDGWTELNTYVVCRQLGFKYGKQASANHFEESTGPIWLDDVSCSGKETRFLQCSRRQWGRHDCSHREDVSIACYPGGEGHRLSLGFPVRLMDGENKKEGRVEVFINGQWGTICDDGWTDKDAAVICRQLGYKGPARARTMAYFGEGKGPIHVDNVKCTGNERSLADCIKQDIGRHNCRHSEDAGVICDYFGKKASGNSNKESLSSVCGLRLLHRRQKRIIGGKNSLRGGWPWQVSLRLKSSHGDGRLLCGATLLSSCWVLTAAHCFKRYGNSTRSYAVRVGDYHTLVPEEFEEEIGVQQIVIHREYRPDRSDYDIALVRLQGPEEQCARFSSHVLPACLPLWRERPQKTASNCYITGWGDTGRAYSRTLQQAAIPLLPKRFCEERYKGRFTGRMLCAGNLHEHKRVDSCQGDSGGPLMCERPGESWVVYGVTSWGYGCGVKDSPGVYTKVSAFVPWIKSVTKL

SEQ ID NO: 744740 - protein, 852 aa, Homo sapiens
HEGPRSWGAWTRPRSAGTMTLARFVLALMLGALPEVVGFDSVLNDSLHHSHRHSPPAGPHYPYYLPTQQRPPTTRPPPPLPRFPRPPRALPAQRPHALQAGHTPRPHPWGCPAGEPWVSVTDFGAPCLRWAEVPPFLERSPPASWAQLRGQRHNFCRSPDGAGRPWCFYGDARGKVDWGYCDCRHGSVRLRGGKNEFEGTVEVYASGVWGTVCSSHWDDSDASVICHQLQLGGKGIAKQTPFSGLGLIPIYWSNVRCRGDEENILLCEKDIWQGGVCPQKMAAAVTCSFSHGPTFPIIRLAGGSSVHEGRVELYHAGQWGTVCDDQWDDADAEVICRQLGLSGIAKAWHQAYFGEGSGPVMLDEVRCTGNELSIEQCPKSSWGEHNCGHKEDAGVSCTPLTDGVIRLAGGKGSHEGRLEVYYRGQWGTVCDDGWTELNTYVVCRQLGFKYGKQASANHFEESTGPIWLDDVSCSGKETRFLQCSRRQWGRHDCSHREDVSIACYPGGEGHRLSLGFPVRLMDGENKKEGRVEVFINGQWGTICDDGWTDKDAAVICRQLGYKGPARARTMAYFGEGKGPIHVDNVKCTGNERSLADCIKQDIGRHNCRHSEDAGVICDYFGKKASGNSNKESLSSVCGLRLLHRRQKRIIGGKNSLRYGNSTRSYAVRVGDYHTLVPEEFEEEIGVQQIVIHREYRPDRSDYDIALVRLQGPEEQCARFSSHVLPACLPLWRERPQKTASNCYITGWGDTGRAYSRTLQQAAIPLLPKRFCEERYKGRFTGRMLCAGNLHEHKRVDSCQGDSGGPLMCERPGESWVVYGVTSWGYGCGVKDSPGVYTKVSAFVPWIKSVTKL

SEQ ID NO: 744741 - protein, 613 aa, Homo sapiens
MAAAVTCSFSHGPTFPIIRLAGGSSVHEGRVELYHAGQWGTVCDDQWDDADAEVICRQLGLSGIAKAWHQAYFGEGSGPVMLDEVRCTGNELSIEQCPKSSWGEHNCGHKEDAGVSCTPLTDGVIRLAGGKGSHEGRLEVYYRGQWGTVCDDGWTELNTYVVCRQLGFKYGKQASANHFEESTGPIWLDDVSCSGKETRFLQCSRRQWGRHDCSHREDVSIACYPGGEGHRLSLGFPVRLMDGENKKEGRVEVFINGQWGTICDDGWTDKDAAVICRQLGYKGPARARTMAYFGEGKGPIHVDNVKCTGNERSLADCIKQDIGRHNCRHSEDAGVICDYFGKKASGNSNKESLSSVCGLRLLHRRQKRIIGGKNSLRGGWPWQVSLRLKSSHGDGRLLCGATLLSSCWVLTAAHCFKRYGNSTRSYAVRVGDYHTLVPEEFEEEIGVQQIVIHREYRPDRSDYDIALVRLQGPEEQCARFSSHVLPACLPLWRERPQKTASNCYITGWGDTGRAYSRTLQQAAIPLLPKRFCEERYKGRFTGRMLCAGNLHEHKRVDSCQGDSGGPLMCERPGESWVVYGVTSWGYGCGVKDSPGVYTKVSAFVPWIKSVTKL

SEQ ID NO: 744742 - protein, 324 aa, Homo sapiens [sequence omitted]

SEQ ID NO: 744743 - protein, 548 aa, Homo sapiens
HEGPRSWGAWTRPRSAGTMTLARFVLALMLGALPEVVGFDSVLNDSLHHSHRHSPPAGPHYPYYLPTQQRPPTTRPPPPLPRFPRPPRALPAQRPHALQAGHTPRPHPWGCPAGEPWVSVTDFGAPCLRWAEVPPFLERSPPASWAQLRGQRHNFCRSPDGAGRPWCFYGDARGKVDWGYCDCRHGSVRLRGGKNEFEGTVEVYASGVWGTVCSSHWDDSDASVICHQLQLGGKGIAKQTPFSGLGLIPIYWSNVRCRGDEENILLCEKDIWQGGVCPQKMAAAVTCSFSHGPTFPIIRLAGGSSVHEGRVELYHAGQWGTVCDDQWDDADAEVICRQLGLSGIAKAWHQAYFGEGSGPVMLDEVRCTGNELSIEQCPKSSWGEHNCGHKEDAGVSCTPLTDGVIRLAGGKGSHEGRLEVYYRGQWGTVCDDGWTELNTYVVCRQLGFKYGKQASANHFEESTGPIWLDDVSCSGKETRFLQCSRRQWGRHDCSHREDVSIACYPGGEGHRLSLGFPVRLMDGENKKEGRVEVFINGQWGTISDTIQS

SEQ ID NO: 744744 - protein, 932 aa, Homo sapiens
  misc_feature (16)..(17): Xaa can be any naturally occurring amino acid
  misc_feature (20)..(20): Xaa can be any naturally occurring amino acid
  misc_feature (26)..(27): Xaa can be any naturally occurring amino acid
  misc_feature (29)..(29): Xaa can be any naturally occurring amino acid
  misc_feature (31)..(31): Xaa can be any naturally occurring amino acid
  misc_feature (38)..(40): Xaa can be any naturally occurring amino acid
  misc_feature (42)..(43): Xaa can be any naturally occurring amino acid
  misc_feature (46)..(46): Xaa can be any naturally occurring amino acid
  misc_feature (49)..(49): Xaa can be any naturally occurring amino acid
  misc_feature (52)..(54): Xaa can be any naturally occurring amino acid
  misc_feature (57)..(59): Xaa can be any naturally occurring amino acid
  misc_feature (63)..(63): Xaa can be any naturally occurring amino acid
  misc_feature (66)..(67): Xaa can be any naturally occurring amino acid
  misc_feature (70)..(71): Xaa can be any naturally occurring amino acid
  misc_feature (73)..(75): Xaa can be any naturally occurring amino acid
  misc_feature (78)..(87): Xaa can be any naturally occurring amino acid
  misc_feature (91)..(91): Xaa can be any naturally occurring amino acid
  misc_feature (93)..(94): Xaa can be any naturally occurring amino acid
  misc_feature (98)..(98): Xaa can be any naturally occurring amino acid
  misc_feature (101)..(102): Xaa can be any naturally occurring amino acid
  misc_feature (104)..(107): Xaa can be any naturally occurring amino acid
  misc_feature (110)..(113): Xaa can be any naturally occurring amino acid
  misc_feature (115)..(115): Xaa can be any naturally occurring amino acid
  misc_feature (119)..(119): Xaa can be any naturally occurring amino acid
  misc_feature (122)..(123): Xaa can be any naturally occurring amino acid
  misc_feature (125)..(127): Xaa can be any naturally occurring amino acid
  misc_feature (129)..(131): Xaa can be any naturally occurring amino acid
  misc_feature (133)..(133): Xaa can be any naturally occurring amino acid
  misc_feature (137)..(137): Xaa can be any naturally occurring amino acid
KAPAAGGKVGEARAVXXQGXEGAGGXXGXGXPPPPPPXXXSXXEKXGSXDQXXXRWXXXARTXRAXXKVXXAXXXGRXXXXXXXXXXKKQXQXXPCRXAKXXKXXXXTTXXXXTXAAAXTAXXAXXXGXXXTXQASXQKRDKHRPHPWGCPAGEPWVSVTDFGAPCLRWAEVPPFLERSPPASWAQLRGQRHNFCRSPDGAGRPWCFYGDARGKVDWGYCDCRHGSVRLRGGKNEFEGTVEVYASGVWGTVCSSHWDDSDASVICHQLQLGGKGIAKQTPFSGLGLIPIYWSNVRCRGDEENILLCEKDIWQGGVCPQKMAAAVTCSFSHGPTFPIIRLAGGSSVHEGRVELYHAGQWGTVCDDQWDDADAEVICRQLGLSGIAKAWHQAYFGEGSGPVMLDEVRCTGNELSIEQCPKSSWGEHNCGHKEDAGVSCTPLTDGVIRLAGGKGSHEGRLEVYYRGQWGTVCDDGWTELNTYVVCRQLGFKYGKQASANHFEESTGPIWLDDVSCSGKETRFLQCSRRQWGRHDCSHREDVSIACYPGGEGHRLSLGFPVRLMDGENKKEGRVEVFINGQWGTICDDGWTDKDAAVICRQLGYKGPARARTMAYFGEGKGPIHVDNVKCTGNERSLADCIKQDIGRHNCRHSEDAGVICDYFGKKASGNSNKESLSSVCGLRLLHRRQKRIIGGKNSLRGGWPWQVSLRLKSSHGDGRLLCGATLLSSCWVLTAAHCFKRYGNSTRSYAVRVGDYHTLVPEEFEEEIGVQQIVIHREYRPDRSDYDIALVRLQGPEEQCARFSSHVLPACLPLWRERPQKTASNCYITGWGDTGRAYSRTLQQAAIPLLPKRFCEERYKGRFTGRMLCAGNLHEHKRVDSCQGDSGGPLMCERPGESWVVYGVTSWGYGCGVKDSPGVYTKVSAFVPWIKSVTKL

SEQ ID NO: 744745 - protein, 573 aa, Homo sapiens
HEGPRSWGAWTRPRSAGTMTLARFVLALMLGALPEVVGFDSVLNDSLHHSHRHSPPAGPHYPYYLPTQQRPPTTRPPPPLPRFPRPPRALPAQRPHALQAGHTPRPHPWGCPAGEPWVSVTDFGAPCLRWAEVPPFLERSPPASWAQLRGQRHNFCRSPDGAGRPWCFYGDARGKVDWGYCDCRHGSVRLRGGKNEFEGTVEVYASGVWGTVCSSHWDDSDASVICHQLQLGGKGIAKQTPFSGLGLIPIYWSNVRCRGDEENILLCEKDIWQGGVCPQKMAAAVTCSFSHGPTFPIIRLAGGSSVHEGRVELYHAGQWGTVCDDQWDDADAEVICRQLGLSGIAKAWHQAYFGEGSGPVMLDEVRCTGNELSIEQCPKSSWGEHNCGHKEDAGVSCTPLTDGVIRLAGGKGSHEGRLEVYYRGQWGTVCDDGWTELNTYVVCRQLGFKYGKQASANHFEESTGPIWLDDVSCSGKETRFLQCSRRQWGRHDCSHREDVSIACYPGGEGHRLSLGFPVRLMDGENKKEGRVEVFINGQWGTICDDGWTDKDAAVICRQLGYNIICNSQDVETA

SEQ ID NO: 744746 - protein, 216 aa, Homo sapiens
GGRWRRRKELVPVQVVEDNHHGHSPEERIIYGVENSSTFLECSPKSQRALVYWQFQRRNEERKEEIRVDDHIIRTDQGLLLRSLQQKDSGNYLCHAVEHGFIQTLLKVTLEVIDTEHLEELLHKDDDGDGSKTKEMSNSMTPSQKVWYRDFMQLINHPNLNTMDEFCEQVWKRDRKQRRQRPGHTPGNSNKWKHLQENKKGRNRRTHEFERAPRSV

SEQ ID NO: 744747 - protein, 306 aa, Homo sapiens
KETWYDLEEVLLEEMTVFREPTAISAMELSTKQQQLYIGSTAGVAQLPLHRCDIYGKACAECCLARDPYCAWDGSACSRYFPTAKRRTRRQDIRNGDPLTHCSDLHHDNHHGHSPEERIIYGVENSSTFLECSPKSQRALVYWQFQRRNEERKEEIRVDDHIIRTDQGLLLRSLQQKDSGNYLCHAVEHGFIQTLLKVTLEVIDTEHLEELLHKDDDGDGSKTKEMSNSMTPSQKVWYRDFMQLINHPNLNTMDEFCEQVWKRDRKQRRQRPGHTPGNSNKWKHLQENKKGRNRRTHEFERAPRSV

SEQ ID NO: 744748 - protein, 219 aa, Homo sapiens
MDSGTRPVGSCCSSPAGLSREYKLVMLGAGGVGKSAMTMQFISHRFPEDHDPTIEDAYKIRIRIDDEPANLDILDTAGQAEFTAMRDQYMRAGEGFIICYSITDRRSFHEVREFKQLIYRVRRTDDTPVVLVGNKSDLKQLRQVTKEEGLALAREFSCPFFETSAAYRYYIDDVFHALVREIRRKEKEAVLAMEKKSKPKNSVWKRLKSPFRKKKDSVT

SEQ ID NO: 744749 - protein, 219 aa, Homo sapiens; identical to SEQ ID NO: 744748

SEQ ID NO: 744750 - protein, 103 aa, Homo sapiens
PTTTTKLAAARPVVLVGNKSDLKQLRQVTKEEGLALAREFSCPFFETSAAYRYYIDDVFHALVREIRRKEKEAVLAMEKKSKPKNSVWKRLKSPFRKKKDSVT

SEQ ID NO: 744751 - protein, 183 aa, Homo sapiens
MTMQFISHRFPEDHDPTIEDAYKIRIRIDDEPANLDILDTAGQAEFTAMRDQYMRAGEGFIICYSITDRRSFHEVREFKQLIYRVRRTDDTPVVLVGNKSDLKQLRQVTKEEGLALAREFSCPFFETSAAYRYYIDDVFHALVREIRRKEKEAVLAMEKKSKPKNSVWKRLKSPFRKKKDSVT

SEQ ID NO: 744752 - protein, 1062 aa, Homo sapiens
MVSSAQMGFNLQALLEQLSQDELSKFKYLITTFSLAHELQKIPHKEVDKADGKQLVEILTTHCDSYWVEMASLQVFEKMHRMDLSERAKDEVREAALKSFNKRKPLSLGITRKERPPLDVDEMLERFKTEAQAFTETKGNVICLGKEVFKGKKPDKDNRCRYILKTKFREMWKSWPGDSKEVQVMAERYKMLIPFSNPRVLPGPFSYTVVLYGPAGLGKTTLAQKLMLDWAEDNLIHKFKYAFYLSCRELSRLGPCSFAELVFRDWPELQDDIPHILAQARKILFVIDGFDELGAAPGALIEDICGDWEKKKPVPVLLGSLLNRVMLPKAALLVTTRPRALRDLRILAEEPIYIRVEGFLEEDRRAYFLRHFGDEDQAMRAFELMRSNAALFQLGSAPAVCWIVCTTLKLQMEKGEDPVPTCLTRTGLFLRFLCSRFPQGAQLRGALRTLSLLAAQGLWAQTSVLHREDLERLGVQESDLRLFLDGDILRQDRVSKGCYSFIHLSFQQFLTALFYTLEKEEEEDRDGHTWDIGDVQKLLSGVERLRNPDLIQAGYYSFGLANEKRAKELEATFGCRMSPDIKQELLRCDISCKGGHSTVTDLQELLGCLYESQEEELVKEVMAQFKEISLHLNAVDVVPSSFCVKHCRNLQKMSLQVIKENLPENVTASESDAEVERSQDDQHMLPFWTDLCSIFGSNKDLMGLAINDSFLSASLVRILCEQIASDTCHLQRVVFKNISPADAHRNLCLALRGHKTVTYLTLQGNDQDDMFPALCEVLRHPECNLRYLGLVSCSATTQQWADLSLALEVNQSLTCVNLSDNELLDEGAKLLYTTLRHPKCFLQRLSLENCHLTEANCKDLAAVLVVSRELTHLCLAKNPIGNTGVKFLCEGLRYPECKLQTLVLWNCDITSDGCCDLTKLLQEKSSLLCLDLGLNHIGVKGMKFLCEALRKPLCNLRCLWLWGCSIPPFSCEDLCSALSCNQSLVTLDLGQNPLGSSGVKMLFETLTCSSGTLRTLRLKIDDFNDELNKLLEEIEEKNPQLIIDTEKHHPWAERPSSHDFMI

SEQ ID NO: 744753 - protein, 1040 aa, Homo sapiens
MVSSAQMGFNLQALLEQLSQDELSKFKYLITTFSLAHELQKIPHKEVDKADGKQLVEILTTHCDSYWVEMASLQVFEKMHRMDLSERAKDEVREAALKSFNKRKPLSLGITRKERPPLDVDEMLERFKTEAQDKDNRCRYILKTKFREMWKSWPGDSKEVQVMAERYKMLIPFSNPRVLPGPFSYTVVLYGPAGLGKTTLAQKLMLDWAEDNLIHKFKYAFYLSCRELSRLGPCSFAELVFRDWPELQDDIPHILAQARKILFVIDGFDELGAAPGALIEDICGDWEKKKPVPVLLGSLLNRVMLPKAALLVTTRPRALRDLRILAEEPIYIRVEGFLEEDRRAYFLRHFGDEDQAMRAFELMRSNAALFQLGSAPAVCWIVCTTLKLQMEKGEDPVPTCLTRTGLFLRFLCSRFPQGAQLRGALRTLSLLAAQGLWAQTSVLHREDLERLGVQESDLRLFLDGDILRQDRVSKGCYSFIHLSFQQFLTALFYTLEKEEEEDRDGHTWDIGDVQKLLSGVERLRNPDLIQAGYYSFGLANEKRAKELEATFGCRMSPDIKQELLRCDISCKGGHSTVTDLQELLGCLYESQEEELVKEVMAQFKEISLHLNAVDVVPSSFCVKHCRNLQKMSLQVIKENLPENVTASESDAEVERSQDDQHMLPFWTDLCSIFGSNKDLMGLAINDSFLSASLVRILCEQIASDTCHLQRVVFKNISPADAHRNLCLALRGHKTVTYLTLQGNDQDDMFPALCEVLRHPECNLRYLGLVSCSATTQQWADLSLALEVNQSLTCVNLSDNELLDEGAKLLYTTLRHPKCFLQRLSLENCHLTEANCKDLAAVLVVSRELTHLCLAKNPIGNTGVKFLCEGLRYPECKLQTLVLWNCDITSDGCCDLTKLLQEKSSLLCLDLGLNHIGVKGMKFLCEALRKPLCNLRCLWLWGCSIPPFSCEDLCSALSCNQSLVTLDLGQNPLGSSGVKMLFETLTCSSGTLRTLRLKIDDFNDELNKLLEEIEEKNPQLIIDTEKHHPWAERPSSHDFMI

SEQ ID NO: 744754 - protein, 102 aa, Homo sapiens
MVSSAQMGFNLQALLEQLSQDELSKFKYLITTFSLAHELQKIPHKEVDKADGKQLVEILTTHCDSYWVEMASLQVFEKMHRMDLSERAKDEVREASKPLKTL

SEQ ID NO: 744755 - protein, 542 aa, Homo sapiens
MSQVWPSLSWDIGDVQKLLSGVERLRNPDLIQAGYYSFGLANEKRAKELEATFGCRMSPDIKQELLRCDISCKGGHSTVTDLQELLGCLYESQEEELVKEVMAQFKEISLHLNAVDVVPSSFCVKHCRNLQKMSLQVIKENLPENVTASESDAEVERSQDDQHMLPFWTDLCSIFGSNKDLMGLAINDSFLSASLVRILCEQIASDTCHLQRVVFKNISPADAHRNLCLALRGHKTVTYLTLQGNDQDDMFPALCEVLRHPECNLRYLGLVSCSATTQQWADLSLALEVNQSLTCVNLSDNELLDEGAKLLYTTLRHPKCFLQRLSLENCHLTEANCKDLAAVLVVSRELTHLCLAKNPIGNTGVKFLCEGLRYPECKLQTLVLWNCDITSDGCCDLTKLLQEKSSLLCLDLGLNHIGVKGMKFLCEALRKPLCNLRCLWLWGCSIPPFSCEDLCSALSCNQSLVTLDLGQNPLGSSGVKMLFETLTCSSGTLRTLRLKIDDFNDELNKLLEEIEEKNPQLIIDTEKHHPWAERPSSHDFMI

SEQ ID NO: 744756 - protein, 846 aa, Homo sapiens
MVSSAQMGFNLQALLEQLSQDELSKFKYLITTFSLAHELQKIPHKEVDKADGKQLVEILTTHCDSYWVEMASLQVFEKMHRMDLSERAKDEVREAALKSFNKRKPLSLGITRKERPPLDVDEMLERFKTEAQAFTETKGNVICLGKEVFKGKKPDKDNRCRYILKTKFREMWKSWPGDSKEVQVMAERYKMLIPFSNPRVLPGPFSYTVVLYGPAGLGKTTLAQKLMLDWAEDNLIHKFKYAFYLSCRELSRLGPCSFAELVFRDWPELQDDIPHILAQARKILFVIDGFDELGAAPGALIEDICGDWEKKKPVPVLLGSLLNRVMLPKAALLVTTRPRALRDLRILAEEPIYIRVEGFLEEDRRAYFLRHFGDEDQAMRAFELMRSNAALFQLGSAPAVCWIVCTTLKLQMEKGEDPVPTCLTRTGLFLRFLCSRFPQGAQLRGALRTLSLLAAQGLWAQTSVLHREDLERLGVQESDLRLFLDGDILRQDRVSKGCYSFIHLSFQQFLTALFYTLEKEEEEDRDGHTWDIGDVQKLLSGVERLRNPDLIQAGYYSFGLANEKRAKELEATFGCRMSPDIKQELLRCDISCKGGHSTVTDLQELLGCLYESQEEELVKEVMAQFKEISLHLNAVDVVPSSFCVKHCRNLQKMSLQVIKENLPENVTASESDAEVERSQDDQHMLPFWTDLCSIFGSNKDLMGLAINDSFLSASLVRILCEQIASDTCHLQRVVFKNISPADAHRNLCLALRGHKTVTYLTLQGNDQDDMFPALCEVLRHPECNLRYLGLVSCSATTQQWADLSLALEVNQSLTCVNLSDNELLDEGAKLLYTTLRHPKCFLQRLS

SEQ ID NO: 744757 - protein, 197 aa, Homo sapiens
MSPLSLSVSNPRLKSQRCITAVRTHRFGFAFFLWLISRLWNCDITSDGCCDLTKLLQEKSSLLCLDLGLNHIGVKGMKFLCEALRKPLCNLRCLWLWGCSIPPFSCEDLCSALSCNQSLVTLDLGQNPLGSSGVKMLFETLTCSSGTLRTLRLKIDDFNDELNKLLEEIEEKNPQLIIDTEKHHPWAERPSSHDFMI

SEQ ID NO: 744758 - protein, 838 aa, Homo sapiens
MVSSAQMGFNLQALLEQLSQDELSKFKYLITTFSLAHELQKIPHKEVDKADGKQLVEILTTHCDSYWVEMASLQVFEKMHRMDLSERAKDEVREAALKSFNKRKPLSLGITRKERPPLDVDEMLERFKTEAQAFTETKGNVICLGKEVFKGKKPDKDNRCRYILKTKFREMWKSWPGDSKEVQVMAERYKMLIPFSNPRVLPGPFSYTVVLYGPAGLGKTTLAQKLMLDWAEDNLIHKFKYAFYLSCRELSRLGPCSFAELVFRDWPELQDDIPHILAQARKILFVIDGFDELGAAPGALIEDICGDWEKKKPVPVLLGSLLNRVMLPKAALLVTTRPRALRDLRILAEEPIYIRVEGFLEEDRRAYFLRHFGDEDQAMRAFELMRSNAALFQLGSAPAVCWIVCTTLKLQMEKGEDPVPTCLTRTGLFLRFLCSRFPQGAQLRGALRTLSLLAAQGLWAQTSVLHREDLERLGVQESDLRLFLDGDILRQDRVSKGCYSFIHLSFQQFLTALFYTLEKEEEEDRDGHTWDIGDVQKLLSGVERLRNPDLIQAGYYSFGLANEKRAKELEATFGCRMSPDIKQELLRCDISCKGGHSTVTDLQELLGCLYESQEEELVKEVMAQFKEISLHLNAVDVVPSSFCVKHCRNLQKMSLQVIKENLPENVTASESDAEVERSQDDQHMLPFWTDLCSIFGSNKDLMGLAINDSFLSASLVRILCEQIASDTCHLQRVVFKNISPADAHRNLCLALRGHKTVTYLTLQGNDQNPLGSSGVKMLFETLTCSSGTLRTLRLKIDDFNDELNKLLEEIEEKNPQLIIDTEKHHPWAERPSSHDFMI

SEQ ID NO: 744759 - protein, 909 aa, Homo sapiens
MVSSAQMGFNLQALLEQLSQDELSKFKYLITTFSLAHELQKIPHKEVDKADGKQLVEILTTHCDSYWVEMASLQVFEKMHRMDLSERAKDEVREAALKSFNKRKPLSLGITRKERPPLDVDEMLERFKTEAQAFTETKGNVICLGKEVFKGKKPDKDNRCRYILKTKFREMWKSWPGDSKEVQVMAERYKMLIPFSNPRVLPGPFSYTVVLYGPAGLGKTTLAQKLMLDWAEDNLIHKFKYAFYLSCRELSRLGPCSFAELVFRDWPELQDDIPHILAQARKILFVIDGFDELGAAPGALIEDICGDWEKKKPVPVLLGSLLNRVMLPKAALLVTTRPRALRDLRILAEEPIYIRVEGFLEEDRRAYFLRHFGDEDQAMRAFELMRSNAALFQLGSAPAVCWIVCTTLKLQMEKGEDPVPTCLTRTGLFLRFLCSRFPQGAQLRGALRTLSLLAAQGLWAQTSVLHREDLERLGVQESDLRLFLDGDILRQDRVSKGCYSFIHLSFQQFLTALFYTLEKEEEEDRDGHTWDIGDVQKLLSGVERLRNPDLIQAGYYSFGLANEKRAKELEATFGCRMSPDIKQELLRCDISCKGGHSTVTDLQELLGCLYESQEEELVKEVMAQFKEISLHLNAVDVVPSSFCVKHCRNLQKMSLQVIKENLPENVTASESDAEVERSQDDQHMLPFWTDLCSIFGSNKDLMGLAINDSFLSASLVRILCEQIASDTCHLQRVVFKNISPADAHRNLCLALRGHKTVTYLTLQGNDQDDMFPALCEVLRHPECNLRYLGLVSCSATTQQWADLSLALEVNQSLTCVNLSDNELLDEGAKLLYTTLRHPKCFLQRLSLENCHLTEANCKDLAAVLVVSRELTHLCLAKNPIGNTGVKFLCEGLRYPECKLQTLVKPTTDY

SEQ ID NO: 744760 - protein, 924 aa, Homo sapiens
MVSSAQMGFNLQALLEQLSQDELSKFKYLITTFSLAHELQKIPHKEVDKADGKQLVEILTTHCDSYWVEMASLQVFEKMHRMDLSERAKDEVREAALKSFNKRKPLSLGITRKERPPLDVDEMLERFKTEAQAFTETKGNVICLGKEVFKGKKPDKDNRCRYILKTKFREMWKSWPGDSKEVQVMAERYKMLIPFSNPRVLPGPFSYTVVLYGPAGLGKTTLAQKLMLDWAEDNLIHKFKYAFYLSCRELSRLGPCSFAELVFRDWPELQDDIPHILAQARKILFVIDGFDELGAAPGALIEDICGDWEKKKPVPVLLGSLLNRVMLPKAALLVTTRPRALRDLRILAEEPIYIRVEGFLEEDRRAYFLRHFGDEDQAMRAFELMRSNAALFQLGSAPAVCWIVCTTLKLQMEKGEDPVPTCLTRTGLFLRFLCSRFPQGAQLRGALRTLSLLAAQGLWAQTSVLHREDLERLGVQESDLRLFLDGDILRQDRVSKGCYSFIHLSFQQFLTALFYTLEKEEEEDRDGHTWDIGDVQKLLSGVERLRNPDLIQAGYYSFGLANEKRAKELEATFGCRMSPDIKQELLRCDISCKGGHSTVTDLQELLGCLYESQEEELVKEVMAQFKEISLHLNAVDVVPSSFCVKHCRNLQKMSLQVIKENLPENVTASESDAEVERSQDDQHMLPFWTDLCSIFGSNKDLMGLAINDSFLSASLVRILCEQIASDTCHLQRVVFKNISPADAHRNLCLALRGHKTVTYLTLQGNDQDDMFPALCEVLRHPECNLRYLGLVSCSATTQQWADLSLALEVNQSLTCVNLSDNELLDEGAKLLYTTLRHPKCFLQRLSLENCHLTEANCKDLAAVLVVSRELTHLCLAKNPIGNTGVKFLCEGLRYPECKLQTLVVSPCWLPVCVGVYAHAPHLRV

SEQ ID NO: 744761 - protein, 73 aa, Homo sapiens
ASSLPSLLTNDKDKDNRCRYILKTKFREMWKSWPGDSKEVQVMAERYKMLIPFSNPRVLPGPFSYTVVLYGPA

SEQ ID NO: 744762 - protein, 85 aa, Homo sapiens
MFSRDGFHHVGQAGLELLSSGDPPTSASQSAGITGVSHRARLCPQPGNGVLLCCPTVLEVLTSRDPSARAFQSAEITGVSRHARP

SEQ ID NO: 744763 - protein, 69 aa, Homo sapiens
NHLVLAIPLRVLVVLWAFVLGLSRVMLGRHNVTDVAFGFFLGYMQYSIVDYCWLSPHNAPVLFLLWSQR

SEQ ID NO: 744764 - protein, 69 aa, Homo sapiens; identical to SEQ ID NO: 744763

SEQ ID NO: 744765 - protein, 69 aa, Homo sapiens; identical to SEQ ID NO: 744763

SEQ ID NO: 744766 - protein, 86 aa, Homo sapiens
TQLGEAFSGSACENSPGLGPNQDGWPREVTAQFPLAGKTQSPVAVFQALLPTPALGPLGGEVRCLMPGSFPGAYMLGIQRGPNSSC

SEQ ID NO: 744767 - protein, 278 aa, Homo sapiens
LCGEVAGEHAQRDCGRVVQSLEGSHALAVWTFKFFRFFRKATGSLGQGRQDCMSEKRRRLDARNPLKQETALSRKMTQDRPLLAVQEALKKCFPVVEEQQGLWQSALRDCQPLLSSLSNLAEQLQAAQNLRFEDVPALRAFPDLKERLRRKQLVAGDIVLDKLGERLAILLKVRDMVSSHVERVFQIYEQHADTVGIDAVLQPSAVSPSVADMLEWLQDIERHYRKSYLKRKYLLSSIQWGDLANIQALPKAWDRISKDEHQDLVQDILLNVSFFLEE

SEQ ID NO: 744768 - protein, 206 aa, Homo sapiens
LCGEVAGEHAQRDCGRVVQSLEGSHALAVWTFKFFRFFRKATGSLGQGRQDCMSEKRRRLDARNPLKQETALSRLPFPRGNQGLLQKAEAGRARWLTPVIPALWKTEAGGSPEKMTQDRPLLAVQEALKKCFPVVEEQQGLWQSALRDCQPLLSSLSNLAEQLQAAQNLRFEDVPALRAFPDLKERLRRKQLVAGDIVLDKLGERL

SEQ ID NO: 744769 - protein, 144 aa, Homo sapiens
LCGEVAGEHAQRDCGRVVQSLEGSHALAVWTFKFFRFFRKATGSLGQGRQDCMSEKRRRLDARNPLKQETALSRLPFPRGNQGLLQKAGLFSLLNALVAVVVTATGAWAEGARAAADITKHLLCARMFTQSLVKSFPSVSLVLL

SEQ ID NO: 744770 - protein, 198 aa, Homo sapiens
MTQDRPLLAVQEALKKCFPVVEEQQGLWQSALRDCQPLLSSLSNLAEQLQAAQNLRFEDVPALRAFPDLKERLRRKQLVAGDIVLDKLGERLAILLKVRDMVSSHVERVFQIYEQHADTVGIDAVLQPSAVSPSVADMLEWLQDIERHYRKSYLKRKYLLSSIQWGDLANIQALPKAWDRISKDEHQDLVQGTGLCSS

SEQ ID NO: 744771 - protein, 317 aa, Homo sapiens
LCGEVAGEHAQRDCGRVVQSLEGSHALAVWTFKFFRFFRKATGSLGQGRQDCMSEKRRRLDARNPLKQETALSRLPFPRGNQGLLQKAEAGRARWLTPVIPALWKTEAGGSPEKMTQDRPLLAVQEALKKCFPVVEEQQGLWQSALRDCQPLLSSLSNLAEQLQAAQNLRFEDVPALRAFPDLKERLRRKQLVAGDIVLDKLGERLAILLKVRDMVSSHVERVFQIYEQHADTVGIDAVLQPSAVSPSVADMLEWLQDIERHYRKSYLKRKYLLSSIQWGDLANIQALPKAWDRISKDEHQDLVQDILLNVSFFLEE

SEQ ID NO: 744772 - protein, 203 aa, Homo sapiens
MTQDRPLLAVQEALKKCFPVVEEQQGLWQSALRDCQPLLSSLSNLAEQLQAAQNLRFEDVPALRAFPDLKERLRRKQLVAGDIVLDKLGERLAILLKVRDMVSSHVERVFQIYEQHADTVGIDAVLQPSAVSPSVADMLEWLQDIERHYRKSYLKRKYLLSSIQWGDLANIQALPKAWDRISKDEHQDLVQDILLNVSFFLEE

SEQ ID NO: 744773 - protein, 203 aa, Homo sapiens; identical to SEQ ID NO: 744772

SEQ ID NO: 744774 - protein, 226 aa, Homo sapiens
MSEKRRRLDARNPLKQETALSRKMTQDRPLLAVQEALKKCFPVVEEQQGLWQSALRDCQPLLSSLSNLAEQLQAAQNLRFEDVPALRAFPDLKERLRRKQLVAGDIVLDKLGERLAILLKVRDMVSSHVERVFQIYEQHADTVGIDAVLQPSAVSPSVADMLEWLQDIERHYRKSYLKRKYLLSSIQWGDLANIQALPKAWDRISKDEHQDLVQDILLNVSFFLEE

SEQ ID NO: 744775 - protein, 203 aa, Homo sapiens; identical to SEQ ID NO: 744772

SEQ ID NO: 744776 - protein, 136 aa, Homo sapiens
MSEKRRRLDARNPLKQETALSRKMTQDRPLLAVQEALKKCFPVVEEQQGLWQSALRDCQPLLSSLSNLAEQLQAAQNLRFEDVPALRAFPDLKERLRQPSSSRCETWSAAMWSECFRSMSNTQTQLALMLSCSLQQ

SEQ ID NO: 744777 - protein, 317 aa, Homo sapiens; identical to SEQ ID NO: 744771

SEQ ID NO: 744778 - protein, 317 aa, Homo sapiens; identical to SEQ ID NO: 744771

SEQ ID NO: 744779 - protein, 124 aa, Homo sapiens
ITEMTPTLDPVPPRLTWHPNVVIFCFYLFQQKMTQDRPLLAVQEALKKCFPVVEEQQGLWQSALRDCQPLLSSLSNLAEQLQAAQNLRFEDVPALRAFPDLKERLRRKQLVAGDIVLDKLGERL

SEQ ID NO: 744780 - protein, 315 aa, Homo sapiens
MTHQDLSITAKLINGGVAGLVGVTCVFPIDLAKTRLQNQHGKAMYKGMIDCLMKTARAEGFFGMYRGAAVNLTLVTPEKAIKLAANDFFRRLLMEDGMQRNLKMEMLAGCGAGMCQVVVTCPMEMLKIQLQDAGRLAVHHQGSASAPSTSRSYTTGSASTHRRPSATLIAWELLRTQGLAGLYRGLGATLLRDIPFSIIYFPLFANLNNLGFNELAGKASFAHSFVSGCVAGSIAAVAVTPLDVLKTRIQTLKKGLGEDMYSGITDCARKLWIQEGPSAFMKGAGCRALVIAPLFGIAQGVYFIGIGERILKCFD

SEQ ID NO: 744781 - protein, 315 aa, Homo sapiens; identical to SEQ ID NO: 744780

SEQ ID NO: 744782 - protein, 438 aa, Homo sapiens
MNVDSLAGKLSLSSDLNYILGSRKGRGSYRKQMEARCVTQAGVQWCDLGSLQFCLPGEEAAAQGGRHLPGRWLGPGCTQNPCSVHTATGPEPRKLPLLPPDSPNSGYPKEPAALCPGIPSPCRMTHQDLSITAKLINGGVAGLVGVTCVFPIDLAKTRLQNQHGKAMYKGMIDCLMKTARAEGFFGMYRGAAVNLTLVTPEKAIKLAANDFFRRLLMEDGMQRNLKMEMLAGCGAGMCQVVVTCPMEMLKIQLQDAGRLAVHHQGSASAPSTSRSYTTGSASTHRRPSATLIAWELLRTQGLAGLYRGLGATLLRDIPFSIIYFPLFANLNNLGFNELAGKASFAHSFVSGCVAGSIAAVAVTPLDVLKTRIQTLKKGLGEDMYSGITDCARKLWIQEGPSAFMKGAGCRALVIAPLFGIAQGVYFIGIGERILKCFD

SEQ ID NO: 744783 - protein, 315 aa, Homo sapiens; identical to SEQ ID NO: 744780

SEQ ID NO: 744784 - protein, 50 aa, Homo sapiens
ASDALDKIRYESLTDPSKLDSGKELKIDIIPSPFIWRRNKTRKLVMMRQK

SEQ ID NO: 744785 - protein, 320 aa, Homo sapiens
QFRFLSVSQGMRPARHWETRFGARDFGGFQDCFFRDRLMDTARIAVVGAGVVGLSTAVCISKLVPRCSVTIISDKFTPDTTSDVAAGMLIPHTYPDTPIHTQKQWFRETFNHLFAIANSAEAGDAGVHLVSGIKGSGGWTLTRRIEDLWELHPSFDIVVNCSGLGSRQLAGDSKIFPVRGQVLQVQAPWVEHFIRDGSGLTYIYPGTSHVTLGGTRQKGDWNLSPDAENSREILSRCCALEPSLHGACNIREKVGLRPYRPGVRLQTELLARDGQRLPVVHHYGHGSGGISVHWGTALEAARLVSECVHALRTPIPKSNL

SEQ ID NO: 744786 - protein, 379 aa, Homo sapiens
QFRFLSVSQGMRPARHWETRFGARDFGGFQDCFFRDRLMDTARIAVVGAGVVGLSTAVCISKLVPRCSVTIISDKFTPDTTSDVAAGMLIPHTYPDTPIHTQKQWFRETFNHLFAIANSAEAGDAGVHLVSGWQIFQSTPTEEVPFWADVVLGFRKMTEAELKKFPQYVFGQAFTTLKCECPAYLPWLEKRIKGSGGWTLTRRIEDLWELHPSFDIVVNCSGLGSRQLAGDSKIFPVRGQVLQVQAPWVEHFIRDGSGLTYIYPGTSHVTLGGTRQKGDWNLSPDAENSREILSRCCALEPSLHGACNIREKVGLRPYRPGVRLQTELLARDGQRLPVVHHYGHGSGGISVHWGTALEAARLVSECVHALRTPIPKSNL

SEQ ID NO: 744787 - protein, 379 aa, Homo sapiens; identical to SEQ ID NO: 744786

SEQ ID NO: 744788 - protein, 320 aa, Homo sapiens; identical to SEQ ID NO: 744785

SEQ ID NO: 744789 - protein, 55 aa, Homo sapiens
MPIDKSRGSARHGAKRFYAHGLHEMARFTDEETEARRVRNLVLDPIPAEVEDAST

SEQ ID NO: 744790 - protein, 132 aa, Homo sapiens
MDVTRLLLATLLVFLCFFTANSHLPPEEKLRDDRSLRSNSSVNLLDVPSVSIVALNKKSKQIGRKAAEKKRSSKKEASMKKVVRPRTPLSAPCVATRNSCKPPAPACCDPCASCQCRFFRSACSCRVLSLNC

SEQ ID NO: 744791 - protein, 377 aa, Homo sapiens
MLRLVPTGARAIVDMSYARHFLDFQGSAIPQAMQKLVVTRLSPNFREAVTLSRDCPVPLPGDGDLLVRNRFVGVNASDINYSAGRYDPSVKPPFDIGFEGIGEVVALGLSASARYTVGQAVAYMAPGSFAEYTVVPASIATPVPSVKPEYLTLLVSGTTAYISLKELGGLSEGKKVLVTAAAGGTGQFAMQLSKKAKCHVIGTCSSDEKSAFLKSLGCDRPINYKTEPVGTVLKQEYPEGVDVVYESVGGAMFDLAVDALATKGRLIVIGFISGYQTPTGLSPVKAGTLPAKLLKKSASVQGFFLNHYLSKYQAAMSHLLEMCVSGDLVCEVDLGDLSPEGRFTGLESIFRAVNYMYMGKNTGKIVVELPHSVNSKL

SEQ ID NO: 744792 - protein, 278 aa, Homo sapiens
ISSDLTSHDLSASARYTVGQAVAYMAPGSFAEYTVVPASIATPVPSVKPEYLTLLVSGTTAYISLKELGGLSEGKKVLVTAAAGGTGQFAMQLSKKAKCHVIGTCSSDEKSAFLKSLGCDRPINYKTEPVGTVLKQEYPEGVDVVYESVGGAMFDLAVDALATKGRLIVIGFISGYQTPTGLSPVKAGTLPAKLLKKSASVQGFFLNHYLSKYQAAMSHLLEMCVSGDLVCEVDLGDLSPEGRFTGLESIFRAVNYMYMGKNTGKIVVELPHSVNSKL

SEQ ID NO: 744793 - protein, 377 aa, Homo sapiens; identical to SEQ ID NO: 744791

SEQ ID NO: 744794 - protein, 377 aa, Homo sapiens; identical to SEQ ID NO: 744791

SEQ ID NO: 744795 - protein, 377 aa, Homo sapiens; identical to SEQ ID NO: 744791

SEQ ID NO: 744796 - protein, 377 aa, Homo sapiens; identical to SEQ ID NO: 744791

SEQ ID NO: 744797 - protein, 1015 aa, Homo sapiens
EDSLPGVIVTHVSVHDVDLNSAFIFSFAKESNPGTKFAIDQNTGVVVLVKTLDFEEMTEYELLIQISDSVHYTEGALVVRVLDVNDNPPVFSQDFYQVTVPESIPVGYSVLTLSATDLESNENISYRILSSSKEFSIDPKNGTIFTISPVLLLDTISTTQFLVEASDGGNPDLRALTLVEIGIEDMNNYAPEFTVKSYNLSLSEDALVGSTLVTFSNIDHDWTRENTYVEYSIISGNSQNNFHVETKFFHSEYPYKQVGYLVLLHSLDREASASHELVILASDSGCPPLSSTAVISIQVLDVNDNPPNFSSLSYHTHVKESTPLGSHITVVSANDRDTGSHAEIIYNIISGNEKGHFYLEENTGVLYLIKPLDYEKMTKFTLTVQASDAEKKHFSFAVVFVSVLDDNDHAPQFMFSSFSCIVPENLPISSTICSINALDFDAGPYGELTYSIVSPCFLTHGMSYDHDLFLIDPLTGDIHAKQILDYENGNKYCLTVQAKDKGDATASLVVWVDIEGIDEFEPIFTQDQYFFTLPEKNKDRQLIGRVEASDADAGIDGVILYSLGTSSPFFSVNRTNGNIYLIRALPLIKSQLNKEDTLEMKIIAHSPKSDSKFASCTVFVNVSFSSEGTPLAVFASSFSISLVVSFLVFLILICILIVMILRHKQKDTINNYEEKKTSSLDADLRVTRDASVLKAFQKTDDCSNEVVPVDATPEWLSLISIMEKDIVNLYRYSNSSGHCSVEGETAEDKEIQRINEHPYRKCSDSALSDHESRVPDSGIPRDSDQLSCLSGETDVMVTAETAEASQTFGEGDQGEGCSTTCAQNNVLPQTVQKREAKESILADVRKESVFISGDQEVRCAALSTQTTSDHDGKDNYHWNYLLSWEPKFQPLASVFNDIAKLKDEHLHMPGIPKEKKSFVFPPPLITAVAQPGIKAVPPRMPAVNLGQVPPKHPRSPIPYHLGSLPEGMTPNFSPSLSLLTMQPPALSPLLREGELLGTHISGTCHELKAEDEVQI

SEQ ID NO: 744798 - protein, 789 aa, Homo sapiens
LGDLRILVSGNSQNNFHVETKFFHSEYPYKQVGYLVLLHSLDREASASHELVILASDSGCPPLSSTAVISIQVLDVNDNPPNFSSLSYHTHVKESTPLGSHITVVSANDRDTGSHAEIIYNIISGNEKGHFYLEENTGVLYLIKPLDYEKMTKFTLTVQASDAEKKHFSFAVVFVSVLDDNDHAPQFMFSSFSCIVPENLPISSTICSINALDFDAGPYGELTYSIVSPCFLTHGMSYDHDLFLIDPLTGDIHAKQILDYENGNKYCLTVQAKDKGDATASLVVWVDIEGIDEFEPIFTQDQYFFTLPEKNKDRQLIGRVEASDADAGIDGVILYSLGTSSPFFSVNRTNGNIYLIRALPLIKSQLNKEDTLEMKIIAHSPKSDSKFASCTVFVNVSFSSEGTPLAVFASSFSISLVVSFLVFLILICILIVMILRHKQKDTINNYEEKKTSSLDADLRVTRDASVLKAFQKTDDCSNEVVPVDATPEWLSLISIMEKDIVNLYRYSNSSGHCSVEGETAEDKEIQRINEHPYRKCSDSALSDHESRVPDSGIPRDSDQLSCLSGETDVMVTAETAEASQTFGEGDQGEGCSTTCAQNNVLPQTVQKREAKESILADVRKESVFISGDQEVRCAALSTQTTSDHDGKDNYHWNYLLSWEPKFQPLASVFNDIAKLKDEHLHMPGIPKEKKSFVFPPPLITAVAQPGIKAVPPRMPAVNLGQVPPKHPRSPIPYHLGSLPEGMTPNFSPSLSLLTMQPPALSPLLREGELLGTHISGTCHELKAEDEVQI

SEQ ID NO: 744799 - protein, 879 aa, Homo sapiens [sequence omitted]

SEQ ID NO: 744800 - protein, 67 aa, Homo sapiens
MAETIQEVEDEYKAFCKSFSKESDDPVACIHFTAEGEVTFKSILFVPTFVPRGLFDEYGSKKSDYIK

SEQ ID NO: 744801 - protein, 503 aa, Homo sapiens
GGERSLLTKMATEAQSEGEVPARESGRSDAICSFVICNDSSLRGQPIIFNPDFFVEKLRHEKPEIFTELVVSNITRLIDLPGTELAQLMGEVDLKLPGGAGPASGFFRSLMSLKRKEKGVIFGSPLTEEGIAQIYQLIEYLHKNLRVEGLFRVPGNSVRQQILRDALNNGTDIDLESGEFHSNDVATLLKMFLGELPEPLLTHKHFNAHLKIADLMQFDDKGNKTNIPDKDRQIEALQLLFLILPPPNRNLLKLLLDLLYQTAKKQDKNKMSAYNLALMFAPHVLWPKNVTANDLQENITKLNSGMAFMIKHSQKLFKAPAYIRECARLHYLGSRTQASKDDLDLIASCHTKSFQLAKSQKRNRVDSCPHQEETQHHTEEALRELFQHVHDMPESAKKKQLIRQFNKQSLTQTPGREPSTSQVQKRARSRSFSGLIKRKVLGNQMMSEKKKKNPTPESVAIGELKGTSKENRNLLFSGSPAVTMTPTRLKWSEGKKEGKKGFL

SEQ ID NO: 744802 - protein, 430 aa, Homo sapiens
GGERSLLTKMATEAQSEGEVPARESGRSDAICSFVICNDSSLREKGVIFGSPLTEEGIAQIYQLIEYLHKNLRVEGLFRVPGNSVRQQILRDALNNGTDIDLESGEFHSNDVATLLKMFLGELPEPLLTHKHFNAHLKIADLMQFDDKGNKTNIPDKDRQIEALQLLFLILPPPNRNLLKLLLDLLYQTAKKQDKNKMSAYNLALMFAPHVLWPKNVTANDLQENITKLNSGMAFMIKHSQKLFKAPAYIRECARLHYLGSRTQASKDDLDLIASCHTKSFQLAKSQKRNRVDSCPHQEETQHHTEEALRELFQHVHDMPESAKKKQLIRQFNKQSLTQTPGREPSTSQVQKRARSRSFSGLIKRKVLGNQMMSEKKKKNPTPESVAIGELKGTSKENRNLLFSGSPAVTMTPTRLKWSEGKKEGKKGFL

SEQ ID NO: 744803 - protein, 503 aa, Homo sapiens; identical to SEQ ID NO: 744801

SEQ ID NO: 744804 - protein, 503 aa, Homo sapiens; identical to SEQ ID NO: 744801

SEQ ID NO: 744805 - protein, 412 aa, Homo sapiens
  misc_feature (411)..(411): Xaa can be any naturally occurring amino acid
GGERSLLTKMATEAQSEGEVPARESGRSDAICSFVICNDSSLRGQPIIFNPDFFVEKLRHEKPEIFTELVVSNITRLIDLPGTELAQLMGEVDLKLPGGAGPASGFFRSLMSLKRKEKGVIFGSPLTEEGIAQIYQLIEYLHKNLRVEGLFRVPGNSVRQQILRDALNNGTDIDLESGEFHSNDVATLLKMFLGELPEPLLTHKHFNAHLKIADLMQFDDKGNKTNIPDKDRQIEALQLLFLILPPPNRNLLKLLLDLLYQTAKKQDKNKMSAYNLALMFAPHVLWPKNVTANDLQENITKLNSGMAFMIKHSQKLFKAPAYIRECARLHYLGSRTQASKDDLDLIASCHTKSFQLAKSQKRNRVDSCPHQEETQHHTEEALRELFQHVHDMPEFLTHKAPSHNKCYGTKXK

SEQ ID NO: 744806 - protein, 73 aa, Homo sapiens
LLRSCLSSGQLGTSCLPLSVLEGTRPFALACVVLKLCFSGTSSSKPRTSRPAPSEQPRLASSPLSRLTPLPSL

SEQ ID NO: 744807 - protein, 73 aa, Homo sapiens; identical to SEQ ID NO: 744806

SEQ ID NO: 744808 - protein, 122 aa, Homo sapiens
MEFTTSPAAPATAQRLDETVWKHGCHLSRCLPSRYRNVGLGTGAPTLKRGEAMERTRGALIQQFTVPWSSPAAPHLHLDSSPGICLAPLCSQSNPTVFPQSQALLSLTADPSPECPEILCKE

SEQ ID NO: 744809 - protein, 110 aa, Homo sapiens
LPCCILPHPSPSSQKSLDLTPRGCPKGLLRTFKELVKLGLNTEVTNSSCYLLNTYYVLGTELFTCVFFLRANYSPKRKVLLPAFHRKGNPASKSWSQLLKYTWLTGKGRI

SEQ ID NO: 744810 - protein, 97 aa, Homo sapiens
PSPANPLSPVSRAVPHSSYSRPVTHICPSPVSHAAPAPASDLHLSLSCLPRCPLQLLLQASDLHRIICLHISLVLHSTTGFPGVFRSLFWALSLAHA

SEQ ID NO: 744811 - protein, 123 aa, Homo sapiens
PWEKLLFRQFPTTLWDRQEQQCPQFYDIWPLLCWSLSGSRNVAGWASPSHPGGSRHIWMTYCPRTCSKSLKPASPPTLGCQPQLSTRLWGQLHSFSKVFWGPSRHQGTGLSHHGHAPGLEMVW

SEQ ID NO: 744812 - protein, 83 aa, Homo sapiens
ANDQGMIHCPDRASSPARESKQHTSDHLAILWKLLLPPPAMSSDAPGSFNLKTQSSCSSCFVSFCGEFSLLPISRNWVHAVRQ

SEQ ID NO: 744813 - protein, 130 aa, Homo sapiens
MSKAELITLAPPPFSSSCIPVLCEQHRHLPCGLDVNPETSSLCWILQRAQKKHRLGTPRKQTQSAKKLFQKCVVTYTHVYSSTICNCKNVEPTQMPINQRVDKETVVCVCVCVCIHTYIYIYIYDGILLS

SEQ ID NO: 744814 - protein, 125 aa, Homo sapiens
GKSQEFLPPAQPGPLKEVISTELTNPIPLPLPPPHSLWFQPAKPPPRPRQGQAQEKSKTGQVHSRRREAPSPDFPPGAPGLGWTEVGPSPGRPPSQLQEKQRWGPNFLPGAPGWGDTEVSGEGQR

SEQ ID NO: 744815 - protein, 284 aa, Homo sapiens
MEPGMLGPHNLPHHEPISFGIDQILSGPETPGGGLGLGRGGQGHGENGAFSGGYHGASGYGPAGSLAPLPGSSGVGPGGVIRVPAHRPLPVPPPAGGAPAVPGPSGLGGAGGLAGLTFPWMDSGRRFAKDRLTAALSPFSGTRRIGHPYQNRTPPKRKKPRTSFSRSQVLELERRFLRQKYLASAERAALAKALRMTDAQVKTWFQNRRTKWRRQTAEEREAERHRAGRLLLHLQQDALPRPLRPPLPPDPLCLHNSSLFALQNLQPWAEDNKVASVSGLASVV

SEQ ID NO: 744816 - protein, 235 aa, Homo sapiens
MEARCALALLWDAPHRPPLPKPDPSEAEEAAHVLLPLTGAGVGAALPAPEVPGLCGEGGAGQGLAHDRRTGQNVVPEPTHQVAAPDGGGARGRAAPRGPAAPASAAGRVATAAAAAAAPGPSLPAQLVALRAAEPAALGRGQQSGFSVRARLGGVSDARPIGVERRARSGGARGCLRPWSSGSRAREERQALRLSSRAPPPPAGSQASVAQMHGQLRGGLSRHFSLHCRYALAGT

SEQ ID NO: 744817 - protein, 137 aa, Homo sapiens [sequence omitted]

SEQ ID NO: 744818 - protein, 179 aa, Homo sapiens
MAATEPILAATGSPAAVPPEKLEGAGSSSAPERNCVGSSLPEASPPAPEPSSPNAAVPEAIPTPRAAASAALELPLGPAPVSVAPQAEAEARSTPGPAGSRLGPETFRQRFRQFRYQDAAGPREAFRQLRELSRQWLRPDIRTKEQIVEMLVQEQLLAILPEAARARRIRRRTDVRITG

SEQ ID NO: 744819 - protein, 179 aa, Homo sapiens; identical to SEQ ID NO: 744818

SEQ ID NO: 744820 - protein, 179 aa, Homo sapiens; identical to SEQ ID NO: 744818

SEQ ID NO: 744821 - protein, 179 aa, Homo sapiens; identical to SEQ ID NO: 744818

SEQ ID NO: 744822 - protein, 179 aa, Homo sapiens; identical to SEQ ID NO: 744818

SEQ ID NO: 744823 - protein, 179 aa, Homo sapiens; identical to SEQ ID NO: 744818

SEQ ID NO: 744824 - protein, 179 aa, Homo sapiens
MAATEPILAATGSPAAVPPEKLEGAGSSSAPERNCVGSSLPEASPPAPEPSSPNAAVPEAIPTPRAAASAALELPLGPAPVSVAPQAEAEARSTPGPAGSRLGPETFRQRFRQFRYQDAAGPREAFRQLRELSRQWLRPDIRTKEQIVEMLVQEQLLIIGTELLYTEGLTVALRLAYLR

SEQ ID NO: 744825 - protein, 104 aa, Homo sapiens
MIGPGGLSLGPHPVLMKNEFWQQKKNNKPFLINSLHNNHNHITTYNSIQFNRAGFYISGLGKLCYSPLNSLGLITLSFASALRSGPHSSPFNNSVTLLQLAILS

SEQ ID NO: 744826 - protein, 216 aa, Homo sapiens
MVEAVLSDEGLPQALRWCRRSAEHTATGQRVTPGAGVMAATEPILAATGSPAAVPPEKLEGAGSSSAPERNCVGSSLPEASPPAPEPSSPNAAVPEAIPTPRAAASAALELPLGPAPVSVAPQAEAEARSTPGPAGSRLGPETFRQRFRQFRYQDAAGPREAFRQLRELSRQWLRPDIRTKEQIVEMLVQEQLLAILPEAARARRIRRRTDVRITG

SEQ ID NO: 744827 - protein, 179 aa, Homo sapiens; identical to SEQ ID NO: 744818

SEQ ID NO: 744828 - protein, 179 aa, Homo sapiens; identical to SEQ ID NO: 744818

SEQ ID NO: 744829 - protein, 179 aa, Homo sapiens; identical to SEQ ID NO: 744818

SEQ ID NO: 744830 - protein, 123 aa, Homo sapiens
MAATEPILAATGSPAAVPPEKLEGAGSSSAPERNCVGSSLPEASPPAPEPSSPNAAVPEAIPTPRAAASAALELPLGPAPVSVAPQAEAEARSTPGPAGSRLGPETFRQRFRQFRRTDVRITG

SEQ ID NO: 744831 - protein, 108 aa, Homo sapiens
MAATEPILAATGSPAAVPPEKLEGAGSSSAPERNCVGSSLPEASPPAPEPSSPNAAVPEAIPTPRAAASAALELPLGPAPVSVAPQAEAEARSTPGPAGSRTDVRITG

SEQ ID NO: 744832 - protein, 110 aa, Homo sapiens
MAPSILGSQEAPTGANLLYLGHRTQSIPRPGAVERKPSVRICCRGLHAPTGKSLRTSCLFPAARSERRKWKYQVGICESPIPVMCYMGVVNRLTSFSSLACLLLQYLVCY

SEQ ID NO: 744833 - protein, 147 aa, Homo sapiens
MCLQAFVEAFFFLAQRKFKMLPLHEQVASLIDLCEYHLSLLDEKRLEAPTGANLLYLGHRTQSIPRPGAVERKPSVRICCRGLHAPTGKSLRTSCLFPAARSERRKWKYQVGICESPIPVMCYMGVVNRLTSFSSLACLLLQYLVCY

SEQ ID NO: 744834 - protein, 130 aa, Homo sapiens
SECKAILAQWEEFQIEDPFGNNAFFEHLPVMQYAPGRRLAYSHALTAPLCLSETALICPTSHASLSSPFAALGRWIIFCPPVALPLGPGSTLACLSSSLLLSTSLSPSSPGGPLAGLAHLKPFLPKLSCM

SEQ ID NO: 744835 - protein, 549 aa, Homo sapiens [sequence omitted]

SEQ ID NO: 744836 - protein, 673 aa, Homo sapiens
MDVVEVAGSWWAQEREDIIMKYEKGHRAGLPEDKGPKPFRSYNNNVDHLGIVHETELPPLTAREAKQIRREISRKSKWVDMLGDWEKYKSSRKLIDRAYKGMPMNIRGPMWSVLLNTEEMKLKNPGRYQIMKEKGKKSSEHIQRIDRDVSGTLRKHIFFRDRYGTKQRELLHILLAYEEYNPEVGYCRDLSHIAALFLLYLPEEDAFWALVQLLASERHSLQGFHSPNGGTVQGLQDQQEHVVATSQPKTMGHQDKKDLCGQCSPLGCLIRILIDGISLGLTLRLWDVYLVEGEQALMPITRIAFKVQQSKSTCAQRGLGSPGVRPRLARGQLPHTVLMILCSGPEGGLAQVGWAGHCDTEPIPHMTQMKVESVVSTSLSGSPPSHSLLCISGHLGWPQKDPAPPSRRLKWPRGMSCDQFPGNSPGLISTLSLERLTKTSRCGPWARFCNRFVDTWARDEDTVLKHLRASMKKLTRKKGDLPPPAKPEQGSSASRPVPASRGGKTLCKGDRQAPPGPPARFPRPIWSASPPRAPRSSTPCPGGAVREDTYPVGTQGVPSPALAQGGPQGSWRFLQWNSMPRLPTDLDVEGPWFRHYDFRQSCWVRAISQEDQLAPCWQAEHPAERVRSAFAAPSTDSDQGTPFRARDEQQCAPTSGPCLCGLHLESSQFPPGF

SEQ ID NO: 744837 - protein, 415 aa, Homo sapiens
CRSTHSSDPLYIRDVSGTLRKHIFFRDRYGTKQRELLHILLAYEEYNPEVGYCRDLSHIAALFLLYLPEEDAFWALVQLLASERHSLQGFHSPNGGTVQGLQDQQEHVVATSQPKTMGHQDKKDLCGQCSPLGCLIRILIDGISLGLTLRLWDVYLVEGEQALMPITRIAFKVQQKRLTKTSRCGPWARFCNRFVDTWARDEDTVLKHLRASMKKLTRKKGDLPPPAKPEQGSSASRPVPASRGGKTLCKGDRQAPPGPPARFPRPIWSASPPRAPRSSTPCPGGAVREDTYPVGTQGVPSPALAQGGPQGSWRFLQWNSMPRLPTDLDVEGPWFRHYDFRQSCWVRAISQEDQLAPCWQAEHPAERVRSAFAAPSTDSDQGTPFRARDEQQCAPTSGPCLCGLHLESSQFPPGF

SEQ ID NO: 744838 - protein, 426 aa, Homo sapiens
MDVVEVAGSWWAQEREDIIMKYEKGHRAGLPEDKGPKPFRSYNNNVDHLGIVHETELPPLTAREAKQIRREISRKSKWVDMLGDWEKYKSSRKLIDRAYKGMPMNIRGPMWSVLLNTEEMKLKNPGRYQIMKEKGKKSSEHIQRIDRDVSGTLRKHIFFRDRYGTKQRELLHILLAYEEYNPEVGYCRDLSHIAALFLLYLPEEDAFWALVQLLASERHSLQGFHSPNGGTVQGLQDQQEHVVATSQPKTMGHQDKKDLCGQCSPLGCLIRILIDGISLGLTLRLWDVYLVEGEQALMPITRIAFKVQQSKSTCAQRGLGSPGVRPRLARGQLPHTVLMILCSGPEGGLAQVGWAGHCDTEPIPHMTQMKVESVVSTSLSGSPPSHSLLCISGHLGWPQKDPAPPSRRLKWPRGMSCDHSQVTPLA

SEQ ID NO: 744839 - protein, 293 aa, Homo sapiens
MDVVEVAGSWWAQEREDIIMKYEKGHRAGLPEDKGPKPFRSYNNNVDHLGIVHETELPPLTAREAKQIRREISRKSKWVDMLGDWEKYKSSRKLIDRAYKGMPMNIRGPMWSVLLNTEEMKLKNPGRYQIMKEKGKKSSEHIQRIDRDVSGTLRKHIFFRDRYGTKQRELLHILLAYEEYNPEVGYCRDLSHIAALFLLYLPEEDAFWALVQLLASERHSLQGFHSPNGGTVQGLQDQQEHVVATSQPKTMGHQDKKDLCGQCSPLGCLIRILIDGISLLRAMGVWYVYALSA

SEQ ID NO: 744840 - protein, 122 aa, Homo sapiens
DKKDLCGQCSPLGCLIRILIDGVRRHRETLAQGPSLPCSALLPQPGGLAHSQPTGGSGGSPKDTQAKPSAQGGSSQGHGWGSGPASWADWARTRLERAQGSLKPWASPSLQEPHPHSNECPP

SEQ ID NO: 744841 - protein, 434 aa, Homo sapiens
MTSPRDPLWRLKPQCAQLEPPAPAWKDQVLSHLLSPQISLGLTLRLWDVYLVEGEQALMPITRIAFKVQQSKSTCAQRGLGSPGVRPRLARGQLPHTVLMILCSGPEGGSGQVGWAGHCDTEPIPHMTQMKVESVVSTSLSGSPPSHSLLCISGHLGWPQKDPAPPSRRLKWPRGMSCDQFPGNSPGLISTLSLERLTKTSRCGPWARFCNRFVDTWARDEDTVLKHLRASMKKLTRKKGDLPPPAKPEQGSSASRPVPASRGGKTLCKGDRQAPPGPPARFPRPIWSASPPRAPRSSTPCPGGAVREDTYPVGTQGVPSPALAQGGPQGSWRFLQWNSMPRLPTDLDVEGPWFRHYDFRQSCWVRAISQEDQLAPCWQAEHPAERVRSAFAAPSTDSDQGTPFRARDEQQCAPTSGPCLCGLHLESSQFPPGF

SEQ ID NO: 744842 - protein, 370 aa, Homo sapiens
ILGSLNLKQRELLHISLAYDGVYTREVGYCRDLSHIAALFLLYLPEEDAFWALVQLLASERHSLQGFHSPNGGTVQGLQDQQEHVVATSQPKTMGHQISLGLTLRLWDVYLVEGEQALMPITRIAFKVQQKRLTKTSRCGPWARFCNRFVDTWARDEDTVLKHLRASMKKLTRKKGDLPPPAKPEQGSSASRPVPASRGGKTLCKGDRQAPPGPPARFPRPIWSASPPRAPRSSTPCPGGAVREDTYPVGTQGVPSPALAQGGPQGSWRFLQWNSMPRLPTDLDVEGPWFRHYDFRQSCWVRAISQEDQLAPCWQAEHPAERVRSAFAAPSTDSDQGTPFRARDEQQCAPTSGPCLCGLHLESSQFPPGF

SEQ ID NO: 744843 - protein, 295 aa, Homo sapiens
MDVVEVAGSWWAQEREDIIMKYEKGHRAGLPEDKGPKPFRSYNNNVDHLGIVHETELPPLTAREAKQIRREISRKSKWVDMLGDWEKYKSSRKLIDRAYKGMPMNIRGPMWSVLLNTEEMKLKNPGRYQIMKEKGKKSSEHIQRIDRDVSGTLRKHIFFRDRYGTKQRELLHILLAYEEYNPEVGYCRDLSHIAALFLLYLPEEDAFWALVQLLASERHSLQGFHSPNGGTVQGLQDQQEHVVATSQPKTMGHQISLGLTLRLWDVYLVEGEQALMPITRIAFKVQQKRLTKTSR

SEQ ID NO: 744844 - protein, 110 aa, Homo sapiens
DVPSESRAEGILRECPDAQGSGTAMGFTCTGTPGPILTAATPTLLPMEIPELYRIPCFMKRGRRGSSPQVAQPHGQPGFEPWTTCFPHTQGLSRGCLEGEGSRCLVGEPP

SEQ ID NO: 744845 - protein, 136 aa, Homo sapiens
TRAAESPLKGQVTSRPALGTVCRKTGVRLGLKMKHILKFTDLCHRMLGEVQLIHAFLGSCLKPITLLSSHSSARFSSTRAAKSPLKGQATLTPALGTVCRSQCRPAPHPEGDAIRVRTAQRLNGPITREEPGGYSI

SEQ ID NO: 744846 - protein, 168 aa, Homo sapiens
PGMSDLLQFVAKQGACFEVILISDANTFGVESSLRAAGHHSLFRRILSNPSGPDARGLLALRPFHTHSCARCPANMCKHKVLSDYLRERAHDGVHFERLFYVGDGANDFCPMGLLAGGDVAFPRRGYPMHRLIQEAQKAEPSSFRASVVPWETAADVRLHLQQVLKSC

SEQ ID NO: 744847 - protein, 71 aa, Homo sapiens
LWLRWDMLLSHAGESTYWRCPPAKPQEQRAVTVGNAAGTRAGRKETEEKGHLPPLALLAPSEPTVGQAGKG

SEQ ID NO: 744848 - protein, 71 aa, Homo sapiens; identical to SEQ ID NO: 744847

SEQ ID NO: 744849 - protein, 79 aa, Homo sapiens
AAVIRSGCLLPDTKAYGDRIERMPCLSLNTPDAKVEEPDEEPEETAEDKEQDKDKEMDVGTDEEKQETAKESTAEKDEL

SEQ ID NO: 744850 - protein, 300 aa, Homo sapiens
KLGTRLGFKSAEPGTAKSQFLKYIEKVSSRAIFTTGQGASAVGLTAYVQRHPVSREWTLEAGALVLADRGVCLIDEFDKMNDQDRTSIHEAMEQQSISISKAGIVTSLQARCTVIAAANPIGGRYDPSLTFSENVDLTEPIISRFDILCVVRDTVDPVQDEMLARFVVGSHVRHHPSNKEEEGLANGSAAEPAMPNTYGVEPLPQEVLKKYIIYAKERVHPKLNQMDQDKVAKMYSDLRKESMATGSIPITVRHIESMIRMAEAHARIHLRDYVIEDDVNMAIRVMLESFIDTQKFSVMR

SEQ ID NO: 744851 - protein, 721 aa, Homo sapiens
MNRPSLDDEDVEELTASQREAAERAMRQRDREAGRGLGRMRRGLLYDSDEEDEERPARKRRQVERATEDGEEDEEMIESIENLEDLKGHSVREWVSMAGPRLEIHHRFKNFLRTHVDSHGHNVFKERISDMCKENRESLVVNYEDLAAREHVLAYFLPEAPAELLQIFDEAALEVVLAMYPKYDRITNHIHVRISHLPLVEELRSLRQLHLNQLIRTSGVVTSCTGVLPQLSMVKYNCNKCNFVLGPFCQSQNQEVKPGSCPECQSAGPFEVNMEETIYQNYQRIRIQESPGKVAAGRLPRSKDAILLADLVDSCKPGDEIELTGIYHNNYDGSLNTANGFPVFATVILANHVAKKDNKVAVGELTDEDVKMITSLSKDQQIGEKIFASIAPSIYGHEDIKRGLALALFGGEPKNPGGKHKVRGDINVLLCGDPGTAKSQFLKYIEKVSSRAIFTTGQGASAVGLTAYVQRHPVSREWTLEAGALVLADRGVCLIDEFDKMNDQDRTSIHEAMEQQSISISKAGIVTSLQARCTVIAAANPIGGRYDPSLTFSENVDLTEPIISRFDILCVVRDTVDPVQDEMLARFVVGSHVRHHPSNKEEEGLANGSAAEPAMPNTYGVEPLPQEVLKKYIIYAKERVHPKLNQMDQDKVAKMYSDLRKESMATGSIPITVRHIESMIRMAEAHARIHLRDYVIEDDVNMAIRVMLESFIDTQKFSVMR

SEQ ID NO: 744852 - protein, 606 aa, Homo sapiens
VSKIRSYGLPKSASANVQENRESLVVNYEDLAAREHVLAYFLPEAPAELLQIFDEAALEVVLAMYPKYDRITNHIHVRISHLPLVEELRSLRQLHLNQLIRTSGVVTSCTGVLPQLSMVKYNCNKCNFVLGPFCQSQNQEVKPGSCPECQSAGPFEVNMEETIYQNYQRIRIQESPGKVAAGRLPRSKDAILLADLVDSCKPGDEIELTGIYHNNYDGSLNTANGFPVFATVILANHVAKKDNKVAVGELTDEDVKMITSLSKDQQIGEKIFASIAPSIYGHEDIKRGLALALFGGEPKNPGGKHKVRGDINVLLCGDPGTAKSQFLKYIEKVSSRAIFTTGQGASAVGLTAYVQRHPVSREWTLEAGALVLADRGVCLIDEFDKMNDQDRTSIHEAMEQQSISISKAGIVTSLQARCTVIAAANPIGGRYDPSLTFSENVDLTEPIISRFDILCVVRDTVDPVQDEMLARFVVGSHVRHHPSNKEEEGLANGSAAEPAMPNTYGVEPLPQEVLKKYIIYAKERVHPKLNQMDQDKVAKMYSDLRKESMATGSIPITVRHIESMIRMAEAHARIHLRDYVIEDDVNMAIRVMLESFIDTQKFSVMR

SEQ ID NO: 744853 - protein, 396 aa, Homo sapiens
YGWVRGWVCAHTANGFPVFATVILANHVAKKDNKVAVGELTDEDVKMITSLSKDQQIGEKIFASIAPSIYGHEDIKRGLALALFGGEPKNPGGKHKVRGDINVLLCGDPGTAKSQFLKYIEKVSSRAIFTTGQGASAVGLTAYVQRHPVSREWTLEAGALVLADRGVCLIDEFDKMNDQDRTSIHEAMEQQSISISKAGIVTSLQARCTVIAAANPIGGRYDPSLTFSENVDLTEPIISRFDILCVVRDTVDPVQDEMLARFVVGSHVRHHPSNKEEEGLANGSAAEPAMPNTYGVEPLPQEVLKKYIIYAKERVHPKLNQMDQDKVAKMYSDLRKESMATGSIPITVRHIESMIRMAEAHARIHLRDYVIEDDVNMAIRVMLESFIDTQKFSVMR

SEQ ID NO: 744854 - protein, 432 aa, Homo sapiens
SWSVILGKAFLKYVKIRGSDEGSSKLQSSVTLGKSQLMKSFRVGHGLIPGPDAVAAAVEVGVFELGMSWFPDASSMWVTYSVSICSHSCRSPSLSQIFASIAPSIYGHEDIKRGLALALFGGEPKNPGGKHKVRGDINVLLCGDPGTAKSQFLKYIEKVSSRAIFTTGQGASAVGLTAYVQRHPVSREWTLEAGALVLADRGVCLIDEFDKMNDQDRTSIHEAMEQQSISISKAGIVTSLQARCTVIAAANPIGGRYDPSLTFSENVDLTEPIISRFDILCVVRDTVDPVQDEMLARFVVGSHVRHHPSNKEEEGLANGSAAEPAMPNTYGVEPLPQEVLKKYIIYAKERVHPKLNQMDQDKVAKMYSDLRKESMATGSIPITVRHIESMIRMAEAHARIHLRDYVIEDDVNMAIRVMLGELHRHTEVQRHA

SEQ ID NO: 744855 - protein, 812 aa, Homo sapiens
MAESSESFTMASSPAQRRRGNDPLTSSPGRSSRRTDALTSSPGRDLPPFEDESEGLLGTEGPLEEEEDGEELIGDGMERDYRAIPELDAYEAEGLALDDEDVEELTASQREAAERAMRQRDREAGRGLGRMRRGLLYDSDEEDEERPARKRRQVERATEDGEEDEEMIESIENLEDLKGHSVREWVSMAGPRLEIHHRFKNFLRTHVDSHGHNVFKERISDMCKENRESLVVNYEDLAAREHVLAYFLPEAPAELLQIFDEAALEVVLAMYPKYDRITNHIHVRISHLPLVEELRSLRQLHLNQLIRTSGVVTSCTGVLPQLSMVKYNCNKCNFVLGPFCQSQNQEVKPGSCPECQSAGPFEVNMEETIYQNYQRIRIQESPGKVAAGRLPRSKDAILLADLVDSCKPGDEIELTGIYHNNYDGSLNTANGFPVFATVILANHVAKKDNKVAVGELTDEDVKMITSLSKDQQIGEKIFASIAPSIYGHEDIKRGLALALFGGEPKNPGGKHKVRGDINVLLCGDPGTAKSQFLKYIEKVSSRAIFTTGQGASAVGLTAYVQRHPVSREWTLEAGALVLADRGVCLIDEFDKMNDQDRTSIHEAMEQQSISISKAGIVTSLQARCTVIAAANPIGGRYDPSLTFSENVDLTEPIISRFDILCVVRDTVDPVQDEMLARFVVGSHVRHHPSNKEEEGLANGSAAEPAMPNTYGVEPLPQEVLKKYIIYAKERVHPKLNQMDQDKVAKMYSDLRKESMATGSIPITVRHIESMIRMAEAHARIHLRDYVIEDDVNMAIRVMLESFIDTQKFSVMR

SEQ ID NO: 744856 - protein, 672 aa, Homo sapiens
MAESSESFTMASSPAQRRRGNDPLTSSPGRSSRRTDALTSSPGRDLPPFEDESEGLLGTEGPLEEEEDGEELIGDGMERDYRAIPELDAYEAEGLALDDEDVEELTASQREAAERAMRQRDREAGRGLGRMRRGLLYDSDEEDEERPARKRRQVERATEDGEEDEEMIESIENLEDLKGHSVREWVSMAGPRLEIHHRFKNFLRTHVDSHGHNVFKERISDMCKENRESLVVNYEDLAAREHVLAYFLPEAPAELLQIFDEAALEVVLAMYPKYDRITNHIHVRISHLPLVEELRSLRQLHLNQLIRTSGVVTSCTGVLPQLSMVKYNCNKCNFVLGPFCQSQNQEVKPGSCPECQSAGPFEVNMEETIYQNYQRIRIQESPGKVAAGRLPRSKDAILLADLVDSCKPGDEIELTGIYHNNYDGSLNTANGFPVFATVILANHVAKKDNKVAVGELTDEDVKMITSLSKDQQIGEKIFASIAPSIYGHEDIKRGLALALFGGEPKNPGGKHKVRGDINVLLCGDPGTAKSQFLKYIEKVSSRAIFTTGQGASAVGLTAYVQRHPVSREWTLEAGALVLADRGVCLIDEFDKMNDQDRTSIHEAMEQQSISISKAGIVTSLQARCTVIAAANPIGGRYDPSLTFSENVDLTEPIISRFDILCVVRDTVDPVQV

SEQ ID NO: 744857 - protein, 367 aa, Homo sapiens
KLGEVEAWCESADEDVKMITSLSKDQQIGEKIFASIAPSIYGHEDIKRGLALALFGGEPKNPGGKHKVRGDINVLLCGDPGTAKSQFLKYIEKVSSRAIFTTGQGASAVGLTAYVQRHPVSREWTLEAGALVLADRGVCLIDEFDKMNDQDRTSIHEAMEQQSISISKAGIVTSLQARCTVIAAANPIGGRYDPSLTFSENVDLTEPIISRFDILCVVRDTVDPVQDEMLARFVVGSHVRHHPSNKEEEGLANGSAAEPAMPNTYGVEPLPQEVLKKYIIYAKERVHPKLNQMDQDKVAKMYSDLRKESMATGSIPITVRHIESMIRMAEAHARIHLRDYVIEDDVNMAIRVMLESFIDTQKFSVMR

SEQ ID NO: 744858 - protein, 289 aa, Homo sapiens
VGLPHLLYPQMKLWGESAQTSLSTSDKEEASDVEISLESDSDDSVVIVPEGLPGGTDRGVSRIDEFDKMNDQDRTSIHEAMEQQSISISKAGIVTSLQARCTVIAAANPIGGRYDPSLTFSENVDLTEPIISRFDILCVVRDTVDPVQDEMLARFVVGSHVRHHPSNKEEEGLANGSAAEPAMPNTYGVEPLPQEVLKKYIIYAKERVHPKLNQMDQDKVAKMYSDLRKESMATGSIPITVRHIESMIRMAEAHARIHLRDYVIEDDVNMAIRVMLESFIDTQKFSVMR

SEQ ID NO: 744859 - protein, 1137 aa, Homo sapiens
GAAPTSDMAHAGGGSGGSGAGGPAGRGLSGARWGRSGSAGHEKLPVHVEDALTYLDQVKIRFGSDPATYNGFLEIMKEFKSQSIDTPGVIRRVSQLFHEHPDLIVGFNAFLPLGYRIDIPKNGKLNIQSPLTSQENSHNHGDGAEDFKQQVPYKEDKPQVPLESDSVEFNNAISYVNKIKTRFLDHPEIYRSFLEILHTYQKEQLNTRGRPFRGMSEEEVFTEVANLFRGQEDLLSEFGQFLPEAKRSLFTGNGPCEMHSVQKNEHDKTPEHSRKRSRPSLLRPVSAPAKKKMKLRGTKDLSIAAVGKYGTLQEFSFFDKVRRVLKSQEVYENFLRCIALFNQELVSGSELLQLVSPFLGKFPELFAQFKSFLGVKELSFAPPMSDRSGDGISREIDYASCKRIGSSYRALPKTYQQPKCSGRTAICKEVLNDTWVSFPSWSEDSTFVSSKKTPYEEQLHRCEDERFELDVVLETNLATIRVLESVQKKLSRMAPEDQEKFRLDDSLGGTSEVIQRRAIYRIYGDKAPEIIESLKKNPVTAVPVVLKRLKAKEEEWREAQQGFNKIWREQYEKAYLKSLDHQAVNFKQNDTKALRSKSLLNEIESVYDEHQEQHSEGRSAPSSEPHLIFVYEDRQILEDAAALISYYVKRQPAIQKEDQGTIHQLLHQFVPSLFFSQQLDLGASEESADEDRDSPQGQTTDPSERKKPAPGPHSSPPEEKGAFGDAPATEQPPLPPPAPHKPLDDVYSLFFANNNWYFFLRLHQTLCSRLLKIYRQAQKQLLEYRTEKEREKLLCEGRREKGSDPAMELRLKQPSEVELEEYYPAFLDMVRSLLEGSIDPTQYEDTLREMFTIHAYVGFTMDKLVQNIARQLHHLVSDDVCLKVVELYLNEKKRGAAGGNLSSRCVRAARETSYQWKAERCMADENCFKVMFLQRKGQVIMTIELLDTEEAQTEDPVEVQHLARYVEQYVGTEGASSSPTEGFLLKPVFLQRNLKKFRRRWQSEQARALRGEARSSWKRLVGVESACDVDCRFKLSTHKMVFIVNSEDYMYRRGTLCRAKQVQPLVLLRHHQHFEEWHSRWLEDNVTVEAASLVQDWLMGEEDEDMVPCKTLCETVHVHGLPVTRYRVQYSRRPASP

SEQ ID NO: 744860 - protein, 674 aa, Homo sapiens
GAAPTSDMAHAGGGSGGSGAGGPAGRGLSGARWGRSGSAGHEKLPVHVEDALTYLDQVKIRFGSDPATYNGFLEIMKEFKSQSIDTPGVIRRVSQLFHEHPDLIVGFNAFLPLGYRIDIPKNGKLNIQSPLTSQENSHNHGDGAEDFKQQVPYKEDKPQVPLESDSVEFNNAISYVNKIKTRFLDHPEIYRSFLEILHTYQKEQLNTRGRPFRGMSEEEVFTEVANLFRGQEDLLSEFGQFLPEAKRSLFTGNGPCEMHSVQKNEHDKTPEHSRKRSRPSLLRPVSAPAKNNWYFFLRLHQTLCSRLLKIYRQAQKQLLEYRTEKEREKLLCEGRREKGSDPAMELRLKQPSEVELEEYYPAFLDMVRSLLEGSIDPTQYEDTLREMFTIHAYVGFTMDKLVQNIARQLHHLVSDDVCLKVVELYLNEKKRGAAGGNLSSRCVRAARETSYQWKAERCMADENCFKVMFLQRKGQVIMTIELLDTEEAQTEDPVEVQHLARYVEQYVGTEGASSSPTEGFLLKPVFLQRNLKKFRRRWQSEQARALRGEARSSWKRLVGVESACDVDCRFKLSTHKMVFIVNSEDYMYRRGTLCRAKQVQPLVLLRHHQHFEEWHSRWLEDNVTVEAASLVQDWLMGEEDEDMVPCKTLCETVHVHGLPVTRYRVQYSRRPASP

SEQ ID NO: 744861 - protein, 379 aa, Homo sapiens
EEPPGPSSQSQFLRGQMFPAHLPHPGDSEALTRVCPQGGHWGLQLPAPANRSSVCAHYSARPTPFISWGYHHNDHKPRGFKQQKSIPSTSWRSAVHNHSVGRAVLLPKALGRILPALPASGGFWRSSAVAWLCESLLSLGPLSRAIVCWGLRQGSESSAAALLMLWQWGAQNPCELLNSESRVRVAIALLWGITGCVSPCPQHLARYVEQYVGTEGASSSPTEGFLLKPVFLQRNLKKFRRRWQSEQARALRGEARSSWKRLVGVESACDVDCRFKLSTHKMVFIVNSEDYMYRRGTLCRAKQVQPLVLLRHHQHFEEWHSRWLEDNVTVEAASLVQDWLMGEEDEDMVPCKTLCETVHVHGLPVTRYRVQYSRRPASP

SEQ ID NO: 744862 - protein, 1137 aa, Homo sapiens; identical to SEQ ID NO: 744859

SEQ ID NO: 744863 - protein, 1137 aa, Homo sapiens; identical to SEQ ID NO: 744859

SEQ ID NO: 744864 - protein, 360 aa, Homo sapiens
GAAPTSDMAHAGGGSGGSGAGGPAGRGLSGARWGRSGSAGHEKLPVHVEDALTYLDQVKIRFGSDPATYNGFLEIMKEFKSQSIDTPGVIRRVSQLFHEHPDLIVGFNAFLPLGYRIDIPKNGKLNIQSPLTSQENSHNHGDGAEDFKQQVPYKEDKPQVPLESDSVEFNNAISYVNKIKTRFLDHPEIYRSFLEILHTYQKEQLNTRGRPFRGMSEEEVFTEVANLFRGQEDLLSEFGQFLPEAKRSLFTGNGPCEMHSVQKNEHDKTPEHSRKRSRPSLLRPVSAPAKKKMKLRGTKDLSIAAVGKYGTLQEFSFFDKVRRVLKSQEVYENFLRCIALFNQELVSGSELLQLVSPFLG

SEQ ID NO: 744865 - protein, 296 aa, Homo sapiens
GAAPTSDMAHAGGGSGGSGAGGPAGRGLSGARWGRSGSAGHEKLPVHVEDALTYLDQVKIRFGSDPATYNGFLEIMKEFKSQSIDTPGVIRRVSQLFHEHPDLIVGFNAFLPLGYRIDIPKNGKLNIQSPLTSQENSHNHGDGAEDFKQQVPYKEDKPQVPLESDSVEFNNAISYVNKIKTRFLDHPEIYRSFLEILHTYQKEQLNTRGRPFRGMSEEEVFTEVANLFRGQEDLLSEFGQFLPEAKRSLFTGNGPCEMHSVQKNEHDKTPMLTRPPGLPTPAPQVSHRHFVHILVF

SEQ ID NO: 744866 - protein, 72 aa, Homo sapiens
MGAFVGALSCQSLACVTLRSPGGIWMRRCVSAGEVELEEYYPAFLDMVRSLLEGSIDPTQYEDTLREMFTIH

SEQ ID NO: 744867 - protein, 1137 aa, Homo sapiens; identical to SEQ ID NO: 744859

SEQ ID NO: 744868 - protein, 775 aa, Homo sapiens
GAAPTSDMAHAGGGSGGSGAGGPAGRGLSGARWGRSGSAGHEKLPVHVEDALTYLDQVKIRFGSDPATYNGFLEIMKEFKSQSIDTPGVIRRVSQLFHEHPDLIVGFNAFLPLGYRIDIPKNGKLNIQSPLTSQENSHNHGDGAEDFKQQVPYKEDKPQVPLESDSVEFNNAISYVNKIKTRFLDHPEIYRSFLEILHTYQKEQLNTRGRPFRGMSEEEVFTEVANLFRGQEDLLSEFGQFLPEAKRSLFTGNGPCEMHSVQKNEHDKTPEHSRKRSRPSLLRPVSAPAKKKMKLRGTKDLSIAAQFVPSLFFSQQLDLGASEESADEDRDSPQGQTTDPSERKKPAPGPHSSPPEEKGAFGDAPATEQPPLPPPAPHKPLDDVYSLFFANNNWYFFLRLHQTLCSRLLKIYRQAQKQLLEYRTEKEREKLLCEGRREKGSDPAMELRLKQPSEVELEEYYPAFLDMVRSLLEGSIDPTQYEDTLREMFTIHAYVGFTMDKLVQNIARQLHHLVSDDVCLKVVELYLNEKKRGAAGGNLSSRCVRAARETSYQWKAERCMADENCFKVMFLQRKGQVIMTIELLDTEEAQTEDPVEVQHLARYVEQYVGTEGASSSPTEGFLLKPVFLQRNLKKFRRRWQSEQARALRGEARSSWKRLVGVESACDVDCRFKLSTHKMVFIVNSEDYMYRRGTLCRAKQVQPLVLLRHHQHFEEWHSRWLEDNVTVEAASLVQDWLMGEEDEDMVPCKTLCETVHVHGLPVTRYRVQYSRRPASP

SEQ ID NO: 744869 - protein, 720 aa, Homo sapiens
MQRHSRHFLLVQVLNDTWVSFPSWSEDSTFVSSKKTPYEEQLHRCEDERFELDVVLETNLATIRVLESVQKKLSRMAPEDQEKFRLDDSLGGTSEVIQRRAIYRIYGDKAPEIIESLKKNPVTAVPVVLKRLKAKEEEWREAQQGFNKIWREQYEKAYLKSLDHQAVNFKQNDTKALRSKSLLNEIESVYDEHQEQHSEGRSAPSSEPHLIFVYEDRQILEDAAALISYYVKRQPAIQKEDQGTIHQLLHQFVPSLFFSQQLDLGASEESADEDRDSPQGQTTDPSERKKPAPGPHSSPPEEKGAFGDAPATEQPPLPPPAPHKPLDDVYSLFFANNNWYFFLRLHQTLCSRLLKIYRQAQKQLLEYRTEKEREKLLCEGRREKGSDPAMELRLKQPSEVELEEYYPAFLDMVRSLLEGSIDPTQYEDTLREMFTIHAYVGFTMDKLVQNIARQLHHLVSDDVCLKVVELYLNEKKRGAAGGNLSSRCVRAARETSYQWKAERCMADENCFKVMFLQRKGQVIMTIELLDTEEAQTEDPVEVQHLARYVEQYVGTEGASSSPTEGFLLKPVFLQRNLKKFRRRWQSEQARALRGEARSSWKRLVGVESACDVDCRFKLSTHKMVFIVNSEDYMYRRGTLCRAKQVQPLVLLRHHQHFEEWHSRWLEDNVTVEAASLVQDWLMGEEDEDMVPCKTLCETVHVHGLPVTRYRVQYSRRPASP

SEQ ID NO: 744870 - protein, 309 aa, Homo sapiens
EEPPGPSSQSQFLRGQMFPAHLPHPGDSEALTRVCPQGGHWGLQLPAPANRSSVCAHYSARPTPFISWGYHHNDHKPRGFKQQKSIPSTSWRSAVHNHSVGGRCSCQRLWGGSFLLFQLPGASGAPQLWPGCHLARYVEQYVGTEGASSSPTEGFLLKPVFLQRNLKKFRRRWQSEQARALRGEARSSWKRLVGVESACDVDCRFKLSTHKMVFIVNSEDYMYRRGTLCRAKQVQPLVLLRHHQHFEEWHSRWLEDNVTVEAASLVQDWLMGEEDEDMVPCKTLCETVHVHGLPVTRYRVQYSRRPASP

SEQ ID NO: 744871 - protein, 360 aa, Homo sapiens; identical to SEQ ID NO: 744864

SEQ ID NO: 744872 - protein, 504 aa, Homo sapiens
GAAPTSDMAHAGGGSGGSGAGGPAGRGLSGARWGRSGSAGHEKLPVHVEDALTYLDQVKIRFGSDPATYNGFLEIMKEFKSQSIDTPGVIRRVSQLFHEHPDLIVGFNAFLPLGYRIDIPKNGKLNIQSPLTSQENSHNHGDGAEDFKQQVPYKEDKPQVPLESDSVEFNNAISYVNKIKTRFLDHPEIYRSFLEILHTYQKEQLNTRGRPFRGMSEEEVFTEVANLFRGQEDLLSEFGQFLPEAKRSLFTGNGPCEMHSVQKNEHDKTPEHSRKRSRPSLLRPVSAPAKKKMKLRGTKDLSIAAVGKYGTLQEFSFFDKVRRVLKSQEVYENFLRCIALFNQELVSGSELLQLVSPFLGKFPELFAQFKSFLGVKELSFAPPMSDRSGDGISREIDYASCKRIGSSYRALPKTYQQPKCSGRTAICKELDHWTLLQGSWTDDYCMSKFKNTCWIPGYSAGVSKLWPTGPGPLPVFVNKVLLSHRHNHSFTYCLWLLFSPQRQS

SEQ ID NO: 744873 - protein, 439 aa, Homo sapiens
GAAPTSDMAHAGGGSGGSGAGGPAGRGLSGARWGRSGSAGHEKLPVHVEDALTYLDQVKIRFGSDPATYNGFLEIMKEFKSQSIDTPGVIRRVSQLFHEHPDLIVGFNAFLPLGYRIDIPKNGKLNIQSPLTSQENSHNHGDGAEDFKQQVPYKEDKPQVPLESDSVEFNNAISYVNKIKTRFLDHPEIYRSFLEILHTYQKEQLNTRGRPFRGMSEEEVFTEVANLFRGQEDLLSEFGQFLPEAKRSLFTGNGPCEMHSVQKNEHDKTPEHSRKRSRPSLLRPVSAPAKKKMKLRGTKDLSIAAVGKYGTLQEFSFFDKVRRVLKSQEVYENFLRCIALFNQELVSGSELLQLVSPFLGKFPELFAQFKSFLGVKELSFAPPMSDRSGDGISREIDYASCKRIGSSYRALPKTYQQPKCSGRTAICKEVALPGAQMFV

SEQ ID NO: 744874 - protein, 99 aa, Homo sapiens
SPQIRPISQWVFPHGAVFRPVRAISSVGGGFTECPVSRVVSRYPRTCVTPSYRSDSSPRLAPHVSLFENTPLFLHSNDDHRLVFYGNHCSLGFITAFIG

SEQ ID NO: 744875 - protein, 528 aa, Homo sapiens
MAEHLELLAEMPMVGRMSTQERLKHAQKRRAQQVKMWAQAEKEAQGKKGPGERPRKEAASQGLLKQVLFPPSVVLLEAAARNDLEEVRQFLGSGVSPDLANEDGLTALHQCCIDDFREMVQQLLEAGANINACDSECWTPLHAAATCGHLHLVELLIASGANLLAVNTDGNMPYDLCDDEQTLDCLETAMADRGITQDSIEAARAVPELRMLDDIRSRLQAGADLHAPLDHGATLLHVAAANGFSEAAALLLEHRASLSAKDQDGWEPLHAAAYWGQVPLVELLVAHGADLNAKSLMDETPLDVCGDEEVRAKLLELKHKHDALLRAQSRQRSLLRRRTSSAGSRGKVVRRVSLTQRTDLYRKQHAQEAIVWQQPPPTSPEPPEDNDDRQTGAELRPPPPEEDNPEVVRPHNGRVGGSPVRHLYSKRLDRSVSYQLSPLDSTTPHTLVHDKAHHTLADLKRQRAAAKLQRPPPEGPESPETAEPGLPGDTVTPQPDCGFRAGGDPPLLKLTAPAVEAPVERRPCCLLM

SEQ ID NO: 744876 - protein, 560 aa, Homo sapiens
MAEHLELLAEMPMVGRMSTQERLKHAQKRRAQQVKMWAQAEKEAQGKKGPGERPRKEAASQGLLKQVLFPPSVVLLEAAARNDLEEVRQFLGSGVSPDLANEDGLTALHQCCIDDFREMVQQLLEAGANINACDSECWTPLHAAATCGHLHLVELLIASGANLLAVNTDGNMPYDLCDDEQTLDCLETAMADRGITQDSIEAARAVPELRMLDDIRSRLQAGADLHAPLDHGATLVRAGGLRGTRGWGPRYLEVGDGAEFRPGACLQLHVAAANGFSEAAALLLEHRASLSAKDQDGWEPLHAAAYWGQVPLVELLVAHGADLNAKSLMDETPLDVCGDEEVRAKLLELKHKHDALLRAQSRQRSLLRRRTSSAGSRGKVVRRVSLTQRTDLYRKQHAQEAIVWQQPPPTSPEPPEDNDDRQTGAELRPPPPEEDNPEVVRPHNGRVGGSPVRHLYSKRLDRSVSYQLSPLDSTTPHTLVHDKAHHTLADLKRQRAAAKLQRPPPEGPESPETAEPGLPGDTVTPQPDCGFRAGGDPPLLKLTAPAVEAPVERRPCCLLM

SEQ ID NO: 744877 - protein, 528 aa, Homo sapiens; identical to SEQ ID NO: 744875

SEQ ID NO: 744878 - protein, 257 aa, Homo sapiens
MAEHLELLAEMPMVGRMSTQERLKHAQKRRAQQVKMWAQAEKEAQGKKGPGERPRKEAASQGLLKQVLFPPSVVLLEAAARNDLEEVRQFLGSGVSPDLANEDGLTALHSAALMISERWCSSSWRLGPTSMPVTVSAGRLCMLRPPAATCTWWSCSSPVAPISWRSTPTGTCPMTCVMMSRRWTAWRLPWPTVASPRTASRPPGPCQNCACWTTSGAGCRPGQTSMPPWTTGPRCCTSQPPTGSARRLPCCWNTEPA

SEQ ID NO: 744879 - protein, 129 aa, Homo sapiens
EFKLGIGQGPSGSNVGGVPGRSWSLQKLTPESINPDDFSCESTTPHTLVHDKAHHTLADLKRQRAAAKLQRPPPEGPESPETAEPGLPGDTVTPQPDCGFRAGGDPPLLKLTAPAVEAPVERRPCCLLM

SEQ ID NO: 744880 - protein, 49 aa, Homo sapiens
SLSSLLPRKVVRRVSLTQRTDLYRKQHAQEAIVWQQPPPTSPEPPEDND

SEQ ID NO: 744881 - protein, 528 aa, Homo sapiens; identical to SEQ ID NO: 744875

SEQ ID NO: 744882 - protein, 528 aa, Homo sapiens; identical to SEQ ID NO: 744875

SEQ ID NO: 744883 - protein, 550 aa, Homo sapiens
MAEHLELLAEMPMVGRMSTQERLKHAQKRRAQQVKMWAQAEKEAQGKKGPGERPRKEAASQGLLKQVLFPPSVVLLEAAARNDLEEVRQFLGSGVSPDLANEDGLTALHQCCIDDFREMVQQLLEAGANINACDSECWTPLHAAATCGHLHLVELLIASGANLLAVNTDGNMPYDLCDDEQTLDCLETAMADRGRCGGAAVGGLPVALPLSLPPPGITQDSIEAARAVPELRMLDDIRSRLQAGADLHAPLDHGATLLHVAAANGFSEAAALLLEHRASLSAKDQDGWEPLHAAAYWGQVPLVELLVAHGADLNAKSLMDETPLDVCGDEEVRAKLLELKHKHDALLRAQSRQRSLLRRRTSSAGSRGKVVRRVSLTQRTDLYRKQHAQEAIVWQQPPPTSPEPPEDNDDRQTGAELRPPPPEEDNPEVVRPHNGRVGGSPVRHLYSKRLDRSVSYQLSPLDSTTPHTLVHDKAHHTLADLKRQRAAAKLQRPPPEGPESPETAEPGLPGDTVTPQPDCGFRAGGDPPLLKLTAPAVEAPVERRPCCLLM

SEQ ID NO: 744884 - protein, 528 aa, Homo sapiens; identical to SEQ ID NO: 744875

SEQ ID NO: 744885 - protein, 576 aa, Homo sapiens
MAEHLELLAEMPMVGRMSTQERLKHAQKRRAQQVKMWAQAEKEAQGKKGPGERPRKEAASQGLLKQVLFPPSVVLLEAAARNDLEEVRQFLGSGVSPDLANEDGLTALHQCCIDDFREMVQQLLEAGANINACDSECWTPLHAAATCGHLHLVELLIASGANLLAVNTDGNMPYDLCDDEQTLDCLETAMADRGITQDSIEAARAVPELRMLDDIRSRLQAGADLHAPLDHGATLLHVAAANGFSEAAALLLEHRASLSAKDQDGWEPLHAAAYWGQVPLVELLVAHGADLNAKSLMDETPLDVCGDEEVRAKLLELKHKHDALLRAQSRQRSLLRRRTSSAGSRGKVVRRVSLTQRTDLYRKQHAQEAIVWQQPPPTSPEPPEDNDDRQTGAELRPPPPEEDNPEVVRPHNGRVGGSPVRHLYSKRLDRSVSYQLSPLDSTTPHTLVHDKAHHTLADLKRQRAAAKLQRPPPEGPESPETAEPGLPGDTVTPQPDCGFRAGGDPPLLKLTAPVRALVLRVQHGNPGFYCTGHWPLSGQKTCLEGCLAAKTIFILQLLIKGCFAMEKTPHTHHRHK

SEQ ID NO: 744886 - protein, 229 aa, Homo sapiens
MAEHLELLAEMPMVGRMSTQERLKHAQKRRAQQVKMWAQAEKEAQGKKGPGERPRKEAASQGLLKQVLFPPSVVLLEAAARNDLEEVRQFLGSGVSPDLANEDGLTALHQCCIDDFREMVQQLLEAGANINACDSECWTPLHAAATCGHLHLVELLIASGANLLAVNTDGNMPYDLCDDEQTLDCLETAMADRGEVRRCGCGRAAGRAPSEPAASQASPRTASRPCLLM

SEQ ID NO: 744887 - protein, 180 aa, Homo sapiens [sequence omitted]

SEQ ID NO: 744888 - protein, 181 aa, Homo sapiens
MMKFKPNQTRTYDREGFKKRAACLCFRSEQEDEVLLVSSSRYPDQWIVPGGGMEPEEEPGGAAVREVYEEAGVKGKLGRLLGIFEQNQDRKHRTYVYVLTVTEILEDWEDSVNIGRKREWFKVEDAIKVLQCHKPVHAEYLEKLKLGCSPANGNSTVPSLPDNNALFVTAAQTSGLPSSVR

SEQ ID NO: 744889 - protein, 180 aa, Homo sapiens [sequence omitted]

SEQ ID NO: 744890 - protein, 181 aa, Homo sapiens; identical to SEQ ID NO: 744888

SEQ ID NO: 744891 - protein, 180 aa, Homo sapiens [sequence omitted]

SEQ ID NO: 744892 - protein, 180 aa, Homo sapiens [sequence omitted]

SEQ ID NO: 744893 - protein, 180 aa, Homo sapiens [sequence omitted]

SEQ ID NO: 744894 - protein, 180 aa, Homo sapiens [sequence omitted]

SEQ ID NO: 744895 - protein, 180 aa, Homo sapiens [sequence omitted]

SEQ ID NO: 744896 - protein, 180 aa, Homo sapiens [sequence omitted]

SEQ ID NO: 744897 - protein, 927 aa, Homo sapiens
MPIDEVNILGIQRIYGNVDKDIYQDKALERKAIKIKCSAAKDLEWLTCNISIWCNITVIRNDICEGSEWKLIQPVGELLSSILSQLHTYPFTQQFHSWESSQQMDKLHNQAMVKYVCCRIYETGTNLIFKCDEVMAIYLLDTLWLPKSYVLPQGVLSIVIEKGRTLLDRTTCFMHVLAYTEKAESLKMRLYRIVDFVFKRLYGLKNVLGNRHEQGRELQPTGQTPPHCLFVRPTSLKFFYVLGFFFFKKILCPFVYKSSVGAFSLQWQNSVVETDLWSTKAEIFTVLGEKNNMNCNNLDLLGCSVLMCPVKTKEKQHQVQSSAISLITSKLLLPDLISTPDLKPGDFVNLLGYNKIKNYRYLLIYIMELFQKQSYGKMDQESLKIKLRKKNHVINSVVETEVGIKFYVHTLTSATQQGHTRHMKGDQLKGDKMKLGEGRGDPNSEYWIPHKRKNFSPAPSMAANGKSQYHKANSWNIPDFHDENGDECRGECIVKKTNNILLVQVVDDRFLLFTFSQIITFSMFCFLCYLKYKPSYNSLRWVACQVAEMKYHPSPKVLIRMKYYIFLKYSNKLGTLLSWYFLFWPAFPDKVVLLLQLTKKMWQGWAARFSGSHLMFRFFSSLPGLCRCCCSLCLEMFIWPESKSLSKLLLFSMTELQLFVCPPSPLEYMVPKGKPHAIHSPPNHPQQLVGKHETLLLNNVFPLAQGLQVKGLQGGRTSRCARRGLLANWRVTGEEDNDMLLGCLLLRSSQLSPVHKGGSGLLLPDLQIIQKLPEFWIFMQISQFLKMLASNSECFNQPHCVGQGKQAQRPGEAAVFNCCLGLSQSPLSPKKAQSHTGTRFIPLVEKASLSKVMGESYQNCKGKKYDTMKLEIHCFEMKMTYFCTSITHKFSRHHLDIFVVQQIEIWNFMVCKSLCDTSYNHEQYYGQ

SEQ ID NO: 744898 - protein, 108 aa, Homo sapiens
NRVITLQRFENVVYIRSASQAGSIQLWFTLQVLLVSSSRYPDQWIVPGGGMEPEEEPGGAAVREVYEEVRCSFTQILFRSFKNKALCYITLRQRDGSRSAFCLMQLYF

SEQ ID NO: 744899 - protein, 181 aa, Homo sapiens; identical to SEQ ID NO: 744888

SEQ ID NO: 744900 - protein, 85 aa, Homo sapiens
SALLSNQKLETLDLGQNHLWKSGIIKLFGVLRQRTGSLKILRLKTYETNLEIKKLLEEVKEKNPKLTIDCNASGATAPPCCDFFC

SEQ ID NO: 744901 - protein, 355 aa, Homo sapiens
MEDLEETLFEEFENYSYDLDYYSLESDLEEKVQLGVVHWVSLVLYCLAFVLGIPGNAIVIWFTGFKWKKTVTTLWFLNLAIADFIFLLFLPLYISYVAMNFHWPFGIWLCKANSFTAQLNMFASVFFLTVISLDHYIHLIHPVLSHRHRTLKNSLIVIIFIWLLASLIGGPALYFRDTVEFNNHTLCYNNFQKHDPDLTLIRHHVLTWVKFIIGYLFPLLTMSICYLCLIFKVKKRTFLISSRHFWTILVVVVAFVVCWTPYHLFSIWELTIHHNSYSHHVMQAGIPLSTGLAFLNSCLNPILYVLISKKFQARFRSSVAEILKYTLWEVSCSGTVSEQLRNSETKNLCLLETAQ

SEQ ID NO: 744902 - protein, 299 aa, Homo sapiens
MEEFDSEDFSTSEEDEDYVPSGGEYSEDDVNELVKEDEVDGEEQTQKTQGKKRKAQSIPARKRRQGGLSLEEEEEEDANSESEGSSSEEEDDAAEQEKGIGSEDARKKKEDELWASFLNDVGPKSKVPPSTQVKKGEETEETSSSKLLVKAEELEKPKETEKVKITKVFDFAGEEVRVTKEVDATSKEAKSFFKQNEKEKPQANVPSALPSLPAGSGLKRSSGMSSLLGKIGAKKQKMSTLEKSKLDWESFKEEEGIGEELAIHNRGKEGYIERKAFLDRVDHRQFEIERDLRLSKMKP

SEQ ID NO: 744903 - protein, 217 aa, Homo sapiens
MEEFDSEDFSTSEEDEDYVPSGGEYSEDDVNELVKEDEVDGEEQTQKTQGKKRKAQSIPARKRRQGGLSLEEEEEEDANSESEGSSSEEEDDAAEQEKGIGSEDARKKKEDELWASFLNDVGPKSKVPPSTQVKKGEETEETSSSKLLVKAEELEKPKETEKVKITKVFDFAGEEVRVTKEVDATSKEAKSFFKQNEKEKPQANVPSALPSLPAGSG

SEQ ID NO: 744904 - protein, 158 aa, Homo sapiens
MFILCPVVSQELENPKTSVTCENSPKSIDPAGQEVRVTKEVDATSKEAKSFFKQNEKEKPQANVPSALPSLPAGSGLKRSSGMSSLLGKIGAKKQKMSTLEKSKLDWESFKEEEGIGEELAIHNRGKEGYIERKAFLDRVDHRQFEIERDLRLSKMKP

SEQ ID NO: 744905 - protein, 299 aa, Homo sapiens; identical to SEQ ID NO: 744902

SEQ ID NO: 744906 - protein, 317 aa, Homo sapiens
MERLIGSGRMKQFGEDRSLNGYLNGFKPFKYPPEDYVPSGGEYSEDDVNELVKEDEVDGEEQTQKTQGKKRKAQSIPARKRRQGGLSLEEEEEEDANSESEGSSSEEEDDAAEQEKGIGSEDARKKKEDELWASFLNDVGPKSKVPPSTQVKKGEETEETSSSKLLVKAEELEKPKETEKVKITKVFDFAGEEVRVTKEVDATSKEAKSFFKQNEKEKPQANVPSALPSLPAGSGLKRSSGMSSLLGKIGAKKQKMSTLEKSKLDWESFKEEEGIGEELAIHNRGKEGYIERKAFLDRVDHRQFEIERDLRLSKMKP

SEQ ID NO: 744907 - protein, 307 aa, Homo sapiens
MSRRPAYCSLQFLGSSDPPASASPVDGTTGGEYSEDDVNELVKEDEVDGEEQTQKTQGKKRKAQSIPARKRRQGGLSLEEEEEEDANSESEGSSSEEEDDAAEQEKGIGSEDARKKKEDELWASFLNDVGPKSKVPPSTQVKKGEETEETSSSKLLVKAEELEKPKETEKVKITKVFDFAGEEVRVTKEVDATSKEAKSFFKQNEKEKPQANVPSALPSLPAGSGLKRSSGMSSLLGKIGAKKQKMSTLEKSKLDWESFKEEEGIGEELAIHNRGKEGYIERKAFLDRVDHRQFEIERDLRLSKMKP

SEQ ID NO: 744908 - protein, 299 aa, Homo sapiens; identical to SEQ ID NO: 744902

SEQ ID NO: 744909 - protein, 223 aa, Homo sapiens
FWVFADMFPTPQMVSVSLETSSNVQRPGAEPFLTDELWASFLNDVGPKSKVPPSTQVKKGEETEETSSSKLLVKAEELEKPKETEKVKITKVFDFAGEEVRVTKEVDATSKEAKSFFKQNEKEKPQANVPSALPSLPAGSGLKRSSGMSSLLGKIGAKKQKMSTLEKSKLDWESFKEEEGIGEELAIHNRGKEGYIERKAFLDRVDHRQFEIERDLRLSKMKP

SEQ ID NO: 744910 - protein, 280 aa, Homo sapiens
MEEFDSEDFSTSEEDEDYVPSGGEYSEDDVNELVKEDEVDGEEQTQKTQGKKRKAQSIPARKRRQGGLSLEEEEEEDANSESEGSSSEEEDDAAEQEKGIGSEDARKKKEDELWASFLNDVGPKSKVPPSTQVKKGEETEETSSSKLLVKAEELEKPKETEKVKITKVFDFAGEEVRVTKEVDATSKEAKSFFKQNEKEKPQANVPSALPSLPAGSGLKRSSGMSSLLGKIGAKKQKMSTLEKSKLDWESFKEEEGIGEELAIHNRGKEGWIKGAQPLGQ

SEQ ID NO: 744911 - protein, 121 aa, Homo sapiens
MSRRPAYCSLQFLGSSDPPASASPVDGTTGGEYSEDDVNELVKEDEVDGEEQTQKTQGKKRKAQSIPARKRRQGGLSLEEEEEEDANSESEGYIERKAFLDRVDHRQFEIERDLRLSKMKP

SEQ ID NO: 744912 - protein, 56 aa, Homo sapiens
MGTPEGEERKAAIFDAIMTENFPKLMTDTTSQIQETQDIEPRHIVFKCQKIKDGHG

SEQ ID NO: 744913 - protein, 87 aa, Homo sapiens
KGRGGGGERAGVMPRGRRLGMVFAPPRPGQRQAGAPWVPERRKRRPDGDTFLLSFLSTTWLKTWRSQQYKESKSRSCAREQMNSSSC

SEQ ID NO: 744914 - protein, 82 aa, Homo sapiens
AWGLNRPRARGRRLGMVFAPPRPGQRQAGAPWVPERRKRRPDGDTFLLSFLSTTWLKTWRSQQYKESKSRSCAREQMNSSSC

SEQ ID NO: 744915 - protein, 97 aa, Homo sapiens
AWGLNRPRARGRRLGMVFAPPRPGQRQAGAPWVPERRKRRPDGVSTGPGQALPVNGARDTFLLSFLSTTWLKTWRSQQYKESKSRSCAREQMNSSSC

SEQ ID NO: 744916 - protein, 422 aa, Homo sapiens
SACADGKIRIYNFLNGNCMKVLKANGRGDPVLSFFIQGNRMVVNTESNVLMFQFEHIKWQYAVEKTKQKKNKEKEEEKEENSLMEILSKCNIQVHSPRESVSSKQTVIQELLPGKPPKSRVLLKPAKFSSAVLIEELQSQGKSKSPRRDDDAEKAQKQGQLETPGKLPSHPKKKSWKIPMSPDQFLLTVSALQHARNSGEFAYPCRPQTEITDVWGPSISYPRKVLNFKGKSIQRAVDRLRLSNPPIDVKRTSIPLEIQKLQPNLKISLHSPRAQSTIPEPMIIRSRFSGSLKGGDQVTSSIERAVCSTGPLTSMQVIKPNRMLAPQVGTATLSLKKERPRIYTALDPFRVNAEFVLLTVKEEKEHQEAKMKEYQARESTGVVDPGKASKAAWIRKIKGLPIDNFTKQGKTAAPELGQNVFI

SEQ ID NO: 744917 - protein, 111 aa, Homo sapiens
AITPEQEGGTLLPSSSTTPRGGGPSLYGGSGAPHQASILPGPDGPSAGGWLRVVAPGSTHFQEGPCNQVKLPDVLESLAPLRLDSSVVASGHSLVLAPFSSLLCAVLIPRR

SEQ ID NO: 744918 - protein, 121 aa, Homo sapiens
LGLPKCWDYRREPPHPALMFVFLVETGFHHVCQAGLELLTSGDPPTSASQSARITGLSHHTRAKEGLLLKRMGHVSYLTISPRFPCSSLTCPSVGVCLRAHLKPCPSRWRVLIHGIVLGMG

SEQ ID NO: 744919 - protein, 106 aa, Homo sapiens [sequence omitted]

SEQ ID NO: 744920 - protein, 469 aa, Homo sapiens
AGEPTEALWTAVGPPVPLNPQASSLLGICLGLKTVGSINLHEDGSLPEEAAEEEMAGPNQLCIRRWTTKHVAVWLKDEGFFEYVDILCNKHRLDGITLLTLTEYDLRSPPLEIKVLGDIKRLMLSVRKLQKIHIDVLEEMGYNSDSPMGSMTPFISALQSTDWLCNGELSHDCDGPITDLNSDQYQYMNGKNKHSVRRLDPEYWKTILSCIYVFIVFGFTSFIMVIVHERVPDMQTYPPLPDIFLDSVPRIPWAFAMTEVCGMILCYIWLLVLLLHKHRSILLRRLCSLMGTVFLLRCFTMFVTSLSVPGQHLQCTGKIYGSVWEKLHRAFAIWSGFGMTLTGVHTCGDYMFSGHTVVLTMLNFFVTEYTPRSWNFLHTLSWVLNLFGIFFILAAHEHYSIDVFIAFYITTRLFLYYHTLANTRAYQQSRRARIWFPMFSFFECNVNGTVPNEYCWPFSKPAIMKRLIG

SEQ ID NO: 744921 - protein, 449 aa, Homo sapiens
GEAGRAPDSDGGSDADSEVGPGSPTRTAEAAEEEMAGPNQLCIRRWTTKHVAVWLKDEGFFEYVDILCNKHRLDGITLLTLTEYDLRSPPLEIKVLGDIKRLMLSVRKLQKIHIDVLEEMGYNSDSPMGSMTPFISALQSTDWLCNGELSHDCDGPITDLNSDQYQYMNGKNKHSVRRLDPEYWKTILSCIYVFIVFGFTSFIMVIVHERVPDMQTYPPLPDIFLDSVPRIPWAFAMTEVCGMILCYIWLLVLLLHKHRSILLRRLCSLMGTVFLLRCFTMFVTSLSVPGQHLQCTGKIYGSVWEKLHRAFAIWSGFGMTLTGVHTCGDYMFSGHTVVLTMLNFFVTEYTPRSWNFLHTLSWVLNLFGIFFILAAHEHYSIDVFIAFYITTRLFLYYHTLANTRAYQQSRRARIWFPMFSFFECNVNGTVPNEYCWPFSKPAIMKRLIG

SEQ ID NO: 744922 - protein, 158 aa, Homo sapiens
PHRAGTPHRAQTPRTPHGAGSSHRAQTPRTPHRGTDPTHPTQGTDPTHPTQGRHLTQGTDPMHPTQGRHPTQGTDPTHPTQGRHPTQGTDPTHPTQGRDPTQGTDPTQGRASPRPGPSPVDLLPGRTRATVTSTLSPSLETSADSSSSPRYTGAPATA

SEQ ID NO: 744923 - protein, 88 aa, Homo sapiens
RPLQHQNGPTQGRHPTQGTDPTHPTQGRDPTQGTDPTQGRASPRPGPSPVDLLPGRTRATVTSTLSPSLETSADSSSSPRYTGAPATA

SEQ ID NO: 744924 - protein, 243 aa, Homo sapiens
PTQGRHPTQGTDPTHPTRGRQLTQGPDPTHPTQGHRPHAPHTGHRPHTPHTGQAPHTGHRPHASHTGQAPHTGHRPHTPHTGQAPHTGHRPHAPHTGQGSHAGHRSHAGQGQPKARPLPCRSPPRQDQSHSHFHTISFPRNLCRLFLLSSIHRGPCHSLTLCHLVSLWKAGSASEYRGLGSCRRMLGQWVLAREQPPGSQSGAAAKAVVVEVRVVARSCCRSEDSGVTLRATTFRHSRKSTSK

SEQ ID NO: 744925 - protein, 268 aa, Homo sapiens
SDQHHGGGKNKRLTKGGKKGAKKKVVDPFSKKDWYDVKAPAMFNIRNIGKTLVTRTQGTKIASDGLKGRVFEVSLADLQNDEVAFRKFKLITEDVQGKNCLTNFHGMDLTRDKMCSMVKKWQTMIEAHVDVKTTDGYLLRLFCVGFTKKRNNQIRKTSYAQHQQVRQIRKKMMEIMTREVQTNDLKEVVNKLIPDSIGKDIEKACQSIYPLHDVFVRKVKMLKKPKFELGKLMELHGEGSSSGKATGDETGAKVERADGYEPPVQESV

SEQ ID NO: 744926 - protein, 123 aa, Homo sapiens
MAHVPSPPPPCPSAAEPRRVCLKVSIRASPDVAHLPLCWAVCVTRPAGTARPCFLTSRPLSELHELSLTVRGVEPPLAGTWVYLLSPICQLPLDSGGSPAWGREGTLRGLSEQRWFFQNQRKV

SEQ ID NO: 744927 - protein, 146 aa, Homo sapiens
PAPDTKLLRGSPPHLQHGAPRAFENHRTPLRRARHSPGLPEPPGAAAPAAISSRSPSPRPRCQVTPFTWACSSLRRASASTPPAGACGDCAAPGWPAASARPAATAHSRLENPTGSRTAPPRPHAPLAPWRHESEPVIGQGLAVKG

SEQ ID NO: 744928 - protein, 146 aa, Homo sapiens; identical to SEQ ID NO: 744927

SEQ ID NO: 744929 - protein, 146 aa, Homo sapiens; identical to SEQ ID NO: 744927

SEQ ID NO: 744930 - protein, 275 aa, Homo sapiens [sequence omitted]

SEQ ID NO: 744931 - protein, 325 aa, Homo sapiens [sequence omitted]

SEQ ID NO: 744932 - protein, 577 aa, Homo sapiens
MKHQERFLFQGNNGTVLYTGDFRLAQGEAARMELLHSGGRVKDIQSVYLDTTFCDPRFYQIPSREECLSGVLELVRSWITRSPYHVVWLNCKAAYGYEYLFTNLSEELGVQVHVNKLDMFRNMPEILHHLTTDRNTQIHACRHPKAEEYFQWSKLPCGITSRNRIPLHIISIKPSTMWFGERSRKTNVIVRTGESSYRACFSFHSSYSEIKDFLSYLCPVNAYPNVIPVGTTMDKVVEILKPLCRSSQSTEPKYKPLGKLKRARTVHRDSEEEDDYLFDDPLPIPLRHKVPYPETFHPEVFSMTAVSEKQPEKLRQTPGCCRAECMQSSRFTNFVDCEESNSESEEEVGIPASLQGDLGSVLHLQKADGDVPQWEVFFKRNDEITDESLENFPSSTVAGGSQSPKLFSDSDGESTHISSQNSSQSTHITEQGSQGWDSQSDTVLLSSQERNSGDITSLDKADYRPTIKENIPASLMEQNVICPKDTYSDLKSRDKDVTIVPSTGEPTTLSSETHIPEEKSLLNLSTNADSQSSSDFEVPSTPEAELPKREHLQYLYEKLATGESIAVKKRKCSLLDT

SEQ ID NO: 744933 - protein, 720 aa, Homo sapiens
LPGSGGAVRAGLGFSCGFGVPDSGIGGAMSSFEGQMAEYPTISIDRFDRENLRARAYFLSHCHKDHMKGLRAPTLKRRLECSLKVYLYCSPVTKELLLTSPKYRFWKKRIISIEIETPTQISLVDEASGEKEEIVVTLLPAGHCPGSVMFLFQGNNGTVLYTGDFRLAQGEAARMELLHSGGRVKDIQSVYLDTTFCDPRFYQIPSREECLSGVLELVRSWITRSPYHVVWLNCKAAYGYEYLFTNLSEELGVQVHVNKLDMFRNMPEILHHLTTDRNTQIHACRHPKAEEYFQWSKLPCGITSRNRIPLHIISIKPSTMWFGERSRKTNVIVRTGESSYRACFSFHSSYSEIKDFLSYLCPVNAYPNVIPVGTTMDKVVEILKPLCRSSQSTEPKYKPLGKLKRARTVHRDSEEEDDYLFDDPLPIPLRHKVPYPETFHPEVFSMTAVSEKQPEKLRQTPGCCRAECMQSSRFTNFVDCEESNSESEEEVGIPASLQGDLGSVLHLQKADGDVPQWEVFFKRNDEITDESLENFPSSTVAGGSQSPKLFSDSDGESTHISSQNSSQSTHITEQGSQGWDSQSDTVLLSSQERNSGDITSLDKADYRPTIKENIPASLMEQNVICPKDTYSDLKSRDKDVTIVPSTGEPTTLSSETHIPEEKSLLNLSTNADSQSSSDFEVPSTPEAELPKREHLQYLYEKLATGESIAVKKRKCSLLDT

SEQ ID NO: 744934 - protein, 572 aa, Homo sapiens
MFLFQGNNGTVLYTGDFRLAQGEAARMELLHSGGRVKDIQSVYLDTTFCDPRFYQIPSREECLSGVLELVRSWITRSPYHVVWLNCKAAYGYEYLFTNLSEELGVQVHVNKLDMFRNMPEILHHLTTDRNTQIHACRHPKAEEYFQWSKLPCGITSRNRIPLHIISIKPSTMWFGERSRKTNVIVRTGESSYRACFSFHSSYSEIKDFLSYLCPVNAYPNVIPVGTTMDKVVEILKPLCRSSQSTEPKYKPLGKLKRARTVHRDSEEEDDYLFDDPLPIPLRHKVPYPETFHPEVFSMTAVSEKQPEKLRQTPGCCRAECMQSSRFTNFVDCEESNSESEEEVGIPASLQGDLGSVLHLQKADGDVPQWEVFFKRNDEITDESLENFPSSTVAGGSQSPKLFSDSDGESTHISSQNSSQSTHITEQGSQGWDSQSDTVLLSSQERNSGDITSLDKADYRPTIKENIPASLMEQNVICPKDTYSDLKSRDKDVTIVPSTGEPTTLSSETHIPEEKSLLNLSTNADSQSSSDFEVPSTPEAELPKREHLQYLYEKLATGESIAVKKRKCSLLDT

SEQ ID NO: 744935 - protein, 577 aa, Homo sapiens; identical to SEQ ID NO: 744932

SEQ ID NO: 744936 - protein, 252 aa, Homo sapiens [sequence omitted]

SEQ ID NO: 744937 - protein, 702 aa, Homo sapiens
LPGSGGAVRAGLGFSCGFGVPDSGIGGAMSSFEGQMAEYPTISIDRFDRENLRARAYFLSHCHKDHMKGLRAPTLKRRLECSLKVYLYCSPVTKELLLTSPKYRFWKKRIISIEIETPTQISLVDEASGEKEEIVVTLLPAGHCPGSVMFLFQGNNGTVLYTGDFRLAQGEAARMELLHSGGRVKDIQSVYLDTTFCDPRFYQIPSREECLSGVLELVRSWITRSPYHVVWLNCKAAYGYEYLFTNLSEELGVQVHVNKLDMFRNMPEILHHLTTDRNTQIHACRHPKAEEYFQWSKLPCGITSRNRIPLHIISIKTIHHVVWRKEQKNKCNCEIKDFLSYLCPVNAYPNVIPVGTTMDKVVEILKPLCRSSQSTEPKYKPLGKLKRARTVHRDSEEEDDYLFDDPLPIPLRHKVPYPETFHPEVFSMTAVSEKQPEKLRQTPGCCRAECMQSSRFTNFVDCEESNSESEEEVGIPASLQGDLGSVLHLQKADGDVPQWEVFFKRNDEITDESLENFPSSTVAGGSQSPKLFSDSDGESTHISSQNSSQSTHITEQGSQGWDSQSDTVLLSSQERNSGDITSLDKADYRPTIKENIPASLMEQNVICPKDTYSDLKSRDKDVTIVPSTGEPTTLSSETHIPEEKSLLNLSTNADSQSSSDFEVPSTPEAELPKREHLQYLYEKLATGESIAVKKRKCSLLDT

SEQ ID NO: 744938 - protein, 572 aa, Homo sapiens; identical to SEQ ID NO: 744934

SEQ ID NO: 744939 - protein, 572 aa, Homo sapiens; identical to SEQ ID NO: 744934

SEQ ID NO: 744940 - protein, 447 aa, Homo sapiens
LPGSGGAVRAGLGFSCGFGVPDSGIGGAMSSFEGQMAEYPTISIDRFDRENLRARAYFLSHCHKDHMKGLRAPTLKRRLECSLKVYLYCSPVTKELLLTSPKYRFWKKRIISIEIETPTQISLVDEASGEKEEIVVTLLPAGHCPGSVMFLFQGNNGTVLYTGDFRLAQGEAARMELLHSGGRVKDIQSVYLDTTFCDPRFYQIPSREECLSGVLELVRSWITRSPYHVVWLNCKAAYGYEYLFTNLSEELGVQVHVNKLDMFRNMPEILHHLTTDRNTQIHACRHPKAEEYFQWSKLPCGITSRNRIPLHIISIKPSTMWFGERSRKTNVIVRTGESSYRACFSFHSSYSEIKDFLSYLCPVNAYPNVIPVGTTMDKVVEILKPLCRSSQSTEPKYKPLGKLKRARTVHRDSGKKNGPGFRGVGSLQTLLSRELGSGRSGLGQSGP

SEQ ID NO: 744941 - protein, 82 aa, Homo sapiens
LPGSGGAVRAGLGFSCGFGVPDSGIGGAMSSFEGQMAEYPTISIDRFDRENLRARAYFLSHCHKDHMKGLRAPTLKRRLECR

SEQ ID NO: 744942 - protein, 697 aa, Homo sapiens
MAGLGPGVGDSEGGPRPLFCRKGALRQKVVHEVKSHKFTARFFKQPTFCSHCTDFIWGIGKQGLQCQVCSFVVHRRCHEFVTFECPGAGKGPQTDDPRNKHKFRLHSYSSPTFCDHCGSLLYGLVHQGMKCSCCEMNVHRRCVRSVPSLCGVDHTERRGRLQLEIRAPTADEIHVTVGEARNLIPMDPNGLSDPYVKLKLIPDPRNLTKQKTRTVKATLNPVWNETFVFNLKPGDVERRLSVEVWDWDRTSRNDFMGAMSFGVSELLKAPVDGWYKLLNQEEGEYYNVPVADADNCSLLQKFEACNYPLELYERVRMGPSSSPIPSPSPSPTDPKRCFFGASPGRLHISDFSFLMVLGKGSFGKVMLAERRGSDELYAIKILKKDVIVQDDDVDCTLVEKRVLALGGRGPGGRPHFLTQLHSTFQTPDRLYFVMEYVTGGDLMYHIQQLGKFKEPHAAFYAAEIAIGLFFLHNQGIIYRDLKLDNVMLDAEGHIKITDFGMCKENVFPGTTTRTFCGTPDYIAPEIIAYQPYGKSVDWWSFGVLLYEMLAGQPPFDGEDEEELFQAIMEQTVTYPKSLSREAVAICKGFLTKHPGKRLGSGPDGEPTIRAHGFFRWIDWERLERLEIPPPFRPRPCGRSGENFDKFFTRAAPALTPPDRLVLASIDQADFQGFTYVNPDFVHPDARSPTSPVPVPVM

SEQ ID NO: 744943 - protein, 97 aa, Homo sapiens
TSPPTPSSRFYAAEIAIGLFFLHNQGIIYRDLKLDNVMLDAEGHIKITDFGMCKENVFPGTTTRTFCGTPDYIAPEIICLPPLWEFCRLVLLRSFAE

SEQ ID NO: 744944 - protein, 473 aa, Homo sapiens
HHGQGDFYVDEAAQRLLLRHLLLHHEGVPVPWERVQDRCSEDTEHSQDLQSALIRLEEEPQRSASLAQVKAMLREHLDQAGSANQALSEDIQKVTNDWTRSRKELEHGRRRGGARRRDLLQLGGELARTSRAVQEAGLGLSTGLRLAESRAEAALEKQALLQAQLEEQLRDKVLREKDLAQQQMQSDLDKADLSARVTELGLAVKRLEKQNLEKDQVNKDLTEKLEALESLRLQEQVALETEDGEGLQQTLRDLAQAVLSDSESGVQLSGSERTADASNGSLRGLSGQRTPSPPRRSSPGRGRSPRRGSSPACSDSSTLALIHSALHKRQLQVQDMRGRYEASQDLLGTLRKQLSDSESERRALEEQLQRLRDKTDGAMQAHEHAQREVQRLRSANELLSRLGHNWSITAHCSLELPDSSDPPTSTSQLPLVGGLGLAWGRIWDRSLRVRFPLPSSVPSPPSEPSPPWVPGQL

SEQ ID NO: 744945 - protein, 138 aa, Homo sapiens
MRGRYEASQDLLGTLRKQLSDSESERRALEEQLQRLRDKTDGAMQAHEHAQREVQRLRSANELLSRLGHNWSITAHCSLELPDSSDPPTSTSQLPLVGGLGLAWGRIWDRSLRVRFPLPSSVPSPPSEPSPPWVPGQL

SEQ ID NO: 744946 - protein, 87 aa, Homo sapiens
SPPRDRTVLCTFTVKPVSLSEKCHVCRGNHGNCFLNSPFLMRAWDSAACFTWDEQLVVSGWRGTSASAVSSHLVACPAGCHCLLSLG

SEQ ID NO: 744947 - protein, 642 aa, Homo sapiens
LDLSHNFISSFPWSDLRNLSALQLLKMNHNRLGSLPRDALGALPDLRSLRINNNRLRTLAPGTFDALSALSHLQLYHNPFHCGCGLVWLQAWAASTRVSLPEPDSIACASPPALQGVPVYRLPALPCAPPSVHLSAEPPLEAPGTPLRAGLAFVLHCIADGHPTPRLQWQLQIPGGTVVLEPPVLSGEDDGVGAEEGEGEGDGDLLTQTQAQTPTPAPAWPAPPATPRFLALANGSLLVPLLSAKEAGVYTCRAHNELGANSTSIRVAVAATGPPKHAPGAGGEPDGQAPTSERKSTAKGRGNSVLPSKPEGKIKGQGLAKVSILGETETEPEEDTSEGEEAEDQILADPAEEQRCGNGDPSRYVSNHAFNQSAELKPHVFELGVIALDVAEREARVQLTPLAARWGPGPGGAGGAPRPGRRPLRLLYLCPAGGGAAVQWSRVEEGVNAYWFRGLRPGTNYSVCLALAGEACHVQVVFSTKKELPSLLVIVAVSVFLLVLATVPLLGAACCHLLAKHPGKPYRLILRPQAPDPMEKRIAADFDPRASYLESEKSYPAGGEAGGEEPEDVQGEGLDEDAEQGDPSGDLQREESLAACSLVESQSKANQEEFEAGSEYSDRLPLGAEAVNIAQEINGNYRQTAG

SEQ ID NO: 744948 - protein, 1657 aa, Homo sapiens
MDSKKRSSTEAEGSKERGLVHIWQAGSFPITPERLPGWGGKTVLQAALGVKHGVLLTEDGEVYSFGTLPWRSGPVEICPSSPILENALVGQYVITVATGSFHSGAVTDNGVAYMWGENSAGQCAVANQQYVPEPNPVSIADSEASPLLAVRILQLACGEEHTLALSISREIWAWGTGCQLGLITTAFPVTKPQKVEHLAGRVVLQVACGAFHSLALVQCLPSQDLKPVPERCNQCSQLLITMTDKEDHVIISDSHCCPLGVTLTESQAENHASTALSPSTETLDRQEEVFENTLVANDQSVATELNAVSAQITSSDAMSSQQNVMGTTEISSARNIPSYPDTQAVNEYLRKLSDHSVREDSEHGEKPVPSQPLLEEAIPNLHSPPTTSTSALNSLVVSCASAVGVRVAATYEAGALSLKKVMNFYSTTPCETGAQAGSSAIGPEGLKDSREEQVKQESMQGKKSSSLVDIREEETEGGSRRLSLPGLLSQVSPRLLRKAARVKTRTVVLTPTYSGEADALLPSLRTEVWTWGKGKEGQLGHGDVLPRLQPLCVKCLDGKEVIHLEAGGYHSLALTAKSQVYSWGSNTFGQLGHSDFPTTVPRLAKISSENGVWSIAAGRDYSLFLVDTEDFQPGLYYSGRQDPTEGDNLPENHSGSKTPVLLSCSKLGYISRVTAGKDSYLALVDKNIMGYIASLHELATTERRFYSKLSDIKSQILRPLLSLENLGTTTTVQLLQEVASRFSKLCYLIGQHGASLSSFLHGVKEARSLVILKHSSLFLDSYTEYCTSITNFLVMGGFQLLAKPAIDFLNKNQELLQDLSEVNDENTQLMEILNTLFFLPIRRLHNYAKVLLKLATCFEVASPEYQKLQDSSSCYECLALHLGRKRKEAEYTLGFWKTFPGKMTDSLRKPERRLLCESSNRALSLQHAGRFSVNWFILFNDALVHAQFSTHHVFPLATLWAEPLSEEAGGVNGLKITTPEEQFTLISSTPQEKTKWLRAISQAVDQALRGMSDLPPYGSGSSVQRQEPPISRSAKYTFYKDPRLKDATYDGRWLSGKPHGRGVLKWPDGKMYSGMFRNGLEDGYGEYRIPNKAMNKEDHYVGHWKEGKMCGQGVYSYASGEVFEGCFQDNMRHGHGLLRSGKLTSSSPSMFIGQWVMDKKAGYGVFDDITRGEKYMGMWQDDVCQGNGVVVTQFGLYYEGNFHLNKMMGNGVLLSEDDTIYEGEFSDDWTLSGKGTLTMPNGDYIEGYFSGEWGSGIKITGTYFKPSLYESDKDRPKVFRKLGNLAVPADEKWKAVFDECWRQLGCEGPGQGEVWKAWDNIAVALTTSRRQHRDSPEILSRSQTQTLESLEFIPQHVGAFSVEKYDDIRKYLIKACDTPLHPLGRLVETLVAVYRMTYVGVGANRRLLQEAVKEIKSYLKRIFQLVRFLFPELPEEGSTIPLSAPLPTERKSFCTGKSDSRSESPEPGYVVTSSGLLLPVLLPRLYPPLFMLYALDNDREEDIYWECVLRLNKQPDIALLGFLGVQRKFWPATLSILGESKKVLPTTKDACFASAVECLQQISTTFTPSDKLKVIQQTFEEISQSVLASLHEDFLWSMDDLFPVFLYVVLRARIRNLGSEVHLIEDLMDPYLQHGEQGIMFTTLKACYYQIQREKLN

SEQ ID NO: 744949 - protein, 396 aa, Homo sapiens
MDSKKRSSTEAEGSKERGLVHIWQAGSFPITPERLPGWGGKTVLQAALGVKHGVLLTEDGEVYSFGTLPWRSGPVEICPSSPILENALVGQYVITVATGSFHSGAVTDNGVAYMWGENSAGQCAVANQQYVPEPNPVSIADSEASPLLAVRILQLACGEEHTLALSISREIWAWGTGCQLGLITTAFPVTKPQKVEHLAGRVVLQVACGAFHSLALVQCLPSQDLKPVPERCNQCSQLLITMTDKEDHVIISDSHCCPLGVTLTESQAENHASTALSPSTETLDRQEEVFENTLVANDQSVATELNAVSAQITSSDAMSSQQNVMGTTEISSARNIPSYPDTQAVNEYLRKLSDHSVREDSEHGEKPVPSQVPAQFYKIKVCLELNCMGFSLETLK

SEQ ID NO: 744950 - protein, 69 aa, Homo sapiens
MCLRSGVLAGCLMGETDLVVCDFLYVVLRARIRNLGSEVHLIEDLMDPYLQHGEQGIMFTTLKVSIVII

SEQ ID NO: 744951 - protein, 1701 aa, Homo sapiens
MDSKKRSSTEAEGSKERGLVHIWQAGSFPITPERLPGWGGKTVLQAALGVKHGVLLTEDGEVYSFGTLPWRSGPVEICPSSPILENALVGQYVITVATGSFHSGAVTDNGVAYMWGENSAGQCAVANQQYVPEPNPVSIADSEASPLLAVRILQLACGEEHTLALSISREIWAWGTGCQLGLITTAFPVTKPQKVEHLAGRVVLQVACGAFHSLALVQCLPSQDLKPVPERCNQCSQLLITMTDKEDHVIISDSHCCPLGVTLTESQAENHASTALSPSTETLDRQEEVFENTLVANDQSVATELNAVSAQITSSDAMSSQQNVMGTTEISSARNIPSYPDTQAVNEYLRKLSDHSVREDSEHGEKPVPSQPLLEEAIPNLHSPPTTSTSALNSLVVSCASAVGVRVAATYEAGALSLKKVMNFYSTTPCETGAQAGSSAIGPEGLKDSREEQVKQESMQGKKSSSLVDIREEETEGGSRRLSLPGLLSQVSPRLLRKAARVKTRTVVLTPTYSGEADALLPSLRTEVWTWGKGKEGQLGHGDVLPRLQPLCVKCLDGKEVIHLEAGGYHSLALTAKSQVYSWGSNTFGQLGHSDFPTTVPRLAKISSENGVWSIAAGRDYSLFLVDTEDFQPGLYYSGRQDPTEGDNLPENHSGSKTPVLLSCSKLGYISRVTAGKDSYLALVDKNIMGYIASLHELATTERRFYSKLSDIKSQILRPLLSLENLGTTTTVQLLQEVASRFSKLCYLIGQHGASLSSFLHGVKEARSLVILKHSSLFLDSYTEYCTSITNFLVMGGFQLLAKPAMEANPHLPVIILSAKDDILKCSVFECSGKALTSSFYQTSQNINFHDFLNKNQELLQDLSEVNDENTQLMEILNTLFFLPIRRLHNYAKVLLKLATCFEVASPEYQKLQDSSSCYECLALHLGRKRKEAEYTLGFWKTFPGKMTDSLRKPERRLLCESSNRALSLQHAGRFSVNWFILFNDALVHAQFSTHHVFPLATLWAEPLSEEAGGVNGLKITTPEEQFTLISSTPQEKTKWLRAISQAVDQALRGMSDLPPYGSGSSVQRQEPPISRSAKYTFYKDPRLKDATYDGRWLSGKPHGRGVLKWPDGKMYSGMFRNGLEDGYGEYRIPNKAMNKEDHYVGHWKEGKMCGQGVYSYASGEVFEGCFQDNMRHGHGLLRSGKLTSSSPSMFIGQWVMDKKAGYGVFDDITRGEKYMGMWQDDVCQGNGVVVTQFGLYYEGNFHLNKMMGNGVLLSEDDTIYEGEFSDDWTLSGKGTLTMPNGDYIEGYFSGEWGSGIKITGTYFKPSLYESDKDRPKVFRKLGNLAVPADEKWKAVFDECWRQLGCEGPGQGEVWKAWDNIAVALTTSRRQHRDSPEILSRSQTQTLESLEFIPQHVGAFSVEKYDDIRKYLIKACDTPLHPLGRLVETLVAVYRMTYVGVGANRRLLQEAVKEIKSYLKRIFQLVRFLFPELPEEGSTIPLSAPLPTERKSFCTGKSDSRSESPEPGYVVTSSGLLLPVLLPRLYPPLFMLYALDNDREEDIYWECVLRLNKQPDIALLGFLGVQRKFWPATLSILGESKKVLPTTKDACFASAVECLQQISTTFTPSDKLKVIQQTFEEISQSVLASLHEDFLWSMDDLFPVFLYVVLRARIRNLGSEVHLIEDLMDPYLQHGEQGIMFTTLKACYYQIQREKLN

SEQ ID NO: 744952 - protein, 472 aa, Homo sapiens
SGQFWPHRTSWEVFPPPLFSESLRSFGIISSLNVWENSPMKSSGPKHYFGTLTMPNGDYIEGYFSGEWGSGIKITGTYFKPSLYESDKDRPKVFRKLGNLAVPADEKWKAVFDECWRQLGCEGPGQGEVWKAWDNIAVALTTSRRQHRDSPEILSRSQTQTLESLEFIPQHVGAFSVEKYDDIRKYLIKACDTPLHPLGRLVETLVAVYRMTYVGVGANRRLLQEAVKEIKSYLKRIFQLVRFLFPELPEEGSTIPLSAPLPTERKSFCTGKSDSRSESPEPGYVVTSSGLLLPVLLPRLYPPLFMLYALDNDREEDIYWECVLRLNKQPDIALLGFLGVQRKFWPATLSILGESKKVLPTTKDACFASAVECLQQISTTFTPSDKLKVIQQTFEEISQSVLASLHEDFLWSMDDLFPVFLYVVLRARIRNLGSEVHLIEDLMDPYLQHGEQGIMFTTLKACYYQIQREKLN

SEQ ID NO: 744953 - protein, 1237 aa, Homo sapiens
MDSKKRSSTEAEGSKERGLVHIWQAGSFPITPERLPGWGGKTVLQAALGVKHGVLLTEDGEVYSFGTLPWRSGPVEICPSSPILENALVGQYVITVATGSFHSGAVTDNGVAYMWGENSAGQCAVANQQYVPEPNPVSIADSEASPLLAVRILQLACGEEHTLALSISREIWAWGTGCQLGLITTAFPVTKPQKVEHLAGRVVLQVACGAFHSLALVQCLPSQDLKPVPERCNQCSQLLITMTDKEDHVIISDSHCCPLGVTLTESQAENHASTALSPSTETLDRQEEVFENTLVANDQSVATELNAVSAQITSSDAMSSQQNVMGTTEISSARNIPSYPDTQAVNEYLRKLSDHSVREDSEHGEKPVPSQPLLEEAIPNLHSPPTTSTSALNSLVVSCASAVGVRVAATYEAGALSLKKVMNFYSTTPCETGAQAGSSAIGPEGLKDSREEQVKQESMQGKKSSSLVDIREEETEGGSRRLSLPGLLSQVSPRLLRKAARVKTRTVVLTPTYSGEADALLPSLRTEVWTWGKGKEGQLGHGDVLPRLQPLCVKCLDGKEVIHLEAGGYHSLALTAKSQVYSWGSNTFGQLGHSDFPTTVPRLAKISSENGVWSIAAGRDYSLFLVDTEDFQPGLYYSGRQDPTEGDNLPENHSGSKTPVLLSCSKLGYISRVTAGKDSYLALVDKNIMGYIASLHELATTERRFYSKLSDIKSQILRPLLSLENLGTTTTVQLLQEVASRFSKLCYLIGQHGASLSSFLHGVKEARSLVILKHSSLFLDSYTEYCTSITNFLVMGGFQLLAKPAIDFLNKNQELLQDLSEVNDENTQLMEILNTLFFLPIRRLHNYAKVLLKLATCFEVASPEYQKLQDSSSCYECLALHLGRKRKEAEYTLGFWKTFPGKMTDSLRKPERRLLCESSNRALSLQHAGRFSVNWFILFNDALVHAQFSTHHVFPLATLWAEPLSEEAGGVNGLKITTPEEQFTLISSTPQEKTKWLRAISQAVDQALRGMSDLPPYGSGSSVQRQEPPISRSAKYTFYKDPRLKDATYDGRWLSGKPHGRGVLKWPDGKMYSGMFRNGLEDGYGEYRIPNKAMNKEDHYVGHWKEGKMCGQGVYSYASGEVFEGCFQDNMRHGHGLLRSGKLTSSSPSMFIGQWVMDKKAGYGVFDDITRGEKYMGMWQDDVCQGNGVVVTQFGLYYEGNFHLNKMMGNGVLLSEDDTIYEGEFSDDWTLSGKVGN

SEQ ID NO: 744954 - protein, 126 aa, Homo sapiens
LSNHSYASGEVFEGCFQDNMRHGHGLLRSGKLTSSSPSMFIGQWVMDKKAGYGVFDDITRGEKYMGMWQDDVCQGNGVVVTQFGLYYEGNFHLNKMMGNGVLLSEDDTIYEGEFSDDWTLSGKVGN

SEQ ID NO: 744955 - protein, 1639 aa, Homo sapiens
MDSKKRSSTEAEGSKERGLVHIWQAGSFPITPERLPGWGGKTVLQAALGVKHGVLLTEDGEVYSFGTLPWRSGPVEICPSSPILDGAVTDNGVAYMWGENSAGQCAVANQQYVPEPNPVSIADSEASPLLAVRILQLACGEEHTLALSISREIWAWGTGCQLGLITTAFPVTKPQKVEHLAGRVVLQVACGAFHSLALVQCLPSQDLKPVPERCNQCSQLLITMTDKEDHVIISDSHCCPLGVTLTESQAENHASTALSPSTETLDRQEEVFENTLVANDQSVATELNAVSAQITSSDAMSSQQNVMGTTEISSARNIPSYPDTQAVNEYLRKLSDHSVREDSEHGEKPVPSQPLLEEAIPNLHSPPTTSTSALNSLVVSCASAVGVRVAATYEAGALSLKKVMNFYSTTPCETGAQAGSSAIGPEGLKDSREEQVKQESMQGKKSSSLVDIREEETEGGSRRLSLPGLLSQVSPRLLRKAARVKTRTVVLTPTYSGEADALLPSLRTEVWTWGKGKEGQLGHGDVLPRLQPLCVKCLDGKEVIHLEAGGYHSLALTAKSQVYSWGSNTFGQLGHSDFPTTVPRLAKISSENGVWSIAAGRDYSLFLVDTEDFQPGLYYSGRQDPTEGDNLPENHSGSKTPVLLSCSKLGYISRVTAGKDSYLALVDKNIMGYIASLHELATTERRFYSKLSDIKSQILRPLLSLENLGTTTTVQLLQEVASRFSKLCYLIGQHGASLSSFLHGVKEARSLVILKHSSLFLDSYTEYCTSITNFLVMGGFQLLAKPAIDFLNKNQELLQDLSEVNDENTQLMEILNTLFFLPIRRLHNYAKVLLKLATCFEVASPEYQKLQDSSSCYECLALHLGRKRKEAEYTLGFWKTFPGKMTDSLRKPERRLLCESSNRALSLQHAGRFSVNWFILFNDALVHAQFSTHHVFPLATLWAEPLSEEAGGVNGLKITTPEEQFTLISSTPQEKTKWLRAISQAVDQALRGMSDLPPYGSGSSVQRQEPPISRSAKYTFYKDPRLKDATYDGRWLSGKPHGRGVLKWPDGKMYSGMFRNGLEDGYGEYRIPNKAMNKEDHYVGHWKEGKMCGQGVYSYASGEVFEGCFQDNMRHGHGLLRSGKLTSSSPSMFIGQWVMDKKAGYGVFDDITRGEKYMGMWQDDVCQGNGVVVTQFGLYYEGNFHLNKMMGNGVLLSEDDTIYEGEFSDDWTLSGKGTLTMPNGDYIEGYFSGEWGSGIKITGTYFKPSLYESDKDRPKVFRKLGNLAVPADEKWKAVFDECWRQLGCEGPGQGEVWKAWDNIAVALTTSRRQHRDSPEILSRSQTQTLESLEFIPQHVGAFSVEKYDDIRKYLIKACDTPLHPLGRLVETLVAVYRMTYVGVGANRRLLQEAVKEIKSYLKRIFQLVRFLFPELPEEGSTIPLSAPLPTERKSFCTGKSDSRSESPEPGYVVTSSGLLLPVLLPRLYPPLFMLYALDNDREEDIYWECVLRLNKQPDIALLGFLGVQRKFWPATLSILGESKKVLPTTKDACFASAVECLQQISTTFTPSDKLKVIQQTFEEISQSVLASLHEDFLWSMDDLFPVFLYVVLRARIRNLGSEVHLIEDLMDPYLQHGEQGIMFTTLKACYYQIQREKLN

SEQ ID NO: 744956 - protein, 503 aa, Homo sapiens
ATTSTHGRIWCLDDITRGEKYMGMWQDDVCQGNGVVVTQFGLYYEGNFHLNKMMGNGVLLSEDDTIYEGEFSDDWTLSGKGTLTMPNGDYIEGYFSGEWGSGIKITGTYFKPSLYESDKDRPKVFRKLGNLAVPADEKWKAVFDECWRQLGCEGPGQGEVWKAWDNIAVALTTSRRQHRDSPEILSRSQTQTLESLEFIPQHVGAFSVEKYDDIRKYLIKACDTPLHPLGRLVETLVAVYRMTYVGVGANRRLLQEAVKEIKSYLKRIFQLVRFLFPELPEEGSTIPLSAPLPTERKSFCTGKSDSRSESPEPGYVVTSSGLLLPVLLPRLYPPLFMLYALDNDREEDIYWECVLRLNKQPDIALLGFLGVQRKFWPATLSILGESKKVLPTTKDACFASAVECLQQISTTFTPSDKLKVIQQTFEEISQSVLASLHEDFLWSMDDLFPVFLYVVLRARIRNLGSEVHLIEDLMDPYLQHGEQGIMFTTLKACYYQIQREKLN

SEQ ID NO: 744957 - protein, 812 aa, Homo sapiens
MDSKKRSSTEAEGSKERGLVHIWQAGSFPITPERLPGWGGKTVLQAALGVKHGVLLTEDGEVYSFGTLPWRSGPVEICPSSPILENALVGQYVITVATGSFHSGAVTDNGVAYMWGENSAGQCAVANQQYVPEPNPVSIADSEASPLLAVRILQLACGEEHTLALSISREIWAWGTGCQLGLITTAFPVTKPQKVEHLAGRVVLQVACGAFHSLALVQCLPSQDLKPVPERCNQCSQLLITMTDKEDHVIISDSHCCPLGVTLTESQAENHASTALSPSTETLDRQEEVFENTLVANDQSVATELNAVSAQITSSDAMSSQQNVMGTTEISSARNIPSYPDTQAVNEYLRKLSDHSVREDSEHGEKPVPSQPLLEEAIPNLHSPPTTSTSALNSLVVSCASAVGVRVAATYEAGALSLKKVMNFYSTTPCETGAQAGSSAIGPEGLKDSREEQVKQESMQGKKSSSLVDIREEETEGGSRRLSLPGLLSQVSPRLLRKAARVKTRTVVLTPTYSGEADALLPSLRTEVWTWGKGKEGQLGHGDVLPRLQPLCVKCLDGKEVIHLEAGGYHSLALTAKSQVYSWGSNTFGQLGHSDFPTTVPRLAKISSENGVWSIAAGRDYSLFLVDTEDFQPGLYYSGRQDPTEGDNLPENHSGSKTPVLLSCSKLGYISRVTAGKDSYLALVDKNIMGYIASLHELATTERRFYSKLSDIKSQILRPLLSLENLGTTTTVQLLQEVASRFSKLCYLIGQHGASLSSFLHGVKEARSLVILKHSSLFLDSYTEQVSSPVSCSISAGLFCQGEQLLNQKRLD

SEQ ID NO: 744958 - protein, 82 aa, Homo sapiens
QTPYERLRVVAMNTILDYLLLHSSFQKELATRFVKRIPAHVSDFLAQKAFLSCYITACVPHFFNRQVLLHKQKASSCNRWQS

SEQ ID NO: 744959 - protein, 98 aa, Homo sapiens
IDDTYLLLLLGPQFVLLGSSSYSCCGWLSAGCAYATSPPRKPQTPRPKQASLSRDISHMSLQFAAGRHILCGLGQDLCQTSLNLPMYIFFLLLLCSLL

SEQ ID NO: 744960 - protein, 914 aa, Homo sapiens
MVQRMWAEAAGPAGGAEPLFPGSRRSRSVWDAVRLEVGVPDSCPVVLHSFTQLDPDLPRPESSTQEIGEELINGVIYSISLRKVQLHHGGNKGQRWLGYENESALNLYETCKVRTVKAGTLEKLVEHLVPAFQGSDLSYVTIFLCTYRAFTTTQQVLDLLFKRYGRCDALTASSRYGCILPYSDEDGGPQDQLKNAISSILGTWLDQYSEDFCQPPDFPCLKQLVAYVQLNMPGSDLERRAHLLLAQLEHSEPIEAEPEALSPVPALKPTPELELALTPARAPSPVPAPAPEPEPAPTPAPGSELEVAPAPAPELQQAPEPAVGLESAPAPALELEPAPEQDPAPSQTLELEPAPAPVPSLQPSWPSPVVAENGLSEEKPHLLVFPPDLVAEQFTLMDAELFKKVVPYHCLGSIWSQRDKKGKEHLAPTIRATVTQFNSVANCVITTCLGNRSTKAPDRARVVEHWIEVARECRILKNFSSLYAILSALQSNSIHRLKKTWEDVSRDSFRIFQKLSEIFSDENNYSLSRELLIKEGTSKFATLEMNPKRAQKRPKETGIIQGTVPYLGTFLTDLVMLDTAMKDYLYGRLINFEKRRKEFEVIAQIKLLQSACNNYSIAPDEQFGAWFRAVERLSETESYNLSCELEPPSESASNTLRTKKNTAIVKRWSDRQAPSTELSTSGSSHSKSCDQLRCGPYLSSGDIADALSVHSAGSSSSDVEEINISFVPESPDGQEKKFWESASQSSPETSGISSASSSTSSSSASTTPVAATRTHKRSVSGLCNSSSALPLYNQQVGDCCIIRVSLDVDNGNMYKSILVTSQDKAPAVIRKAMDKHNLEEEEPEDYELLQILSDDRKLKIPENANVFYAMNSTANYDFVLKKRTFTKGVKVKHGASSTLPRMKQKGLKIAKGIF

SEQ ID NO: 744961 - protein, 105 aa, Homo sapiens
MARYEAVVAVTSQDKAPAVIRKAMDKHNLEEEEPEDYELLQILSDDRKLKIPENANVFYAMNSTANYDFVLKKRTFTKGVKVKHGASSTLPRMKQKGLKIAKGIF

SEQ ID NO: 744962 - protein, 105 aa, Homo sapiens
KIVIVRGRVVTSQDKAPAVIRKAMDKHNLEEEEPEDYELLQILSDDRKLKIPENANVFYAMNSTANYDFVLKKRTFTKGVKVKHGASSTLPRMKQKGLKIAKGIF

SEQ ID NO: 744963 - protein, 468 aa, Homo sapiens
MYAILSALQSNSIHRLKKTWEDVSRDSFRIFQKLSEIFSDENNYSLSRELLIKEGTSKFATLEMNPKRAQKRPKETGIIQGTVPYLGTFLTDLVMLDTAMKDYLYGRLINFEKRRKEFEVIAQIKLLQSACNNYSIAPDEQFGAWFRAVERLSETESYNLSCELEPPSESASNTLRTKKNTAIVKRWSDRQAPSTELSTSGSSHSKSCDQLRCGPYLSSGDIADALSVHSAGSSSSDVEEINISFVPESPDGQEKKVTACPSPQYPFPSPHSKSMHGARKPWILNTASRRFPIWQLAWGAPTGQWDLLILPSPSVLGISLTVIPGDLRHQLSLQQHLVLLSLHHARGCHTHPQALCLRALQLQLRAAALQPAGGRLLYHPRQPGRGQWQHVQEHPGKPAGVAWVPPSTGGKCTLNTVHHPCPSGVYLVVGGEGQMSARYRNEEGSDQGQGWPEGRGGGKEQPCKAPRS

SEQ ID NO: 744964 - protein, 433 aa, Homo sapiens
MYAILSALQSNSIHRLKKTWEDVSRDSFRIFQKLSEIFSDENNYSLSRELLIKEGTSKFATLEMNPKRAQKRPKETGIIQGTVPYLGTFLTDLVMLDTAMKDYLYGRLINFEKRRKEFEVIAQIKLLQSACNNYSIAPDEQFGAWFRAVERLSETESYNLSCELEPPSESASNTLRTKKNTAIVKRWSDRQAPSTELSTSGSSHSKSCDQLRCGPYLSSGDIADALSVHSAGSSSSDVEEINISFVPESPDGQEKKFWESASQSSPETSGISSASSSTSSSSASTTPVAATRTHKRSVSGLCNSSSALPLYNQQVGDCCIIRVSLDVDNGNMYKSILVTSQDKAPAVIRKAMDKHNLEEEEPEDYELLQILSDDRKLKIPENANVFYAMNSTANYDFVLKKRTFTKGVKVKHGASSTLPRMKQKGLKIAKGIF

SEQ ID NO: 744965 - protein, 952 aa, Homo sapiens
EPSMVQRMWAEAAGPAGGAEPLFPGSRRSRSVWDAVRLEVGVPDSCPVVLHSFTQLDPDLPRPESSTQEIGEELINGVIYSISLRKVQLHHGGNKGQRWLGYENESALNLYETCKVRTVKAGTLEKLVEHLVPAFQGSDLSYVTIFLCTYRAFTTTQQVLDLLFKRYGRCDALTASSRYGCILPYSDEDGGPQDQLKNAISSILGTWLDQYSEDFCQPPDFPCLKQLVAYVQLNMPGSDLERRAHLLLAQLEHSEPIEAEPEALSPVPALKPTPELELALTPARAPSPVPAPAPEPEPAPTPAPGSELEVAPAPAPELQQAPEPAVGLESAPAPALELEPAPEQDPAPSQTLELEPAPAPVPSLQPSWPSPVVAENGLSEEKPHLLVFPPDLVAEQFTLMDAELFKKVVPYHCLGSIWSQRDKKGKEHLAPTIRATVTQFNSVANCVITTCLGNRSTKAPDRARVVEHWIEVARECRILKNFSSLYAILSALQSNSIHRLKKTWEDVSRDSFRIFQKLSEIFSDENNYSLSRELLIKEGTSKFATLEMNPKRAQKRPKETGIIQGTVPYLGTFLTDLVMLDTAMKDYLYGRLINFEKRRKEFEVIAQIKLLQSACNNYSIAPDEQFGAWFRAVERLSETESYNLSCELEPPSESASNTLRTKKNTAIVKRWSDRQAPSTELSTSGSSHSKSCDQLRCGPYLSSGDIADALSVHSAGSSSSDVEEINISFVPESPDGQEKKVTACPSPQYPFPSPHSKSMHGARKPWILNTASRRFPIWQLAWGAPTGQWDLLILPSPSVLGISLTVIPGDLRHQLSLQQHLVLLSLHHARGCHTHPQALCLRALQLQLRAAALQPAGGRLLYHPRQPGRGQWQHVQEHPGKPAGVAWVPPSTGGKCTLNTVHHPCPSGVYLVVGGEGQMSARYRNEEGSDQGQGWPEGRGGGKEQPCKAPRS

SEQ ID NO: 744966 - protein, 832 aa, Homo sapiens
MYAILSALQSNSIHRLKKTWEDVSRDSFRIFQKLSEIFSDENNYSLSRELLIKEGTSKFATLEMNPKRAQKRPKETGIIQGTVPYLGTFLTDLVMLDTAMKDYLYGRLINFEKRRKEFEVIAQIKLLQSACNNYSIAPDEQFGAWFRAVERLSETESYNLSCELEPPSESASNTLRTKKNTAIVKRWSDRQAPSTELSTSGSSHSKSCDQLRCGPYLSSGDIADALSVHSAGSSSSDVEEINISFVPESPDGQEKKVTACPSPQYPFPSPHSKSMHGARKPWILNTASRRFPIWQLAWGAPTGQWDLLILPSPSVLGISLTVIPGDLRHQLSLQQHLVLLSLHHARGCHTHPQALCLRALQLQLRAAALQPAGGRLLYHPRQPGRGQWQHVQEHPGKPAGVAWVPPSTGGKCTLNTVHHPCPSGVYLVVGGEGQMSARYRNEEGSDQGQGWPEGRGGGKEQPCKAPRSRRGCAVGEVRSGKYPGPGHIGPEPCQDLDFLGEEDRSNDGWLLCLAWAGTRAAGVLVRRPLWQPGWEPWKGPAGSESRQDLETADGNCSQNGFAWGLFLHPPGVLRQMNHFNPHPLYPSPGSGAPLFTHAPDPSLPGASMVVIKQSPVALCPSSACALALRVKVAGAWPMLTTLSILAGPSFLTSRAWTRDCLFPRLSDAVILEGQVLLKEVWEEGTVSYRRSRVGTAGTDPSSFLEASHGEQKDGGLTWGVGECDKALSGPSTWPEAVTSQDKAPAVIRKAMDKHNLEEEEPEDYELLQILSDDRKLKIPENANVFYAMNSTANYDFVLKKRTFTKGVKVKHGASSTLPRMKQKGLKIAKGIF

SEQ ID NO: 744967 - protein, 403 aa, Homo sapiens
MVLILGRRLNREDLGVRDSPATKRKVFEMDPKSLTGHEFFDFSSGSSHAENILQIFNEFRDSRLFTDVIICVEGKEFPCHRAVLSACSSYFRAMFCNDHRESREMLVEINGILAEAMECFLQYVYTGKVKITTENVQYLFETSSLFQISVLRDACAKFLEEQLDPCNCLGIQRFADTHSLKTLFTKCKNFALQTFEDVSQHEEFLELDKDEVYVVGGYDGQNRLSSVECYDSFSNRWTEVAPLKEAVSSPAVTSCVGKLFVIGGGPDDNTCSDKVQSYDPETNSWLLRAAIPIAKRCITAVSLNNLIYVAGGLTKAIYCYDPVEDYWMHVQNTFSRQENCGMSVCNGKIYILGGRRENGEATDTILCYDPATSIITGVAAMPRPVSYHGCVTIHRYNEKCFKL

SEQ ID NO: 744968 - protein, 135 aa, Homo sapiens
GRYPRESSSFYWRVFMVTRWACPWAILPVPGEPGRAGERAFRRRSPRLTSPPSYHSRTQFLNLVPNGPALKFWTPRVKTVNAAGAGGARSRPCCGRLVASVAAAALLLPDPAGSSGHAEIGYRGLPSEDRKINTL

SEQ ID NO: 744969 - protein, 120 aa, Homo sapiens
GFSLGSLHKRHFFNCLCLKQGVFESAALWVGLVLLGTRHPPHGGSPRWPRRPPGSVNYISQGSPGRRTPTRIGQGSLTLSVLARTVTCFLCCELRQRLVAGGDAGAGECAAPPAAEGPRG

SEQ ID NO: 744970 - protein, 600 aa, Homo sapiens
MVLILGRRLNREDLGVRDSPATKRKVFEMDPKSLTGHEFFDFSSGSSHAENILQIFNEFRDSRLFTDVIICVEGKEFPCHRAVLSACSSYFRAMFCNDHRESREMLVEINGILAEAMECFLQYVYTGKVKITTENVQYLFETSSLFQISVLRDACAKFLEEQLDPCNCLGIQRFADTHSLKTLFTKCKNFALQTFEDVSQHEEFLELDKDELIDYICSDELVIGKEEMVFEAVMRWVYRAVDLRRPLLHELLTHVRLPLLHPNYFVQTVEVDQLIQNSPECYQLLHEARRYHILGNEMMSPRTRPRRSTGYSEVIVVVGGCERVGGFNLPYTECYDPVTGEWKSLAKLPEFTKSEYAVCALRNDILVSGGRINSRDVWIYNSQLNIWIRVASLNKGRWRHKMAVLLGKVYVVGGYDGQNRLSSVECYDSFSNRWTEVAPLKEAVSSPAVTSCVGKLFVIGGGPDDNTCSDKVQSYDPETNSWLLRAAIPIAKRCITAVSLNNLIYVAGGLTKAIYCYDPVEDYWMHVQNTFSRQENCGMSVCNGKIYILGGRRENGEATDTILCYDPATSIITGVAAMPRPVSYHGCVTIHRYNEKCFKL

SEQ ID NO: 744971 - protein, 199 aa, Homo sapiens
MAVLLGKVYVVGGYDGQNRLSSVECYDSFSNRWTEVAPLKEAVSSPAVTSCVGKLFVIGGGPDDNTCSDKVQSYDPETNSWLLRAAIPIAKRCITAVSLNNLIYVAGGLTKAIYCYDPVEDYWMHVQNTFSRQENCGMSVCNGKIYILGGRRENGEATDTILCYDPATSIITGVAAMPRPVSYHGCVTIHRYNEKCFKL

SEQ ID NO: 744972 - protein, 537 aa, Homo sapiens
MVLILGRRLNREDLGVRDSPATKRKVFEMDPKSLTGHEFFDFSSGSSHAENILQIFNEFRDSRLFTDVIICVEGKEFPCHRAVLSACSSYFRAMFCNDHRESREMLVEINGILAEAMECFLQYVYTGKVKITTENVQYLFETSSLFQISVLRDACAKFLEEQLDPCNCLGIQRFADTHSLKTLFTKCKNFALQTFEDVSQHEEFLELDKDELIDYICSDELVIGKEEMVFEAVMRWVYRAVDLRRPLLHELLTHVRLPLLHPNYFVQTVEVDQLIQNSPECYQLLHEARRYHILGNEMMSPRTRPRRSTGYSEVIVVVGGCERVGGFNLPYTECYDPVTGEWKSLAKLPEFTKSEYAVCALRNDILVSGGRINSRDVWIYNSQLNIWIRVASLNKGRWRHKMAVLLGKVYVVGGYDGQNRLSSVECYDSFSNRWTEVAPLKEAVSSPAVTSCVGKLFVIGGGPDDNTCSDKVQSYDPETNSWLLRAAIPIAKRCITAVSLNNLIYVAGGLTKAIYCYDPVEDYWMHVQNTFSRQVIT

SEQ ID NO: 744973 - protein, 600 aa, Homo sapiens; identical to SEQ ID NO: 744970

SEQ ID NO: 744974 - protein, 227 aa, Homo sapiens
MVLILGRRLNREDLGVRDSPATKRKVFEMDPKSLTGHEFFDFSSGSSHAENILQIFNEFRDSRLFTDVIICVEGKEFPCHRAVLSACSSYFRAMFCNDHRESREMLVEINGILAEAMECFLQYVYTGKVKITTENVQYLFETSSLFQISVLRDACAKFLEEQLDPCNCLGIQRFADTHSLKTLFTKCKNFALQTFEDVSQHEEFLELDKDELIDYICSDEGFSSCYF

SEQ ID NO: 744975 - protein, 30 aa, Homo sapiens
MGCERGAAFYFRKPGGVRPPQIQPSCLVGR

SEQ ID NO: 744976 - protein, 108 aa, Homo sapiens
LQPFEEPRPGRSLSQGCDFLFGDLWCLGSPSLWATPHSPVPAMEAACGVPSPAAASQRAGTPAGTWSCLPHSSSQCVGAVAESHACSHTPCCSTPDSQSPLEVWDLGW

SEQ ID NO: 744977 - protein, 1566 aa, Homo sapiens
GVGAAPSRGRGLCAGLAPDPSHRPAASASPDSPPGDPEAPTSSEMSRNDKEPFFVKFLKSSDNSKCFFKALESIKEFQSEEYLQIITEEEALKIKENDRSLYICDPFSGVVFDHLKKLGCRIVGPQVVIFCMHHQRCVPRAEHPVYNMVMSDVTISCTSLEKEKREEVHKYVQMMGGRVYRDLNVSVTHLIAGEVGSKKYLVAANLKKPILLPSWIKTLWEKSQEKKITRYTDINMEDFKCPIFLGCIICVTGLCGLDRKEVQQLTVKHGGQYMGQLKMNECTHLIVQEPKGQKYECAKRWNVHCVTTQWFFDSIEKGFCQDESIYKTEPRPEAKTMPNSSTPTSQINTIDSRTLSDVSNISNINASCVSESICNSLNSKLEPTLENLENLDVSAFQAPEDLLDGCRIYLCGFSGRKLDKLRRLINSGGGVRFNQLNEDVTHVIVGDYDDELKQFWNKSAHRPHVVGAKWLLECFSKGYMLSEEPYIHANYQPVEIPVSHQPESKAALLKKKNSSFSKKDFAPSEKHEQADEDLLSQYENGSSTVVEAKTSEARPFNDSTHAEPLNDSTHISLQEENQSSVSHCVPDVSTITEEGLFSQKSFLVLGFSNENESNIANIIKENAGKIMSLLSRTVADYAVVPLLGCEVEATVGEVVTNTWLVTCIDYQTLFDPKSNPLFTPVPVMTGMTPLEDCVISFSQCAGAEKESLTFLANLLGASVQEYFVRKSNAKKGMFASTHLILKERGGSKYEAAKKWNLPAVTIAWLLETARTGKRADESHFLIENSTKEERSLETEITNGINLNSDTAEHPGTRLQTHRKTVVTPLDMNRFQSKAFRAVVSQHARQVAASPAVGQPLQKEPSLHLDTPSKFLSKDKLFKPSFDVKDALAALETPGRPSQQKRKPSTPLSEVIVKNLQLALANSSRNAVALSASPQLKEAQSEKEEAPKPLHKVVVCVSKKLSKKQSELNGIAASLGADYRWSFDETVTHFIYQGRPNDTNREYKSVKERGVHIVSEHWLLDCAQECKHLPESLYPHTYNPKMSLDISAVQDGRLCNSRLLSAVSSTKDDEPDPLILEENDVDNMATNNKESAPSNGSGKNDSKGVLTQTLEMRENFQKQLQEIMSATSIVKPQGQRTSLSRSGCNSASSTPDSTRSARSGRSRVLEALRQSRQTVPDVNTEPSQNEQIIWDDPTAREERARLASNLQWPSCPTQYSELQVDIQNLEDSPFQKPLHDSEIAKQAVCDPGNIRVTEAPKHPISEELETPIKDSHLIPTPQAPSIAFPLANPPVAPHPREKIITIEETHEELKKQYIFQLSSLNPQERIDYCHLIEKLGGLVIEKQCFDPTCTHIVVGHPLRNEKYLASVAAGKWVLHRSYLEACRTAGHFVQEEDYEWGSSSILDVLTGINVQQRRLALAAMRWRKKIQQRQESGIVEGAFSGWKVILHVDQSREAGFKRLLQSGGAKVLPGHSVPLFKEATHLFSDLNKLKPDDSGVNIAEAAAQNVYCLRTEYIADYLMQESPPHVENYCLPEAISFIQNNKELGTGLSQKRKAPTEKNKIKRPRVH

SEQ ID NO: 744978 - protein, 1259 aa, Homo sapiens
GVGAAPSRGRGLCAGLAPDPSHRPAASASPDSPPGDPEAPTSSEMSRNDKEPFFVKFLKSSDNSKCFFKALESIKEFQSEEYLQIITEEEALKIKENDRSLYICDPFSGVVFDHLKKLGCRIVGPQVVIFCMHHQRCVPRAEHPVYNMVMSDVTISCTSLEKEKREEVHKYVQMMGGRVYRDLNVSVTHLIAGEVGSKKYLVAANLKKPILLPSWIKTLWEKSQEKKITRYTDINMEDFKCPIFLGCIICVTGLCGLDRKEVQQLTVKHGGQYMGQLKMNECTHLIVQEPKGQKYECAKRWNVHCVTTQWFFDSIEKGFCQDESIYKTEPRPEAKTMPNSSTPTSQINTIDSRTLSDVSNISNINASCVSESICNSLNSKLEPTLENLENLDVSAFQAPEDLLDGCRIYLCGFSGRKLDKLRRLINSGGGVRFNQLNEDVTHVIVGDYDDELKQFWNKSAHRPHVVGAKWLLECFSKGYMLSEEPYIHANYQPVEIPVSHQPESKAALLKKKNSSFSKKDFAPSEKHEQADEDLLSQYENGSSTVVEAKTSEARPFNDSTHAEPLNDSTHISLQEENQSSVSHCVPDVSTITEEGLFSQKSFLVLGFSNENESNIANIIKENAGKIMSLLSRTVADYAVVPLLGCEVEATVGEVVTNTWLVTCIDYQTLFDPKSNPLFTPVPVMTGMTPLEDCVISFSQCAGAEKESLTFLANLLGASVQEYFVRKSNAKKGMFASTHLILKERGGSKYEAAKKWNLPAVTIAWLLETARTGKRADESHFLIENSTKEERSLETEITNGINLNSDTAEHPGTRLQTHRKTVVTPLDMNRFQSKAFRAVVSQHARQVAASPAVGQPLQKEPSLHLDTPSKFLSKDKLFKPSFDVKDALAALETPGRPSQQKRKPSTPLSEVIVKNLQLALANSSRNAVALSASPQLKEAQSEKEEAPKPLHKVVVCVSKKLSKKQSELNGIAASLGADYRWSFDETVTHFIYQGRPNDTNREYKSVKERGVHIVSEHWLLDCAQECKHLPESLYPHTYNPKMSLDISAVQDGRLCNSRLLSAVSSTKDDEPDPLILEENDVDNMATNNKESAPSNGSGKNDSKGVLTQTLEMRENFQKQLQEIMSATSIVKPQGQRTSLSRSGCNSASSTPDSTRSARSGRSRVLEALRQSRQTVPDVNTEPSQNEQIIWDDPTAREERARLASNLQWPSCPTQYSELQVDIQNLEDSPFQKPLHDSEIAKQGNKKEIFAFVCIKYMLTS

SEQ ID NO: 744979 - protein, 1112 aa, Homo sapiens
MVMSDVTISCTSLEKEKREEVHKYVQMMGGRVYRDLNVSVTHLIAGEVGSKKYLVAANLKKPILLPSWIKTLWEKSQEKKITRYTDINMEDFKCPIFLGCIICVTGLCGLDRKEVQQLTVKHGGQYMGQLKMNECTHLIVQEPKGQKYECAKRWNVHCVTTQWFFDSIEKGFCQDESIYKTEPRPEAKTMPNSSTPTSQINTIDSRTLSDVSNISNINASCVSESICNSLNSKLEPTLENLENLDVSAFQAPEDLLDGCRIYLCGFSGRKLDKLRRLINSGGGVRFNQLNEDVTHVIVGDYDDELKQFWNKSAHRPHVVGAKWLLECFSKGYMLSEEPYIHANYQPVEIPVSHQPESKAALLKKKNSSFSKKDFAPSEKHEQADEDLLSQYENGSSTVVEAKTSEARPFNDSTHAEPLNDSTHISLQEENQSSVSHCVPDVSTITEEGLFSQKSFLVLGFSNENESNIANIIKENAGKIMSLLSRTVADYAVVPLLGCEVEATVGEVVTNTWLVTCIDYQTLFDPKSNPLFTPVPVMTGMTPLEDCVISFSQCAGAEKESLTFLANLLGASVQEYFVRKSNAKKGMFASTHLILKERGGSKYEAAKKWNLPAVTIAWLLETARTGKRADESHFLIENSTKEERSLETEITNGINLNSDTAEHPGTRLQTHRKTVVTPLDMNRFQSKAFRAVVSQHARQVAASPAVGQPLQKEPSLHLDTPSKFLSKDKLFKPSFDVKDALAALETPGRPSQQKRKPSTPLSEVIVKNLQLALANSSRNAVALSASPQLKEAQSEKEEAPKPLHKVVVCVSKKLSKKQSELNGIAASLGADYRWSFDETVTHFIYQGRPNDTNREYKSVKERGVHIVSEHWLLDCAQECKHLPESLYPHTYNPKMSLDISAVQDGRLCNSRLLSAVSSTKDDEPDPLILEENDVDNMATNNKESAPSNGSGKNDSKGVLTQTLEMRENFQKQLQEIMSATSIVKPQGQRTSLSRSGCNSASSTPDSTRSARSGRSRVLEALRQSRQTVPDVNTEPSQNEQIIWDDPTAREERARLASNLQWPSCPTQYSELQVDIQNLEDSPFQKPLHDSEIAKQGNKKEIFAFVCIKYMLTS

SEQ ID NO: 744980 - protein, 1086 aa, Homo sapiens
MMGGRVYRDLNVSVTHLIAGEVGSKKYLVAANLKKPILLPSWIKTLWEKSQEKKITRYTDINMEDFKCPIFLGCIICVTGLCGLDRKEVQQLTVKHGGQYMGQLKMNECTHLIVQEPKGQKYECAKRWNVHCVTTQWFFDSIEKGFCQDESIYKTEPRPEAKTMPNSSTPTSQINTIDSRTLSDVSNISNINASCVSESICNSLNSKLEPTLENLENLDVSAFQAPEDLLDGCRIYLCGFSGRKLDKLRRLINSGGGVRFNQLNEDVTHVIVGDYDDELKQFWNKSAHRPHVVGAKWLLECFSKGYMLSEEPYIHANYQPVEIPVSHQPESKAALLKKKNSSFSKKDFAPSEKHEQADEDLLSQYENGSSTVVEAKTSEARPFNDSTHAEPLNDSTHISLQEENQSSVSHCVPDVSTITEEGLFSQKSFLVLGFSNENESNIANIIKENAGKIMSLLSRTVADYAVVPLLGCEVEATVGEVVTNTWLVTCIDYQTLFDPKSNPLFTPVPVMTGMTPLEDCVISFSQCAGAEKESLTFLANLLGASVQEYFVRKSNAKKGMFASTHLILKERGGSKYEAAKKWNLPAVTIAWLLETARTGKRADESHFLIENSTKEERSLETEITNGINLNSDTAEHPGTRLQTHRKTVVTPLDMNRFQSKAFRAVVSQHARQVAASPAVGQPLQKEPSLHLDTPSKFLSKDKLFKPSFDVKDALAALETPGRPSQQKRKPSTPLSEVIVKNLQLALANSSRNAVALSASPQLKEAQSEKEEAPKPLHKVVVCVSKKLSKKQSELNGIAASLGADYRWSFDETVTHFIYQGRPNDTNREYKSVKERGVHIVSEHWLLDCAQECKHLPESLYPHTYNPKMSLDISAVQDGRLCNSRLLSAVSSTKDDEPDPLILEENDVDNMATNNKESAPSNGSGKNDSKGVLTQTLEMRENFQKQLQEIMSATSIVKPQGQRTSLSRSGCNSASSTPDSTRSARSGRSRVLEALRQSRQTVPDVNTEPSQNEQIIWDDPTAREERARLASNLQWPSCPTQYSELQVDIQNLEDSPFQKPLHDSEIAKQGNKKEIFAFVCIKYMLTS

SEQ ID NO: 744981 - protein, 830 aa, Homo sapiens
FLWALVREVDVTHVIVGDYDDELKQFWNKSAHRPHVVGAKWLLECFSKGYMLSEEPYIHANYQPVEIPVSHQPESKAALLKKKNSSFSKKDFAPSEKHEQADEDLLSQYENGSSTVVEAKTSEARPFNDSTHAEPLNDSTHISLQEENQSSVSHCVPDVSTITEEGLFSQKSFLVLGFSNENESNIANIIKENAGKIMSLLSRTVADYAVVPLLGCEVEATVGEVVTNTWLVTCIDYQTLFDPKSNPLFTPVPVMTGMTPLEDCVISFSQCAGAEKESLTFLANLLGASVQEYFVRKSNAKKGMFASTHLILKERGGSKYEAAKKWNLPAVTIAWLLETARTGKRADESHFLIENSTKEERSLETEITNGINLNSDTAEHPGTRLQTHRKTVVTPLDMNRFQSKAFRAVVSQHARQVAASPAVGQPLQKEPSLHLDTPSKFLSKDKLFKPSFDVKDALAALETPGRPSQQKRKPSTPLSEVIVKNLQLALANSSRNAVALSASPQLKEAQSEKEEAPKPLHKVVVCVSKKLSKKQSELNGIAASLGADYRWSFDETVTHFIYQGRPNDTNREYKSVKERGVHIVSEHWLLDCAQECKHLPESLYPHTYNPKMSLDISAVQDGRLCNSRLLSAVSSTKDDEPDPLILEENDVDNMATNNKESAPSNGSGKNDSKGVLTQTLEMRENFQKQLQEIMSATSIVKPQGQRTSLSRSGCNSASSTPDSTRSARSGRSRVLEALRQSRQTVPDVNTEPSQNEQIIWDDPTAREERARLASNLQWPSCPTQYSELQVDIQNLEDSPFQKPLHDSEIAKQGNKKEIFAFVCIKYMLTS

SEQ ID NO: 744982 - protein, 957 aa, Homo sapiens
GVGAAPSRGRGLCAGLAPDPSHRPAASASPDSPPGDPEAPTSSEMSRNDKEPFFVKFLKSSDNSKCFFKALESIKEFQSEEYLQIITEEEALKIKENDRSLYICDPFSGVVFDHLKKLGCRIVGPQVVIFCMHHQRCVPRAEHPVYNMVMSDVTISCTSLEKEKREEVHKYVQMMGGRVYRDLNVSVTHLIAGEVGSKKYLVAANLKKPILLPSWIKTLWEKSQEKKITRYTDINMEDFKCPIFLGCIICVTGLCGLDRKEVQQLTVKHGGQYMGQLKMNECTHLIVQEPKGQKYECAKRWNVHCVTTQWFFDSIEKGFCQDESIYKTEPRPEAKTMPNSSTPTSQINTIDSRTLSDVSNISNINASCVSESICNSLNSKLEPTLENLENLDVSAFQAPEDLLDGCRIYLCGFSGRKLDKLRRLINSGGGVRFNQLNEDVTHVIVGDYDDELKQFWNKSAHRPHVVGAKWLLECFSKGYMLSEEPYIHANYQPVEIPVSHQPESKAALLKKKNSSFSKKDFAPSEKHEQADEDLLSQYENGSSSSSSPAVGQPLQKEPSLHLDTPSKFLSKDKLFKPSFDVKDALAALETPGRPSQQKRKPSTPLSEVIVKNLQLALANSSRNAVALSASPQLKEAQSEKEEAPKPLHKVVVCVSKKLSKKQSELNGIAASLGADYRWSFDETVTHFIYQGRPNDTNREYKSVKERGVHIVSEHWLLDCAQECKHLPESLYPHTYNPKMSLDISAVQDGRLCNSRLLSAVSSTKDDEPDPLILEENDVDNMATNNKESAPSNGSGKNDSKGVLTQTLEMRENFQKQLQEIMSATSIVKPQGQRTSLSRSGCNSASSTPDSTRSARSGRSRVLEALRQSRQTVPDVNTEPSQNEQIIWDDPTAREERARLASNLQWPSCPTQYSELQVDIQNLEDSPFQKPLHDSEIAKQGNKKEIFAFVCIKYMLTS

SEQ ID NO: 744983 - protein, 604 aa, Homo sapiens
STVGGLEYPRRAVADYRWSFDETVTHFIYQGRPNDTNREYKSVKERGVHIVSEHWLLDCAQECKHLPESLYPHTYNPKMSLDISAVQDGRLCNSRLLSAVSSTKDDEPDPLILEENDVDNMATNNKESAPSNGSGKNDSKGVLTQTLEMRENFQKQLQEIMSATSIVKPQGQRTSLSRSGCNSASSTPDSTRSARSGRSRVLEALRQSRQTVPDVNTEPSQNEQIIWDDPTAREERARLASNLQWPSCPTQYSELQVDIQNLEDSPFQKPLHDSEIAKQAVCDPGNIRVTEAPKHPISEELETPIKDSHLIPTPQAPSIAFPLANPPVAPHPREKIITIEETHEELKKQYIFQLSSLNPQERIDYCHLIEKLGGLVIEKQCFDPTCTHIVVGHPLRNEKYLASVAAGKWVLHRSYLEACRTAGHFVQEEDYEWGSSSILDVLTGINVQQRRLALAAMRWRKKIQQRQESGIVEGAFSGWKVILHVDQSREAGFKRLLQSGGAKVLPGHSVPLFKEATHLFSDLNKLKPDDSGVNIAEAAAQNVYCLRTEYIADYLMQESPPHVENYCLPEAISFIQNNKELGTGLSQKRKAPTEKNKIKRPRVH

SEQ ID NO: 744984 - protein, 1259 aa, Homo sapiens; identical to SEQ ID NO: 744978

SEQ ID NO: 744985 - protein, 1259 aa, Homo sapiens; identical to SEQ ID NO: 744978

SEQ ID NO: 744986 - protein, 1259 aa, Homo sapiens; identical to SEQ ID NO: 744978

SEQ ID NO: 744987 - protein, 1259 aa, Homo sapiens; identical to SEQ ID NO: 744978

SEQ ID NO: 744988 - protein, 1259 aa, Homo sapiens; identical to SEQ ID NO: 744978

SEQ ID NO: 744989 - protein, 1259 aa, Homo sapiens; identical to SEQ ID NO: 744978

SEQ ID NO: 744990 - protein, 1259 aa, Homo sapiens; identical to SEQ ID NO: 744978

SEQ ID NO: 744991 - protein, 1259 aa, Homo sapiens; identical to SEQ ID NO: 744978

SEQ ID NO: 744992 - protein, 1281 aa, Homo sapiens
GVGAAPSRGRGLCAGLAPDPSHRPAASASPDSPPGDPEAPTSSEMSRNDKEPFFVKFLKSSDNSKCFFKALESIKEFQSEEYLQIITEEEALKIKENDRSLYICDPFSGVVFDHLKKLGCRIVGPQVVIFCMHHQRCVPRAEHPVYNMVMSDVTISCTSLEKEKREEVHKYVQMMGGRVYRDLNVSVTHLIAGEVGSKKYLVAANLKKPILLPSWIKTLWEKSQEKKITRYTDINMEDFKCPIFLGCIICVTGLCGLDRKEVQQLTVKHGGQYMGQLKMNECTHLIVQEPKGQKYECAKRWNVHCVTTQWFFDSIEKGFCQDESIYKTEPRPEAKTMPNSSTPTSQINTIDSRTLSDVSNISNINASCVSESICNSLNSKLEPTLENLENLDVSAFQAPEDLLDGCRIYLCGFSGRKLDKLRRLINSGGGVRFNQLNEDVTHVIVGDYDDELKQFWNKSAHRPHVVGAKWLLECFSKGYMLSEEPYIHANYQPVEIPVSHQPESKAALLKKKNSSFSKKDFAPSEKHEQADEDLLSQYENGSSTVVEAKTSEARPFNDSTHAEPLNDSTHISLQEENQSSVSHCVPDVSTITEEGLFSQKSFLVLGFSNENESNIANIIKENAGKIMSLLSRTVADYAVVPLLGCEVEATVGEVVTNTWLVTCIDYQTLFDPKSNPLFTPVPVMTGMTPLEDCVISFSQCAGAEKESLTFLANLLGASVQEYFVRKSNAKKGMFASTHLILKERGGSKYEAAKKWNLPAVTIAWLLETARTGKRADESHFLIENSTKEERSLETEITNGINLNSDTAEHPGTRLQTHRKTVVTPLDMNRFQSKAFRAVVSQHARQVAASPAVGQPLQKEPSLHLDTPSKFLSKDKLFKPSFDVKDALAALETPGRPSQQKRKPSTPLSEVIVKNLQLALANSSRNAVALSASPQLKEAQSEKEEAPKPLHKVVVCVSKKLSKKQSELNGIAASLGADYRWSFDETVTHFIYQGRPNDTNREYKSVKERGVHIVSEHWLLDCAQECKHLPESLYPHTYNPKMSLDISAVQDGRLCNSRLLSAVSSTKDDEPDPLILEENDVDNMATNNKESAPSNGSGKNDSKGVLTQTLEMRENFQKQLQEIMSATSIVKPQGQRTSLSRSGCNSASSTPDSTRSARSGRSRVLEALRQSRQTVPDVNTEPSQNEQIIWDDPTAREERARLASNLQWPSCPTQYSELQVDIQNLEDSPFQKPLHDSEIAKQAVCDPGNIRVTEAPKHPISEELETPIKDSHLIPSFKTEKK

SEQ ID NO: 744993 - protein, 979 aa, Homo sapiens
GVGAAPSRGRGLCAGLAPDPSHRPAASASPDSPPGDPEAPTSSEMSRNDKEPFFVKFLKSSDNSKCFFKALESIKEFQSEEYLQIITEEEALKIKENDRSLYICDPFSGVVFDHLKKLGCRIVGPQVVIFCMHHQRCVPRAEHPVYNMVMSDVTISCTSLEKEKREEVHKYVQMMGGRVYRDLNVSVTHLIAGEVGSKKYLVAANLKKPILLPSWIKTLWEKSQEKKITRYTDINMEDFKCPIFLGCIICVTGLCGLDRKEVQQLTVKHGGQYMGQLKMNECTHLIVQEPKGQKYECAKRWNVHCVTTQWFFDSIEKGFCQDESIYKTEPRPEAKTMPNSSTPTSQINTIDSRTLSDVSNISNINASCVSESICNSLNSKLEPTLENLENLDVSAFQAPEDLLDGCRIYLCGFSGRKLDKLRRLINSGGGVRFNQLNEDVTHVIVGDYDDELKQFWNKSAHRPHVVGAKWLLECFSKGYMLSEEPYIHANYQPVEIPVSHQPESKAALLKKKNSSFSKKDFAPSEKHEQADEDLLSQYENGSSTVVEAKTSEARPFNDSTHAEPLNDSTHISLQEENQSSVSHCVPDVSTITEEGLFSQKSFLVLGFSNENESNIANIIKENAGKIMSLLSRTVADYAVVPLLGCEVEATVGEVVTNTWLVTCIDYQTLFDPKSNPLFTPVPVMTGMTPLEDCVISFSQCAGAEKESLTFLANLLGASVQEYFVRKSNAKKGMFASTHLILKERGGSKYEAAKKWNLPAVTIAWLLETARTGKRADESHFLIENSTKEERSLETEITNGINLNSDTAEHPGTRLQTHRKTVVTPLDMNRFQSKAFRAVVSQHARQVAASPAVGQPLQKEPSLHLDTPSKFLSKDKLFKPSFDVKDALAALETPGRPSQQKRKPSTPLSEVIVKNLQLALANSSRNAVALSASPQLKEAQSEKEEAPKPLHKVVVCVSKKLSKKQSELNGIAASLGADYR

SEQ ID NO: 744994 - protein, 970 aa, Homo sapiens
GVGAAPSRGRGLCAGLAPDPSHRPAASASPDSPPGDPEAPTSSEMSRNDKEPFFVKFLKSSDNSKCFFKALESIKEFQSEEYLQIITEEEALKIKENDRSLYICDPFSGVVFDHLKKLGCRIVGPQVVIFCMHHQRCVPRAEHPVYNMVMSDVTISCTSLEKEKREEVHKYVQMMGGRVYRDLNVSVTHLIAGEVGSKKYLVAANLKKPILLPSWIKTLWEKSQEKKITRYTDINMEDFKCPIFLGCIICVTGLCGLDRKEVQQLTVKHGGQYMGQLKMNECTHLIVQEPKGQKYECAKRWNVHCVTTQWFFDSIEKGFCQDESIYKTEPRPEAKTMPNSSTPTSQINTIDSRTLSDVSNISNINASCVSESICNSLNSKLEPTLENLENLDVSAFQAPEDLLDGCRIYLCGFSGRKLDKLRRLINSGGGVRFNQLNEDVTHVIVGDYDDELKQFWNKSAHRPHVVGAKWLLECFSKGYMLSEEPYIHANYQPVEIPVSHQPESKAALLKKKNSSFSKKDFAPSEKHEQADEDLLSQYENGSSTVVEAKTSEARPFNDSTHAEPLNDSTHISLQEENQSSVSHCVPDVSTITEEGLFSQKSFLVLGFSNENESNIANIIKENAGKIMSLLSRTVADYAVVPLLGCEVEATVGEVVTNTWLVTCIDYQTLFDPKSNPLFTPVPVMTGMTPLEDCVISFSQCAGAEKESLTFLANLLGASVQEYFVRKSNAKKGMFASTHLILKERGGSKYEAAKKWNLPAVTIAWLLETARTGKRADESHFLIENSTKEERSLETEITNGINLNSDTAEHPGTRLQTHRKTVVTPLDMNRFQSKAFRAVVSQHARQVAASPAVGQPLQKEPSLHLDTPSKFLSKDKLFKPSFDVKDALAALETPGRPSQQKRKPSTPLSEVIVKNLQLALANSSRNAVALSASPQLKEAQSEKEEAPKPLHKVVVCVSKKLSTFSRGEMVP

SEQ ID NO: 744995 - protein, 122 aa, Homo sapiens
HIKVSHNFYGLTYGFNEFGFVIAVYLNCHFYSLGSLVRQYLMSTQSLPKMNRSFGMTLQQGRREQGLPAICSGLVVPHNTLSFRLTFKTWRILLFKSLYMIQKLLNRVTRKKSLHLFVLSTC

SEQ ID NO: 744996 - protein, 117 aa, Homo sapiens [sequence omitted]

SEQ ID NO: 744997 - protein, 285 aa, Homo sapiens [sequence omitted]

SEQ ID NO: 744998 - protein, 139 aa, Homo sapiens
GQGRSQDGRIGTAPVYSSQRERRRRRVISAFPSETSDLFYFIVNKLHEYLPESRDKNALQNQSQRVDELVACIEIIQTLVLMFRETETESSRLNTLAAKNYRSLFWSIQILLQHFYMRYFLSFSREISDWDPQSLLLAG

SEQ ID NO: 744999 - protein, 139 aa, Homo sapiens; identical to SEQ ID NO: 744998

SEQ ID NO: 745000 - protein, 42 aa, Homo sapiens
MGVSVETTSVAEYNPATVTRKLRAHRDHGASTHDTTLRPTRR

SEQ ID NO: 745001 - protein, 150 aa, Homo sapiens
DFVCFLVSLGCWFGDFCLIAMSGRGKQGGKARAKAKSRSSRAGLQFPVGRVHRLLRKGNYAERVGAGAPVYLAAVLEYLTAEILELAGNAARDNKKTRIIPRHLQLAIRNDEELNKLLGRVTIAQGGVLPNIQAVLLPKKTESHHKAKGK

SEQ ID NO: 745002 - protein, 150 aa, Homo sapiens; identical to SEQ ID NO: 745001

SEQ ID NO: 745003 - protein, 166 aa, Homo sapiens
SGMISAHCNLRLLHSSDSPTSASRVAGITGVHHHAHLCIVFLVEMGFCHVGQAGLKLLTSCDPSTSTSQSAGITGLSHHAQPQLRAFLLAVLSTWDVLAPNHCMNASSCGSGLKFSFTCSETPSLILSIELVLLCLHITIKNYMRLGTVAHAYNPSSLGVHGRRIT

SEQ ID NO: 745004 - protein, 136 aa, Homo sapiens
SICVLPPQEHQLPEGRDPGPVQDSVAPGRRQPPLQMEDAGIRVLAASVFEPWSQAVFACPPGTLDHHEESLQSSQVQPLKGQGSGGSGTPPARTHMAPVAKWPCVAYKDLLSGDQPGAASPRAAEEEAIVGNRVRT

SEQ ID NO: 745005 - protein, 63 aa, Homo sapiens
YHLPGPTFDLVPVPLPVLVDGAPAPIAWDGSLSHSCLLRSLHSPYLTGHESFWFCPLNSEDLC

SEQ ID NO: 745006 - protein, 170 aa, Homo sapiens
MAMSNGNNDFVVLSNSSIATSAANPSPLTPCDGDHAAQQLTPKEATRTKVSPNGCLQLNGTVKSSFLPLDNQRMPQMLPQCCHPCPYHHPLTSHSSHQECHPEAGPAAPSALASCCMQPHSEYSASLCPNHSPVYQTTCCLQPSPSFCLHHPWPDHFQHQPVQQHIANIR

SEQ ID NO: 745007 - protein, 1352 aa, Homo sapiens
MAMSNGNNDFVVLSNSSIATSAANPSPLTPCDGDHAAQQLTPKEATRTKVSPNGCLQLNGTVKSSFLPLDNQRMPQMLPQCCHPCPYHHPLTSHSSHQECHPEAGPAAPSALASCCMQPHSEYSASLCPNHSPVYQTTCCLQPSPSFCLHHPWPDHFQHQPVQQHIANIRPSRPFKLPKSYAALIADWPVVVLGMCTMFIVVCALVGVLVPELPDFSDPLLGFEPRGTAIGQRLVTWNNMVKNTGYKATLANYPFKYADEQAKSHRDDRWSDDHYEREKREVDWNFHKDSFFCDVPSDRYSRVVFTSSGGETLWNLPAIKSMCNVDNSRIRSHPQFGDLCQRTTAASCCPSWTLGNYIAILNNRSSCQKIVERDVSHTLKLLRTCAKHYQNGTLGPDCWDMAARRKDQLKCTNVPRKCTKYNAVYQILHYLVDKDFMTPKTADYATPALKYSMLFSPTEKGESMMNIYLDNFENWNSSDGVTTITGIEFGIKHSLFQDYLLMDTVYPAIAIVIVLLVMCVYTKSMFITLMTMFAIISSLIVSYFLYRVVFHFEFFPFMNLTALIILVGIGADDAFVLCDVWNYTKFDKPHAETSETVSITLQHAALSMFVTSFTTAAAFYANYVSNITAIRCFGVYAGTAILVNYVLMVTWLPAVVVLHERYLLNIFTCFKKPQQQIYDNKSCWTVACQKCHKVLFAISEASRIFFEKVLPCIVIKFRYLWLFWFLALTVGGAYIVCINPKMKLPSLELSEFQVFRSSHPFERYDAEYKKLFMFERVHHGEELHMPITVIWGVSPEDNGNPLNPKSKGKLTLDSSFNIASPASQAWILHFCQKLRNQTFFYQTDEQDFTSCFIETFKQWMENQDCDEPALYPCCSHWSFPYKQEIFELCIKRAIMELERSTGYHLDSKTPGPRFDINDTIRAVVLEFQSTYLFTLAYEKMHQFYKEVDSWISSELSSAPEGLSNGWFVSNLEFYDLQDSLSDGTLIAMGLSVAVAFSVMLLTTWNIIISLYAIISIAGTIFVTVGSLVLLGWELNVLESVTISVAVGLSVDFAVHYGVAYRLAPDPDREGKVIFSLSRVGSAMAMAALTTFVAGAMMMPSTVLAYTQLGTFMMLIMCISWAFATFFFQCMCRCLGPQGTCGQIPLPKKLQCSAFSHALSTSPSDKGQSKTHTINAYHLDPRGPKSELEHEFYELEPLASHSCTAPEKTTYEETHICSEFFNSQAKNLGMPVHAAYNSELSKSTESDAGSALLQPPLEQHTVCHFFSLNQRCSCPDAYKHLNYGPHSCQQMGDCLCHQCSPTTSSFVQIQNGVAPLKATHQAVEGFVHPITHIHHCPCLQGRVKPAWNAEFSA

SEQ ID NO: 745008 - protein, 1399 aa, Homo sapiens
LARQSPSQSVGITESRNWSMAMSNGNNDFVVLSNSSIATSAANPSPLTPCDGDHAAQQLTPKEATRTKVSPNGCLQLNGTVKSSFLPLDNQRMPQMLPQCCHPCPYHHPLTSHSSHQECHPEAGPAAPSALASCCMQPHSEYSASLCPNHSPVYQTTCCLQPSPSFCLHHPWPDHFQHQPVQQHIANIRPSRPFKLPKSYAALIADWPVVVLGMCTMFIVVCALVGVLVPELPDFSDPLLGFEPRGTAIGQRLVTWNNMVKNTGYKATLANYPFKYADEQAKSHRDDRWSDDHYEREKREVDWNFHKDSFFCDVPSDRYSRVVFTSSGGETLWNLPAIKSMCNVDNSRIRSHPQFGDLCQRTTAASCCPSWTLGNYIAILNNRSSCQKIVERDVSHTLKLLRTCAKHYQNGTLGPDCWDMAARRKDQLKCTNVPRKCTKYNAVYQILHYLVDKDFMTPKTADYATPALKYSMLFSPTEKGESMMNIYLDNFENWNSSDGVTTITGIEFGIKHSLFQDYLLMDTVYPAIAIVIVLLVMCVYTKSMFITLMTMFAIISSLIVSYFLYRVVFHFEFFPFMNLTALIILVGIGADDAFVLCDVWNYTKFDKPHAETSETVSITLQHAALSMFVTSFTTAAAFYANYVSNITAIRCFGVYAGTAILVNYVLMVTWLPAVVVLHERYLLNIFTCFKKPQQQIYDNKSCWTVACQKCHKVLFAISEASRIFFEKVLPCIVIKFRYLWLFWFLALTVGGAYIVCINPKMKLPSLELSEFQVFRSSHPFERYDAEYKKLFMFERVHHGEELHMPITVIWGVSPEDNGNPLNPKSKGKLTLDSSFNIASPASQAWILHFCQKLRNQTFFYQTDEQDFTSCFIETFKQWMENQDCDEPALYPCCSHWSFPYKQEIFELCIKRAIMELERSTGYHLDSKTPGPRFDINDTIRAVVLEFQSTYLFTLAYEKMHQFYKEVDSWISSELSSAPEGLSNGWFVSNLEFYDLQDSLSDGTLIAMGLSVAVAFSVMLLTTWNIIISLYAIISIAGTIFVTVGSLVLLGWELNVLESVTISVAVGLSVDFAVHYGVAYRLAPDPDREGKVIFSLSRVGSAMAMAALTTFVAGAMMMPSTVLAYTQLGTFMMLIMCISWAFATFFFQCMCRCLGPQGTCGQIPLPKKLQCSAFSHALSTSPSDKGQSKTHTINAYHLDPRGPKSELEHEFYELEPLASHSCTAPEKTTYEETHICSEFFNSQAKNLGMPVHAAYNSELSKSTESDAGSALLQPPLEQHTVCHFFSLNQRCSCPDAYKHLNYGPHSCQQMGDCLCHQCSPTTSSFVQIQNGVAPLKATHQAVEGFVHPITHIHHCPCLQGRVKPAGMQNSLPRNFFLHPVQHIQAQEKIGKTNVTVFRGA

SEQ ID NO: 745009 - protein, 221 aa, Homo sapiens
LARQSPSQSVGITESRNWSMAMSNGNNDFVVLSNSSIATSAANPSPLTPCDGDHAAQQLTPKEATRTKVSPNGCLQLNGTVKSSFLPLDNQRMPQMLPQCCHPCPYHHPLTSHSSHQECHPEAGPAAPSALASCCMQPHSEYSASLCPNHSPVYQTTCCLQPSPSFCLHHPWPDHFQHQPVQQHIANIRPSRPFKLPQSYAASTTTSTQSSHLPFYVSVPS

SEQ ID NO: 745010 - protein, 104 aa, Homo sapiens
MCTMFIVVCALVGVLVPELPDFSDPLLGFEPRGTAIGQRLVTWNNMVKNTGYKATLANYPFKYADEQAKSHRDDRWSDDHYEREKREVDWNFHKDSFFCDVPSE

SEQ ID NO: 745011 - protein, 82 aa, Homo sapiens
TEKPQAPPQPTPLARALLDPQSILEVLVSTPPPSPGDTPYLSLQSKPMKPTPARGPAPVPGLGLLTKDWAGPSSAIHEPYQG

SEQ ID NO: 745012 - protein, 144 aa, Homo sapiens [sequence omitted]

SEQ ID NO: 745013 - protein, 124 aa, Homo sapiens
GRLWLNLVFWLLSSPMQGCGSPHRPLQRGTLGGAHGTSKQSPVAPGVSLEGTSRAHQPAHPRAQTPPRPFVPPWGGRASMAISWVLGMVAHCLHDVHKVVYPLNLASVSPMKPWCRIPTWMLRA

SEQ ID NO: 745014 - protein, 254 aa, Homo sapiens
MPRWQMLRVLEEELGRDWQAKVASLEEVPFAAASIGQVHQGLLRDGTEVAVKIQYPGIAQSIQSDVQNLLAVLKMSAALPAGLFAEQSLQALQQELAWECDYRREAACAQNFRQLLANDPFFRVPAVVKELCTTRVLGMELAGGVPLDQCQGLSQDLRNQICFQLLTLCLRELFEFRFMQTDPNWANFLYDASSHQVTLLDFGASREFGTEFTDHYIEVVKAAADGDRDCVLQKSRDLKFLTGFETKVGRHWGR

SEQ ID NO: 745015 - protein, 544 aa, Homo sapiens
MWLKVGGLLRGTGGQLGQTVGWPCGALGPGPHRWGPCGGSWAQKFYQDGPGRGLGEEDIRRAREARPRKTPRPQLSDRSRERKVPASRISRLANFGGLAVGLGLGVLAEMAKKSMPGGRLQSEGGSGLDSSPFLSEANAERIVQTLCTVRGAALKVGQMLSIQDNSFISPQLQHIFERVRQSADFMPRWQMLRVLEEELGRDWQAKVASLEEVPFAAASIGQVHQGLLRDGTEVAVKIQYPGIAQSIQSDVQNLLAVLKMSAALPAGLFAEQSLQALQQELAWECDYRREAACAQNFRQLLANDPFFRVPAVVKELCTTRVLGMELAGGVPLDQCQGLSQDLRNQICFQLLTLCLRELFEFRFMQTDPNWANFLYDASSHQVTLLDFGASREFGTEFTDHYIEVVKAAADGDRDCVLQKSRDLKFLTGFETKAFSDAHVEAVMILGEPFATQGPYDFGSGETARRIQDLIPVLLRHRLCPPPEETYALHRKLAGAFLACAHLRAHIACRDLFQDTYHRYWASRQPDAATAGSLPTKGDSWVDPS

SEQ ID NO: 745016 - protein, 591 aa, Homo sapiens
MWLKVGGLLRGTGGQLGQTVGWPCGALGPGPHRWGPCGGSWAQKFYQDGPGRGLGEEDIRRAREARPRKTPRPQLSDRSRERKVPASRISRLANFGGLAVGLGLGVLAEMAKKSMPGGRLQSEGGSGLDSSPFLSEANAERIVQTLCTVRGAALKVGQMLSIQGQHDPRLLTPDLPSTPALPTNRPQLQILTRGPSSPLRLLPPWFHVSQDNSFISPQLQHIFERVRQSADFMPRWQMLRVLEEELGRDWQAKVASLEEVPFAAASIGQVHQGLLRDGTEVAVKIQYPGIAQSIQSDVQNLLAVLKMSAALPAGLFAEQSLQALQQELAWECDYRREAACAQNFRQLLANDPFFRVPAVVKELCTTRVLGMELAGGVPLDQCQGLSQDLRNQICFQLLTLCLRELFEFRFMQTDPNWANFLYDASSHQVTLLDFGASREFGTEFTDHYIEVVKAAADGDRDCVLQKSRDLKFLTGFETKAFSDAHVEAVMILGEPFATQGPYDFGSGETARRIQDLIPVLLRHRLCPPPEETYALHRKLAGAFLACAHLRAHIACRDLFQDTYHRYWASRQPDAATAGSLPTKGDSWVDPS

SEQ ID NO: 745017 - protein, 520 aa, Homo sapiens
QVADSEAESSGPCGGSWAQKFYQDGPGRGLGEEDIRRAREARPRKTPRPQLSDRSRERKVPASRISRLANFGGLAVGLGLGVLAEMAKKSMPGGRLQSEGGSGLDSSPFLSEANAERIVQTLCTVRGAALKVGQMLSIQDNSFISPQLQHIFERVRQSADFMPRWQMLRVLEEELGRDWQAKVASLEEVPFAAASIGQVHQGLLRDGTEVAVKIQYPGIAQSIQSDVQNLLAVLKMSAALPAGLFAEQSLQALQQELAWECDYRREAACAQNFRQLLANDPFFRVPAVVKELCTTRVLGMELAGGVPLDQCQGLSQDLRNQICFQLLTLCLRELFEFRFMQTDPNWANFLYDASSHQVTLLDFGASREFGTEFTDHYIEVVKAAADGDRDCVLQKSRDLKFLTGFETKAFSDAHVEAVMILGEPFATQGPYDFGSGETARRIQDLIPVLLRHRLCPPPEETYALHRKLAGAFLACAHLRAHIACRDLFQDTYHRYWASRQPDAATAGSLPTKGDSWVDPS

SEQ ID NO: 745018 - protein, 591 aa, Homo sapiens
MWLKVGGLLRGTGGQLGQTVGWPCGALGPGPHRWGPCGGSWAQKFYQDGPGRGLGEEDIRRAREARPRKTPRPQLSDRSRERKVPASRISRLANFGGLAVGLGLGVLAEMAKKSMPGGRLQSEGGSGLDSSPFLSEANAERIVQTLCTVRGAALKVGQMLSIQGQHDPRLLTPDLPSTPALPTNRPQLQILTRGPSSPLRLLPPWFTVSQDNSFISPQLQHIFERVRQSADFMPRWQMLRVLEEELGRDWQAKVASLEEVPFAAASIGQVHQGLLRDGTEVAVKIQYPGIAQSIQSDVQNLLAVLKMSAALPAGLFAEQSLQALQQELAWECDYRREAACAQNFRQLLANDPFFRVPAVVKELCTTRVLGMELAGGVPLDQCQGLSQDLRNQICFQLLTLCLRELFEFRFMQTDPNWANFLYDASSHQVTLLDFGASREFGTEFTDHYIEVVKAAADGDRDCVLQKSRDLKFLTGFETKAFSDAHVEAVMILGEPFATQGPYDFGSGETARRIQDLIPVLLRHRLCPPPEETYALHRKLAGAFLACAHLRAHIACRDLFQDTYHRYWASRQPDAATAGSLPTKGDSWVDPS

SEQ ID NO: 745019 - protein, 359 aa, Homo sapiens [sequence omitted]

SEQ ID NO: 745020 - protein, 359 aa, Homo sapiens [sequence omitted]

SEQ ID NO: 745021 - protein, 158 aa, Homo sapiens
CSLLGESGLVLMVETGGSGGYTLFLGYAEGSMSTLAALLSPHPHSQAFSDAHVEAVMILGEPFATQGPYDFGSGETARRIQDLIPVLLRHRLCPPPEETYALHRKLAGAFLACAHLRAHIACRDLFQDTYHRYWASRQPDAATAGSLPTKGDSWVDPS

SEQ ID NO: 745022 - protein, 166 aa, Homo sapiens
MWLKVGGLLRGTGGQLGQTVGWPCGALGPGPHRWGPCGGSWAQKFYQDGPGRGLGEEDIRRAREARPRKTPRPQLSDRSRERKVPASRISRLANFGGLAVGLGLGVLAEMAKKSMPGGRLQSEGGSGLDSSPFLSEANAERIVQTLCTVRGAALKVGQMLSIQGTA

SEQ ID NO: 745023 - protein, 544 aa, Homo sapiens; identical to SEQ ID NO: 745015

SEQ ID NO: 745024 - protein, 514 aa, Homo sapiens
QVADSEAESSAMWLKVGGLLRGTGGQLGQTVGWPCGALGPGPHRWGPCGGSWAQKFYQDGPGRGLGEEDIRRAREARPRKTPRPQLSDRSRERKVPASRISRLANFGGLAVGLGLGVLAEMAKKSMPGGRLQSDNSFISPQLQHIFERVRQSADFMPRWQMLRVLEEELGRDWQAKVASLEEVPFAAASIGQVHQGLLRDGTEVAVKIQYPGIAQSIQSDVQNLLAVLKMSAALPAGLFAEQSLQALQQELAWECDYRREAACAQNFRQLLANDPFFRVPAVVKELCTTRVLGMELAGGVPLDQCQGLSQDLRNQICFQLLTLCLRELFEFRFMQTDPNWANFLYDASSHQVTLLDFGASREFGTEFTDHYIEVVKAAADGDRDCVLQKSRDLKFLTGFETKAFSDAHVEAVMILGEPFATQGPYDFGSGETARRIQDLIPVLLRHRLCPPPEETYALHRKLAGAFLACAHLRAHIACRDLFQDTYHRYWASRQPDAATAGSLPTKGDSWVDPS

SEQ ID NO: 745025 - protein, 369 aa, Homo sapiens
MPRWQMLYPGIAQSIQSDVQNLLAVLKMSAALPAGEAPTHSSADLPKGLCPERESRRGSPEESTGRVCWRCERECQRQKGHQGGESPGSMSSLFAEQSLQALQQELAWECDYRREAACAQNFRQLLANDPFFRVPAVVKELCTTRVLGMELAGGVPLDQCQGLSQDLRNQICFQLLTLCLRELFEFRFMQTDPNWANFLYDASSHQVTLLDFGASREFGTEFTDHYIEVVKAAADGDRDCVLQKSRDLKFLTGFETKAFSDAHVEAVMILGEPFATQGPYDFGSGETARRIQDLIPVLLRHRLCPPPEETYALHRKLAGAFLACAHLRAHIACRDLFQDTYHRYWASRQPDAATAGSLPTKGDSWVDPS

SEQ ID NO: 745026 - protein, 115 aa, Homo sapiens
MWLKVGGLLRGTGGQLGQTVGWPCGALGPGPHRWGPCGGSWAQKFYQDGPGRGLGEEDIRRAREARPRKTPRPQLSDRSRERKVPASRISRLANFGAAPRTVHKVCTIRSALASD

SEQ ID NO: 745027 - protein, 106 aa, Homo sapiens
LKFTQRKVTILKNAQNILFSITKAFHPGKLLYQNLIWPREKENLKNEASSSFLDNLMGWVGQGRKRERKEGRGGGGRGKRGPGGREEDRQAGKETSEVHSPGTQTY

SEQ ID NO: 745028 - protein, 89 aa, Homo sapiens
MGVTMITILQLPKVRKRKKAKGKKVVLTLAVLKKQETMKVVNLPFEKFGTGQDILALDRTSSPKGTSLALSNGPIILGCSSREPSSISS

SEQ ID NO: 745029 - protein, 515 aa, Homo sapiens
MATSTGRWLLLRLALFGFLWEASGGLDSGASRDDDLLLPYPRARARLPRDCTRVRAGNREHESWPPPPATPGAGGLAVRTFVSHFRDRAVAGHLTRAVEPLRTFSVLEPGGPGGCAARRRATVEETARAADCRVAQNGGFFRMNSGECLGNVVSDERRVSSSGGLQNAQFGIRRDGTLVTGYLSEEEVLDTENPFVQLLSGVVWLIRNGSIYINESQATECDETQETGSFSKFVNVISARTAIGHDRKGQLVLFHADGQTEQRGINLWEMAEFLLKQDVVNAINLDGGGSATFVLNGTLASYPSDHCQDNMWRCPRQVSTVVCVHEPRCQPPDCHGHGTCVDGHCQCTGHFWRGPGCDELDCGPSNCSQHGLCTETGCRCDAGWTGSNCSEECPLGWHGPGCQRPCKCEHHCPCDPKTGNCSVSRVKQCLQPPEATLRAGELSFFTRTAWLALTLALAFLLLISTAANLSLLLSRAERNRRLHGDYAYHPLQEMNGEPLAAEKEQPGGAHNPFKD

SEQ ID NO: 745030 - protein, 549 aa, Homo sapiens
MATSTGRWLLLRLALFGFLWEASGGLDSGASRDDDLLLPYPRARARLPRDCTRVRAGNREHESWPPPPATPGAGGLAVRTFVSHFRDRAVAGHLTRAVEPLRTFSVLEPGGPGGCAARRRATVEETARAADCRVAQNGGFFRMNSGECLGNVVSDERRVSSSGGLQNAQFGIRRDGTLVTGYLSEEEVLDTENPFVQLLSGVVWLIRNGSIYINESQATECDETQETGSFSKFVNVISARTAIGHDRKGQLVLFHADGQTEQRGINLWEMAEFLLKQDVVNAINLDGGGSATFVLNGTLASYPSDHWQADGAHLTVTAAQEARVEGSQYLISKIDRRHLVSQDNMWRCPRQVSTVVCVHEPRCQPPDCHGHGTCVDGHCQCTGHFWRGPGCDELDCGPSNCSQHGLCTETGCRCDAGWTGSNCSEECPLGWHGPGCQRPCKCEHHCPCDPKTGNCSVSRVKQCLQPPEATLRAGELSFFTRTAWLALTLALAFLLLISTAANLSLLLSRAERNRRLHGDYAYHPLQEMNGEPLAAEKEQPGGAHNPFKD

SEQ ID NO: 745031 - protein, 481 aa, Homo sapiens
MATSTGRWLLLRLALFGFLWEASGGLDSGASRDDDLLLPYPRARARLPRDCTRVRAGNREHESWPPPPATPGAGGLAVRTFVSHFRDRAVAGHLTRAVEPLRTFSVLEPGGPGGCAARRRATVEETARAADCRVAQNGGFFRMNSGECLGNVVSDERRVSSSGGLQNAQFGIRRDGTLVTGYLSEEEVLDTENPFVQLLSGVVWLIRNGSIYINESQATECDETQETGSFSKFVNVISARTAIGHDRKGQLVLFHADGQTEQRGINLWEMAEFLLKQDVVNAINLDGGGSATFVLNGTLASYPSDHCQDNMWRCPRQVSTVVCVHEPRCQPPDCHGHGTCVDGHCQCTGHFWRGPGCDELDCGPSNCSQHGLCTETGCRCDAGWTGSNCSEVKQCLQPPEATLRAGELSFFTRTAWLALTLALAFLLLISTAANLSLLLSRAERNRRLHGDYAYHPLQEMNGEPLAAEKEQPGGAHNPFKD

SEQ ID NO: 745032 - protein, 515 aa, Homo sapiens; identical to SEQ ID NO: 745029

SEQ ID NO: 745033 - protein, 212 aa, Homo sapiens
MAEFLLKQDVVNAINLDGGGSATFVLNGTLASYPSDHCQDNMWRCPRQVSTVVCVHEPRCQPPDCHGHGTCVDGHCQCTGHFWRGPGCDELDCGPSNCSQHGLCTETGCRCDAGWTGSNCSEVKQCLQPPEATLRAGELSFFTRTAWLALTLALAFLLLISTAANLSLLLSRAERNRRLHGDYAYHPLQEMNGEPLAAEKEQPGGAHNPFKD

SEQ ID NO: 745034 - protein, 228 aa, Homo sapiens
MATSTGRWLLLRLALFGFLWEASGGLDSGASRDDDLLLPYPRARARLPRDCTRVRAGNREHESWPPPPATPGAGGLAVRTFVSHFRDRAVAGHLTRAVEPLRTFSVLEPGGPGGCAARRRATVEETARAADCRVAQNGGFFRMNSGECLGNVVSDERRVSSSGGLQNAQFGIRRDGTLVTGYLSEEEVLDTENPFVQLLSGVVWLIRNGSIYINESQATEWTSLPSWL

SEQ ID NO: 745035 - protein, 515 aa, Homo sapiens; identical to SEQ ID NO: 745029

SEQ ID NO: 745036 - protein, 418 aa, Homo sapiens
MATSTGRWLLLRLALFGFLWEASGGLDSGASRDDDLLLPYPRARARLPRDCTRVRAGNREHESWPPPPATPGAGGLAVRTFVSHFRDRAVAGHLTRAVEPLRTFSVLEPGGPGGCAARRRATVEETARAADCRVAQNGGFFRMNSGECLGNVVSDERRVSSSGGLQNAQFGIRRDGTLVTGYLSEEEVLDTENPFVQLLSGVVWLIRNGSIYINESQATECDETQETGSFSKFVNVISARTAIGHDRKGQLVLFHADGQTEQRGINLWEMAEFLLKQDVVNAINLDGGGSATFVLNGTLASYPSDHWQADGAHLTVTAAQEARVEGSQYLISKIDRRHLVAGTSGGVPAVMSWTVAPLTAASTDCARRPAAAVMPDGPGPTAVKSVPLAGMGRAARGLVSVSTIVPVTPRLATAASPE

SEQ ID NO: 745037 - protein, 515 aa, Homo sapiens; identical to SEQ ID NO: 745029

SEQ ID NO: 745038 - protein, 212 aa, Homo sapiens; identical to SEQ ID NO: 745033

SEQ ID NO: 745039 - protein, 713 aa, Homo sapiens
  misc_feature (5)..(6): Xaa can be any naturally occurring amino acid
KGGGXXKLTARYEAAVKSAEVLSSSTVEVLVMPSLRTRREEAEMELSVPGPSPWTPAAQARVRDAPAVTHPGSAACGTPCCSDTELEAICPHYQQPDCDTRTEDKEFLHKEDIHEDLESQAEISENYAGDVSQVPELGDLCDDVSERDWGVPEGRRLPQSLSQEGDFTPAAMGLLRGPLGEKDLDCNGFDSRFSLSPNLMACQEIPTEERPHPYDMGGQSFQHSVDLTGHEGVPTAESPLICNECGKTFQGNPDLIQRQIVHTGEASFMCDDCGKTFSQNSVLKNRHRSHMSEKAYQCSECGKAFRGHSDFSRHQSHHSSERPYMCNECGKAFSQNSSLKKHQKSHMSEKPYECNECGKAFRRSSNLIQHQRIHSGEKPYVCSECGKAFRRSSNLIKHHRTHTGEKPFECGECGKAFSQSAHLRKHQRVHTGEKPYECNDCGKPFSRVSNLIKHHRVHTGEKPYKCSDCGKAFSQSSSLIQHRRIHTGEKPHVCNVCGKAFSYSSVLRKHQIIHTGEKPYRCSVCGKAFSHSSALIQHQGVHTGDKPYACHECGKTFGRSSNLILHQRVHTGEKPYECTECGKTFSQSSTLIQHQRIHNGLKPHECNQCGKAFNRSSNLIHHQKVHTGEKPYTCVECGKGFSQSSHLIQHQIIHTGERPYKCSECGKAFSQRSVLIQHQRIHTGVKPYDCAACGKAFSQRSKLIKHQLIHTRE

SEQ ID NO: 745040 - protein, 711 aa, Homo sapiens
PLQIPLTTPSFSAGAHEGQKSQCQYNVLVMPSLRTRREEAEMELSVPGPSPWTPAAQARVRDAPAVTHPGSAACGTPCCSDTELEAICPHYQQPDCDTRTEDKEFLHKEDIHEDLESQAEISENYAGDVSQVPELGDLCDDVSERDWGVPEGRRLPQSLSQEGDFTPAAMGLLRGPLGEKDLDCNGFDSRFSLSPNLMACQEIPTEERPHPYDMGGQSFQHSVDLTGHEGVPTAESPLICNECGKTFQGNPDLIQRQIVHTGEASFMCDDCGKTFSQNSVLKNRHRSHMSEKAYQCSECGKAFRGHSDFSRHQSHHSSERPYMCNECGKAFSQNSSLKKHQKSHMSEKPYECNECGKAFRRSSNLIQHQRIHSGEKPYVCSECGKAFRRSSNLIKHHRTHTGEKPFECGECGKAFSQSAHLRKHQRVHTGEKPYECNDCGKPFSRVSNLIKHHRVHTGEKPYKCSDCGKAFSQSSSLIQHRRIHTGEKPHVCNVCGKAFSYSSVLRKHQIIHTGEKPYRCSVCGKAFSHSSALIQHQGVHTGDKPYACHECGKTFGRSSNLILHQRVHTGEKPYECTECGKTFSQSSTLIQHQRIHNGLKPHECNQCGKAFNRSSNLIHHQKVHTGEKPYTCVECGKGFSQSSHLIQHQIIHTGERPYKCSECGKAFSQRSVLIQHQRIHTGVKPYDCAACGKAFSQRSKLIKHQLIHTRE

SEQ ID NO: 745041 - protein, 713 aa, Homo sapiens
AGLPGVSRRWLRRLRATVLPPFQARPVEVLVMPSLRTRREEAEMELSVPGPSPWTPAAQARVRDAPAVTHPGSAACGTPCCSDTELEAICPHYQQPDCDTRTEDKEFLHKEDIHEDLESQAEISENYAGDVSQVPELGDLCDDVSERDWGVPEGRRLPQSLSQEGDFTPAAMGLLRGPLGEKDLDCNGFDSRFSLSPNLMACQEIPTEERPHPYDMGGQSFQHSVDLTGHEGVPTAESPLICNECGKTFQGNPDLIQRQIVHTGEASFMCDDCGKTFSQNSVLKNRHRSHMSEKAYQCSECGKAFRGHSDFSRHQSHHSSERPYMCNECGKAFSQNSSLKKHQKSHMSEKPYECNECGKAFRRSSNLIQHQRIHSGEKPYVCSECGKAFRRSSNLIKHHRTHTGEKPFECGECGKAFSQSAHLRKHQRVHTGEKPYECNDCGKPFSRVSNLIKHHRVHTGEKPYKCSDCGKAFSQSSSLIQHRRIHTGEKPHVCNVCGKAFSYSSVLRKHQIIHTGEKPYRCSVCGKAFSHSSALIQHQGVHTGDKPYACHECGKTFGRSSNLILHQRVHTGEKPYECTECGKTFSQSSTLIQHQRIHNGLKPHECNQCGKAFNRSSNLIHHQKVHTGEKPYTCVECGKGFSQSSHLIQHQIIHTGERPYKCSECGKAFSQRSVLIQHQRIHTGVKPYDCAACGKAFSQRSKLIKHQLIHTRE

SEQ ID NO: 745042 - protein, 153 aa, Homo sapiens
MQTCQCQVNAEDGDSPSGSECGKTFSQSSTLIQHQRIHNGLKPHECNQCGKAFNRSSNLIHHQKVHTGEKPYTCVECGKGFSQSSHLIQHQIIHTGERPYKCSECGKAFSQRSVLIQHQRIHTGVKPYDCAACGKAFSQRSKLIKHQLIHTRE

SEQ ID NO: 745043 - protein, 161 aa, Homo sapiens
VTLCPVAHLRGLAFGILPAQAGTGHQPPGSPSSKPQDQSLRGQHKAGAGVPLLCQGPGEHGPCSPLSSHQRPSLPDSSRGAALMDTIRCWEAGTTRTWTESPVTSLADRGALSYSITNNGWGRSDAILWVLLPGRRRPSPQRQPRDTRVRSQGAQEQCGPE

SEQ ID NO: 745044 - protein, 883 aa, Homo sapiens
MAENSVLTSTTGRTSLADSSIFDSKVTEISKENLLIGSTSYVEEEMPQIETRVILVQEAGKQEELIKALKDIKVGFVKMESVEEFEGLDSPEFENVFVVTDFQDSVFNDLYKADCRVIGPPVVLNCSQKGEPLPFSCRPLYCTSMMNLVLCFTGFRKKEELVRLVTLVHHMGGVIRKDFNSKVTHLVANCTQGEKFRVAVSLGTPIMKPEWIYKAWERRNEQDFYAAVDDFRNEFKVPPFQDCILSFLGFSDEEKTNMEEMTEMQGGKYLPLGDERCTHLVVEENIVKDLPFEPSKKLYVVKQEWFWGSIQMDARAGETMYLYEKANTPELKKSVSMLSLNTPNSNRKRRRLKETLAQLSRETDVSPFPPRKRPSAEHSLSIGSLLDISNTPESSINYGDTPKSCTKSSKSSTPVPSKQSARWQVAKELYQTESNYVNILATIIQLFQVPLEEEGQRGGPILAPEEIKTIFGSIPDIFDVHTKIKDDLEDLIVNWDESKSIGDIFLKYSKDLVKTYPPFVNFFEMSKETIIKCEKQKPRFHAFLKINQAKPECGRQSLVELLIRPVQRLPSVALLLNDLKKHTADENPDKSTLEKAIGSLKEVMTHINEDKRKTEAQKQIFDVVYEVDGCPANLLSSHRSLVQRVETISLGEHPCDRGEQVTLFLFNDCLEIARKRHKVIGTFRSPHGQTRPPASLKHIHLMPLSQIKKVLDIRETEDCHNAFALLVRPPTEQANVLLSFQMTSDELPKENWLKMLCRHVANTICKADAENLIYTADPESFEVNTKDMDSTLSRASRAIKKTSKKVTRAFSFSKTPKRALRRALMTSHGSVEGRSPSSNDKHVMSRLSSTSSLAGIPSPSLVSLPSFFERRSHTLSRSTTHLI

SEQ ID NO: 745045 - protein, 883 aa, Homo sapiens; identical to SEQ ID NO: 745044

SEQ ID NO: 745046 - protein, 712 aa, Homo sapiens
KKHTADENPDKSTLEKAIGSLKEVDDVAVSLGTPIMKPEWIYKAWERRNEQDFYAAVDDFRNEFKVPPFQDCILSFLGFSDEEKTNMEEMTEMQGGKYLPLGDERCTHLVVEENIVKDLPFEPSKKLYVVKQEWFWGSIQMDARAGETMYLYEKANTPELKKSVSMLSLNTPNSNRKRRRLKETLAQLSRETDVSPFPPRKRPSAEHSLSIGSLLDISNTPESSINYGDTPKSCTKSSKSSTPVPSKQSARWQVAKELYQTESNYVNILATIIQLFQVPLEEEGQRGGPILAPEEIKTIFGSIPDIFDVHTKIKDDLEDLIVNWDESKSIGDIFLKYSKDLVKTYPPFVNFFEMSKETIIKCEKQKPRFHAFLKINQAKPECGRQSLVELLIRPVQRLPSVALLLNDLKKHTADENPDKSTLEKAIGSLKEVMTHINEDKRKTEAQKQIFDVVYEVDGCPANLLSSHRSLVQRVETISLGEHPCDRGEQVTLFLFNDCLEIARKRHKVIGTFRSPHGQTRPPASLKHIHLMPLSQIKKVLDIRETEDCHNAFALLVRPPTEQANVLLSFQMTSDELPKENWLKMLCRHVANTICKADAENLIYTADPESFEVNTKDMDSTLSRASRAIKKTSKKVTRAFSFSKTPKRALRRALMTSHGSVEGRSPSSNDKHVMSRLSSTSSLAGIPSPSLVSLPSFFERRSHTLSRSTTHLI

SEQ ID NO: 745047 - protein, 914 aa, Homo sapiens
MAENSVLTSTTGRTSLADSSIFDSKVTEISKENLLIGSTSYVEEEMPQIETRVILVQEAGKQEELIKALKTIKIMEVPVIKIKESCPGKSDEKLIKSVINMDIKVGFVKMESVEEFEGLDSPEFENVFVVTDFQDSVFNDLYKADCRVIGPPVVLNCSQKGEPLPFSCRPLYCTSMMNLVLCFTGFRKKEELVRLVTLVHHMGGVIRKDFNSKVTHLVANCTQGEKFRVAVSLGTPIMKPEWIYKAWERRNEQDFYAAVDDFRNEFKVPPFQDCILSFLGFSDEEKTNMEEMTEMQGGKYLPLGDERCTHLVVEENIVKDLPFEPSKKLYVVKQEWFWGSIQMDARAGETMYLYEKANTPELKKSVSMLSLNTPNSNRKRRRLKETLAQLSRETDVSPFPPRKRPSAEHSLSIGSLLDISNTPESSINYGDTPKSCTKSSKSSTPVPSKQSARWQVAKELYQTESNYVNILATIIQLFQVPLEEEGQRGGPILAPEEIKTIFGSIPDIFDVHTKIKDDLEDLIVNWDESKSIGDIFLKYSKDLVKTYPPFVNFFEMSKETIIKCEKQKPRFHAFLKINQAKPECGRQSLVELLIRPVQRLPSVALLLNDLKKHTADENPDKSTLEKAIGSLKEVMTHINEDKRKTEAQKQIFDVVYEVDGCPANLLSSHRSLVQRVETISLGEHPCDRGEQVTLFLFNDCLEIARKRHKVIGTFRSPHGQTRPPASLKHIHLMPLSQIKKVLDIRETEDCHNAFALLVRPPTEQANVLLSFQMTSDELPKENWLKMLCRHVANTICKADAENLIYTADPESFEVNTKDMDSTLSRASRAIKKTSKKVTRAFSFSKTPKRALRRALMTSHGSVEGRSPSSNDKHVMSRLSSTSSLAGIPSPSLVSLPSFFERRSHTLSRSTTHLI

SEQ ID NO: 745048 - protein, 800 aa, Homo sapiens
HSSLLRVKLGPERRKDSDFQDSVFNDLYKADCRVIGPPVVLNCSQKGEPLPFSCRPLYCTSMMNLVLCFTGFRKKEELVRLVTLVHHMGGVIRKDFNSKVTHLVANCTQGEKFRVAVSLGTPIMKPEWIYKAWERRNEQDFYAAVDDFRNEFKVPPFQDCILSFLGFSDEEKTNMEEMTEMQGGKYLPLGDERCTHLVVEENIVKDLPFEPSKKLYVVKQEWFWGSIQMDARAGETMYLYEKANTPELKKSVSMLSLNTPNSNRKRRRLKETLAQLSRETDVSPFPPRKRPSAEHSLSIGSLLDISNTPESSINYGDTPKSCTKSSKSSTPVPSKQSARWQVAKELYQTESNYVNILATIIQLFQVPLEEEGQRGGPILAPEEIKTIFGSIPDIFDVHTKIKDDLEDLIVNWDESKSIGDIFLKYSKDLVKTYPPFVNFFEMSKETIIKCEKQKPRFHAFLKINQAKPECGRQSLVELLIRPVQRLPSVALLLNDLKKHTADENPDKSTLEKAIGSLKEVMTHINEDKRKTEAQKQIFDVVYEVDGCPANLLSSHRSLVQRVETISLGEHPCDRGEQVTLFLFNDCLEIARKRHKVIGTFRSPHGQTRPPASLKHIHLMPLSQIKKVLDIRETEDCHNAFALLVRPPTEQANVLLSFQMTSDELPKENWLKMLCRHVANTICKADAENLIYTADPESFEVNTKDMDSTLSRASRAIKKTSKKVTRAFSFSKTPKRALRRALMTSHGSVEGRSPSSNDKHVMSRLSSTSSLAGIPSPSLVSLPSFFERRSHTLSRSTTHLI

SEQ ID NO: 745049 - protein, 145 aa, Homo sapiens
LASGPPATDNIFIRLSLKLYCLAERMKVSEAALSLLVLILIITSASRSQPKVPEWVNTPSTCCLKYYEKVLPRRLVVGYRKALNCHLPAIIFVTKRNREVCTNPNDDWVQEYIKDPNLPLLPTRNLSTVKIITAKNGQPQLLNSQ

SEQ ID NO: 745050 - protein, 127 aa, Homo sapiens
RGGPGRLLYGPLLVLELHPKDCVCLCPRGRAPHNSLCPIGSLCHYLTQYTSDWGSSLRMALSLAQGLAFLHEERWQNGQYKPGIAHRDLSSQNVLIREDGSCAIGDLGLALVLPGLTQPPAWTPTPV

SEQ ID NO: 745051 - protein, 119 aa, Homo sapiens
ALAVQERRRPYIPSTWRCFATDPDGLRELLEDCWDADPEARLTAECVQQRLAALAHPQESHPFPESCPRGCPPLCPEDCTSIPAPTILPCRPQRSACHFSVQQGPCSRNPQPACTLSPV

SEQ ID NO: 745052 - protein, 211 aa, Homo sapiens
SCLDVQPCYSERTTECEGSLCHYLTQYTSDWGSSLRMALSLAQGLAFLHEERWQNGQYKPGIAHRDLSSQNVLIREDGSCAIGDLGLALVLPGLTQPPAWTPTQPQGPAAIMEDPDGLRELLEDCWDADPEARLTAECVQQRLAALAHPQESHPFPESCPRGCPPLCPEDCTSIPAPTILPCRPQRSACHFSVQQGPCSRNPQPACTLSPV

SEQ ID NO: 745053 - protein, 958 aa, Homo sapiens
AARMLPGRLCWVPLLLALGVGSGSGGGGDSRQRRLLAAKVNKHKPWIETSYHGVITENNDTVILDPPLVALDKDAPVPFAGEICAFKIHGQELPFEAVVLNKTSGEGRLRAKSPIDCELQKEYTFIIQAYDCGAGPHETAWKKSHKAVVHIQVKDVNEFAPTFKEPAYKAVVTEGKIYDSILQVEAIDEDCSPQYSQICNYEIVTTDVPFAIDRNGNIRNTEKLSYDKQHQYEILVTAYDCGQKPAAQDTLVQVDVKPVCKPGWQDWTKRIEYQPGSGSMPLFPSIHLETCDGAVSSLQIVTELQTNYIGKGCDRETYSEKSLQKLCGASSGIIDLLPSPSAATNWTAGLLVDSSEMIFKFDGRQGAKIPDGIVPKNLTDQFTITMWMKHGPSPGVRAEKETILCNSDKTEMNRHHYALYVHNCRLVFLLRKDFDQADTFRPAEFHWKLDQICDKEWHYYVINVEFPVVTLYMDGATYEPYLVTNDWPIHPSHIAMQLTVGACWQGGEVTKPQFAQFFHGSLASLTIRPGKMESQKVISCLQACKEGLDINSLESLGQGIKYHFNPSQSILVMEGDDIGNINRALQKVSYINSRQFPTAGVRRLKVSSKVQCFGEDVCISIPEVDAYVMVLQAIEPRITLRGTDHFWRPAAQFESARGVTLFPDIKIVSTFAKTEAPGDVKTTDPKSEVLEEMLHNLDFCDILVIGGDLDPRQECLELNHSELHQRHLDATNSTAGYSIYGVGSMSRYEQVLHHIRYRNWRPASLEARRFRIKCSELNGRYTSNEFNLEVSILHEDQVSDKEHVNHLIVQPPFLQSVHHPESRSSIQHSSVVPSIATVVIIISVCMLVFVVAMGVYRVRIAHQHFIQETEAAKESEMDWDDSALTITVNPMEKHEGPGHGEDETEGEEEEEAEEEMSSSSGSDDSEEEEEEEGMGRGRHGQNGARQAQLEWDDSTLPY

SEQ ID NO: 745054 - protein, 958 aa, Homo sapiens; identical to SEQ ID NO: 745053

SEQ ID NO: 745055 - protein, 86 aa, Homo sapiens
MLGLLGSTALVGWITGAAVAVLLLLLLLATCLFHGRQDCDVERNRTAAGGNRVRRAQPWPFRRRGHLGIFHHHRHPGHVSHVPNVG

SEQ ID NO: 745056 - protein, 477 aa, Homo sapiens
MTGQSLWDVSEANVEDGEIRINVGGFKRRLRSHTLLRFPETRLGRLLLCHSREAILELCDDYDDVQREFYFDRNPELFPYVLHFYHTGKLHVMAELCVFSFSQEIEYWGINEFFIDSCCSYSYHGRKVEPEQEKWDEQSDQESTTSSFDEILAFYNDASKFDGQPLGNFRRQLWLALDNPGYSVLSRVFSILSILVVMGSIITMCLNSLPDFQIPDSQGNPGEDPRFEIVEHFGIAWFTFELVARFAVAPDFLKFFKNALNLIDLMSIVPFYITLVVNLVVESTPTLANLGRVAQVLRLMRIFRILKLARHSTGLRSLGATLKYSYKEVGLLLLYLSVGISIFSVVAYTIEKEENEGLATIPACWWWATVSMTTVGYGDVVPGTTAGKLTASACILAGILVVVLPITLIFNKFSHFYRRQKQLESAMRSCDFGDGMKEVPSVNLRDYYAHKVKSLMASLTNMSRSSPSELSLNDSLR

SEQ ID NO: 745057 - protein, 477 aa, Homo sapiens; identical to SEQ ID NO: 745056

SEQ ID NO: 745058 - protein, 87 aa, Homo sapiens
LCGLLNQHLSKFKYSRGWKSEIRVSALLGSGEGPPPDFFMGESESRVEDGVEKKEKGEKERERMLQCTFSHASSYKDMNLLMRAPPS

SEQ ID NO: 745059 - protein, 610 aa, Homo sapiens
YDERWKEKQEQGFTWWLNFILTPDDFTVKTNISEVNAATLLLGIENQHKISVPRAPTKEEMSLRAYTARCRLNRLRRAACRLFTSEKMVKAIKKLEIEIEARRLIVRKDRHLWKDVGERQKVLNWLLSYNPLWLRIGLETTYGELISLEDNSDVTGLAMFILNRLLWNPDIAAEYRHPTVPHLYRDGHEEALSKFTLKKLLLLVCFLDYAKISRLIDHDPCLFCKDAEFKASKEILLAFSRDFLSGEGDLSRHLGLLGLPVNHVQTPFDEFDFAVTNLAVDLQCGVRLVRTMELLTQNWDLSKKLRIPAISRLQKMHNVDIVLQVLKSRGIELSDEHGNTILSKDIVDRHREKTLRLLWKIAFAFQVDISLNLDQLKEEIAFLKHTKSIKKTISLLSCHSDDLINKKKGKRDSGSFEQYSENIKLLMDWVNAVCAFYNKKVENFTVSFSDGRVLCYLIHHYHPCYVPFDAICQRTTQTVECTQTGSVVLNSSSESDDSSLDMSLKAFDHENTSELYKELLENEKKNFHLVRSAVRDLGGIPAMINHSDMSNTIPDEKVVITYLSFLCARLLDLRKEIRAARLIQTTWRKYKLKTDLKRHQVLLEYETTIV

SEQ ID NO: 745060 - protein, 817 aa, Homo sapiens
YDERWKEKQEQGFTWWLNFILTPDDFTVKTNISEVNAATLLLGIENQHKISVPRAPTKEEMSLRAYTARCRLNRLRRAACRLFTSEKMVKAIKKLEIEIEARRLIVRKDRHLWKDVGERQKVLNWLLSYNPLWLRIGLETTYGELISLEDNSDVTGLAMFILNRLLWNPDIAAEYRHPTVPHLYRDGHEEALSKFTLKKLLLLVCFLDYAKISRLIDHDPCLFCKDAEFKASKEILLAFSRDFLSGEGDLSRHLGLLGLPVNHVQTPFDEFDFAVTNLAVDLQCGVRLVRTMELLTQNWDLSKKLRIPAISRLQKMHNVDIVLQVLKSRGIELSDEHGNTILSKDIVDRHREKTLRLLWKIAFAFQVDISLNLDQLKEEIAFLKHTKSIKKTISLLSCHSDDLINKKKGKRDSGSFEQYSENIKLLMDWVNAVCAFYNKKVENFTVSFSDGRVLCYLIHHYHPCYVPFDAICQRTTQTVECTQTGSVVLNSSSESDDSSLDMSLKAFDHENTSELYKELLENEKKNFHLVRSAVRDLGGIPAMINHSDMSNTIPDEKVVITYLSFLCARLLDLRKEIRAARLIQTTWRKYKLKTDLKRHQEREKAARIIQLAVINFLAKQRLRKRVNAALVIQKYWRRVLAQRKLLMLKKEKLEKVQNKAASLIQGYWRRYSTRQRFLKLKYYSIILQSRIRMIIAVTSYKRYLWATVTIQRHWRAYLRRKQDQQRYEMLKSSTLIIQSMFRKWKQRKMQSQVKATVILQRAFREWHLRKQAKEENSAIIIQSWYRMHKELRKYIYIRSCVVIIQKRFRCFQAQKLY

SEQ ID NO: 745061 - protein, 702 aa, Homo sapiens
AETAPPNFVQRLQSMTVRQGSQVRLQVRVTGIPTPVVKFYRDGAEIQSSLDFQISQEGDLYSLLIAEAYPEDSGTYSVNATNSVGRATSTAELLVQGEEEVPAKKTKTIVSTAQISESRQTRIEKKIEAHFDARSIATVEMVIDGAAGEQLPHKTPPRIPPKPKSRSPTPPSIAAKAQLARQQSPSPIRHSPSPVRHVRAPTPSPVRSVSPAARISTSPIRSVRSPLLMRKTQASTVATGPEVPPPWKQEGYVASSSEAEMRETTLTTSTQIRTEERWEGRYGVQEQVTISGAAGLPPVCRPVLSYAAEAVATGAKEVKQDADKSAAVATVVAAVDMARVREPVISAVEQTAQRTTTTAVHIQPAQEQVRKEAEKTAVTKVVVAADKAKEQELKSRTKEVITTKQEQMHVTHEQIRKETEKTFVPKVVISAAKAKEQETRISEEITKKQKQVTQEAMRKEAEKTALSTIAVATAKAKEQETILRTRETMATRQEQIQVTHGKVDVGKKAEAVATVVAAVDQARVREPREPGHLEESYAQQTTLEYGYKERISAAKVAEPPQRPASEPHVVPKAVKPRVIQAPSETHIKTTDQKGMHISSQIKKTTDLTTERLVHVDKRPRTASPHFTVSKISVPKTEHGYEASIAGSAIATLQKELSATSSAQKITKSVKAPTVKPSETRVRAEPTPLPQFPFADTPDTYKS

SEQ ID NO: 745062 - protein, 794 aa, Homo sapiens
AETAPPNFVQRLQSMTVRQGSQVRLQVRVTGIPTPVVKFYRDGAEIQSSLDFQISQEGDLYSLLIAEAYPEDSGTYSVNATNSVGRATSTAELLVQGEEEVPAKKTKTIVSTAQISESRQTRIEKKIEAHFDARSIATVEMVIDGAAGEQLPHKTPPRIPPKPKSRSPTPPSIAAKAQLARQQSPSPIRHSPSPVRHVRAPTPSPVRSVSPAARISTSPIRSVRSPLLMRKTQASTVATGPEVPPPWKQEGYVASSSEAEMRETTLTTSTQIRTEERWEGRYGVQEQVTISGAAGLPPVCRPVLSYAAEAVATGAKEVKQDADKSAAVATVVAAVDMARVREPVISAVEQTAQRTTTTAVHIQPAQEQVRKEAEKTAVTKVVVAADKAKEQELKSRTKEVITTKQEQMHVTHEQIRKETEKTFVPKVVISAAKAKEQETRISEEITKKQKQVTQEAIRQETEITAASMVVVATAKSTKLETVPGAQEETTTQQDQMHLSYEKIMKETRKTVVPKVIVATPKVKEQDLVSRGREGITTKREQVQITQEKMRKEAEKTALSTIAVATAKAKEQETILRTRETMATRQEQIQVTHGKVDVGKKAEAVATVVAAVDQARVREPREPGHLEESYAQQTTLEYGYKERISAAKVAEPPQRPASEPHVVPKAVKPRVIQAPSETHIKTTDQKGMHISSQIKKTTDLTTERLVHVDKRPRTASPHFTVSKISVPKTEHGYEASIAGSAIATLQKELSATSSAQKITKSVKAPTVKPSETRVRAEPTPLPQFPFADTPDTYKS

SEQ ID NO: 745063 - protein, 656 aa, Homo sapiens
AETAPPNFVQRLQSMTVRQGSQVRLQVRVTGIPTPVVKFYRDGAEIQSSLDFQISQEGDLYSLLIAEAYPEDSGTYSVNATNSVGRATSTAELLVQGEEEVPAKKTKTIVSTAQISESRQTRIEKKIEAHFDARSIATVEMVIDGAAGEQLPHKTPPRIPPKPKSRSPTPPSIAAKAQLARQQSPSPIRHSPSPVRHVRAPTPSPVRSVSPAARISTSPIRSVRSPLLMRKTQASTVATGPEVPPPWKQEGYVASSSEAEMRETTLTTSTQIRTEERWEGRYGVQEQVTISGAAGLPPVCRPVLSYAAEAVATGAKEVKQDADKSAAVATVVAAVDMARVREPVISAVEQTAQRTTTTAVHIQPAQEQVRKEAEKTAVTKVVVAADKAKEQELKSRTKEVITTKQEQMHVTHEQIRKETEKTFVPKVVISAAKAKEQETRISEEITKKQKQVTQEAVDVGKKAEAVATVVAAVDQARVREPREPGHLEESYAQQTTLEYGYKERISAAKVAEPPQRPASEPHVVPKAVKPRVIQAPSETHIKTTDQKGMHISSQIKKTTDLTTERLVHVDKRPRTASPHFTVSKISVPKTEHGYEASIAGSAIATLQKELSATSSAQKITKSVKAPTVKPSETRVRAEPTPLPQFPFADTPDTYKS

SEQ ID NO: 745064 - protein, 101 aa, Homo sapiens
DHSLHQIETQLVNKLEQYTNIDTSSEDPGNTESGILELKLKALILDIIHNIDVVKQLNQIQVHTTEDWAWKKQLRFYMKSDHTCCVQMVDSEFQYTYEYQV

SEQ ID NO: 745065 - protein, 148 aa, Homo sapiens
MGDLSRTALWLGGRRDPSGSFRVRDGAAAEVGRACLGLPSECGSLVRARASPRPLLGPAVCPWRARSPRPGLPRPSPTCPWKRGGDWCALSLVAPAASRHPPLSASEQRIPPTSTCTCTRPLGNPLAFLTTVQNQKQIEHWENKDDAS

SEQ ID NO: 745066 - protein, 148 aa, Homo sapiens; identical to SEQ ID NO: 745065

SEQ ID NO: 745067 - protein, 49 aa, Homo sapiens
MTLSNALCMCAHPLTPLLLHTLHKWYSILCHCKNQNWLWIFVIHLYLKK

SEQ ID NO: 745068 - protein, 49 aa, Homo sapiens; identical to SEQ ID NO: 745067

SEQ ID NO: 745069 - protein, 49 aa, Homo sapiens; identical to SEQ ID NO: 745067

SEQ ID NO: 745070 - protein, 49 aa, Homo sapiens; identical to SEQ ID NO: 745067

SEQ ID NO: 745071 - protein, 161 aa, Homo sapiens
ECGKTFRLSFYLTEHRRTHAGKKPYECKECGKSFNVRGQLNRHKTIHTGIKPFACKVCEKAFSYSGDLRVHSRIHTGEKPYECKECGKAFMLRSVLTEHQRLHTGVKPYECKECGKTFRVRSQISLHKKIHTDVKPYKCVRCGKTFRFGFYLTEHQRIHTG

SEQ ID NO: 745072 - protein, 70 aa, Homo sapiens
LPFDPFANRDGLEQREVRLLGQPYGMSSQEAQDLLAQVAKRQAAECVCQPSEKGCLKPSISWGCSKSLLL

SEQ ID NO: 745073 - protein, 110 aa, Homo sapiens
TKTKKTCPVCKQKVVPSQGDSDSDTDSSQEENEVTEHTPLLRPLASVSAQSFGALSESRSHQNMTESSDYEEDDNEDTDSSDAENEINEHDVVVQLQPNGERDYNIANTV

SEQ ID NO: 745074 - protein, 106 aa, Homo sapiens
LKWFMTSSPLPRLLCSLVFLGGCWVTGFSSSLMWASAKEQLQHLFLIGSCLYKYFLPICHIASLPPCLPWSTAESVSVPGMHTWTLSFPNRLSAGQHFVMFGCYRH

SEQ ID NO: 745075 - protein, 148 aa, Homo sapiens [sequence omitted]

SEQ ID NO: 745076 - protein, 148 aa, Homo sapiens [sequence omitted]

SEQ ID NO: 745077 - protein, 92 aa, Homo sapiens
KRPELGVQAKSPRGEPGREAVANGIPWSSSTQIRHGGWARGLQKKEALGTTFYEYYVDDPPRIVLDKLERRGFRVLSMTGVGQTLVWCLHKE

SEQ ID NO: 745078 - protein, 148 aa, Homo sapiens [sequence omitted]

SEQ ID NO: 745079 - protein, 103 aa, Homo sapiens
LREMIIKGIRESVPHTQNLSRAFDVQQEKDEGPMKFLKRPREQTKKYADLDPEDSLGQEMLKLHVVTNSWSDITKQLQKLENWKNLSIEKLLGEAQKFYVRRD

SEQ ID NO: 745080 - protein, 619 aa, Homo sapiens
LSCLLGTRFNLDTSSKHPRVPLPSLLEYSLSGSFPLPDSAALVPAFSALPALRLGPGSFPLAGVSSPPPEGRADPSLLAACPASPPPRRPGSGRAGAPGAVRRPRATTAASASCCSGLFCAGLVGGDPDCARQWLRGRRVAMGSRWSSEEERQPLLGPGLGPGLGASWRSREAAAAALPAAVPGPGRVYGRRWLVLLLFSLLAFVQGLVWNTWGPIQNSARQAYGFSSWDIALLVLWGPIGFLPCFAFMWLLDKRGLRITVLLTSFLMVLGTGLRCIPISDLILKRRLIHGGQMLNGLAGPTVMNAAPFLSTTWFSADERATATAIASMLSYLGGACAFLVGPLVVPAPNGTSPLLAAESSRAHIKDRIEAVLYAEFGVVCLIFSATLAYFPPRPPLPPSVAAASQRLSYRRSVCRLLSNFRFLMIALAYAIPLGVFAGWSGVLDLILTPAHVSQVDAGWIGFWSIVGGCVVGIAMARFADFIRGMLKLILLLLFSGATLSSTWFTLTCLNSITHLPLTTVTLYASCILLGVFLNSSVPIFFELFVETVYPVPEGITCGVVTFLSNMFMGVLLFFLTFYHTELSWFNWCLPGSCLLSLLLILCFRESYDRLYLDVVVSV

SEQ ID NO: 745081 - protein, 438 aa, Homo sapiens
LSCLLGTRFNLDTSSKHPRVPLPSLLEYSLSGSFPLPDSAALVPAFSALPALRLGPGSFPLAGVSSPPPEGRADPSLLAACPASPPPRRPGSGRAGAPGAVRRPRATTAASASCCSGLFCAGLVGGDPDCARQWLRGRRVAMGSRWSSEEERQPLLGPGLGPGLGASWRSREAAAAALPAAVPGPGRVYGRRWLVLLLFSLLAFVQGLVWNTWGPIQNSARQAYGFSSWDIALLVLWGPIGFLPCFAFMWLLDKRGLRITVLLTSFLMVLGTGLRCIPISDLILKRRLIHGGQMLNGLAGPTVMNAAPFLSTTWFSADERATATAIASMLSYLGGACAFLVGPLVVPAPNGTSPLLAAESSRAHIKDRIEAVLYAEFGVVCLIFSATLAYFPPRPPLPPSVAAASQRLSYRRSVCRLLRFHFICYICIHLCILLSESD

SEQ ID NO: 745082 - protein, 256 aa, Homo sapiens
LSCLLGTRFNLDTSSKHPRVPLPSLLEYSLSGSFPLPDSAALVPAFSALPALRLGPGSFPLAGVSSPPAEGRADPSLLAACPASPPPRRPGSGRAGAPGAVRRPRATTAASASCCSGLFCAGLVGGDPDCARQWLRGRRVAMGSRWSSEEERQPLLGPGLGPGLGASWRSREAAAAALPAAVPGPGRVYGRRWLVLLLFSLLAFVQGLVWNTWGPIQNSARQAYGFSSWDIALLVLWGPIGFLPCFAFMWLLDKRD

SEQ ID NO: 745083 - protein, 529 aa, Homo sapiens
LSCLLGTRFNLDTSSKHPRVPLPSLLEYSLSGSFPLPDSAALVPAFSALPALRLGPGSFPLAGVSSPPPEGRADPSLLAACPASPPPRRPGSGRAGAPGAVRRPRATTAASASCCSGLFCAGLVGGDPDCARQWLRGRRVAMGSRWSSEEERQPLLGPGLGPGLGASWRSREAAAAALPAAVPGPGRVYGRRWLVLLLFSLLAFVQGLVWNTWGPIQNSARQAYGFSSWDIALLVLWGPIGFLPCFAFMWLLDKRGLRITVLLTSFLMVLGTGLRCIPISDLILKRRLIHGGQMLNGLAGPTVMNAAPFLSTTWFSADERATATAIASMLSYLGGACAFLVGPLVVPAPNGTSPLLAAESSRAHIKDRIEAVLYAEFGVVCLIFSATLAYFPPRPPLPPSVAAASQRLSYRRSVCRLLSNFRFLMIALAYAIPLGVFAGWSGVLDLILTPAHVSQVDAGWIGFWSIVGGCVVGIAMARFADFIRGMLKLILLLLFSGATLSSTWFTLTCLNSITHLPLTTGEHRLFLNF

SEQ ID NO: 745084 - protein, 75 aa, Homo sapiens
RPPRLPPGHCKDDLPHSHSGSPLTQHRPCAKPAGQVKVVSSPNLAEAPFFSSAHCFGTVYAADVSRQHGLHVTCL

SEQ ID NO: 745085 - protein, 109 aa, Homo sapiens
MLWGRPKEIFASRERETFLEDRKTFLEEIMKQAQKRKRAFKNDVKFMADLILETRSPSRVEIFSLRHQAMTVQSAAETAFRPSVLTQVQELCGVFHLGLLLFKAHKSRL

SEQ ID NO: 745086 - protein, 119 aa, Homo sapiens
ETSLILSPTLECSGAISAHCNLCLPGSSNSCASASRVAWITGMHHHAQLIFVFLVEMGVHHVGLAGLELLTSGDPPASASQSAGITGVSHRIWPHILFCTAWCPILQNTKLCNHILTGI

SEQ ID NO: 745087 - protein, 838 aa, Homo sapiens
VKETHLPKVVLVDLVPGDSDYEVISDDIPLQLVTDPPQLTVKDISCINTECIDIEDKSCDFFGSEVRCNCKASTPSMTNQCKETFKIINRKKDYIILGEPSCQSCGSEMNFNVDASDQSMTYESQGPDEKMVKYIDSEDKSCGYNGSKGKFNLEDTSHRTTHRLQKAHKEASLRKDPRNAGLKGKSCQSSASAVDFGASSKSALHRRADKKKRSKLKHRDLEVSCEPDGFEMNFQCAPPLPSDTDQPQETVKKRHPCKKVSSDLKEKNHDSQSSSVLKVDSVRNLKKAKDVIEDNPDEPVLEALPHVPPSFVGKTWSQIMREDDIKINALVKEFREGRFHCYFDDDCETKKVSSKGKKKVTWADLQGKEDTAPTQAVSESDDIVCGISDIDDLSVALDKPCHRHPPAERPPKQKGRVASQCQTAKISHSTQTSCKNYPVMKRKIIRQEEDPPKSKCSRLQDDRKTKKKVKIGTVEFPASCTKVLKPMQPKALVCVLSSLNIKLKEGEGLPFPKMRHHSWDNDIRFICKYKRNIFDYYEPLIKQIVISPPLSVIVPEFERRNWVKIHFNRSNQNSSAGDNDADGQGSASAPLMAVPARYGFNSHQGTSDSSLFLEESKVLHARELPKKRNFQLTFLNHDVVKISPKSVRNKLLESQSKKKIHGKRVTTSSNKLGFPKKVYKPIILQQKPRKASEKQSIWIRTKPSDIIRKYISKYSVFLRHRYQSRSAFLGRYLKKKKSVVSRLKKAKRTAKVLLNSSVPPAGAEELSSAMANPPPKRPVRASCRVARRRKKTDESYHGRQKGPSTPVRAYDLRSSSCLQQRERMMTRLANKLRGNEVK

SEQ ID NO: 745088 - protein, 838 aa, Homo sapiens; identical to SEQ ID NO: 745087

SEQ ID NO: 745089 - protein, 30 aa, Homo sapiens
MRLGWKSHGPLTESRCFSPSLSDTVLMVDE

SEQ ID NO: 745090 - protein, 50 aa, Homo sapiens
ATQPPPAPPPPVPAPPEAAATERLAAAAERLAAATTAASCKESSSSSKRG

SEQ ID NO: 745091 - protein, 640 aa, Homo sapiens
MGERTLHAAVPTPGYPESESIMMAPICLVENQEEQLTVNSKALEILDKISQPVVVVAIVGLYRTGKSYLMNRLAGKRNGFPLGSTVQSETKGIWMWCVPHLSKPNHTLVLLDTEGLGDVEKSNPKNDSWIFALAVLLSSSFVYNSVSTINHQALEQLHYVTELAELIRAKSCPRPDEAEDSSEFASFFPDFIWTVRDFTLELKLDGNPITEDEYLENALKLIPGKNPKIQNSNMPRECIRHFFRKRKCFVFDRPTNDKQYLNHMDEVPEENLERHFLMQSDNFCSYIFTHAKTKTLREGIIVTGKRLGTLVVTYVDAINSGAVPCLENAVTALAQLENPAAVQRAADHYSQQMAQQLRLPTDTLQELLDVHAACEREAIAVFMEHSFKDENHEFQKKLVDTIEKKKGDFVLQNEEASAKYCQAELKRLSEHLTESILRGIFSVPGGHNLYLEEKKQVEWDYKLVPRKGVKANEVLQNFLQSQVVVEESILQSDKALTAGEKAIAAERAMKEAAEKEQELLREKQKEQQQMMEAQERSFQENIAQLKKKMERERENLLREHERLLKHKLKVQEEMLKEEFQKKSEQLNKEINQLKEKIESTKNEQLRLLKILDMASNIMIVTLPGASKLLGVGTKYLGSRI

SEQ ID NO: 745092 - protein, 640 aa, Homo sapiens; identical to SEQ ID NO: 745091

SEQ ID NO: 745093 - protein, 477 aa, Homo sapiens
PLLGTQERCPRPDEAEDSSEFASFFPDFIWTVRDFTLELKLDGNPITEDEYLENALKLIPGKNPKIQNSNMPRECIRHFFRKRKCFVFDRPTNDKQYLNHMDEVPEENLERHFLMQSDNFCSYIFTHAKTKTLREGIIVTGKRLGTLVVTYVDAINSGAVPCLENAVTALAQLENPAAVQRAADHYSQQMAQQLRLPTDTLQELLDVHAACEREAIAVFMEHSFKDENHEFQKKLVDTIEKKKGDFVLQNEEASAKYCQAELKRLSEHLTESILRGIFSVPGGHNLYLEEKKQVEWDYKLVPRKGVKANEVLQNFLQSQVVVEESILQSDKALTAGEKAIAAERAMKEAAEKEQELLREKQKEQQQMMEAQERSFQENIAQLKKKMERERENLLREHERLLKHKLKVQEEMLKEEFQKKSEQLNKEINQLKEKIESTKNEQLRLLKILDMASNIMIVTLPGASKLLGVGTKYLGSRI

SEQ ID NO: 745094 - protein, 640 aa, Homo sapiens; identical to SEQ ID NO: 745091

SEQ ID NO: 745095 - protein, 510 aa, Homo sapiens
MGERTLHAAVPTPGYPESESIMMAPICLVENQEEQLTVNSKALEILDKISQPVVVVAIVGLYRTGKSYLMNRLAGKRNGFPLGSTVQSETKGIWMWCVPHLSKPNHTLVLLDTEGLGDVEKSNPKNDSWIFALAVLLSSSFVYNSVSTINHQALEQLHYVTELAELIRAKSCPRPDEAEDSSEFASFFPDFIWTVRDFTLELKLDGNPITEDEYLENALKLIPGKNPKIQNSNMPRECIRHFFRKRKCFVFDRPTNDKQYLNHMDEVPEENLERHFLMQSDNFCSYIFTHAKTKTLREGIIVTGKRLGTLVVTYVDAINSGAVPCLENAVTALAQLENPAAVQRAADHYSQQMAQQLRLPTDTLQELLDVHAACEREAIAVFMEHSFKDENHEFQKKLVDTIEKKKGDFVLQNEEASAKYCQAELKRLSEHLTESILRGIFSVPGGHNLYLEEKKQVEWDYKLVPRKGVKANEVLQNFLQSQVVVEESILQSDKALTAGEKAIAGTGAGL

SEQ ID NO: 745096 - protein, 120 aa, Homo sapiens
MVCGPNLAQHLFLEMRLYWSIRAPICLHIVFGSICATVADLHNGQRNLKAEKLEILTICKAENIYYLTSLFLCSFPFPFPFFLTGSHSVTQAVVQWCNHGSLHPRPPGLKRSSHLSMLGG

SEQ ID NO: 745097 - protein, 120 aa, Homo sapiens
SPQPPQNILHSHDSFRQIQRETGTLGYQRTRDEKVSSFRNTSDSPSGSPILQSPPRLVKNEDYCTRPQIQNEKCTWWRMGGEWGLVSAFFTSPQEFWHALAYEKHGEGTGGRWMGVDRIC

SEQ ID NO: 745098 - protein, 154 aa, Homo sapiens
MSTEQMQPLEVSEDRLDKLDPRCSHLDDLSDQFIKDCDLKKKPRKGKNVQATLNVESDQKKPRRKDTPALHIPPFIPGVFSEHLIKRYDVQERHPKGKMIPVLHNTDLEQKKPRRKDTPALHMSPFAAGVTLLRDERPKAIVEDDEKDGDKIAI

SEQ ID NO: 745099 - protein, 263 aa, Homo sapiens
MVIGQLEGILRELKEVAKELREVVSQIDKLTSDFDFELEPDDWTTATVSSTSSTDKAGMGGPFDLGHLDFMTADILSDSWEFCSFLDVSTPSDSVDGPESTRPGAGPDYRLMNGGTPIPNGPRVETPDSSSEEAFGAGPTVKSQLPQRTPGTRERVRFSDKVLYHALCCDDEEGDGEQEVEEEEVGLPPEPAHTEAHAGPHKPSPAPYKSRRSPLTSRHSGSTLAPEQTRRVTRNSSTQTVSDKSTQTVLPYTATRQKARGKN

SEQ ID NO: 745100 - protein, 154 aa, Homo sapiens
MGRPRGWAEQTLAAAPDAAGAGARTFWVRAERVLGARRCQLTPGGVGQGRPQRSTDPADLDWTERIPDGAEPGECRAWAEGIPAPSQPSDFGSRAGTCPASPRPPRAPVTCGLGAPNLPDPRSFPTPSLERLEKDFSCPLPWSAEAGGGGHIEL

SEQ ID NO: 745101 - protein, 289 aa, Homo sapiens
GYLEDPPGALPPGALTLRERIRQRMKMVIGQLEGILRELKEVAKELREVVSQIDKLTSDFDFELEPDDWTTATVSSTSSTDKAGMGGPFDLGHLDFMTADILSDSWEFCSFLDVSTPSDSVDGPESTRPGAGPDYRLMNGGTPIPNGPRVETPDSSSEEAFGAGPTVKSQLPQRTPGTRERVRFSDKVLYHALCCDDEEGDGEQEVEEEEVGLPPEPAHTEAHAGPHKPSPAPYKSRRSPLTSRHSGSTLAPEQTRRVTRNSSTQTVSDKSTQTVLPYTATRQKARGKN

SEQ ID NO: 745102 - protein, 884 aa, Homo sapiens
SLCARFDLSQLAKLRSVLFYTACLDPNFPATLFKDKMKCTVNNQQSKKIMVAADIVTIFNLIQMNGGAAKEKLPTGRQKVRKKEASFESCRSDTEICNAAECEPLNCELSERSFSRGYPIRQSSKCRKMDCKDCPQFVPASEPNFLLGVSKEVKNRAASLDRLQALAPYSVTSPQPCEMQRTYFPMNIENESISDQDSLPINQSIKETFISNEEPFVVQSCVQKRNIFKEDFHNLMAVSPSLVGPISKAENEHREPQSRKEPHKPPFFNHSFEMPYNSQYLNPVYSPVPDKRRAKHESLDDLQASTYFGPTPVMGTQEARRCLGKPNKQTPWPAKSWSLNTEEVPDFERSFFNRNPSEEKLHYPNASSQTPNFPAPERRPTYLVPKDQQPILPIAYAAKQNGLKSKEISSPVDLEKHEPVKKFKDKSINCTSGQLSSDTSSVGTQTEHVLEPKKCRDLCTSGQGKYSDRHTMKHSDDDSEIVSDDISDIFRFLDDMSISGSTGVIQSSCYNSTGSLSQLHKSDCDSSPEHNLTKIANGVPNSKGDKGNRPENTHHSEEELKTSVCKLVLRIGEIERKLESLSGVRDEISQVLGKLNKLDQKMQQPEKVSVQIDLNSLTSEGPSDDSASPRMFHAHSGSHGPKLENNPDWCCSDASGSNSESLRVKALKKSLFTRPSSRSLTEENSATESKIASISNSPRDWRTITYTNRVGLNEEEIKDTGPGDNKDWHRKSKEADRQYDIPPQHRLPKQPKDGFLVEQVFSPHPYPASLKAHMKSNPLYTDMRLTELAEVKRGQPSWTIEEYARNAGDKGKLTALDLQTQESLNPNNLEYWMEDIYTPGYDSLLKRKEAEFRRAKVCKIAALIAAAACTVILVIVVPICTMKS

SEQ ID NO: 745103 - protein, 520 aa, Homo sapiens
PAWPSEPTTFGPTGVPAPIPVLSVTQTLTTGPDSAVSQAHLTPSPVPVSIQAVNQPLMPLPQTLSLYQDPLYPGFPCNEKGDRAIVPPYSLCQTGEDLPKDKNILRFFFNLGVKAYSCPMWAPHSYLYPLHQAYLAACRMYPKVPVPVYPHNPWFQEAPAAQNESDCTCTDAHFPMQTEASVNGQMPQPEIGPPTFSSPLVIPPSQVSESHGQLSYQADLESETPGQLLHADYEESLSGKNMFPQPSFGPNPFLGPVPIAPPFFPHVWYGYPFQGFIENPVMRQNIVLPSDEKGELDLSLENLDLSKDCGSVSTVDEFPEARGEHVHSLPEASVSSKPDEGRTEQSSQTRKADTALASIPPVAEGKAHPPTQILNRERETVPVELEPKRTIQSLKEKTEKVKDPKTAADVVSPGANSVDSRVQRPKEESSEDENEVSNILRSGRSKQFYNQTYGSRKYKSDWGYSGRGGYQHVRSEESWKGQPSRSRDEGYQYHRNVRGRPFRGDRRRSGMGDGHRGQHT

SEQ ID NO: 745104 - protein, 491 aa, Homo sapiens
DALPQGWLTAVLTTGMERVLNELGIQPLMPLPQTLSLYQDPLYPGFPCNEKGDRAIVPPYSLCQTGEDLPKDKNILRFFFNLGVKAYSCPMWAPHSYLYPLHQAYLAACRMYPKVPVPVYPHNPWFQEAPAAQNESDCTCTDAHFPMQTEASVNGQMPQPEIGPPTFSSPLVIPPSQVSESHGQLSYQADLESETPGQLLHADYEESLSGKNMFPQPSFGPNPFLGPVPIAPPFFPHVWYGYPFQGFIENPVMRQNIVLPSDEKGELDLSLENLDLSKDCGSVSTVDEFPEARGEHVHSLPEASVSSKPDEGRTEQSSQTRKADTALASIPPVAEGKAHPPTQILNRERETVPVELEPKRTIQSLKEKTEKVKDPKTAADVVSPGANSVDSRVQRPKEESSEDENEVSNILRSGRSKQFYNQTYGSRKYKSDWGYSGRGGYQHVRSEESWKGQPSRSRDEGYQYHRNVRGRPFRGDRRRSGMGDGHRGQHT

SEQ ID NO: 745105 - protein, 429 aa, Homo sapiens
PAWPSEPTTFGPTGVPAPIPVLSVTQTLTTGPDSAVSQAHLTPSPVPVSIQAVNQPLMPLPQTLSLYQDPLYPGFPCNEKGDRAIVPPYSLCQTGEDLPKDKNILRFFFNLGVKAYSCPMWAPHSYLYPLHQAYLAACRMYPKVPVPVYPHNPWFQEAPAAQNESDCTCTDAHFPMQTEASVNGQMPQPEIGPPTFSSPLVIPPSQVSESHGQLSKDCGSVSTVDEFPEARGEHVHSLPEASVSSKPDEGRTEQSSQTRKADTALASIPPVAEGKAHPPTQILNRERETVPVELEPKRTIQSLKEKTEKVKDPKTAADVVSPGANSVDSRVQRPKEESSEDENEVSNILRSGRSKQFYNQTYGSRKYKSDWGYSGRGGYQHVRSEESWKGQPSRSRDEGYQYHRNVRGRPFRGDRRRSGMGDGHRGQHT

SEQ ID NO: 745106 - protein, 108 aa, Homo sapiens
PAWPSEPTTFGPTGVPAPIPVLSVTQTLTTGPDSAVSQAHLTPSPVPVSIQAVNQPLMPLPQTLSLYQDPLYPGFPCNEKGDRAIVPPYSLTTPHCQRLTDNALTDNA

SEQ ID NO: 745107 - protein, 401 aa, Homo sapiens
MWAPHSYLYPLHQAYLAACRMYPKVPVPVYPHNPWFQEAPAAQNESDCTCTDAHFPMQTEASVNGQMPQPEIGPPTFSSPLVIPPSQVSESHGQLSYQADLESETPGQLLHADYEESLSGKNMFPQPSFGPNPFLGPVPIAPPFFPHVWYGYPFQGFIENPVMRQNIVLPSDEKGELDLSLENLDLSKDCGSVSTVDEFPEARGEHVHSLPEASVSSKPDEGRTEQSSQTRKADTALASIPPVAEGKAHPPTQILNRERETVPVELEPKRTIQSLKEKTEKVKDPKTAADVVSPGANSVDSRVQRPKEESSEDENEVSNILRSGRSKQFYNQTYGSRKYKSDWGYSGRGGYQHVRSEESWKGQPSRSRDEGYQYHRNVRGRPFRGDRRRSGMGDGHRGQHT

SEQ ID NO: 745108 - protein, 251 aa, Homo sapiens
PAWPSEPTTFGPTGVPAPIPVLSVTQTLTTGPDSAVSQAHLTPSPVPVSIQAVNQPLMPLPQTLSLYQDPLYPGFPCNEKGDRAIVPPYSLCQTGEDLPKDKNILRFFFNLGVKAYSCPMWAPHSYLYPLHQAYLAACRMYPKVPVPVYPHNPWFQEAPAAQNESDCTCTDAHFPMQTEASVNGQMPQPEIGPPTFSSPLVIPPSQVSESHGQLSYQADLESETPGQLLHADYEESLSGKNMFPTAKQKSG

SEQ ID NO: 745109 - protein, 520 aa, Homo sapiens; identical to SEQ ID NO: 745103

SEQ ID NO: 745110 - protein, 234 aa, Homo sapiens
  misc_feature (153)..(153): Xaa can be any naturally occurring amino acid
  misc_feature (162)..(162): Xaa can be any naturally occurring amino acid
  misc_feature (167)..(167): Xaa can be any naturally occurring amino acid
MAGEKVEKPDTKEKKPEAKKVDAGGKVKKGNLKAKKPKKGKPHCSRNPVLVRGIGRYSRSAMYSRKAMYKRKYSAAKSKVEKKKKEKVLATVTKPVGGDKNGGTRVVKLRKMPRYYPTEDVPRKLLSHGKKPFSQHVRKLRAQHYPPPGGGGXTPKFFLGQXFSQKXFSPPPFFLPRLRGKPGPPPKNEDRGKRVVFLKQLASGLLLVTGPLVLNRVPLRRTHQKFVIATSTKI

SEQ ID NO: 745111 - protein, 202 aa, Homo sapiens
MAGEKVEKPDTKEKKPEAKKVDAGGKVKKGNLKAKKPKKGKPHCSRNPVLVRGIGRYSRSAMYSRKAMYKRKYSAAKSKVEKKKKEKVLATVTKPVGGDKNGGTRVVKLRKMPRYYPTEDVPRKLLSHGKKPFSQHVRKLRASITPGTILIILTGRHRGKRVVFLKQLASGLLLVTGPLVLNRVPLRRTHQKFVIATSTKID

SEQ ID NO: 745112 - protein, 183 aa, Homo sapiens
MAGEKVEKPDTKEKKPEAKKVDAGGKVKKGNLKAKKPKKGKPHCSRNPVLVRGIGRYSRSAMYSRKAMYKRKYSAAKSKVEKKKKEKVLATVTKPVGGDKNGGTRVVKLRKMPRYYPTEDVPRKLLSHGKKPFSQHVNRGKRVVFLKQLASGLLLVTGPLVLNRVPLRRTHQKFVIATSTKID

SEQ ID NO: 745113 - protein, 428 aa, Homo sapiens
MKRRKYGFIYKTHLFGRPTVRVMGADNVRRILLGEHRLVSVHWPASVRTILGSGCLSNLHDSSHKQRKKVIMRAFSREALECYVPVITEEVGSSLEQWLSCGERGLLVYPEVKRLMFRIAMRILLGCEPQLAGDGDSEQQLVEAFEEMTRNLFSLPIDVPFSGLYRGMKARNLIHARIEQNIRAKICGLRASEAGQGCKDALQLLIEHSWERGERLDMQALKQSSTELLFGGHETTASAATSLITYLGLYPHVLQKVREELKSKGLLCKSNQDNKLDMEILEQLKYIGCVIKETLRLNPPVPGGFRVALKTFELNGYQIPKGWNVIYSICDTHDVAEIFTNKEEFNPDRFMLPHPEDASRFSFIPFGGGLRSCVGKEFAKILLKIFTVELARHCDWQLLNGPPTMKTSPTVYPVDNLPARFTHFHGEI

SEQ ID NO: 745114 - protein, 490 aa, Homo sapiens
MGLPALLASALCTFVLPLLLFLAAIKLWDLYCVSGRDRSCALPLPPGTMGFPFFGETLQMVLQRRKFLQMKRRKYGFIYKTHLFGRPTVRVMGADNVRRILLGETGWCRSTGQRRCAPFWDLAASLTCTTPRTSSARSREALECYVPVITEEVGSSLEQWLSCGERGLLVYPEVKRLMFRIAMRILLGCEPQLAGDGDSEQQLVEAFEEMTRNLFSLPIDVPFSGLYRGMKARNLIHARIEQNIRAKICGLRASEAGQGCKDALQLLIEHSWERGERLDMQALKQSSTELLFGGHETTASAATSLITYLGLYPHVLQKVREELKSKGLLCKSNQDNKLDMEILEQLKYIGCVIKETLRLNPPVPGGFRVALKTFELNGYQIPKGWNVIYSICDTHDVAEIFTNKEEFNPDRFMLPHPEDASRFSFIPFGGGLRSCVGKEFAKILLKIFTVELARHCDWQLLNGPPTMKTSPTVYPVDNLPARFTHFHGEI

SEQ ID NO: 745115 - protein, 89 aa, Homo sapiens
KYGFIYKTHLFGRPTVRVMGADNVRRILLGEHRLVSVHWPASVRTILGSGCLSNLHDSSHKQRKKVGAGGDGWTGRGTPFMSGIPADGC

SEQ ID NO: 745116 - protein, 497 aa, Homo sapiens
MGLPALLASALCTFVLPLLLFLAAIKLWDLYCVSGRDRSCALPLPPGTMGFPFFGETLQMVLQRRKFLQMKRRKYGFIYKTHLFGRPTVRVMGADNVRRILLGEHRLVSVHWPASVRTILGSGCLSNLHDSSHKQRKKVIMRAFSREALECYVPVITEEVGSSLEQWLSCGERGLLVYPEVKRLMFRIAMRILLGCEPQLAGDGDSEQQLVEAFEEMTRNLFSLPIDVPFSGLYRGMKARNLIHARIEQNIRAKICGLRASEAGQGCKDALQLLIEHSWERGERLDMQALKQSSTELLFGGHETTASAATSLITYLGLYPHVLQKVREELKSKGLLCKSNQDNKLDMEILEQLKYIGCVIKETLRLNPPVPGGFRVALKTFELNGYQIPKGWNVIYSICDTHDVAEIFTNKEEFNPDRFMLPHPEDASRFSFIPFGGGLRSCVGKEFAKILLKIFTVELARHCDWQLLNGPPTMKTSPTVYPVDNLPARFTHFHGEI

SEQ ID NO: 745117 - protein, 34 aa, Homo sapiens
MKRRKYGFIYKTHLFGRPTVRVMGADNVRRILLG

SEQ ID NO: 745118 - protein, 230 aa, Homo sapiens
SGGERQTYIKLGMARVATFLDIYEDGILDIVVLSKGYTKNDFAIHTLKNNFEADAYFVKVIVLSGLCSNDCPRKITPFGVNQPGPYIMYTTVDANGYLKNGSAGQLSQSAHLALQLPYNVLGLGRSANFLDHLYVGIPRPSGEKSIRKQEWTAIIPNSQLIVIPYPHNVPRSWSAKLYLTPSNIVLLTAIALIGVCVFILAIIGILHWQEKKADDREKRQEAHRFHFDAM

SEQ ID NO: 745119 - protein, 136 aa, Homo sapiens
LLNSNLASDNIHLELLSFNFLRPLFVSYHIISSVPCSQDFFCLECLPSLLSRLSFLNSIQVLPAPGSQLSFWSSGWPCLSKVLWVSLSLLMEPAHGMPPQAAWKTLHRYGESLTQAEGQSSTRLLIFRDGRPRREF

SEQ ID NO: 745120 - protein, 121 aa, Homo sapiens
ESIWNNRWLRTISIILYLNKQDMLAEKVLAGKSKIEDYFPEYANYTVPEDATPDAGEDPKVTRAKFFIRDLFLRISTATGDGKHYCYPHFTCAVDTENIRRVFNDCRDIIQRMHLKQYELL

SEQ ID NO: 745121 - protein, 107 aa, Homo sapiens
MSHFFNPEMFLFMWERGGGGESPSWSSPNLFLSSEGHFSHRQRDSRAALERAVRPEVSKPQLWQPLESPWTEAHWAEWVECPCQSRTDGWFLPWGWASAPCFLCPPS

SEQ ID NO: 745122 - protein, 74 aa, Homo sapiens
LVLMEAILEGGGSYNDSGNYNNQSSNFEPMMKGNFGGRSSGSYGGGSQYFPKPQNRGGYGSSSSSSSYSSGRRF

SEQ ID NO: 745123 - protein, 577 aa, Homo sapiens
HEGEEGCVCFPFCDDSKFSEASPAMLNSIGCDDYLGSDKVVDKCGVCGGDNTGCQVVSGVFKHALTSLGYHRVVEIPEGATKINITEMYKSNNYLALRSRSGRSIINGNWAIDRPGKYEGGGTMFTYKRPNEISSTAGESFLAEGPTNEILDVYMIHQQPNPGVHYEYVIMGTNAISPQVPPHRRPGEPFNGQMVTEGRSQEEGEQKGRNEEKEDLRGEAPEMFTSESAQTFPVRHPDRFSPHRPDNLVPPAPQPPRRSRDHNWKQLGTTECSTTCGKGSQYPIFRCVHRSTHEEAPESYCDSSMKPTPEEEPCNIFPCPAFWDIGEWSECSKTCGLGMQHRQVLCRQVYANRSLTVQPYRCQHLEKPETTSTCQLKICSEWQIRTDWTSCSVPCGVGQRTRDVKCVSNIGDVVDDEECNMKLRPNDIENCDMGPCAKSWFLTEWSERCSAECGAGVRTRSVVCMTNHVSSLPLEGCGNNRPAEATPCDNGPCTGKVEWFAGSWSQCSIECGSGTQQREVICVRKNADTFEVLDPSECSFLEKPPSQQSCHLKPCGAKWFSTEWSMSLQRAMLTRPS

SEQ ID NO: 745124 - protein, 661 aa, Homo sapiens
HEGEEGCVCFPFCDDSKFSEASPAMLNSIGCDDYLGSDKVVDKCGVCGGDNTGCQVVSGVFKHALTSLGYHRVVEIPEGATKINITEMYKSNNYLALRSRSGRSIINGNWAIDRPGKYEGGGTMFTYKRPNEISSTAGESFLAEGPTNEILDVYMIHQQPNPGVHYEYVIMGTNAISPQVPPHRRPGEPFNGQMVTEGRSQEEGEQKGRNEEKEDLRGEAPEMFTSESAQTFPVRHPDRFSPHRPDNLVPPAPQPPRRSRDHNWKQLGTTECSTTCGKGSQYPIFRCVHRSTHEEAPESYCDSSMKPTPEEEPCNIFPCPAFWDIGEWSECSKTCGLGMQHRQVLCRQVYANRSLTVQPYRCQHLEKPETTSTCQLKICSEWQIRTDWTSCSVPCGVGQRTRDVKCVSNIGDVVDDEECNMKLRPNDIENCDMGPCAKSWFLTEWSERCSAECGAGVRTRSVVCMTNHVSSLPLEGCGNNRPAEATPCDNGPCTGKVEWFAGSWSQCSIECGSGTQQREVICVRKNADTFEVLDPSECSFLEKPPSQQSCHLKPCGAKWFSTEWSMCSKSCQGGFRVREVRCLSDDMTLSNLCDPQLKPEERESCNPQDCVPEVDENCKDKYYNCNVVVQARLCVYNYYKTACCASCTRVANRQTGFLGSR

SEQ ID NO: 745125 - protein, 375 aa, Homo sapiens
  misc_feature (4)..(4): Xaa can be any naturally occurring amino acid
LGPXMCRSQRHVPLPKRHVPLPEKKPCNIFSLAQPFWDIGEWSECSKTCGLGMQHRQVLCRQVYANRSLTVQPYRCQHLEKPETTSTCQLKICSEWQIRTDWTSCSVPCGVGQRTRDVKCVSNIGDVVDDEECNMKLRPNDIENCDMGPCAKSWFLTEWSERCSAECGAGVRTRSVVCMTNHVSSLPLEGCGNNRPAEATPCDNGPCTGKVEWFAGSWSQCSIECGSGTQQREVICVRKNADTFEVLDPSECSFLEKPPSQQSCHLKPCGAKWFSTEWSMCSKSCQGGFRVREVRCLSDDMTLSNLCDPQLKPEERESCNPQDCVPEVDENCKDKYYNCNVVVQARLCVYNYYKTACCASCTRVANRQTGFLGSR

SEQ ID NO: 745126 - protein, 583 aa, Homo sapiens
HEGEEGCVCFPFCDDSKFSEASPAMLNSIGCDDYLGSDKVVDKCGVCGGDNTGCQVVSGVFKHALTSLGYHRVVEIPEGATKINITEMYKSNNYLALRSRSGRSIINGNWAIDRPGKYEGGGTMFTYKRPNEISSTAGESFLAEGPTNEILDVYMIHQQPNPGVHYEYVIMGTNAISPQVPPHRRPGEPFNGQMVTEGRSQEEGEQKGRNEEKEDLRGEAPEMFTSESAQTFPVRHPDRFSPHRPDNLVPPAPQPPRRSRDHNWKQLGTTECSTTCGKGSQYPIFRCVHRSTHEEAPESYCDSSMKPTPEEEPCNIFPCPAFWDIGEWSECSKTCGLGMQHRQVLCRQVYANRSLTVQPYRCQHLEKPETTSTCQLKICSEWQIRTDWTSCSVPCGVGQRTRDVKCVSNIGDVVDDEECNMKLRPNDIENCDMGPCAKSWFLTEWSERCSAECGAGVRTRSVVCMTNHVSSLPLEGCGNNRPAEATPCDNGPCTGKVEWFAGSWSQCSIECGSGTQQREVICVRKNADTFEVLDPSECSFLEKPPSQQSCHLKPCGAKWFSTEWSMVSHGALDGGCIGTTSPT

SEQ ID NO: 745127 - protein, 661 aa, Homo sapiens; identical to SEQ ID NO: 745124

SEQ ID NO: 745128 - protein, 721 aa, Homo sapiens
RSYTNRMFSKAVEYPGGTVCIYNQQPFMGLVFMRWEPFAELKGNLKCEYNCQAMGYRFYLLPAETVVCIAPSVDLNEPALCLSGLCQSIGCDDYLGSDKVVDKCGVCGGDNTGCQVVSGVFKHALTSLGYHRVVEIPEGATKINITEMYKSNNYLALRSRSGRSIINGNWAIDRPGKYEGGGTMFTYKRPNEISSTAGESFLAEGPTNEILDVYMIHQQPNPGVHYEYVIMGTNAISPQVPPHRRPGEPFNGQMVTEGRSQEEGEQKGRNEEKEDLRGEAPEMFTSESAQTFPVRHPDRFSPHRPDNLVPPAPQPPRRSRDHNWKQLGTTECSTTCGKGSQYPIFRCVHRSTHEEAPESYCDSSMKPTPEEEPCNIFPCPAFWDIGEWSECSKTCGLGMQHRQVLCRQVYANRSLTVQPYRCQHLEKPETTSTCQLKICSEWQIRTDWTSCSVPCGVGQRTRDVKCVSNIGDVVDDEECNMKLRPNDIENCDMGPCAKSWFLTEWSERCSAECGAGVRTRSVVCMTNHVSSLPLEGCGNNRPAEATPCDNGPCTGKVEWFAGSWSQCSIECGSGTQQREVICVRKNADTFEVLDPSECSFLEKPPSQQSCHLKPCGAKWFSTEWSMCSKSCQGGFRVREVRCLSDDMTLSNLCDPQLKPEERESCNPQDCVPEVDENCKDKYYNCNVVVQARLCVYNYYKTACCASCTRVANRQTGFLGSR

SEQ ID NO: 745129 - protein, 221 aa, Homo sapiens
MCPSPVSQCSAECGAGVRTRSVVCMTNHVSSLPLEGCGNNRPAEATPCDNGPCTGKVEWFAGSWSQCSIECGSGTQQREVICVRKNADTFEVLDPSECSFLEKPPSQQSCHLKPCGAKWFSTEWSMCSKSCQGGFRVREVRCLSDDMTLSNLCDPQLKPEERESCNPQDCVPEVDENCKDKYYNCNVVVQARLCVYNYYKTACCASCTRVANRQTGFLGSR

SEQ ID NO: 745130 - protein, 430 aa, Homo sapiens
MAAVVLPPTAALSSLFPASQREGHTEGGELVNELLKSWLKGLVTFEDVAVEFTQEEWALLDPAQRTLYRDVMLENCRNLASLGNQVDKPRLISQLEQEDKVMTEERGILSGTCPDVENPFKAKGLTPKLHVFRKEQSRNMKMERNHLGATLNECNQCFKVFSTKSSLTRHRKIHTGERPYGCSECGKSYSSRSYLAVHKRIHNGEKPYECNDCGKTFSSRSYLTVHKRIHNGEKPYECSDCGKTFSNSSYLRPHLRIHTGEKPYKCNQCFREFRTQSIFTRHKRVHTGEGHYVCNQCGKAFGTRSSLSSHYSIHTGEYPYECHDCGRTFRRRSNLTQHIRTHTGEKPYTCNECGKSFTNSFSLTIHRRIHNGEKSYECSDCGKSFNVLSSVKKHMRTHTGKKPYECNYCGKSFTSNSYLSVHTRMHNRQM

SEQ ID NO: 745131 - protein, 272 aa, Homo sapiens
MAAVVLPPTAALSSLFPASQREGHTEGGELVNELLKSWLKGLVTFEDVAVEFTQEEWALLDPAQRTLYRDVMLENCRNLASLGNQVDKPRLISQLEQEDKVMTEERGILSGTCPDVENPFKAKGLTPKLHVFRKEQSRNMKMERNHLGATLNECNQCFKVFSTKSSLTRHRKIHTGERPYGCSECGKSYSSRSYLAVHKRIHNGEKPYECNDCGKTFSSRSYLTVHKRIHNGEKPYECSDCGKTFSNSSYLRPHLRIHTGYICTVFLQCEFS

SEQ ID NO: 745132 - protein, 354 aa, Homo sapiens
MAAVVLPPTAALSSLFPASQREGHTEGGELVNELLKSWLKGLVTFEDVAVEFTQEEWALLDPAQRTLYRDVMLENCRNLASLGNQVDKPRLISQLEQEDKVMTEERGILSGTCPDVENPFKAKGLTPKLHVFRKEQSRNMKMERNHLGATLNECNQCFKVFSTKSSLTRHRKIHTGERPYGCSECGKSYSSRSYLAVHKRIHNGEKPYECNDCGKTFSSRSYLTVHKRIHNGEKPYECSDCGKTFSNSSYLRPHLRIHTGEKPYKCNQCFREFRTQSIFTRHKRVHTGEGHYVCNQCGKAFGTRSSLSSHYSIHTGEYPYECHDCGRTFRRRSNLTQHIRTHTGEKPYTCNECG

SEQ ID NO: 745133 - protein, 423 aa, Homo sapiens
MAAVVLPPTAASQREGHTEGGELVNELLKSWLKGLVTFEDVAVEFTQEEWALLDPAQRTLYRDVMLENCRNLASLGNQVDKPRLISQLEQEDKVMTEERGILSGTCPDVENPFKAKGLTPKLHVFRKEQSRNMKMERNHLGATLNECNQCFKVFSTKSSLTRHRKIHTGERPYGCSECGKSYSSRSYLAVHKRIHNGEKPYECNDCGKTFSSRSYLTVHKRIHNGEKPYECSDCGKTFSNSSYLRPHLRIHTGEKPYKCNQCFREFRTQSIFTRHKRVHTGEGHYVCNQCGKAFGTRSSLSSHYSIHTGEYPYECHDCGRTFRRRSNLTQHIRTHTGEKPYTCNECGKSFTNSFSLTIHRRIHNGEKSYECSDCGKSFNVLSSVKKHMRTHTGKKPYECNYCGKSFTSNSYLSVHTRMHNRQM

SEQ ID NO: 745134 - protein, 149 aa, Homo sapiens [sequence omitted]

SEQ ID NO: 745135 - protein, 149 aa, Homo sapiens [sequence omitted]

SEQ ID NO: 745136 - protein, 114 aa, Homo sapiens [sequence omitted]

SEQ ID NO: 745137 - protein, 232 aa, Homo sapiens
ERFNKLVVRMTKSLAELQRALAGEVGMSNELDDVARSLFIGHIPNIWRRLAPDTLKSLGNWMVYFLRRFSQYMLWVTESEPSVMWLSGLHIPESYLTALVQATCRKNGWPLDRSTLFTQVTKFQDADEVNERAGQGCFVSGLYLEGADWDIEKGCLIKSKPKVLVVDLPILKIIPIEAHRLKLQNTFRTPVYTTSMRRNAMGVGLVFEADLFTTRHISHWVLQGVCLTLNSD

SEQ ID NO: 745138 - protein, 84 aa, Homo sapiens
ERFNKLVVRMTKSLAELQRALAGEVGMSNELDDVARSLFIGHIPNIWRRLAPDTLKSLGNWMVYFLRRFSQYMLWLLLDGSWKG

SEQ ID NO: 745139 - protein, 145 aa, Homo sapiens
MSAARTGYISLNGARKRSPDRLDAAPYIGKRPSQERSGLQPSLAGWLDSESAACPGPVTRERTPRGASPGPGVPSLAGGEAPQSPLLRLPCDARSPRLGARGEREGGVCLRRGPEACARPCALSAARSYLSTPAATLRAPGARVK

SEQ ID NO: 745140 - protein, 218 aa, Homo sapiens
MSAARTGYISLNGARKRSPDRLDAAPYIGKRPSQERSGLQPSLAGWLDSESAACPGPVTRERTPRGASPGPGVPSLAGGEAPQSPLLRLPCDARSPRLGARGEREGGVCLRRGPEACARPCALSAARSYLSTPAATLRAPGARVTRPPAPARGDPPPWKPRAHSAFLASRRQGGAQVWEGAEAEAVPFSAGSVGGRGPHPSREPVPPGPCASVRGRVK

SEQ ID NO: 745141 - protein, 178 aa, Homo sapiens
MSAARTGYISLNGARKRSPDRLDAAPYIGKRPSQERSGLQPSLAGWLDSESAACPGPVTRERTPRGASPGPGVPSLAGGEAPQSPLLRLPCDARSPRLGARGEREGGVCLRRGPEACARPCALSAARSYLSTPAATLRAPGARVTRPPAPARGDPPPWKPRAHSAFLASRRQGGAQVK

SEQ ID NO: 745142 - protein, 117 aa, Homo sapiens
MAYGVPRKNTVKTILRGSCYNVQEPWDIALLAKTWYTNLANIKLPFLEEISFGGSVQLTKCTTIKDGLLPSAESIKLEREYEVKRLCKLKCQENTSKEIQLLLRERPAGLRRPLPSK

SEQ ID NO: 745143 - protein, 110 aa, Homo sapiens
MEREAKDFWLGPGLFGDAFNKWKKIGHRKCRLNGTLRQEQVLLPLPQQQPSPQEGARMGGQEYSGSVGELKSWGTSQAPHTLEIQEAQLGDSARSRRVPMPVHWDLVPCN

SEQ ID NO: 745144 - protein, 94 aa, Homo sapiens
DSRLSNLQRQLALEVIVTLSETATPMLKKHTNIIAQAVPHILAMMVDLQDDEDWVNADEMEEDDFDSNAVAAESALDRLACGLGGKVVLPMTKE

SEQ ID NO: 745145 - protein, 63 aa, Homo sapiens
MRPWALAVTRWPPSRRASAPAGGSPRMLHPATQQSPFMVDLHEQVHQGPVPLSYTVTTVTTQG

SEQ ID NO: 745146 - protein, 74 aa, Homo sapiens
HEQRARGPAPGGQPYPAAASGSTLPGRMRQEPAAASFFSFSSPSCGSGAPGPGRAAALLRAPRAPQPPPDALLG

SEQ ID NO: 745147 - protein, 684 aa, Homo sapiens
MFAEAAKTTRPCGMAEFKEKPEAPTEQLDVACGQENLPVGAWPPGAAPAPFQYTPDHVVGPGADIDPTQITFPGCICVKTPCLPGTCSCLRHGENYDDNSCLRDIGSGGKYAEPVFECNVLCRCSDHCRNRVVQKGLQFHFQVFKTHKKGWGLRTLEFIPKGRFVCEYAGEVLGFSEVQRRIHLQTKSDSNYIIAIREHVYNGQVMETFVDPTYIGNIGRFLNHSCEPNLLMIPVRIDSMVPKLALFAAKDIVPEEELSYDYSGRYLNLTVSEDKERLDHGKLRKPCYCGAKSCTAFLPFDSSLYCPVEKSNISCGNEKEPSMCGSAPSVFPSCKRLTLETMKMMLDKKQIRAIFLFEFKMGRKAAETTRNINNAFGPGTANERTVQWWFKKFCKGDESLEDEERSGRPSEVDNDQLRAIIEADPLTTTREVAEELNVNHSTVVRHLKQIGKVKKLDKWVPHELTENQKNRRFEVSSSLILRNHNEPFLDRIVTCDEKWILYDNRRRSAQWLDQEEAPKHFPKPILHPKKVMVTIWWSAAGLIHYSFLNPGETITSEKYAQEIDEMNQKLQRLQLALVNRKGPILLHDNARPHVAQPTLQKLNELGYEVLPHPPYSPDLLPTNYHVFKHLNNFLQGKRFHNQQDAENAFQEFVESQSTDFYATGINQLISRWQKCVDCNGSYFD

SEQ ID NO: 745148 - protein, 345 aa, Homo sapiens
MFAEAAKTTRPCGMAEFKEKPEAPTEQLDVACGQENLPVGAWPPGAAPAPFQYTPDHVVGPGADIDPTQITFPGCICVKTPCLPGTCSCLRHGENYDDNSCLRDIGSGGKYAEPVFECNVLCRCSDHCRNRVVQKGLQFHFQVFKTHKKGWGLRTLEFIPKGRFVCEYAGEVLGFSEVQRRIHLQTKSDSNYIIAIREHVYNGQVMETFVDPTYIGNIGRFLNHSCEPNLLMIPVRIDSMVPKLALFAAKDIVPEEELSYDYSGRYLNLTVSEDKERLDHGKLRKPCYCGAKSCTAFLPFDSSLYCPVEKSNISCGNEKEPSMCGSAPSVFPSCKRLTLEGESVQ

SEQ ID NO: 745149 - protein, 359 aa, Homo sapiens
MCGSAPSVFPSCKRLTLETMKMMLDKKQIRAIFLFEFKMGRKAAETTRNINNAFGPGTANERTVQWWFKKFCKGDESLEDEERSGRPSEVDNDQLRAIIEADPLTTTREVAEELNVNHSTVVRHLKQIGKVKKLDKWVPHELTENQKNRRFEVSSSLILRNHNEPFLDRIVTCDEKWILYDNRRRSAQWLDQEEAPKHFPKPILHPKKVMVTIWWSAAGLIHYSFLNPGETITSEKYAQEIDEMNQKLQRLQLALVNRKGPILLHDNARPHVAQPTLQKLNELGYEVLPHPPYSPDLLPTNYHVFKHLNNFLQGKRFHNQQDAENAFQEFVESQSTDFYATGINQLISRWQKCVDCNGS

SEQ ID NO: 745150 - protein, 327 aa, Homo sapiens
MAEGKKDQNSGTSSRTNAFGPGTANERTVQWWFKKFCKGDESLEDEERSGRPSEVDNDQLRAIIEADPLTTTREVAEELNVNHSTVVRHLKQIGKVKKLDKWVPHELTENQKNRRFEVSSSLILRNHNEPFLDRIVTCDEKWILYDNRRRSAQWLDQEEAPKHFPKPILHPKKVMVTIWWSAAGLIHYSFLNPGETITSEKYAQEIDEMNQKLQRLQLALVNRKGPILLHDNARPHVAQPTLQKLNELGYEVLPHPPYSPDLLPTNYHVFKHLNNFLQGKRFHNQQDAENAFQEFVESQSTDFYATGINQLISRWQKCVDCNGSYFD

SEQ ID NO: 745151 - protein, 470 aa, Homo sapiens
PPSRDLLSSLTAHPLVRGNRCACPGLGLFLLTHGITLARVLSFSVHSLKRRTGGLVRTWLFVQSCPQNSRRHHGGSHLPPWSQVSLTGSLYCPVEKSNISCGNEKEPSMCGSAPSVFPSCKRLTLETMKMMLDKKQIRAIFLFEFKMGRKAAETTRNINNAFGPGTANERTVQWWFKKFCKGDESLEDEERSGRPSEVDNDQLRAIIEADPLTTTREVAEELNVNHSTVVRHLKQIGKVKKLDKWVPHELTENQKNRRFEVSSSLILRNHNEPFLDRIVTCDEKWILYDNRRRSAQWLDQEEAPKHFPKPILHPKKVMVTIWWSAAGLIHYSFLNPGETITSEKYAQEIDEMNQKLQRLQLALVNRKGPILLHDNARPHVAQPTLQKLNELGYEVLPHPPYSPDLLPTNYHVFKHLNNFLQGKRFHNQQDAENAFQEFVESQSTDFYATGINQLISRWQKCVDCNGSYFD

SEQ ID NO: 745152 - protein, 676 aa, Homo sapiens
MFAEAAKTTRPCGMAEFKEKPEAPTEQLDVACGQENLPVGAWPPGAAPAPFQYTPDHVVGPGADIDPTQITFPGCICVKTPCLPGTCSCLRHGENYDDNSCLRDIGSGGKYAEPVFECNVLCRCSDHCRNRVVQKGLQFHFQVFKTHKKGWGLRTLEFIPKGRFVCEYAGEVLGFSEVQRRIHLQTKSDSNYIIAIREHVYNGQVMETFVDPTYIGNIGRFLNHSCEPNLLMIPVRIDSMVPKLALFAAKDIVPEEELSYDYSGRYLNLTVSEDKERLDHGKLRKPCYCGAKSCTAFLPFDSSLYCPVEKSNISCGNEKEPSMCGSAPSVFPSCKRLTLETMKMMLDKKQIRAIFLFEFKMGRKAAETTRNINNAFGPGTANERTVQWWFKKFCKGDESLEDEERSGRPSEVDNDQLRAIIEADPLTTTREVAEELNVNHSTVVRHLKQIGKVKKLDKWVPHELTENQKNRRFEVSSSLILRNHNEPFLDRIVTCDEKWILYDNRRRSAQWLDQEEAPKHFPKPILHPKKVMVTIWWSAAGLIHYSFLNPGETITSEKYAQEIDEMNQKLQRLQLALVNRKGPILLHDNARPHVAQPTLQKLNELGYEVLPHPPYSPDLLPTNYHVFKHLNNFLQGKRFHNQQDAENAFQEFVESQSTDFYSYRNKPTYFSLAKMC

SEQ ID NO: 745153 - protein, 140 aa, Homo sapiens
METFVDPTYIGNIGRFLNHSCEPNLLMIPVRIDSMVPKLALFAAKDIVPEEELSYDYSGRYLNLTVSEDKERLDHGKLRKPCYCGAKSCTAFLPFDSSLYCPVEKSNISCGNEKEPSMCGSAPSVFPSCKRLTLEGESVQ

SEQ ID NO: 745154 - protein, 396 aa, Homo sapiens
MFAEAAKTTRPCGMAEFKEKPEAPTEQLDVACGQENLPVGAWPPGAAPAPFQTMKMMLDKKQIRAIFLFEFKMGRKAAETTRNINNAFGPGTANERTVQWWFKKFCKGDESLEDEERSGRPSEVDNDQLRAIIEADPLTTTREVAEELNVNHSTVVRHLKQIGKVKKLDKWVPHELTENQKNRRFEVSSSLILRNHNEPFLDRIVTCDEKWILYDNRRRSAQWLDQEEAPKHFPKPILHPKKVMVTIWWSAAGLIHYSFLNPGETITSEKYAQEIDEMNQKLQRLQLALVNRKGPILLHDNARPHVAQPTLQKLNELGYEVLPHPPYSPDLLPTNYHVFKHLNNFLQGKRFHNQQDAENAFQEFVESQSTDFYATGINQLISRWQKCVDCNGSYFD

SEQ ID NO: 745155 - protein, 109 aa, Homo sapiens
KNTKIRSLQIEGGILVKKKEIRDATLLFWHRKHMIKHAQMSWNRYSYLVRVNKNNQGPRVCMLPGGGERGISQNLKTNWKNNQDSQVKQPQGPKQSRSLMCLEMTLCYS

SEQ ID NO: 745156 - protein, 113 aa, Homo sapiens
MSHLVPAKWNLCDWFHTMVPSLMLLLIPEAQPFFSSCSFRKPSLTPPVSSGCPSSCSVKLFFFETESRSVAQAGVQWRDLGSLPSLPPGFKRFSCLSLQVAGTTGAHHATTPS

SEQ ID NO: 745157 - protein, 72 aa, Homo sapiens
FATSPLTFGATDKSRCAGPASLIQGLQCFEAQSLLAFVMKIPVKMSGRGPKGRIGSAMVGWNKKMLAHPQIS

SEQ ID NO: 745158 - protein, 72 aa, Homo sapiens; identical to SEQ ID NO: 745157

SEQ ID NO: 745159 - protein, 679 aa, Homo sapiens
GGAAPRMPRSPGTRLKPAKYIPVATAAALLVGSSTLFFVFTCPWLTRAVSPAVPVYNGIIFLFVLANFSMATFMDPGVFPRADEDEDKEDDFRAPLYKNVDVRGIQVRMKWCATCHFYRPPRCSHCSVCDNCVEVTGKFRGGVNPFTRGCCGNVEHVLCSPLAPRYVVEPPRLPLAVSLKPPFLRPELLDRAAPLKVKLSDNGLKAGLGRSKSKGSLDRLDEKPLDLGPPLPPKIEAGTFSSDLQTPRPGSAESALSVQRTSPPTPAMYKFRPAFPTGPKVPFCGPGEQVPGPDSLTLGDDSIRSLDFVSEPSLDLPDYGPGGLHAAYPPSPPLSASDAFSGALRSLSLKASSRRGGDHVALQPLRSEGGPPTPHRSIFAPHALPNRNGSLSYDSLLNPGSPGGHACPAHPAVGVAGYHSPYLHPGATGDPPRPLPRSFSPVLGPRPREPSPVRYDNLSRTIMASIQERKDREERERLLRSQADSLFGDSGVYDAPSSYSLQQASVLSEGPRGPALRYGSRDDLVAGPGFGGARNPALQTSLSSLSSSVSRAPRTSSSSLQADQASSNAPGPRPSSGSHRSPARQGLPSPPGTPHSPSYAGPKAVAFIHTDLPEPPPSLTVQRDHPQLKTPPSKLNGQSPGLARLGPATGPPGPSASPTRHTLVKKVSGVGGTTYEISV

SEQ ID NO: 745160 - protein, 771 aa, Homo sapiens
GGAAPRMPRSPGTRLKPAKYIPVATAAALLVGSSTLFFVFTCPWLTRAVSPAVPVYNGIIFLFVLANFSMATFMDPGVFPRADEDEDKEDDFRAPLYKNVDVRGIQVRMKWCATCHFYRPPRCSHCSVCDNCVEDFDHHCPWVNNCIGRRNYRYFFLFLLSLSAHMVGVVAFGLVYVLNHAEGLGAAHTTITMAVMCVAGLFFIPVIGLTGFHVVLVTRGRTTNEQVTGKFRGGVNPFTRGCCGNVEHVLCSPLAPRYVVEPPRLPLAVSLKPPFLRPELLDRAAPLKVKLSDNGLKAGLGRSKSKGSLDRLDEKPLDLGPPLPPKIEAGTFSSDLQTPRPGSAESALSVQRTSPPTPAMYKFRPAFPTGPKVPFCGPGEQVPGPDSLTLGDDSIRSLDFVSEPSLDLPDYGPGGLHAAYPPSPPLSASDAFSGALRSLSLKASSRRGGDHVALQPLRSEGGPPTPHRSIFAPHALPNRNGSLSYDSLLNPGSPGGHACPAHPAVGVAGYHSPYLHPGATGDPPRPLPRSFSPVLGPRPREPSPVRYDNLSRTIMASIQERKDREERERLLRSQADSLFGDSGVYDAPSSYSLQQASVLSEGPRGPALRYGSRDDLVAGPGFGGARNPALQTSLSSLSSSVSRAPRTSSSSLQADQASSNAPGPRPSSGSHRSPARQGLPSPPGTPHSPSYAGPKAVAFIHTDLPEPPPSLTVQRDHPQLKTPPSKLNGQSPGLARLGPATGPPGPSASPTRHTLVKKVSGVGGTTYEISV

SEQ ID NO: 745161 - protein, 717 aa, Homo sapiens
GGAAPRMPRSPGTRLKPAKYIPVATAAALLVGSSTLFFVFTCPWLTRAVSPAVPVYNGIIFLFVLANFSMATFMDPGVFPRADEDEDKEDDFRAPLYKNVDVRGIQVRMKWCATCHFYRPPRCSHCSVCDNCVEDFDHHCPWVNNCIGRRNYRYFFLFLLSLSAHMVGVVAFGLVYVLNHAEGLGAAHTTITMAVMCVAGLFFIPVIGLTGFHVVLVTRGRTTNEQVTGKFRGGVNPFTRGCCGNVEHVLCSPLAPRYVVEPPRLPLAVSLKPPFLRPELLDRAAPLKVKLSDNGLKAGLGRSKSKGSLDRLDEKPLDLGPPLPPKIEAGTFSSDLQTPRPGSAESALSVQRTSPPTPAMYKFRPAFPTGPKVPFCGPGEQVPGPDSLTLGDDSIRSLDFVSEPSLDLPDYGPGGLHAAYPPSPPLSASDAFSGALRSLSLKASSRRGGDHVALQPLRSEGGPPTPHRSIFAPHALPNRNGSLSYDSLLNPGSPGGHACPAHPAVGVAGYHSPYLHPGATGDPPRPLPRSFSPVLGPRPREPSPVRYDNLSRTIMASIQERKDREERERLLRSQADSLFGDSGVYDAPSSYSLQQASVLSEGPRGPALRYGSRDDLVAGPGFGGARNPALQTSLSSLSSSVSRAPRTSSSSLQADQASSNAPGPRPSSGSHRSPARQGLPSPPGTPHSPPGPSASPTRHTLVKKVSGVGGTTYEISV

SEQ ID NO: 745162 - protein, 463 aa, Homo sapiens
GGAAPRMPRSPGTRLKPAKYIPVATAAALLVGSSTLFFVFTCPWLTRAVSPAVPVYNGIIFLFVLANFSMATFMDPGVFPRADEDEDKEDDFRAPLYKNVDVRGIQVRMKWCATCHFYRPPRCSHCSVCDNCVEDFDHHCPWVNNCIGRRNYRYFFLFLLSLSAHMVGVVAFGLVYVLNHAEGLGAAHTTITMAVMCVAGLFFIPVIGLTGFHVVLVTRGRTTNEQVTGKFRGGVNPFTRGCCGNVEHVLCSPLAPRYVVEPPRLPLAVSLKPPFLRPELLDRAAPLKVKLSDNGLKAGLGRSKSKGSLDRLDEKPLDLGPPLPPKIEAGTFSSDLQTPRPGSAESALSVQRTSPPTPAMYKFRPAFPTGPKVPFCGPGEQVQACILTWGTTDRSLDCVELGWTPDMAGLMSYRIHVRLCSRVARLANRGIGLPLQGPPIALSGFYVRWPPRGTRGGQPNQAR

SEQ ID NO: 745163 - protein, 705 aa, Homo sapiens
GGAAPRMPRSPGTRLKPAKYIPVATAAALLVGSSTLFFVFTCPWLTRAVSPAVPVYNGIIFLFVLANFSMATFMDPGVFPRADEDEDKEDDFRAPLYKNVDVRGIQVRMKWCATCHFYRPPRCSHCSVCDNCVEDFDHHCPWVNNCIGRRNYRYFFLFLLSLSAHMVGVVAFGLVYVLNHAEGLGAAHTTITMAVMCVAGLFFIPVIGLTGFHVVLVTRGRTTNEQVTGKFRGGVNPFTRGCCGNVEHVLCSPLAPRYVVEPPRLPLAVSLKPPFLRPELLDRAAPLKVKLSDNGLKAGLGRSKSKGSLDRLDEKPLDLGPPLPPKIEAGTFSSDLQTPRPGSAESALSVQRTSPPTPAMYKFRPAFPTGPKVPFCGPGEQVPGPDSLTLGDDSIRSLDFVSEPSLDLPDYGPGGLHAAYPPSPPLSASDAFSGALRSLSLKASSRRGGDHVALQPLRSEGGPPTPHRSFLPPMHCPTATAACPMTACSILARLVATPALPTQQLAWPDTTHPTCILGQRATRHGPYPAASAPCWGPRGPALRYGSRDDLVAGPGFGGARNPALQTSLSSLSSSVSRAPRTSSSSLQADQASSNAPGPRPSSGSHRSPARQGLPSPPGTPHSPSYAGPKAVAFIHTDLPEPPPSLTVQRDHPQLKTPPSKLNGQSPGLARLGPATGPPGPSASPTRHTLVKKVSGVGGTTYEISV

SEQ ID NO: 745164 - protein, 115 aa, Homo sapiens
MCPVSVCCAAAPCLMCQCSGRRCPFHQSLNLCFMLLWEATGGQAGAGTGVMLPQGAGDTQSPLPSPQALPAKLENPTPRHATSAAPAWLRCSRRGKAHWGGVSASLGVRDLRVST

SEQ ID NO: 745165 - protein, 139 aa, Homo sapiens
MHPLLTIGGRECHASTACPKRSACPSTHLPMGKSAHWDKGHWAGLCLGLSHGWGSEGAQSASLGHPLSARLGPLPSPSTPDHRQASPQWSPYGQVPEMDRGTQGPHRPSDTACGLPDRVSPARLLLTNALPFTDPAGSL

SEQ ID NO: 745166 - protein, 353 aa, Homo sapiens
MLCRLCWLVSYSLAVLLLGCLLFLRKAAKPAGDPTAHQPFWAPPTPRHSRCPPNHTVSSASLSLPSRHRLFLTYRHCRNFSILLEPSGCSKDTFLLLAIKSQPGHVERRAAIRSTWGRVGGWARGRQLKLVFLLGVAGSAPPAQLLAYESREFDDILQWDFTEDFFNLTLKELHLQRWVVAACPQAHFMLKGDDDVFVHVPNVLEFLDGWDPAQDLLVGDVIRQALPNRNTKVKYFIPPSMYRATHYPPYAGGGGYVMSRATVRRLQAIMEDAELFPIDDVFVGMCLRRLGLSPMHHAGFKTFGIRRPLDPLDPCLYRGLLLVHRLSPLEMWTMWALVTDEGLKCAAGPIPQR

SEQ ID NO: 745167 - protein, 132 aa, Homo sapiens
CLKNKNLKKKENNFQSSFEAPCFIAAPLTSFSQIHYHPQASDSFSTNSRVPTMCLVTYEGQRMMNFAEHHRPRDRAPRTDRMVVTSHAPFPLWHLISIPQMRQVLLYHFPAYLILFLSLSLGQSHLAPLQIK

SEQ ID NO: 745168 - protein, 529 aa, Homo sapiens
MQGLFYRPQGSSKERRTSSKERRAPSKDRMIFAATFCAPKAVSAARAHLPAAWKNLPATPETFAPSSSVFPATSQFQPASLNAFKGPSAASETPKSLPYALQDPFACVEALPAVPWVPQPNMNASKASQAVPTFLMATAAAPQATATTQEASKTSVEPPRRSGKATRKKKHLEAQEDSRGHTLAFHDWQGPRPWENLNLSDWEVQSPIQVSGDWEHPNTPRGLSGWEGPSTSRILSGWEGPSASWALSAWEGPSTSRALGLSESPGSSLPVVVSEVASVSPGSSATQDNSKVEAQPLSPLDERANALVQFLLVKDQAKVPVQRSEMVKVILREYKDECLDIINRANNKLECAFGYQLKEIDTKNHAYIIINKLGYHTGNLVASYLDRPKFGLLMVVLSLIFMKGNCVREDLIFNFLFKLGLDVRETNGLFGNTKKLITEVFVRQKYLEYRRIPYTEPAEYEFLWGPRAFLETSKMLVLRFLAKLHKKDPQSWPFHYLEALAECEWEDTDEDEPDTGDSAHGPTSRPPPR

SEQ ID NO: 745169 - protein, 525 aa, Homo sapiens
MQGLFYRPQGSSKERRTSSKERRAPSKDRMIFAATFCAPKAVSAARAHLPAAWKNLPATPETFAPSSSVFPATSQFQPASLNAFKGPSAASETPKSLPYALQDPFACVEALPAVPWVPQPNMNASKASQAVPTFLMATAAAPQATATTQEASKTSVEPPRRSGKATRKKKHLEAQEDSRGHTLAFHDWQGPRPWENLNLSDWEVQSPIQVSGDWEHPNTPRGLSGWEGPSTSRILSGWEGPSASWALSAWEGPSTSRALGLSESPGSSLPVVVSEVASVSPGSSATQDNSKVEAQPLSPLDERANALVQFLLVKDQAKVPVQRSEMVKVILREYKDECLDIINRANNKLECAFGYQLKEIDTKNHAYIIINKLGYHTGNLVASYLDRPKFGLLMVVLSLIFMKGNCVREDLIFNFLFKLGLDVRETNGLFGNTKKLITEVFVRQKYLEYRRIPYTEPAEYEFLWGPRAFLETSKMLVLRFLAKLHKKDPQSWPFHYLEALAECEWEDTDEISDTLICRGHQRPLR

SEQ ID NO: 745170 - protein, 293 aa, Homo sapiens
QRRVAELDVVVGPPGDAGAVERHLDVGPAGLALVPKREGVVEEAVGDGAAGRDGQAGRAALVGGALVDRVAQRAGESAQLRVVAGHAVAPVVLVEVGQLVVEVHWALEELGQREVPGARAGGRQRPALASRGAHRAVAGARVACIVVLQLLDAVGGVVEAQAQADEGQARAEEERQRDAGRQQRLPGGEALLSEGGVVGLVGAPGRGAPGHGGRAGTDARADRVGAPPRGASLSAPRKPGDCSRVGFPASSGGFLPGPLLCLRHSGESLWVCSNLNSCLLRRKNLTKGHKAER

SEQ ID NO: 745171 - protein, 265 aa, Homo sapiens
QRRVAELDVVVGPPGDAGAVERHLDVGPAGLALVPKREGVVEEAVGDGAAGRDGQAGRAALVGGALVDRVAQRAGESAQLRVVAGHAVAPVVLVEVGQLVVEVHWALEELGQREVPGARAGGRQRPALASRGAHRAVAGARVACIVVLQLLDAVGGVVEAQAQADEGQARAEEERQRDAGRQQRLPGGEALLSEGGVVGLVGAPGRGAPGHGGRAGTDARADRVGAPPRGASLSAPRKPGDCSRVGFPASSGGFLPGPLLCLRHR

SEQ ID NO: 745172 - protein, 331 aa, Homo sapiens
MIELGFGRQNFHPLKRKSSLLLKLIAVVFAVLLFCEFLIYYLAIFQCNWPEVKTTASDGEQTTREPVLKAMFLADTHLLGEFLGHWLDKLRREWQMERAFQTALWLLQPEVVFILGDIFDEGKWSTPEAWADDVERFQKMFRHPSHVQLKVVAGNHDIGFHYEMNTYKVERFEKVFSSERLFSWKGINFVMVNSVALNGDGCGICSETEAELIEVSHRLNCSRELLWWLQPRLVLSGHTHSACEVHHGGRVPELSVPSFSWRNRNNPSFIMGSITPTDYTLSKCYLPREDVVLIIYCGVVGFLVVLTLTHFGLLASPFLSGLNLLGKRKTR

SEQ ID NO: 745173 - protein, 254 aa, Homo sapiens
MIELGFGRQNFHPLKRKSSLLLKLIAVVFAVLLFCEFLIYYLAIFQCNWPEVKTTASDGEQTTREPVLKAMFLADTHLLGEFLGHWLDKLRREWQMERAFQTALWLLQPEVVFILGDIFDEGKWSTPEAWADDVERFQKMFRHPSHVQLKVVAGNHDIGFHYEMNTYKVERFEKVFSSERLFSWKGINFVMVNSVALNGDGCGICSETEAELIEVSHRLNCSREVGEHLNATGAFCPVLLRFGCSLSPLALLAL

SEQ ID NO: 745174 - protein, 254 aa, Homo sapiens; identical to SEQ ID NO: 745173

SEQ ID NO: 745175 - protein, 254 aa, Homo sapiens; identical to SEQ ID NO: 745173

SEQ ID NO: 745176 - protein, 254 aa, Homo sapiens; identical to SEQ ID NO: 745173

SEQ ID NO: 745177 - protein, 394 aa, Homo sapiens [sequence omitted]

SEQ ID NO: 745178 - protein, 338 aa, Homo sapiens [sequence omitted]

SEQ ID NO: 745179 - protein, 175 aa, Homo sapiens
MFRHPSHVQLKVVAGNHDIGFHYEMNTYKVERFEKVFSSERLFSWKGINFVMVNSVALNGDGCGICSETEAELIEVSHRLNCSREHYPLYRRSDANCSGEDAAPAEERDIPFKENYDVLSREASQKLLWWLQPRLVLSGHTHSACEVHHGGRVPELSVPSFSWRNRNNPSFIMVT

SEQ ID NO: 745180 - protein, 254 aa, Homo sapiens; identical to SEQ ID NO: 745173

SEQ ID NO: 745181 - protein, 254 aa, Homo sapiens; identical to SEQ ID NO: 745173

SEQ ID NO: 745182 - protein, 254 aa, Homo sapiens; identical to SEQ ID NO: 745173

SEQ ID NO: 745183 - protein, 254 aa, Homo sapiens; identical to SEQ ID NO: 745173

SEQ ID NO: 745184 - protein, 172 aa, Homo sapiens
MPYFFLLASREWQMERAFQTALWLLQPEVVFILGDIFDEGKWSTPEAWADDVERFQKMFRHPSHVQLKVVAGNHDIGFHYEMNTYKVERFEKVFSSERLFSWKGINFVMVNSVALNGDGCGICSETEAELIEVSHRLNCSREVGEHLNATGAFCPVLLRFGCSLSPLALLAL

SEQ ID NO: 745185 - protein, 103 aa, Homo sapiens
MIELGFGRQNFHPLKRKSSLLLKLIAVVFAVLLFCEFLIYYLAIFQCNWPEVKTTASDGEQTTREPVLKAMFLADTHLLGEFLGHWLDKLRRDGVLLCCPCWF

SEQ ID NO: 745186 - protein, 220 aa, Homo sapiens
SDVVKGVYKEKDNEELTISCPVPADEQTECTSAQQLNMSTSSPCAAELTALSTTQQEKDLIEDSSVQKDGLNQTTIPVSPPSTTKPSRASTASPCNNNINAATAVALQEPRKLSYAEVCQKPPKEPSSVLVQPLRELRSNVVSPTKNEDNGAPENSVEKPHEKPEARASKDYSGFRGNIIPRGAAGKIREQRRQFSHRAIPQGVTRRNGKEQYVPPRSPK

SEQ ID NO: 745187 - protein, 220 aa, Homo sapiens; identical to SEQ ID NO: 745186

SEQ ID NO: 745188 - protein, 112 aa, Homo sapiens
EKSFYFKDNEELTISCPVPADEQTECTSAQQLNMSTSSPCAAELTALSTTQQEKDLIEDSSVQKDGLNQTTIPVSPPSTTKPSRASTASPCNNNINAATAVALQAFRSLPSL

SEQ ID NO: 745189 - protein, 220 aa, Homo sapiens; identical to SEQ ID NO: 745186

SEQ ID NO: 745190 - protein, 545 aa, Homo sapiens [sequence omitted]

SEQ ID NO: 745191 - protein, 545 aa, Homo sapiens [sequence omitted]

SEQ ID NO: 745192 - protein, 545 aa, Homo sapiens [sequence omitted]

SEQ ID NO: 745193 - protein, 545 aa, Homo sapiens [sequence omitted]

SEQ ID NO: 745194 - protein, 66 aa, Homo sapiens
MRLISNREVYLLLNLATQVAVPNCALIMTKEENNNVVLGEMGEQAHDINMASSSNTSKGCEETKVH

SEQ ID NO: 745195 - protein, 299 aa, Homo sapiens
MFSLPLSLPLCEDTAFLPSKCCSSHKTIKQARTLIMIFLASGTHFQTMLKSKLNVLTLKKEPLPAVIFHEPEAIELCTTTPLMKTRTHSGCKHFQTMLKSKLNVLTLKKEPLPAVIFHEPEAIELCTTTPLMKTRTHSGCKVTYLGKVSTTGMQFLSGCTEKPVIELWKKHTLAREDVFPANALLEIRPFQVWLHHLDHKGEATVHMDTFQVARIAYCTADHNVSPNIFAWVYREINDDLSYQMDCHAVECESKLEAKKLAHAMMEAFRKTFHSMKSDGRIHSNSSSEEVSQELESDDG

SEQ ID NO: 745196 - protein, 217 aa, Homo sapiens
MWQPATERLQHFQTMLKSKLNVLTLKKEPLPAVIFHEPEAIELCTTTPLMKTRTHSGCKVTYLGKVSTTGMQFLSGCTEKPVIELWKKHTLAREDVFPANALLEIRPFQVWLHHLDHKGEATVHMDTFQVARIAYCTADHNVSPNIFAWVYREINDDLSYQMDCHAVECESKLEAKKLAHAMMEAFRKTFHSMKSDGRIHSNSSSEEVSQELESDDG

SEQ ID NO: 745197 - protein, 250 aa, Homo sapiens
MFSLPLSLPLCEDTAFLPSKCCSSHKTIKQARTLIMIFLASGTHFQTMLKSKLNVLTLKKEPLPAVIFHEPEAIELCTTTPLMKTRTHSGCKVTYLGKVSTTGMQFLSGCTEKPVIELWKKHTLAREDVFPANALLEIRPFQVWLHHLDHKGEATVHMDTFQVARIAYCTADHNVSPNIFAWVYREINDDLSYQMDCHAVECESKLEAKKLAHAMMEAFRKTFHSMKSDGRIHSNSSSEEVSQELESDDG

SEQ ID NO: 745198 - protein, 217 aa, Homo sapiens; identical to SEQ ID NO: 745196

SEQ ID NO: 745199 - protein, 78 aa, Homo sapiens
HNVSPNIFAWVYREINDDLSYQMDCHAVECESKLEAKKLAHAMMEAFRKTFHSMKSDGRIHSNSSSEEVSQELESDDG

SEQ ID NO: 745200 - protein, 314 aa, Homo sapiens
TPSWRMLVRGRDQGSGSRLGPIVRRWAPRPSPLQSLAASLDAEPSSAAVPDGFPAGPTVSPRRLARPPGLEEALSALGLQGEREYAGDIFAEVMEYLGLAGDTLYLAVHLLDSYLSAGRVRLHRLQLLGVACLFVACKMEECVLPEETEVRNLGPFQGREERARIQDSFTSPRIPHLQPAFLCLLSADSFSRAELLRAERRILSRLDFRLHHPGPLLCLGLLAALAGSSPQVMLLATYFLELSLLEAEAAGWEPGRRAAAALSLAHRLLDGAGSRLQPELYRCSLGGGSVWGHRSFRDLPSWSFLRSRRMRDNY

SEQ ID NO: 745201 - protein, 189 aa, Homo sapiens
MEYLGLAGDTLYLAVHLLDSYLSAGRVRLHRLQLLGVACLFVACKMEECVLPEPAFLCLLSADSFSRAELLRAERRILSRLDFRLHHPGPLLCLGLLAALAGSSPQVMLLATYFLELSLLEAEAAGWEPGRRAAAALSLAHRLLDGAGSRLQPELYRCSLGGGSVWGHRSFRDLPSWSFLRSRRMRDNY

SEQ ID NO: 745202 - protein, 243 aa, Homo sapiens
ASRAGAQEKGRGTGVESEASLPQPQVCRVLPLRALPRAVTPEMRALVVDWLVQVHEYLGLAGDTLYLAVHLLDSYLSAGRVRLHRLQLLGVACLFVACKMEECVLPEPAFLCLLSADSFSRAELLRAERRILSRLDFRLHHPGPLLCLGLLAALAGSSPQVMLLATYFLELSLLEAEAAGWEPGRRAAAALSLAHRLLDGAGSRLQPELYRCSLGGGSVWGHRSFRDLPSWSFLRSRRMRDNY

SEQ ID NO: 745203 - protein, 211 aa, Homo sapiens
MEYLGLAGDTLYLAVHLLDSYLSAGRVRLHRLQLLGVACLFVACKMEECVLPEPAFLCLLSADSFSRAELLRAERRILSRLDFRLHHPGPLLCLGLLAALAGSSPQVMLLATYFLELSLLEAEAAGWEPGRRAAAALSLAHRLLDGAGSRLQPELYSPEELGTLEPCMARAALRGPAPGRAAVFLKYARPQRQGTSLAAACLLRRLQSEPP

SEQ ID NO: 745204 - protein, 139 aa, Homo sapiens
DNLEIQCPAEPRRGSWAGMRAESSQSPPDTPPRGCPLEAPQTVPTFPGLSLCPQPSAWHEGKPKDGRELHSWVIEDCCQLENEAHSLPRDKPAEARQPSSCVYFGTGTPGARASSCNSYLQPTPFYLKLTGHPSLTGSA

SEQ ID NO: 745205 - protein, 530 aa, Homo sapiens
MAEHAPRRCCLGWDFSTQQVKVVAVDAELNVFYEESVHFDRDLPEFGMYLMCMTQGGVHVHKDGLTVTSPVLMWVQALDIILEKMKASGFDFSQVLALSGAGQQHGSIYWKAGAQQALTSLSPDLRLHQQLQDCFSISDCPVWMDSSTTAQCRQLEAAVGGAQALSCLTGSRAYERFTGNQIAKIYQQNPEAYSHTERISLVSSFAASLFLGSYSPIDYSDGSGMNLLQIQDKVWSQACLGACAPHLEEKLSPPVPSCSVVGAISSYYVQRYGFPPGCKVVAFTGDNPASLAGMRLEEGDIAVSLGTSDTLFLWLQEPMPALEGHIFCNPVDSQHYMALLCFKNGSLMREKIRNESVSRSWSDFSKALQSTEMGNGGNLGFYFDVMEITPEIIGRHRFNTENHKVAAFPGDVEVRALIEGQFMAKRIHAEGLGYRVMSKTKILATGGASHNREILQVLADVFDAPVYVIDTANSACVGSAYRAFHGLAGGTDVPFSEVVKLAPNPRLAATPSPGASQVRDHQNLFVAFAL

SEQ ID NO: 745206 - protein, 536 aa, Homo sapiens
MAEHAPRRCCLGWDFSTQQVKVVAVDAELNVFYEESVHFDRDLPEFGTQGGVHVHKDGLTVTSPVLMWVQALDIILEKMKASGFDFSQVLALSGAGQQHGSIYWKAGAQQALTSLSPDLRLHQQLQDCFSISDCPVWMDSSTTAQCRQLEAAVGGAQALSCLTGSRAYERFTGNQIAKIYQQNPEAYSHTERISLVSSFAASLFLGSYSPIDYSDGSGMNLLQIQDKVWSQACLGACAPHLEEKLSPPVPSCSVVGAISSYYVQRYGFPPGCKVVAFTGDNPASLAGMRLEEGDIAVSLGTSDTLFLWLQEPMPALEGHIFCNPVDSQHYMALLCFKNGSLMREKIRNESVSRSWSDFSKALQSTEMGNGGNLGFYFDVMEITPEIIGRHRFNTENHKVAAFPGDVEVRALIEGQFMAKRIHAEGLGYRVMSKTKILATGGASHNREILQVLADVFDAPVYVIDTANSACVGSAYRAFHGLAGGTDVPFSEVVKLAPNPRLAATPSPGASQVYEALLPQYAKLEQRILSQTRGPPE

SEQ ID NO: 745207 - protein, 117 aa, Homo sapiens
MAEHAPRRCCLGWDFSTQQVKVVAVDAELNVFYEESVHFDRDLPEFGATLEAHVEHDRATINLVLNDCMEQNSPLPTHVPNHLLIVLYMRRKKLQLYQAIEMCFSLTNIIFSLISFF

SEQ ID NO: 745208 - protein, 536 aa, Homo sapiens; identical to SEQ ID NO: 745206

SEQ ID NO: 745209 - protein, 299 aa, Homo sapiens
MAEHAPRRCCLGWDFSTQQVKVVAVDAELNVFYEESVHFDRDLPEFGTQGGVHVHKDGLTVTSPVLMWVQALDIILEKMKASGFDFSQVLALSGAGQQHGSIYWKAGAQQALTSLSPDLRLHQQLQDCFSISDCPVWMDSSTTAQCRQLEAAVGGAQALSCLTGSRAYERFTGNQIAKIYQQNPEAYSHTERISLVSSFAASLFLGSYSPIDYSDGSGMNLLQIQDKVWSQACLGACAPHLEEKLSPPVPSCSVVVGLLSGDVAHLRAGSYQGSTVAHTHAHTHTHTHTHSAHTLICSS

SEQ ID NO: 745210 - protein, 129 aa, Homo sapiens
HERNGCRLCKSDKYCEPHDYEYCCPCEWHRTEHDRQLNEVENNIKKKACCCEGFPFHEVIQEFLLNKDKLVKVIRYQRPDLLLFQRFTLEKMEWPNHYACEKLLVLLTHYDMIERKLGSRNSNQLQPIR

SEQ ID NO: 745211 - protein, 636 aa, Homo sapiens
HERNGCRLCKSDKYCEPHDYEYCCPCEWHRTEHDRQLNEVENNIKKKACCCEGFPFHEVIQEFLLNKDKLVKVIRYQRPDLLLFQRFTLEKMEWPNHYACEKLLVLLTHYDMIERKLGSRNSNQLQPIRIVKTRIRNGVHCFEIEWEKPEHYAMEDKQHGEFALLTIEEESLFEAAYPEIVAVYQKQKLEIKGKKQKRIKPKENNLPEPDEVMSFQSHMTLKPTCEIFHKQNSKLNSGISPDPTLPQESISASLNSLLLPKNTPCLNAQEQFMSSLRPLAIQQIKAVSKSLISESSQPNTSSHNISVIADLHLSTIDWEGTSFSNSPAIQRNTFSHDLKSEVESELSAIPDGFENIPEQLSCESERYTANIKKVLDEDSDGISPEEHLLSGITDLCLQDLPLKERIFTKLSYPQDNLQPDVNLKTLSILSVKESCIANSGSDCTSHLSKDLPGIPLQNESRDSKILKGDQLLQEDYKVNTSVPYSVSNTVVKTCNVRPPNTALDHSRKVDMQTTRKILMKKSVCLDRHSSDEQSAPVFGKAKYTTQRMKHSSQKHNSSHFKESGHNKLSSPKIHIKETEQCVRSYETAENEESCFPDSTKSSLSSLQCHKKENNSGTCLDSPLPLRQRLKLRFQST

SEQ ID NO: 745212 - protein, 636 aa, Homo sapiens; identical to SEQ ID NO: 745211

SEQ ID NO: 745213 - protein, 115 aa, Homo sapiens
MVIPEDQGPSFPTHIPMHLIRTANGGGRDFKAVTIARRGTALSHFTARLTLFRTLKSGDRLQKQAPVCDDVCVKECNPHAAGSRSLFRGMVSPHAPALCATSIMARPWGSRCELE

SEQ ID NO: 745214 - protein, 104 aa, Homo sapiens
AYTATGYLLKIRANFALLLCIAYIFLKGHSCSFTKKKINKSFSEFRKFGNSRFTLALSCVSVWLCPQALPPFSLGERTWLHILFSFMNLPVTLRQRLGFCFISL

SEQ ID NO: 745215 - protein, 385 aa, Homo sapiens
MSKPAGSTSRILDIPCKVCGDRSSGKHYGVYACDGCSGFFKRSIRRNRTYVCKSGNQGGCPVDKTHRNQCRACRLKKCLEVNMNKDAVQHERGPRTSTIRKQVALYFRGHKEENGAAAHFPSAALPAPAFFTAVTQLEPHGLELAAVSTTPERQTLVSLAQPTPKYPHEVNGTPMYLYEVATESVCESAARLLFMSIKWAKSVPAFSTLSLQDQLMLLEDAWRELFVLGIAQWAIPVDANTLLAVSGMNGDNTDSQKLNKIISEIQALQEVVARFRQLRLDATEFACLKCIVTFKAVPTHSGSELRSFRNAAAIAALQDEAQLTLNSYIHTRYPTQPCRFGKLLLLLPALRSISPSTIEEVFFKKTIGNVPITRLLSDMYKSSDI

SEQ ID NO: 745216 - protein, 61 aa, Homo sapiens
GPLSLPDENLHFNKVLDAAKFEIYWARTLRGHKGSLKTKENRQGVVAHACNPCILGCQGGR

SEQ ID NO: 745217 - protein, 77 aa, Homo sapiens
KLEDGPTFLKSGDAAIVDMVPGKPMCVESFSVYPPLSRFAVCDMRQTVAVGVIEAMDKKAAGAGKVTKSTQKAQKAK

SEQ ID NO: 745218 - protein, 320 aa, Homo sapiens
QEPPTTDSQEAQSPGHSSAGQEGEDTLRRRLLAPEAGSHPQQTQKLEEIKENAQDTMRQINKKGFWSYGPVILVVLVVAVVASSVNSYYSSPAQQVPKNPALEAFLAQFSQLEDKFPGQSSFLWQRGRKFLQKHLNASNPTEPATIIFTAAREGRETLKCLSHHVADAYTSSQKVSPIQIDGAGRTWQDSDTVKLLVDLELSYGFENGQKAAVVHHFESFPAGSTLIFYKYCDHENAAFKDVALVLTVLLEEETLEASVGPRETEEKVRDLLWAKFTNSDTPTSFNHMDSDKLSGLWSRISHLVLPVQPVSSIEEQGCLF

SEQ ID NO: 745219 - protein, 264 aa, Homo sapiens
MRQINKKGFWSYGPVILVVLVVAVVASSVNSYYSSPAQQVPKNPALEAFLAQFSQLEDKFPGQSSFLWQRGRKFLQKHLNASNPTEPATIIFTAAREGRETLKCLSHHVADAYTSSQKVSPIQIDGAGRTWQDSDTVKLLVDLELSYGFENGQKAAVVHHFESFPAGSTLIFYKYCDHENAAFKDVALVLTVLLEEETLEASVGPRETEEKVRDLLWAKFTNSDTPTSFNHMDSDKLSGLWSRISHLVLPVQPVSSIEEQGCLF

SEQ ID NO: 745220 - protein, 320 aa, Homo sapiens; identical to SEQ ID NO: 745218

SEQ ID NO: 745221 - protein, 331 aa, Homo sapiens
QEPPTTDSQEAQSPGHSSAGQEGEDTLRRRLLAPEAGSHPQQTQKLEEIKENAQDTMRQINKKGFWSYGPVILVVLVVAVVASSVNSYYSSPAQQVPKNPALEAFLAQFSQLEDKFPGQSSFLWQRGRKFLQKHLNASNPTEPATIIFTAAREGRETLKCLSHHVADAYTSSQKVSPIQIDGAGRTWQDSDTVKLLVDLELSYGFENGQKAAVVHHFESFPAGSTLIFYKYCDHENAAFKDVALVLTVLLEEETLEASVGPRETEEKVRDLLWAKFTNSDTPTSFNHMDSDKLSGLWSRISHLVLPVQPILDASVTSTKPVLPCITIILAC

SEQ ID NO: 745222 - protein, 331 aa, Homo sapiens; identical to SEQ ID NO: 745221

SEQ ID NO: 745223 - protein, 1081 aa, Homo sapiens
CKTWPAARVSRSHVTLVSWSVQLPPASELPDPNTKQSECRAECKTLKTLQSKVLIPEALQNMEIKDQGAQMEPLLPTRNDEEAVVDRGGTRSILKTHFEKEDLEGHRTLFIGVHVPLGGRKSHRRHRHRGHKHRKRDRERDSGLEDGRESPSFDTPSQRVQFILGTEDDDEEHIPHDLFTELDEICWREGEDAEWRETARWLKFEEDVEDGGERWSKPYVATLSLHSLFELRSCILNGTVLLDMHANTLEEIADMVLDQQVSSGQLNEDVRHRVHEALMKQHHHQNQKKLTNRIPIVRSFADIGKKQSEPNSMDKNAGQVVSPQSAPACVENKNDVSRENSTVDFSKVDLHFMKKIPPGAEASNILVGELEFLDRTVVAFVRLSPAVLLQGLAEVPIPTRFLFILLGPLGKGQQYHEIGRSIATLMTDEVFHDVAYKAKDRNDLVSGIDEFLDQVTVLPPGEWDPSIRIEPPKNVPSQEKRKIPAVPNGTAAHGEAEPHGGHSGPELQRTGRIFGGLILDIKRKAPYFWSDFRDAFSLQCLASFLFLYCACMSPVITFGGLLGEATEGRISAIESLFGASMTGIAYSLFGGQPLTILGSTGPVLVFEKILFKFCKEYGLSYLSLRASIGLWTATLCIILVATDASSLVCYITRFTEEAFASLICIIFIYEALEKLFELSEAYPINMHNDLELLTQYSCNCVEPHNPSNGTLKEWRESNISASDIIWENLTVSECKSLHGEYVGRACGHDHPYVPDVLFWSVILFFSTVTLSATLKQFKTSRYFPTKVRSIVSDFAVFLTILCMVLIDYAIGIPSPKLQVPSVFKPTRDDRGWFVTPLGPNPWWTVIAAIIPALLCTILIFMDQQITAVIINRKEHKLKKGCGYHLDLLMVAVMLGVCSIMGLPWFVAATVLSITHVNSLKLESECSAPGEQPKFLGIREQRVTGLMIFILMGSSVFMTSILKFIPMPVLYGVFLYMGASSLKGIQFFDRIKLFWMPAKHQPDFIYLRHVPLRKVHLFTIIQMSCLGLLWIIKVSRAAIVFPMMVLALVFVRKLMDLLFTKRELSWLDDLMPESKKKKLESS

SEQ ID NO: 745224 - protein, 1081 aa, Homo sapiens; identical to SEQ ID NO: 745223

SEQ ID NO: 745225 - protein, 961 aa, Homo sapiens
LVTLEDPPPNGIHRKRDRERDSGLEDGRESPSFDTPSQRVQFILGTEDDDEEHIPHDLFTELDEICWREGEDAEWRETARWLKFEEDVEDGGERWSKPYVATLSLHSLFELRSCILNGTVLLDMHANTLEEIADMVLDQQVSSGQLNEDVRHRVHEALMKQHHHQNQKKLTNRIPIVRSFADIGKKQSEPNSMDKNAGQVVSPQSAPACVENKNDVSRENSTVDFSKVDLHFMKKIPPGAEASNILVGELEFLDRTVVAFVRLSPAVLLQGLAEVPIPTRFLFILLGPLGKGQQYHEIGRSIATLMTDEVFHDVAYKAKDRNDLVSGIDEFLDQVTVLPPGEWDPSIRIEPPKNVPSQEKRKIPAVPNGTAAHGEAEPHGGHSGPELQRTGRIFGGLILDIKRKAPYFWSDFRDAFSLQCLASFLFLYCACMSPVITFGGLLGEATEGRISAIESLFGASMTGIAYSLFGGQPLTILGSTGPVLVFEKILFKFCKEYGLSYLSLRASIGLWTATLCIILVATDASSLVCYITRFTEEAFASLICIIFIYEALEKLFELSEAYPINMHNDLELLTQYSCNCVEPHNPSNGTLKEWRESNISASDIIWENLTVSECKSLHGEYVGRACGHDHPYVPDVLFWSVILFFSTVTLSATLKQFKTSRYFPTKVRSIVSDFAVFLTILCMVLIDYAIGIPSPKLQVPSVFKPTRDDRGWFVTPLGPNPWWTVIAAIIPALLCTILIFMDQQITAVIINRKEHKLKKGCGYHLDLLMVAVMLGVCSIMGLPWFVAATVLSITHVNSLKLESECSAPGEQPKFLGIREQRVTGLMIFILMGSSVFMTSILKFIPMPVLYGVFLYMGASSLKGIQFFDRIKLFWMPAKHQPDFIYLRHVPLRKVHLFTIIQMSCLGLLWIIKVSRAAIVFPMMVLALVFVRKLMDLLFTKRELSWLDDLMPESKKKKLESS

SEQ ID NO: 745226 - protein, 601 aa, Homo sapiens
PRCSGGSGCRRAGQEQRDPSRAGGARHGTRALLAPRPACGPGSSLPLSHPPSLPLHPLCRRSPVPPALRNPGWAGPWQSARPRVGSRRAVDGEGARRGLCSPSSRRWRPGPPQPHCPGPRAPALSCAAAAPARTRGAMRRAAGMEDFSAEEEESWYDQQDLEQDLHLAAELGKTLLERNKELEGSLQQMYSTNEEQVQEIEYLTKQLDTLRHVNEQHAKVYEQLDLTARDLELTNHRLVLESKAAQQKIHGLTETIERLQAQVEELQAQVEQLRGLEQLRVLREKRERRRTIHTFPCLKELCTSPRCKDAFRLHSSSLETPAAPGAGERAAADPGGALRSQVSQERRKRERAEDEYTAVLQEYSELERHGARMEACRLRVQSLEAELLELQQMKQAKTYLLGPDDHLAEALLAPLTQAPEADDPQPGRGDDLGAQDGVSSPAASPGHVVRKSCSDTALNAIVAKDPASRHAGNLTLHANSVRKRGMSILREVDEQYHALLEKYEELLSKCRQHGAGVRHAGVQTSRPISRDSSWRDLRGGEEGQGEVKAGEKSLSQHVEAVDKRLEQSQPEYKALFKEIFSRIQKTKADINATKVKTHSSK

SEQ ID NO: 745227 - protein, 64 aa, Homo sapiens
MGVLCLCSHARVSPILDLHLAAELGKTLLERNKELEGSLQQMYSTNEEQVQEIEVRALHVLAHT

SEQ ID NO: 745228 - protein, 601 aa, Homo sapiens; identical to SEQ ID NO: 745226

SEQ ID NO: 745229 - protein, 161 aa, Homo sapiens
  misc_feature (50)..(50): Xaa can be any naturally occurring amino acid
  misc_feature (61)..(61): Xaa can be any naturally occurring amino acid
MSCVGSILTRGLEELPRLWYTVVTGYEVLSLRSTIVDGKPSMSPGGVVGXIALGTERHHDXRDIKASVTVTMMEESCKTVTETGVQDSHACRSSYAVARSSEDLYSQVIHYYDQMFRYIRQLHDQDAQQQVTLLRPAASPRVEAVGSLRPGRCSFQRASAL

SEQ ID NO: 745230 - protein, 197 aa, Homo sapiens
YEPRAAAAAASSSCSSGSCSSGSSPSLKASLSYEEGHPSHSETDLLQRQSFAASHQLPGYAPTPQPTGLSGIFDTSVNSASSNTKESSVMNFLSTAESRTAQAAASGTTLLPQFRAPSWQTGMHSSAATELFATGPLPSTGTLPPSLSAYQHPTTFSNRNFATTSPLVLQDSTFNTTSNGILSHHDPLLQIKTSQGT

SEQ ID NO: 745231 - protein, 190 aa, Homo sapiens
  misc_feature (4)..(4): Xaa can be any naturally occurring amino acid
MLIXAVSTPLTTLDATSDKEEENSLSYEEGHPSHSETDLLQRQSFAASHQLPGYAPTPQPTGLSGIFDTSVNSASSNTKESSVMNFLSTAESRTAQAAASGTTLLPQFRAPSWQTGMHSSAATELFATGPLPSTGTLPPSLSAYQHPTTFSNRNFATTSPLVLQDSTFNTTSNGILSHHDPLLQIKTSQG

SEQ ID NO: 745232 - protein, 139 aa, Homo sapiens [sequence omitted]

SEQ ID NO: 745233 - protein, 139 aa, Homo sapiens [sequence omitted]

SEQ ID NO: 745234 - protein, 139 aa, Homo sapiens [sequence omitted]

SEQ ID NO: 745235 - protein, 139 aa, Homo sapiens [sequence omitted]

SEQ ID NO: 745236 - protein, 139 aa, Homo sapiens [sequence omitted]

SEQ ID NO: 745237 - protein, 139 aa, Homo sapiens [sequence omitted]

SEQ ID NO: 745238 - protein, 62 aa, Homo sapiens
MRDPGRSCCCCPRCDSFLLREGSAPRCSQVGPGRPPWPTAQTAKCWSRPLHLHHPFLSSNST

SEQ ID NO: 745239 - protein, 336 aa, Homo sapiens
SGPRSPRSASPGPASTGPRHPQVAEGGGRERAARSREAGEGPASEAAAAAAGAASGSSGENGSAGRQTAAGCHGRHEACEARGRRPRLLNPGRRGGGGGGGQIAARTRRRGGGRMERKGSAAGAKGNPSPPAAGEGQRPPPPLCVPGGGGGAPARGQVGAAAEPAELIRRAHEFKSQGAQCYKDKKFREAIGKYHRALLELKGLLPPPGERERDSRAASPAGALKPGRLSEEQSKTVEAIEIDCYNSLAACLLQAELVNYERVKEYCLKVLKKEGENFKALYRSGVAFYHLGDYDKALYYLKEARTQQPTDTNVIRYIQLTEMKLSRCSQREKEAM

SEQ ID NO: 745240 - protein, 336 aa, Homo sapiens; identical to SEQ ID NO: 745239

SEQ ID NO: 745241 - protein, 723 aa, Homo sapiens
MGSRCALALAVLSALLCQVWSSGVFELKLQEFVNKKGLLGNRNCCRGGAGPPPCACRTFFRVCLKHYQASVSPEPPCTYGSAVTPVLGVDSFSLPDGGGADSAFSNPIRFPFGFTWPGTFSLIIEALHTDSPDDLATENPERLISRLATQRHLTVGEEWSQDLHSSGRTDLKYSYRFVCDEHYYGEGCSVFCRPRDDAFGHFTCGERGEKVCNPGWKGPYCTEPICLPGCDEQHGFCDKPGECKCRVGWQGRYCDECIRYPGCLHGTCQQPWQCNCQEGWGGLFCNQDLNYCTHHKPCKNGATCTNTGQGSYTCSCRPGYTGATCELGIDECDPSPCKNGGSCTDLENSYSCTCPPGFYGKICELSAMTCADGPCFNGGRCSDSPDGGYSCRCPVGYSGFNCEKKIDYCSSSPCSNGAKCVDLGDAYLCRCQAGFSGRHCDDNVDDCASSPCANGGTCRDGVNDFSCTCPPGYTGRNCSAPVSRCEHAPCHNGATCHERGHRYVCECARGYGGPNCQFLLPELPPGPAVVDLTEKLEGQGGPFPWVAVCAGVILVLMLLLGCAAVVVCVRLRLQKHRPPADPCRGETETMNNLANCQREKDISVSIIGATQIKNTNKKADFHGDHSADKNGFKARYPAVDYNLVQDLKGDDTAVRDAHSKRDTKCQPQGSSGEEKGTPTTLRGGEASERKRPDSGCSTSKDTKYQSVYVISEEKDECVIATEV

SEQ ID NO: 745242 - protein, 987 aa, Homo sapiens
SQILCAHPRRPDPAEGRAQGNPGSRGAEPPPTARPLRSCACVLDGIGWIHRKDADLCCDTGDRSPECSRNDRRRRVTPGRDPQGPPRTPAAADRPLSARRWPRIIALPVGFPDRGFLIGSGGSSAALLGIKLNLWTLSLSLSPPPSPAKKLKTKPGSRRPSPPRGLGGRRKTKVAAAALSPESCLSSGIPGAAAGPRRADIKNRGLGKRRRPAFKERSPGSCGLGRGKGAFLPTLPVALDPPRVRRCSKERSGGPPGSRVERSSMGSRCALALAVLSALLCQVWSSGVFELKLQEFVNKKGLLGNRNCCRGGAGPPPCACRTFFRVCLKHYQASVSPEPPCTYGSAVTPVLGVDSFSLPDGGGADSAFSNPIRFPFGFTWPGTFSLIIEALHTDSPDDLATENPERLISRLATQRHLTVGEEWSQDLHSSGRTDLKYSYRFVCDEHYYGEGCSVFCRPRDDAFGHFTCGERGEKVCNPGWKGPYCTEPICLPGCDEQHGFCDKPGECKCRVGWQGRYCDECIRYPGCLHGTCQQPWQCNCQEGWGGLFCNQDLNYCTHHKPCKNGATCTNTGQGSYTCSCRPGYTGATCELGIDECDPSPCKNGGSCTDLENSYSCTCPPGFYGKICELSAMTCADGPCFNGGRCSDSPDGGYSCRCPVGYSGFNCEKKIDYCSSSPCSNGAKCVDLGDAYLCRCQAGFSGRHCDDNVDDCASSPCANGGTCRDGVNDFSCTCPPGYTGRNCSAPVSRCEHAPCHNGATCHERGHRYVCECARGYGGPNCQFLLPELPPGPAVVDLTEKLEGQGGPFPWVAVCAGVILVLMLLLGCAAVVVCVRLRLQKHRPPADPCRGETETMNNLANCQREKDISVSIIGATQIKNTNKKADFHGDHSADKNGFKARYPAVDYNLVQDLKGDDTAVRDAHSKRDTKCQPQGSSGEEKGTPTTLRGGEASERKRPDSGCSTSKDTKYQSVYVISEEKDECVIATEV

SEQ ID NO: 745243 - protein, 1037 aa, Homo sapiens
SQILCAHPRRPDPAEGRAQGNPGSRGAEPPPTARPLRSCACVLDGIGWIHRKDADLCCDTGDRSPECSRNDRRRRVTPGRDPQGPPRTPAAADRPLSARRWPRIIALPVGFPDRGFLIGSGGSSAALLGIKLNLWTLSLSLSPPPSPAKKLKTKPGSRRPSPPRGLGGRRKTKVAAAALSPESCLSSGIPGAAAGPRRADIKNRGLGKRRRPAFKERSPGSCGLGRGKGAFLPTLPVALDPPRVRRCSKERSGGPPGSRVERSSMGSRCALALAVLSALLCQVWSSGVFELKLQEFVNKKGLLGNRNCCRGGAGPPPCACRTFFRVCLKHYQASVSPEPPCTYGSAVTPVLGVDSFSLPDGGGADSAFSNPIRFPFGFTWPGTFSLIIEALHTDSPDDLATENPERLISRLATQRHLTVGEEWSQDLHSSGRTDLKYSYRFVCDEHYYGEGCSVFCRPRDDAFGHFTCGERGEKVCNPGWKGPYCTEPICLPGCDEQHGFCDKPGECKCRVGWQGRYCDECIRYPGCLHGTCQQPWQCNCQEGWGGLFCNQDQGKPSLPEAACSLQSSPGLPWLFDHWKNKVFLHLMSASYLLLFLSPPFTDLNYCTHHKPCKNGATCTNTGQGSYTCSCRPGYTGATCELGIDECDPSPCKNGGSCTDLENSYSCTCPPGFYGKICELSAMTCADGPCFNGGRCSDSPDGGYSCRCPVGYSGFNCEKKIDYCSSSPCSNGAKCVDLGDAYLCRCQAGFSGRHCDDNVDDCASSPCANGGTCRDGVNDFSCTCPPGYTGRNCSAPVSRCEHAPCHNGATCHERGHRYVCECARGYGGPNCQFLLPELPPGPAVVDLTEKLEGQGGPFPWVAVCAGVILVLMLLLGCAAVVVCVRLRLQKHRPPADPCRGETETMNNLANCQREKDISVSIIGATQIKNTNKKADFHGDHSADKNGFKARYPAVDYNLVQDLKGDDTAVRDAHSKRDTKCQPQGSSGEEKGTPTTLRGGEASERKRPDSGCSTSKDTKYQSVYVISEEKDECVIATEV

SEQ ID NO: 745244 - protein, 511 aa, Homo sapiens
SQILCAHPRRPDPAEGRAQGNPGSRGAEPPPTARPLRSCACVLDGIGWIHRKDADLCCDTGDRSPECSRNDRRRRVTPGRDPQGPPRTPAAADRPLSARRWPRIIALPVGFPDRGFLIGSGGSSAALLGIKLNLWTLSLSLSPPPSPAKKLKTKPGSRRPSPPRGLGGRRKTKVAAAALSPESCLSSGIPGAAAGPRRADIKNRGLGKRRRPAFKERSPGSCGLGRGKGAFLPTLPVALDPPRVRRCSKERSGGPPGSRVERSSMGSRCALALAVLSALLCQVWSSGVFELKLQEFVNKKGLLGNRNCCRGGAGPPPCACRTFFRVCLKHYQASVSPEPPCTYGSAVTPVLGVDSFSLPDGGGADSAFSNPIRFPFGFTWPGTFSLIIEALHTDSPDDLATENPERLISRLATQRHLTVGEEWSQDLHSSGRTDLKYSYRFVCDEHYYGEGCSVFCRPRDDAFGHFTCGERGEKVCNPGWKGPYCTERESLGRHRWLTRPRTRTTRRDGAS

SEQ ID NO: 745245 - protein, 723 aa, Homo sapiens; identical to SEQ ID NO: 745241

SEQ ID NO: 745246 - protein, 1026 aa, Homo sapiens
SQILCAHPRRPDPAEGRAQGNPGSRGAEPPPTARPLRSCACVLDGIGWIHRKDADLCCDTGDRSPECSRNDRRRRVTPGRDPQGPPRTPAAADRPLSARRWPRIIALPVGFPDRGFLIGSGGSSAALLGIKLNLWTLSLSLSPPPSPAKKLKTKPGSRRPSPPRGLGGRRKTKVAAAALSPESCLSSGIPGAAAGPRRADIKNRGLGKRRRPAFKERSPGSCGLGRGKGAFLPTLPVALDPPRVRRCSKERSGGPPGSRVERSSMGSRCALALAVLSALLCQVWSSGVFELKLQEFVNKKGLLGNRNCCRGGAGPPPCACRTFFRVCLKHYQASVSPEPPCTYGSAVTPVLGVDSFSLPDGGGADSAFSNPIRFPFGFTWPGTFSLIIEALHTDSPDDLATENPERLISRLATQRHLTVGEEWSQDLHSSGRTDLKYSYRFVCDEHYYGEGCSVFCRPRDDAFGHFTCGERGEKVCNPGWKGPYCTEPICLPGCDEQHGFCDKPGECKCRVGWQGRYCDECIRYPGCLHGTCQQPWQCNCQEGWGGLFCNQDLNYCTHHKPCKNGATCTNTGQGSYTCSCRPGYTGATCELGIDECDPSPCKNGGSCTVSRRLHGISPGSWGALVLNGVCGLLGATLEAFSDLSIVYDLENSYSCTCPPGFYGKICELSAMTCADGPCFNGGRCSDSPDGGYSCRCPVGYSGFNCEKKIDYCSSSPCSNGAKCVDLGDAYLCRCQAGFSGRHCDDNVDDCASSPCANGGTCRDGVNDFSCTCPPGYTGRNCSAPVSRCEHAPCHNGATCHERGHRYVCECARGYGGPNCQFLLPELPPGPAVVDLTEKLEGQGGPFPWVAVCAGVILVLMLLLGCAAVVVCVRLRLQKHRPPADPCRGETETMNNLANCQREKDISVSIIGATQIKNTNKKADFHGDHSADKNGFKARYPAVDYNLVQDLKGDDTAVRDAHSKRDTKCQPQGSSGEEKGTPTTLRGGEASERKRPDSGCSTSKDTKYQSVYVISEEKDECVIATEV

SEQ ID NO: 745247 - protein, 356 aa, Homo sapiens [sequence omitted]

SEQ ID NO: 745248 - protein, 317 aa, Homo sapiens
MHGRAYLLLHRDFCDLKENNYKGITAKPVSEDMMEWEVEIEGLQNSVWQGLVFQLTIHFTSEYNYAPPVVKFITIPFHPNVDPHTGQPCIDFLDNPEKWNTNYTLSSILLALQVMLSNPVLENPVNLEAARILVKDESLYRTILRLFNRPLQMKDDSQELPKDPRKCIRPIKTTSFSDYYQTWSRIATSKATEYYRTPLLKVPNFIGQYYKWKKMDLQHQKEWNLKYSVIKCWLARKRMPHEVTHSMEEIKLCPTLNEIFLESPTAINSITDIYETEEEGWKSDTSLYENDTDEPREEEVEDLISWTNTLNTNTSED

SEQ ID NO: 745249 - protein, 287 aa, Homo sapiens
MHGRAYLLLHRDFCDLKENNYKGITAKPVSEDMMEWEVEIEGLQNSVWQGLVFQLTIHFTSEYNYAPPVVKFITIPFHPNVDPHTGQPCIDFLDNPEKWNTNYTLSSILLALQVMLSNPVLENPVNLEAARILVKDESLYRTILRLFNRPLQMKMTARSYLKTHVNVSVLKVPNFIGQYYKWKKMDLQHQKEWNLKYSVIKCWLARKRMPHEVTHSMEEIKLCPTLNEIFLESPTAINSITDIYETEEEGWKSDTSLYENDTDEPREEEVEDLISWTNTLNTNTSED

SEQ ID NO: 745250 - protein, 226 aa, Homo sapiens
MHGRAYLLLHRDFCDLKENNYKGITAKPVSEDMMEWEVEIEGLQNSVWQGLVFQLTIHFTSEYNYAPPVVKFITIPFHPNVDPHTGQPCIDFLDNPEKWNTNYTLSSILLALQVMLSNPVLENPVNLEAARILVKDESLYRTILRLFNRPLQMKDDSQELPKDPRKCIRPIKTTSFSDYYQTWSRIATSKATEYYRTPLLKVPNFIGQYYKWKKMDLQHQKEWNLK

SEQ ID NO: 745251 - protein, 205 aa, Homo sapiens
MHGRAYLLLHRDFCDLKENNYKGITAKPVSEDMMEWEVEIEGLQNSVWQGLVFQLTIHFTSEYNYAPPVVKFITIPFHPNVDPHTGQPCIDFLDNPEKWNTNYTLSSILLALQVMLSNPVLENPVNLEAARILVKDESLYRTILRLFNRPLQMKDDSQELPKDPRKCISAQSSKFHWTVLQMEENGSTASERMEFKMKNLSLEAA

SEQ ID NO: 745252 - protein, 3460 aa, Homo sapiens
MERSGWARQTFLLALLLGATLRARAAAGYYPRFSPFFFLCTHHGELEGDGEQGEVLISLHIAGNPTYYVPGQEYHVTISTSTFFDGLLVTGLYTSTSVQASQSIGGSSAFGFGIMSDHQFGNQFMCSVVASHVSHLPTTNLSFIWIAPPAGTGCVNFMATATHRGQVIFKDALAQQLCEQGAPTDVTVHPHLAEIHSDSIILRDDFDSYHQLQLNPNIWVECNNCETGEQCGAIMHGNAVTFCEPYGPRELITTGLNTTTASVLQFSIGSGSCRFSYSDPSIIVLYAKNNSADWIQLEKIRAPSNVSTIIHILYLPEDAKGENVQFQWKQENLRVGEVYEACWALDNILIINSAHRQVVLEDSLDPVDTGNWLFFPGATVKHSCQSDGNSIYFHGNEGSEFNFATTRDVDLSTEDIQEQWSEEFESQPTGWDVLGAVIGTECGTIESGLSMVFLKDGERKLCTPSMDTTGYGNLRFYFVMGGICDPGNSHENDIILYAKIEGRKEHITLDTLSYSSYKVPSLVSVVINPELQTPATKFCLRQKNHQGHNRNVWAVDFFHVLPVLPSTMSHMIQFSINLGCGTHQPGNSVSLEFSTNHGRSWSLLHTECLPEICAGPHLPHSTVYSSENYSGWNRITIPLPNAALTRNTRIRWRQTGPILGNMWAIDNVYIGPSCLKFCSGRGQCTRHGCKCDPGFSGPACEMASQTFPMFISESFGSSRLSSYHNFYSIRGAEVSFGCGVLASGKALVFNKDGRRQLITSFLDSSQSRFLQFTLRLGSKSVLSTCRAPDQPGEGVLLHYSYDNGITWKLLEHYSYLSYHEPRIISVELPGDAKQFGIQFRWWQPYHSSQREDVWAIDEIIMTSVLFNSISLDFTNLVEVTQSLGFYLGNVQPYCGHDWTLCFTGDSKLASSMRYVETQSMQIGASYMIQFSLVMGCGQKYTPHMDNQVKLEYSTNHGLTWHLVQEECLPSMPSCQEFTSASIYHASEFTQWRRVIVLLPQKTWSSATRFRWSQSYYTAQDEWALDSIYIGQQCPNMCSGHGSCDHGICRCDQGYQGTECHPEAALPSTIMSDFENQNGWESDWQEVIGGEIVKPEQGCGVISSGSSLYFSKAGKRQLVSWDLDTSWVDFVQFYIQIGGESASCNKPDSREEGVLLQYSNNGGIQWHLLAEMYFSDFSKPRFVYLELPAAAKTPCTRFRWWQPVFSGEDYDQWAVDDIIILSEKQKQIIPVINPTLPQNFYEKPAFDYPMNQMSVWLMLANEGMVKNETFCAATPSAMIFGKSDGDRFAVTRDLTLKPGYVLQFKLNIGCANQFSSTAPVLLQYSHDAGMSWFLVKEGCYPASAGKGCEGNSRELSEPTMYHTGDFEEWTRITIVIPRSLASSKTRFRWIQESSSQKNVPPFGLDGVYISEPCPSYCSGHGDCISGVCFCDLGYTAAQGTCVSNVPNHNEMFDRFEGKLSPLWYKITGAQVGTGCGTLNDGKSLYFNGPGKREARTVPLDTRNIRLVQFYIQIGSKTSGITCIKPRTRNEGLIVQYSNDNGILWHLLRELDFMSFLEPQIISIDLPQDAKTPATAFRWWQPQHGKHSAQWALDDVLIGMNDSSQTGFQDKFDGSIDLQANWYRIQGGQVDIDCLSMDTALIFTENIGKPRYAETWDFHVSASTFLQFEMSMGCSKPFSNSHSVQLQYSLNNGKDWHLVTEECVPPTIGCLHYTESSIYTSERFQNWKRITVYLPLSTISPRTRFRWIQANYTVGADSWAIDNVVLASGCPWMCSGRGICDAGRCVCDRGFGGPYCVPVVPLPSILKDDFNGNLHPDLWPEVYGAERGNLNGETIKSGTSLIFKGEGLRMLISRDLDCTNTMYVQFSLRFIAKSTPERSHSILLQFSISGGITWHLMDEFYFPQTTNILFINVPLPYTAQTNATRFRLWQPYNNGKKEEIWIVDDFIIDGNNVNNPVMLLDTFDFGPREDNWFFYPGGNIGLYCPYSSKGAPEEDSAMVFVSNEVGEHSITTRDLNVNENTIIQFEINVGCSTDSSSADPVRLEFSRDFGATWHLLLPLCYHSSSHVSSLCSTEHHPSSTYYAGTMQGWRREVVHFGKLHLCGSVRFRWYQGFYPAGSQPVTWAIDNVYIGPQCEEMCNGQGSCINGTKCICDPGYSGPTCKISTKNPDFLKDDFEGQLESDRFLLMSGGKPSRKCGILSSGNNLFFNEDGLRMLMTRDLDLSHARFVQFFMRLGCGKGVPDPRSQPVLLQYSLNGGLSWSLLQEFLFSNSSNVGRYIALEIPLKARSGSTRLRWWQPSENGHFYSPWVIDQILIGGNISGNTVLEDDFTTLDSRKWLLHPGGTKMPVCGSTGDALVFIEKASTRYVVSTDVAVNEDSFLQIDFAASCSVTDSCYAIELEYSVDLGLSWHPLVRDCLPTNVECSRYHLQRILVSDTFNKWTRITLPLPPYTRSQATRFRWHQPAPFDKQQTWAIDNVYIGDGCIDMCSGHGRCIQGNCVCDEQWGGLYCDDPETSLPTQLKDNFNRAPSSQNWLTVNGGKLSTVCGAVASGMALHFSGGCSRLLVTVDLNLTNAEFIQFYFMYGCLITPNNRNQGVLLEYSVNGGITWNLLMEIFYDQYSKPGFVNILLPPDAKEIATRFRWWQPRHDGLDQNDWAIDNVLISGSADQRTVMLDTFSSAPVPQHERSPADAGPVGRIAFDMFMEDKTSVNEHWLFHDDCTVERFCDSPDGVMLCGSHDGREVYAVTHDLTPTEGWIMQFKISVGCKVSEKIAQNQIHVQYSTDFGVSWNYLVPQCLPADPKCSGSVSQPSVFFPTKGWKRITYPLPESLVGNPVRFRFYQKYSDMQWAIDNFYLGPGCLDNCRGHGDCLREQCICDPGYSGPNCYLTHTLKTFLKERFDSEEIKPDLWMSLEGGSTCTECGILAEDTALYFGGSTVRQAVTQDLDLRGAKFLQYWGRIGSENNMTSCHRPICRKEGVLLDYSTDGGITWTLLHEMDYQKYISVRHDYILLPEDALTNTTRLRWWQPFVISNGIVVSGVERAQWALDNILIGGAEINPSQLVDTFDDEGTSHEENWSFYPNAVRTAGFCGNPSFHLYWPNKKKDKTHNALSSRELIIQPGYMMQFKIVVGCEATSCGDLHSVMLEYTKDARSDSWQLVQTQCLPSSSNSIGCSPFQFHEATIYNSVNSSSWKRITIQLPDHVSSSATQFRWIQKGEETEKQSWAIDHVYIGEACPKLCSGHGYCTTGAICICDESFQGDDCSVFSHDLPSYIKDNFESARVTEANWETIQGGVIGSGCGQLAPYAHGDSLYFNGCQIRQAATKPLDLTRASKIMFVLQIGSMSQTDSCNSDLSGPHAVDKAVLLQYSVNNGITWHVIAQHQPKDFTQAQRVSYNVPLEARMKGVLLRWWQPRHNGTGHDQWALDHVEVVLVSTRKQNYMMNFSRQHGLRHFYNRRRRSLRRYP

SEQ ID NO: 745253 - protein, 1162 aa, Homo sapiens
MENLGFFKNTFQILIGGNISGNTVLEDDFTTLDSRKWLLHPGGTKMPVCGSTGDALVFIEKASTRYVVSTDVAVNEDSFLQIDFAASCSVTDSCYAIELEYSVDLGLSWHPLVRDCLPTNVECSRYHLQRILVSDTFNKWTRITLPLPPYTRSQATRFRWHQPAPFDKQQTWAIDNVYIGDGCIDMCSGHGRCIQGNCVCDEQWGGLYCDDPETSLPTQLKDNFNRAPSSQNWLTVNGGKLSTVCGAVASGMALHFSGGCSRLLVTVDLNLTNAEFIQFYFMYGCLITPNNRNQGVLLEYSVNGGITWNLLMEIFYDQYSKPGFVNILLPPDAKEIATRFRWWQPRHDGLDQNDWAIDNVLISGSADQRTVMLDTFSSAPVPQHERSPADAGPVGRIAFDMFMEDKTSVNEHWLFHDDCTVERFCDSPDGVMLCGSHDGREVYAVTHDLTPTEGWIMQFKISVGCKVSEKIAQNQIHVQYSTDFGVSWNYLVPQCLPADPKCSGSVSQPSVFFPTKGWKRITYPLPESLVGNPVRFRFYQKYSDMQWAIDNFYLGPGCLDNCRGHGDCLREQCICDPGYSGPNCYLTHTLKTFLKERFDSEEIKPDLWMSLEGGSTCTECGILAEDTALYFGGSTVRQAVTQDLDLRGAKFLQYWGRIGSENNMTSCHRPICRKEGVLLDYSTDGGITWTLLHEMDYQKYISVRHDYILLPEDALTNTTRLRWWQPFVISNGIVVSGVERAQWALDNILIGGAEINPSQLVDTFDDEGTSHEENWSFYPNAVRTAGFCGNPSFHLYWPNKKKDKTHNALSSRELIIQPGYMMQFKIVVGCEATSCGDLHSVMLEYTKDARSDSWQLVQTQCLPSSSNSIGCSPFQFHEATIYNSVNSSSWKRITIQLPDHVSSSATQFRWIQKGEETEKQSWAIDHVYIGEACPKLCSGHGYCTTGAICICDESFQGDDCSVFSHDLPSYIKDNFESARVTEANWETIQGGVIGSGCGQLAPYAHGDSLYFNGCQIRQAATKPLDLTRASKIMFVLQIGSMSQTDSCNSDLSGPHAVDKAVLLQYSVNNGITWHVIAQHQPKDFTQAQRVSYNVPLEARMKGVLLRWWQPRHNGTGHDQWALDHVEVVLVSTRKQNYMMNFSRQHGLRHFYNRRRRSLRRYP

SEQ ID NO: 745254 - protein, 3069 aa, Homo sapiens
MERSGWARQTFLLALLLGATLRARAAAGYYPRFSPFFFLCTHHGELEGDGEQGEVLISLHIAGNPTYYVPGQEYHVTISTSTFFDGLLVTGLYTSTSVQASQSIGGSSAFGFGIMSDHQFGNQFMCSVVASHVSHLPTTNLSFIWIAPPAGTGCVNFMATATHRGQVIFKDALAQQLCEQGAPTDVTVHPHLAEIHSDSIILRDDFDSYHQLQLNPNIWVECNNCETGEQCGAIMHGNAVTFCEPYGPRELITTGLNTTTASVLQFSIGSGSCRFSYSDPSIIVLYAKNNSADWIQLEKIRAPSNVSTIIHILYLPEDAKGENVQFQWKQENLRVGEVYEACWALDNILIINSAHRQVVLEDSLDPVDTGNWLFFPGATVKHSCQSDGNSIYFHGNEGSEFNFATTRDVDLSTEDIQEQWSEEFESQPTGWDVLGAVIGTECGTIESGLSMVFLKDGERKLCTPSMDTTGYGNLRFYFVMGGICDPGNSHENDIILYAKIEGRKEHITLDTLSYSSYKVPSLVSVVINPELQTPATKFCLRQKNHQGHNRNVWAVDFFHVLPVLPSTMSHMIQFSINLGCGTHQPGNSVSLEFSTNHGRSWSLLHTECLPEICAGPHLPHSTVYSSENYSGWNRITIPLPNAALTRNTRIRWRQTGPILGNMWAIDNVYIGPSCLKFCSGRGQCTRHGCKCDPGFSGPACEMASQTFPMFISESFGSSRLSSYHNFYSIRGAEVSFGCGVLASGKALVFNKDGRRQLITSFLDSSQSRFLQFTLRLGSKSVLSTCRAPDQPGEGVLLHYSYDNGITWKLLEHYSYLSYHEPRIISVELPGDAKQFGIQFRWWQPYHSSQREDVWAIDEIIMTSVLFNSISLDFTNLVEVTQSLGFYLGNVQPYCGHDWTLCFTGDSKLASSMRYVETQSMQIGASYMIQFSLVMGCGQKYTPHMDNQVKLEYSTNHGLTWHLVQEECLPSMPSCQEFTSASIYHASEFTQWRRVIVLLPQKTWSSATRFRWSQSYYTAQDEWALDSIYIGQQCPNMCSGHGSCDHGICRCDQGYQGTECHPEAALPSTIMSDFENQNGWESDWQEVIGGEIVKPEQGCGVISSGSSLYFSKAGKRQLVSWDLDTSWVDFVQFYIQIGGESASCNKPDSREEGVLLQYSNNGGIQWHLLAEMYFSDFSKPRFVYLELPAAAKTPCTRFRWWQPVFSGEDYDQWAVDDIIILSEKQKQIIPVINPTLPQNFYEKPAFDYPMNQMSVWLMLANEGMVKNETFCAATPSAMIFGKSDGDRFAVTRDLTLKPGYVLQFKLNIGCANQFSSTAPVLLQYSHDAGMSWFLVKEGCYPASAGKGCEGNSRELSEPTMYHTGDFEEWTRITIVIPRSLASSKTRFRWIQESSSQKNVPPFGLDGVYISEPCPSYCSGHGDCISGVCFCDLGYTAAQGTCVSNVPNHNEMFDRFEGKLSPLWYKITGAQVGTGCGTLNDGKSLYFNGPGKREARTVPLDTRNIRLVQFYIQIGSKTSGITCIKPRTRNEGLIVQYSNDNGILWHLLRELDFMSFLEPQIISIDLPQDAKTPATAFRWWQPQHGKHSAQWALDDVLIGMNDSSQTGFQDKFDGSIDLQANWYRIQGGQVDIDCLSMDTALIFTENIGKPRYAETWDFHVSASTFLQFEMSMGCSKPFSNSHSVQLQYSLNNGKDWHLVTEECVPPTIGCLHYTESSIYTSERFQNWKRITVYLPLSTISPRTRFRWIQANYTVGADSWAIDNVVLASGCPWMCSGRGICDAGRCVCDRGFGGPYCVPVVPLPSILKDDFNGNLHPDLWPEVYGAERGNLNGETIKSGTSLIFKGEGLRMLISRDLDCTNTMYVQFSLRFIAKSTPERSHSILLQFSISGGITWHLMDEFYFPQTTNILFINVPLPYTAQTNATRFRLWQPYNNGKKEEIWIVDDFIIDGNNVNNPVMLLDTFDFGPREDNWFFYPGGNIGLYCPYSSKGAPEEDSAMVFVSNEVGEHSITTRDLNVNENTIIQFEINVGCSTDSSSADPVRLEFSRDFGATWHLLLPLCYHSSSHVSSLCSTEHHPSSTYYAGTMQGWRREVVHFGKLHLCGSVRFRWYQGFYPAGSQPVTWAIDNVYIGPQCEEMCNGQGSCINGTKCICDPGYSGPTCKISTKNPDFLKDDFEGQLESDRFLLMSGGKPSRKCGILSSGNNLFFNEDGLRMLMTRDLDLSHARFVQFFMRLGCGKGVPDPRSQPVLLQYSLNGGLSWSLLQEFLFSNSSNVGRYIALEIPLKARSGSTRLRWWQPSENGHFYSPWVIDQILIGGNISGNTVLEDDFTTLDSRKWLLHPGGTKMPVCGSTGDALVFIEKASTRYVVSTDVAVNEDSFLQIDFAASCSVTDSCYAIELEYSVDLGLSWHPLVRDCLPTNVECSRYHLQRILVSDTFNKWTRITLPLPPYTRSQATRFRWHQPAPFDKQQTWAIDNVYIGDGCIDMCSGHGRCIQGNCVCDEQWGGLYCDDPETSLPTQLKDNFNRAPSSQNWLTVNGGKLSTVCGAVASGMALHFSGGCSRLLVTVDLNLTNAEFIQFYFMYGCLITPNNRNQGVLLEYSVNGGITWNLLMEIFYDQYSKPGFVNILLPPDAKEIATRFRWWQPRHDGLDQNDWAIDNVLISGSADQRTVMLDTFSSAPVPQHERSPADAGPVGRIAFDMFMEDKTSVNEHWLFHDDCTVERFCDSPDGVMLCGSHDGREVYAVTHDLTPTEGWIMQFKISVGCKVSEKIAQNQIHVQYSTDFGVSWNYLVPQCLPADPKCSGSVSQPSVFFPTKGWKRITYPLPESLVGNPVRFRFYQKYSDMQWAIDNFYLGPGCLDNCRGHGDCLREQCICDPGYSGPNCYLTHTLKTFLKERFDSEEIKPDLWMSLEGGSTCTECGILAEDTALYFGGSTVRQAVTQDLDLRGAKFLQYWGRIGSENNMTSCHRPICRKEGVLLDYSTDGGITWTLLHEMDYQKYISVRHDYILLPEDALTNTTRLRWWQPFVISNGIVVSGVERAQWALDNILIGGAEINPSQLVDTFDDVRRYP

SEQ ID NO: 745255 - protein, 2101 aa, Homo sapiens
MERSGWARQTFLLALLLGATLRARAAAGYYPRFSPFFFLCTHHGELEGDGEQGEVLISLHIAGNPTYYVPGQEYHVTISTSTFFDGLLVTGLYTSTSVQASQSIGGSSAFGFGIMSDHQFGNQFMCSVVASHVSHLPTTNLSFIWIAPPAGTGCVNFMATATHRGQVIFKDALAQQLCEQGAPTDVTVHPHLAEIHSDSIILRDDFDSYHQLQLNPNIWVECNNCETGEQCGAIMHGNAVTFCEPYGPRELITTGLNTTTASVLQFSIGSGSCRFSYSDPSIIVLYAKNNSADWIQLEKIRAPSNVSTIIHILYLPEDAKGENVQFQWKQENLRVGEVYEACWALDNILIINSAHRQVVLEDSLDPVDTGNWLFFPGATVKHSCQSDGNSIYFHGNEGSEFNFATTRDVDLSTEDIQEQWSEEFESQPTGWDVLGAVIGTECGTIESGLSMVFLKDGERKLCTPSMDTTGYGNLRFYFVMGGICDPGNSHENDIILYAKIEGRKEHITLDTLSYSSYKVPSLVSVVINPELQTPATKFCLRQKNHQGHNRNVWAVDFFHVLPVLPSTMSHMIQFSINLGCGTHQPGNSVSLEFSTNHGRSWSLLHTECLPEICAGPHLPHSTVYSSENYSGWNRITIPLPNAALTRNTRIRWRQTGPILGNMWAIDNVYIGPSCLKFCSGRGQCTRHGCKCDPGFSGPACEMASQTFPMFISESFGSSRLSSYHNFYSIRGAEVSFGCGVLASGKALVFNKDGRRQLITSFLDSSQSRFLQFTLRLGSKSVLSTCRAPDQPGEGVLLHYSYDNGITWKLLEHYSYLSYHEPRIISVELPGDAKQFGIQFRWWQPYHSSQREDVWAIDEIIMTSVLFNSISLDFTNLVEVTQSLGFYLGNVQPYCGHDWTLCFTGDSKLASSMRYVETQSMQIGASYMIQFSLVMGCGQKYTPHMDNQVKLEYSTNHGLTWHLVQEECLPSMPSCQEFTSASIYHASEFTQWRRVIVLLPQKTWSSATRFRWSQSYYTAQDEWALDSIYIGQQCPNMCSGHGSCDHGICRCDQGYQGTECHPEAALPSTIMSDFENQNGWESDWQEVIGGEIVKPEQGCGVISSGSSLYFSKAGKRQLVSWDLDTSWVDFVQFYIQIGGESASCNKPDSREEGVLLQYSNNGGIQWHLLAEMYFSDFSKPRFVYLELPAAAKTPCTRFRWWQPVFSGEDYDQWAVDDIIILSEKQKQIIPVINPTLPQNFYEKPAFDYPMNQMSVWLMLANEGMVKNETFCAATPSAMIFGKSDGDRFAVTRDLTLKPGYVLQFKLNIGCANQFSSTAPVLLQYSHDAGMSWFLVKEGCYPASAGKGCEGNSRELSEPTMYHTGDFEEWTRITIVIPRSLASSKTRFRWIQESSSQKNVPPFGLDGVYISEPCPSYCSGHGDCISGVCFCDLGYTAAQGTCVSNVPNHNEMFDRFEGKLSPLWYKITGAQVGTGCGTLNDGKSLYFNGPGKREARTVPLDTRNIRLVQFYIQIGSKTSGITCIKPRTRNEGLIVQYSNDNGILWHLLRELDFMSFLEPQIISIDLPQDAKTPATAFRWWQPQHGKHSAQWALDDVLIGMNDSSQTGFQDKFDGSIDLQANWYRIQGGQVDIDCLSMDTALIFTENIGKPRYAETWDFHVSASTFLQFEMSMGCSKPFSNSHSVQLQYSLNNGKDWHLVTEECVPPTIGCLHYTESSIYTSERFQNWKRITVYLPLSTISPRTRFRWIQANYTVGADSWAIDNVVLASGCPWMCSGRGICDAGRCVCDRGFGGPYCVPVVPLPSILKDDFNGNLHPDLWPEVYGAERGNLNGETIKSGTSLIFKGEGLRMLISRDLDCTNTMYVQFSLRFIAKSTPERSHSILLQFSISGGITWHLMDEFYFPQTTNILFINVPLPYTAQTNATRFRLWQPYNNGKKEEIWIVDDFIIDGNNVNNPVMLLDTFDFGPREDNWFFYPGGNIGLYCPYSSKGAPEEDSAMVFVSNEVGEHSITTRDLNVNENTIIQFEINVGCSTDSSSADPVRLEFSRDFGATWHLLLPLCYHSSSHVSSLCSTEHHPSSTYYAGTMQGWRREVVHFGKLHLCG

SEQ ID NO: 745256 - protein, 925 aa, Homo sapiens
MERSGWARQTFLLALLLGATLRARAAAGYYPRFSPFFFLCTHHGELEGDGEQGEVLISLHIAGNPTYYVPGQEYHVTISTSTFFDGLLVTGLYTSTSVQASQSIGGSSAFGFGIMSDHQFGNQFMCSVVASHVSHLPTTNLSFIWIAPPAGTGCVNFMATATHRGQVIFKDALAQQLCEQGAPTDVTVHPHLAEIHSDSIILRDDFDSYHQLQLNPNIWVECNNCETGEQCGAIMHGNAVTFCEPYGPRELITTGLNTTTASVLQFSIGSGSCRFSYSDPSIIVLYAKNNSADWIQLEKIRAPSNVSTIIHILYLPEDAKGENVQFQWKQENLRVGEVYEACWALDNILIINSAHRQVVLEDSLDPVDTGNWLFFPGATVKHSCQSDGNSIYFHGNEGSEFNFATTRDVDLSTEDIQEQWSEEFESQPTGWDVLGAVIGTECGTIESGLSMVFLKDGERKLCTPSMDTTGYGNLRFYFVMGGICDPGNSHENDIILYAKIEGRKEHITLDTLSYSSYKVPSLVSVVINPELQTPATKFCLRQKNHQGHNRNVWAVDFFHVLPVLPSTMSHMIQFSINLGCGTHQPGNSVSLEFSTNHGRSWSLLHTECLPEICAGPHLPHSTVYSSENYSGWNRITIPLPNAALTRNTRIRWRQTGPILGNMWAIDNVYIGPSCLKFCSGRGQCTRHGCKCDPGFSGPACEMASQTFPMFISESFGSSRLSSYHNFYSIRGAEVSFGCGVLASGKALVFNKDGRRQLITSFLDSSQSRFLQFTLRLGSKSVLSTCRAPDQPGEGVLLHYSYDNGITWKLLEHYSYLSYHEPRIISVELPGDAKQFGIQFRWWQPYHSSQREDVWAIDEIIMTSVLFNSISLDFTNLVEVTQSLGFYLGNVQPYCGHDWTLWLECNGAISTHCNLCLPGSNDTFSI

SEQ ID NO: 745257 - protein, 3446 aa, Homo sapiens
MERSGWARQTFLLALLLGATLRARAAAGYYPRFSPFFFLCTHHGELEGDGEQGEVLISLHIAGNPTYYVPGQEYHVTISTSTFFDGLLVTGLYTSTSVQASQSIGGSSAFGFGIMSDHQFGNQFMCSVVASHVSHLPTTNLSFIWIAPPAGTGCVNFMATATHRGQVIFKDALAQQLCEQGAPTDVTVHPHLAEIHSDSIILRDDFDSYHQLQLNPNIWVECNNCETGEQCGAIMHGNAVTFCEPYGPRELITTGLNTTTASVLQFSIGSGSCRFSYSDPSIIVLYAKNNSADWIQLEKIRAPSNVSTIIHILYLPEDAKGENVQFQWKQENLRVGEVYEACWALDNILIINSAHRQVVLEDSLDPVDTGNWLFFPGATVKHSCQSDGNSIYFHGNEGSEFNFATTRDVDLSTEDIQEQWSEEFESQPTGWDVLGAVIGTECGTIESGLSMVFLKDGERKLCTPSMDTTGYGNLRFYFVMGGICDPGNSHENDIILYAKIEGRKEHITLDTLSYSSYKVPSLVSVVINPELQTPATKFCLRQKNHQGHNRNVWAVDFFHVLPVLPSTMSHMIQFSINLGCGTHQPGNSVSLEFSTNHGRSWSLLHTECLPEICAGPHLPHSTVYSSENYSGWNRITIPLPNAALTRNTRIRWRQTGPILGNMWAIDNVYIGPSCLKFCSGRGQCTRHGCKCDPGFSGPACEMASQTFPMFISESFGSSRLSSYHNFYSIRGAEVSFGCGVLASGKALVFNKDGRRQLITSFLDSSQSRFLQFTLRLGSKSVLSTCRAPDQPGEGVLLHYSYDNGITWKLLEHYSYLSYHEPRIISVELPGDAKQFGIQFRWWQPYHSSQREDVWAIDEIIMTSVLFNSISLDFTNLVEVTQSLGFYLGNVQPYCGHDWTLCFTGDSKLASSMRYVETQSMQIGASYMIQFSLVMGCGQKYTPHMDNQVKLEYSTNHGLTWHLVQEECLPSMPSCQEFTSASIYHASEFTQWRRVIVLLPQKTWSSATRFRWSQSYYTAQDEWALDSIYIGQQCPNMCSGHGSCDHGICRCDQGYQGTECHPEAALPSTIMSDFENQNGWESDWQEVIGGEIVKPEQGCGVISSGSSLYFSKAGKRQLVSWDLDTSWVDFVQFYIQIGGESASCNKPDSREEGVLLQYSNNGGIQWHLLAEMYFSDFSKPRFVYLELPAAAKTPCTRFRWWQPVFSGEDYDQWAVDDIIILSEKQKQIIPVINPTLPQNFYEKPAFDYPMNQMSVWLMLANEGMVKNETFCAATPSAMIFGKSDGDRFAVTRDLTLKPGYVLQFKLNIGCANQFSSTAPVLLQYSHDAGMSWFLVKEGCYPASAGKGCEGNSRELSEPTMYHTGDFEEWTRITIVIPRSLASSKTRFRWIQESSSQKNVPPFGLDGVYISEPCPSYCSGHGDCISGVCFCDLGYTAAQGTCVSNVPNHNEMFDRFEGKLSPLWYKITGAQVGTGCGTLNDGKSLYFNGPGKREARTVPLDTRNIRLVQFYIQIGSKTSGITCIKPRTRNEGLIVQYSNDNGILWHLLRELDFMSFLEPQIISIDLPQDAKTPATAFRWWQPQHGKHSAQWALDDVLIGMNDSSQTGFQDKFDGSIDLQANWYRIQGGQVDIDCLSMDTALIFTENIGKPRYAETWDFHVSASTFLQFEMSMGCSKPFSNSHSVQLQYSLNNGKDWHLVTEECVPPTIGCLHYTESSIYTSERFQNWKRITVYLPLSTISPRTRFRWIQANYTVGADSWAIDNVVLASGCPWMCSGRGICDAGRCVCDRGFGGPYCVPVVPLPSILKDDFNGNLHPDLWPEVYGAERGNLNGETIKSGTSLIFKGEGLRMLISRDLDCTNTMYVQFSLRFIAKSTPERSHSILLQFSISGGITWHLMDEFYFPQTTNILFINVPLPYTAQTNATRFRLWQPYNNGKKEEIWIVDDFIIDGNNVNNPVMLLDTFDFGPREDNWFFYPGGNIGLYCPYSSKGAPEEDSAMVFVSNEVGEHSITTRDLNVNENTIIQFEINVGCSTDSSSADPVRLEFSRDFGATWHLLLPLCYHSSSHVSSLCSTEHHPSSTYYAGTMQGWRREVVHFGKLHLCGSVRFRWYQGFYPAGSQPVTWAIDNVYIGPQCEEMCNGQGSCINGTKCICDPGYSGPTCKISTKNPDFLKDDFEGQLESDRFLLMSGGKPSRKCGILSSGNNLFFNEDGLRMLMTRDLDLSHARFVQFFMRLGCGKGVPDPRSQPVLLQYSLNGGLSWSLLQEFLFSNSSNVGRYIALEIPLKARSGSTRLRWWQPSENGHFYSPWVIDQILIGGNISGNTVLEDDFTTLDSRKWLLHPGGTKMPVCGSTGDALVFIEKASTRYVVSTDVAVNEDSFLQIDFAASCSVTDSCYAIELEYSVDLGLSWHPLVRDCLPTNVECSRYHLQRILVSDTFNKWTRITLPLPPYTRSQATRFRWHQPAPFDKQQTWAIDNVYIGDGCIDMCSGHGRCIQGNCVCDEQWGGLYCDDPETSLPTQLKDNFNRAPSSQNWLTVNGGKLSTVCGAVASGMALHFSGGCSRLLVTVDLNLTNAEFIQFYFMYGCLITPNNRNQGVLLEYSVNGGITWNLLMEIFYDQYSKPGFVNILLPPDAKEIATRFRWWQPRHDGLDQNDWAIDNVLISGSADQRTVMLDTFSSAPVPQHERSPADAGPVGRIAFDMFMEDKTSVNEHWLFHDDCTVERFCDSPDGVMLCGSHDGREVYAVTHDLTPTEGWIMQFKISVGCKVSEKIAQNQIHVQYSTDFGVSWNYLVPQCLPADPKCSGSVSQPSVFFPTKGWKRITYPLPESLVGNPVRFRFYQKYSDMQWAIDNFYLGPGCLDNCRGHGDCLREQCICDPGYSGPNCYLTHTLKTFLKERFDSEEIKPDLWMSLEGGSTCTECGILAEDTALYFGGSTVRQAVTQDLDLRGAKFLQYWGRIGSENNMTSCHRPICRKEGVLLDYSTDGGITWTLLHEMDYQKYISVRHDYILLPEDALTNTTRLRWWQPFVISNGIVVSGVERAQWALDNILIGGAEINPSQLVDTFDDEGTSHEENWSFYPNAVRTAGFCGNPSFHLYWPNKKKDKTHNALSSRELIIQPGYMMQFKIVVGCEATSCGDLHSVMLEYTKDARSDSWQLVQTQCLPSSSNSIGCSPFQFHEATIYNSVNSSSWSTQFRWIQKGEETEKQSWAIDHVYIGEACPKLCSGHGYCTTGAICICDESFQGDDCSVFSHDLPSYIKDNFESARVTEANWETIQGGVIGSGCGQLAPYAHGDSLYFNGCQIRQAATKPLDLTRASKIMFVLQIGSMSQTDSCNSDLSGPHAVDKAVLLQYSVNNGITWHVIAQHQPKDFTQAQRVSYNVPLEARMKGVLLRWWQPRHNGTGHDQWALDHVEVVLVSTRKQNYMMNFSRQHGLRHFYNRRRRSLRRYP

SEQ ID NO: 745258 - protein, 414 aa, Homo sapiens
SNFPQENNMPYCFQFSLTEGTSHEENWSFYPNAVRTAGFCGNPSFHLYWPNKKKDKTHNALSSRELIIQPGYMMQFKIVVGCEATSCGDLHSVMLEYTKDARSDSWQLVQTQCLPSSSNSIGCSPFQFHEATIYNSVNSSSWKRITIQLPDHVSSSATQFRWIQKGEETEKQSWAIDHVYIGEACPKLCSGHGYCTTGAICICDESFQGDDCSVFSHDLPSYIKDNFESARVTEANWETIQGGVIGSGCGQLAPYAHGDSLYFNGCQIRQAATKPLDLTRASKIMFVLQIGSMSQTDSCNSDLSGPHAVDKAVLLQYSVNNGITWHVIAQHQPKDFTQAQRVSYNVPLEARMKGVLLRWWQPRHNGTGHDQWALDHVEVVLVSTRKQNYMMNFSRQHGLRHFYNRRRRSLRRYP

SEQ ID NO: 745259 - protein, 3460 aa, Homo sapiens; identical to SEQ ID NO: 745252

SEQ ID NO: 745260 - protein, 187 aa, Homo sapiens
RISLEKLFVTACWLGLEDCLQLSKELFAKWVDHPENEIPYPIKDVVLCYGIALGSDKEWDILLNTYTNTTNKEEKIQLAYAMSCSKDPWILNRYMEYAISTSPFTSNETNIIEVVASSEVGRYVAKDFLVNNWQAVSKRAFMGICLTVTCRQAHRHRLHTKAHVGVEYIANSSAGTAAPFSQAQNSS

SEQ ID NO: 745261 - protein, 184 aa, Homo sapiens
RISLEKLFVTACWLGLEDCLQLSKELFAKWVDHPENEIPYPIKDVVLCYGIALGSDKEWDILLNTYTNTTNKEEKIQLAYAMSCSKDPWILNRYMEYAISTSPFTSNETNIIEVVASSEVGRYVAKDFLVNNWQAVSKRYGTQSLINLIYTIGRTVTTDLQIVEAEFLLGSLFPCGEKHSSPLI

SEQ ID NO: 745262 - protein, 150 aa, Homo sapiens
RISLEKLFVTACWLGLEDCLQLSKELFAKWVDHPENEIPYPIKDVVLCYGIALGSDKEWDILLNTYTNTTNKEEKIQLAYAMSCSKDPWILNRYMEYAISTSPFTSNETNIIEVVASSEVGRYVAKDFLVNNWQAVSKSLLFTFLTTATL

SEQ ID NO: 745263 - protein, 117 aa, Homo sapiens
MCHYSSLGSELKRVTWFLHALMSPTCKIEAANQKGSRWPSLLWRGKSHFLLSRALLLLPGTCSQPGGRYGRTWGSSQCQYSSWPGHLDSYREVPFPTLLGDLLLRPSSKAFITLIHN

SEQ ID NO: 745264 - protein, 485 aa, Homo sapiens
ARGRGGRSLPARCSRRRSEAALSSQRDLFSSPFFLNSSSRERLVVTGRAGWMGMGRGAGRSALGFWPTLAFLLCSFPAATSPCKILKCNSEFWSATSGSHAPASDDTPEFCAALRSYALCTRRTARTCRGDLAYHSAVHGIEDLMSQHNCSKDGPTSQPRLRTLPPAGDSQERSDSPEICHYEKSFHKHSATPNYTHCGLFGDPHLRTFTDRFQTCKVQGAWPLIDNNYLNVQVTNTPVLPGSAATATSKLTIIFKNFQECVDQKVYQAEMDELPAAFVDGSKNGGDKHGANSLKITEKVSGQHVEIQAKYIGTTIVVRQVGRYLTFAVRMPEEVVNAVEDWDSQGLYLCLRGCPLNQQIDFQAFHTNAEGTGARRLAAASPAPTAPETFPYETAVAKCKEKLPVEDLYYQACVFDLLTTGDVNFTLAAYYALEDVKMLHSNKDKLHLYERTRDLPGRAAAGLPLAPRPLLGALVPLLALLPVFC

SEQ ID NO: 745265 - protein, 74 aa, Homo sapiens
QEASGADGEGGSGNQVLTQGQALLGFRRPNAQLHTLPTHRQPLCCSPGTSHTLARRLQNVLPLPAGFSWSLCWK

SEQ ID NO: 745266 - protein, 485 aa, Homo sapiens; identical to SEQ ID NO: 745264

SEQ ID NO: 745267 - protein, 485 aa, Homo sapiens; identical to SEQ ID NO: 745264

SEQ ID NO: 745268 - protein, 537 aa, Homo sapiens
ERWLRRPSRWAGEALAVRSRAGSARRSQACSPGAGGAPRAAAEPAGAAGTSASGAPPTLPRGRRAAPRHPLFSRSPASATPRGPQGLMQPPRERLVVTGRAGWMGMGRGAGRSALGFWPTLAFLLCSFPAATSPCKILKCNSEFWSATSGSHAPASDDTPEFCAALRSYALCTRRTARTCRGDLAYHSAVHGIEDLMSQHNCSKDGPTSQPRLRTLPPAGDSQERSDSPEICHYEKSFHKHSATPNYTHCGLFGDPHLRTFTDRFQTCKVQGAWPLIDNNYLNVQVTNTPVLPGSAATATSKLTIIFKNFQECVDQKVYQAEMDELPAAFVDGSKNGGDKHGANSLKITEKVSGQHVEIQAKYIGTTIVVRQVGRYLTFAVRMPEEVVNAVEDWDSQGLYLCLRGCPLNQQIDFQAFHTNAEGTGARRLAAASPAPTAPETFPYETAVAKCKEKLPVEDLYYQACVFDLLTTGDVNFTLAAYYALEDVKMLHSNKDKLHLYERTRDLPGRAAAGLPLAPRPLLGALVPLLALLPVFC

SEQ ID NO: 745269 - protein, 485 aa, Homo sapiens; identical to SEQ ID NO: 745264

SEQ ID NO: 745270 - protein, 326 aa, Homo sapiens
ARGRGGRSLPARCSRRRSEAALSSQRDLFSSPFFLNSSSRERLVVTGRAGWMGMGRGAGRSALGFWPTLAFLLCSFPAATSPCKILKCNSEFWSATSGSHAPASDDTPEFCAALRSYALCTRRTARTCRGDLAYHSAVHGIEDLMSQHNCSKDGPTSQPRLRTLPPAGDSQERSDSPEICHYEKSFHKHSATPNYTHCGLFGDPHLRTFTDRFQTCKVQGAWPLIDNNYLNVQVTNTPVLPGSAATATSKLTIIFKNFQECVDQKVYQAEMDELPAAFVDGSKNVSPPPSKRSCSLCQNRVWAGGRALGARPLPLPAGFSWSLCWK

SEQ ID NO: 745271 - protein, 727 aa, Homo sapiens
MQLKSLVEPSSQAWCGQDFTYVPVSDCPLGIIRLVSLMVAKVTAAVPDVTSVLRNIQNKRKYRDPVSQNSSKSPESHCELNKITCPPLNQQLVARVVYWLSQIMYLTLRTGEIGEGESRISFPETTWIPDGNCDFGEGESSPDPEDVTNRNPAQLNTLNCVDKQGLQELEGNERRLHQSEQGGFMEENERLEPNPEEIKDLGNGVGRWKGRNIAHVLCQTSSKPSVCRAWWLTPVIPTLWEAETGGSPEVRSSRQDWPTWRNPVSTKIQKLVRHGGALLQSQLLRRLRWGHCLNPGGRGCGEPRLCLCTAAWVIKQNSISKKKKKFSVCIISVNPYNDLQVWYHHYPHFTVEKLKPRGHTVSVEVETWTQLVWLEKLVPGAMTLVSKVDSGHLGSLHECEVSGLTSGHHRGSAECEVLPSAVLFLGQRGSEPKHNSFESLPNFDLNHVKPCAFPAHQMDSSDKARCWFCSLLGGLECIIHSLLSLSFPICKIDTVIPHLLIEQIYSCLIFAGPGRPRNKDEGDSACPQGPPSLAEEMDIKSERLMESSGKHRSGSDQLSLSGSGKASKKGTSEPHLEWLEEFARQPLGAEFCENQISCVKEMFYKLGCLSLLGSYLSLHCCCRKHKKCPRNPSLELRVPRIRGRGRVLNACYSLGSSSCHTRPVWLHLSLNFMLTQNNHLEFHEIITSLFLLLCLLLLHTHLATSNLFPGNVIDPHSTHAASAPFYL

SEQ ID NO: 745272 - protein, 81 aa, Homo sapiens
FQASEGSRHLEIQTSKTPVAIFRNEAGPPGMKGTWRFKSMTAPGPLWLENIIRAKLVIPYSELKCSLHILLGEVTGQSALT

SEQ ID NO: 745273 - protein, 242 aa, Homo sapiens
MGKAKISLQSGRRQTLRESLHLIVLLTDLLPHLPVQVDLNRQAVQEDLRLPQVLPHHPFPKITIQIPKGTVMVGKPSSHSQYTSSGSVSSSGSKSHHSHSSSSSSSASTSGKMKSSKSEGSSSSKLSSSMYSSQGSSGSSQSKNSSQSGGKPGSSPITKHGLSSGSSSTKMKPQGKPSSLMNPSLSKPNISPSSFKATWEALTSFASPMKPVPGTPPSSKAKSPISSGSGGSHMSGTSSSSG

SEQ ID NO: 745274 - protein, 211 aa, Homo sapiens
MASKVALAKLPRVAVQPRADGVAVIIPAIMSSFLGTGAETMPVPLGAGMRRTSSGSVSSSGSKSHHSHSSSSSSSASTSGKMKSSKSEGSSSSKLSSSMYSSQGSSGSSQSKNSSQSGGKPGSSPITKHGLSSGSSSTKMKPQGKPSSLMNPSLSKPNISPSSFKATWEALTSFASPMKPVPGTPPSSKAKSPISSGSGGSHMSGTSSSSG

SEQ ID NO: 745275 - protein, 111 aa, Homo sapiens
PFQGSQIWPVFLPFPLRVAPRPGPSPAPGLSVFFLRACSFLHTRKQIARGKDHSAARQFPSTWTKHLLRPVCLNRTCTWQSSLVHTRFLGIATDLKIPATAPSPQGLALSD

SEQ ID NO: 745276 - protein, 104 aa, Homo sapiens
MALTQGPLTFRDVAIEFSQEEWKSLDPVQKALYWDVMLENYRNLVFLGILPKCMTKELPPIGNSNTGEKCQTVTLERHECYDVENFYLREIQKNLQDLEFQWKD

SEQ ID NO: 745277 - protein, 111 aa, Homo sapiens; identical to SEQ ID NO: 745275

SEQ ID NO: 745278 - protein, 112 aa, Homo sapiens
AFQLQWDTELEMSRGERSNKMKTKGQGNNGLSPHLWEGACVFRQIKMMTPFTPTPWDSFPTLLRSCSPTMQTQPLQAALFPVGTYLIKWFESPGFHQKHISLMFFCVLLTKL

SEQ ID NO: 745279 - protein, 270 aa, Homo sapiens
PGPWVGPAGAPGDGEAAGENSLREPCADPASPGQALAPPPPAAGRAGASSRAAPPPVFVLEYYLDTLWKGMLLFIISVVLVSFSSLREVWAPGPDPHRPPPLRAGPAPLRLSAWRPQVQKQETWVFLVYGVGVGLWLVISSLPRRRLVLNHTRGVYHFSIQGRTVCQGPLHLVYVRLALSSDAHGRCFFHLVLGGHRLEPLVLVQLSEHYEQMEYLGRYIARKLNINYFDYLATSYRHVVRHWPPPGAGTVMGKSPMGHKPSSSQSSLEV

SEQ ID NO: 745280 - protein, 242 aa, Homo sapiens
MTEVVPSSALSEVSLRLLCHDDIDTVKHLCGDWFPIEYPDSWYRDITSNKKFFSLAATYRGAIVGMIVAEIKNRTKIHKEDGDILASNFSVDTQVAYILSLGVVKEFRKHGIGSLLLESLKDHISTTAQDHCKAIYLHVLTTNNTAINFYENRDFKQHHYLPYYYSIRGVLKDGFTYVLYINGGHPPWTILDYIQHLGSALASLSPCSIPHRVYRQAHSLLCSFLPWSGISSKSGIEYSRTM

SEQ ID NO: 745281 - protein, 208 aa, Homo sapiens
  misc_feature (175)..(175): Xaa can be any naturally occurring amino acid
  misc_feature (197)..(198): Xaa can be any naturally occurring amino acid
MTEVVPSSALSEVSLRLLCHDDIDTVKHLCGDWFPIEYPDSWYRDITSNKKFFSLAATYRGAIVGMIVAEIKNRTKIHKEDGDILASNFSVDTQVAYILSLGVVKEFRKHGIGSLLLESLKDHISTTAQDHCKAIYLHVLTTNNTAINFYENRDFKQHHYLPYYYSIPKGFLQKXGFHPNVPPYIQTGGGATPPLGXXIFGELNIPKP

SEQ ID NO: 745282 - protein, 242 aa, Homo sapiens; identical to SEQ ID NO: 745280

SEQ ID NO: 745283 - protein, 242 aa, Homo sapiens; identical to SEQ ID NO: 745280

SEQ ID NO: 745284 - protein, 242 aa, Homo sapiens; identical to SEQ ID NO: 745280

SEQ ID NO: 745285 - protein, 242 aa, Homo sapiens; identical to SEQ ID NO: 745280

SEQ ID NO: 745286 - protein, 213 aa, Homo sapiens
MTEVVPSSALSEVSLRLLCHDDIDTVKHLCGDWFPIEYPDSWYRDITSNKKFFSLAATYRGAIVGMIVAEIKNRTKIHKEDGDILASNFSVDTQVAYILSLGVVKEFRKHGIGSLLLESLKDHISTTAQDHCKAIYLHVLTTNNTAINFYENRDFKQHHYLPYYYSIRGVLKDGFTYVLYINGGHPPWTILDYIQHLGSALASLSPCSIPHRV

SEQ ID NO: 745287 - protein, 242 aa, Homo sapiens; identical to SEQ ID NO: 745280

SEQ ID NO: 745288 - protein, 221 aa, Homo sapiens
  misc_feature (10)..(10): Xaa can be any naturally occurring amino acid
TFTNCILLGXAVLFTRYPDSWYRDITSNKKFFSLAATYRGAIVGMIVAEIKNRTKIHKEDGDILASNFSVDTQVAYILSLGVVKEFRKHGIGSLLLESLKDHISTTAQDHCKAIYLHVLTTNNTAINFYENRDFKQHHYLPYYYSIRGVLKDGFTYVLYINGGHPPWTILDYIQHLGSALASLSPCSIPHRVYRQAHSLLCSFLPWSGISSKSGIEYSRTM

SEQ ID NO: 745289 - protein, 177 aa, Homo sapiens
MIVAEIKNRTKIHKEDGDILASNFSVDTQVAYILSLGVVKEFRKHGIGSLLLESLKDHISTTAQDHCKAIYLHVLTTNNTAINFYENRDFKQHHYLPYYYSIRGVLKDGFTYVLYINGGHPPWTILDYIQHLGSALASLSPCSIPHRVYRQAHSLLCSFLPWSGISSKSGIEYSRTM

SEQ ID NO: 745290 - protein, 177 aa, Homo sapiens
MTEVVPSSALSEVSLRLLCHDDIDTVKHLCGDWFPIEYPDSWYRDITSNKKFFSLAATYRGAIVGMIVAEIKNRTKIHKEDGDILASNFSVDTQVAYILSLGVVKEFRKHGIAARPTACSAASCHGRASLPRVASSTAGPCDVGWAAATRPHPSAARRARLPVHLTPSVFCKELPAI

SEQ ID NO: 745291 - protein, 242 aa, Homo sapiens; identical to SEQ ID NO: 745280

SEQ ID NO: 745292 - protein, 242 aa, Homo sapiens; identical to SEQ ID NO: 745280

SEQ ID NO: 745293 - protein, 242 aa, Homo sapiens; identical to SEQ ID NO: 745280

SEQ ID NO: 745294 - protein, 242 aa, Homo sapiens; identical to SEQ ID NO: 745280

SEQ ID NO: 745295 - protein, 158 aa, Homo sapiens
MTEVVPSSALSEVSLRLLCHDDIDTVKHLCGDWFPIEYPDSWYRDITSNKKFFSLAATYRGAIVGMIVAEIKNRTKIHKEDGDILASNFSVDTQVAYILSLGVVKEFRKHGIGSLLLESLKDHISTTAQDHCKAIYLHVLMLPQAAAPRPGHMQTGGS

SEQ ID NO: 745296 - protein, 193 aa, Homo sapiens
MTEVVPSSALSEVSLRLLCHDDIDTVKHLCGDWFPIEYPDSWYRDITSNKKFFSLAATYRGAIVGMIVAEIKNRTKIHKEDGDILASNFSVDTQVAYILSLGVVKEFRKHGIGSLLLESLKDHISTTAQDHCKAIYLHVLTTNNTAINFYENRDFKQHHYLPYYYSIRGVLKDGFTYVLYINGGHPPWTILYP

SEQ ID NO: 745297 - protein, 202 aa, Homo sapiens
MTEVVPSSALSEVSLRLLCHDDIDTVKHLCGDWFPIEYPDSWYRDITSNKKFFSLAATYRGAIVGMIVAEIKNRTKIHKEDGDILASNFSVDTQVAYILSLGVVKEFRKHGIGSLLLESLKDHISTTAQDHCKAIYLHVLTTNNTSHSTPSLTSLITTTKSTPHNASSFTSVSATTGITSRSTPIFTSSIPPPTHLTHTPTH

SEQ ID NO: 745298 - protein, 103 aa, Homo sapiens
GNDTIWGGGPKRVFVKLRSHHVTPEQSCVHRTESHPQYRVQVLDPAPPPSSPSPSCPPAPAPTICRTPVCHTMAPLHLLFPHPGAPLPSFHPLLYSGSPRRHS

SEQ ID NO: 745299 - protein, 91 aa, Homo sapiens
MEWNGMNLKTMEWNPMEWKGHEWNGMEWNGLEWKRLEFSGMESNGMEWNGFECNRMESNGKECSVMEWNGMEWNRMQWNLKDSIAMECTRM

SEQ ID NO: 745300 - protein, 370 aa, Homo sapiens
MLPRLICINDYEQHAKSVLPKSIYDYYRSGANDEETLADNIAAFSRWKLYPRMLRNVAETDLSTSVLGQRVSMPICVGATAMQRMAHVDGELATVRACQSLGTGMMLSSWATSSIEEVAEAGPEALRWLQLYIYKDREVTKKLVRQAEKMGYKAIFVTVDTPYLGNRLDDVRNRFKLPPQLRMKNFETSTLSFSPEENFGDDSGLAAYVAKAIDPSISWEDIKWLRRLTSLPIVAKGILRGDDAREAVKHGLNGILVSNHGARQLDGVPATIDVLPEIVEAVEGKVEVFLDGGVRKGTDVLKALALGAKAVFVGRPIVWGLAFQGEKGVQDVLEILKEEFRLAMALSGCQNVKVIDKTLVRKNPLAVSKI

SEQ ID NO: 745301 - protein, 174 aa, Homo sapiens
LSPHLRMRNFETSTLSFSPEDHWEDIKWLRRLTSLPIVAKGILRGDDAREAVKHGLNGILVSNHGARQLDGVPATIDVLPEIVEAVEGKVEVFLDGGVRKGTDVLKALALGAKAVFVGRPIVWGLAFQGEKGVQDVLEILKEEFRLAMALSGCQNVKVIDKTLVRKNPLAVSKI

SEQ ID NO: 745302 - protein, 370 aa, Homo sapiens; identical to SEQ ID NO: 745300

SEQ ID NO: 745303 - protein, 370 aa, Homo sapiens; identical to SEQ ID NO: 745300

SEQ ID NO: 745304 - protein, 1012 aa, Homo sapiens
MPFGLKLRRTRRYNVLSKNCFVTRIRLLDSNVIECTLSVESTGQECLEAVAQRLELRETHYFGLWFLSKSQQARWVELEKPLKKHLDKFANEPLLFFGVMFYVPNVSWLQQEATRYQYYLQVKKDVLEGRLRCTLDQVIRLAGLAVQADFGDYNQFDSQDFLREYVLFPMDLALEEAVLEELTQKVAQEHKAHSGILPAEAELMYINEVERLDGFGQEIFPVKDNHGNCVHLGIFFMGIFVRNRIGRQAVIYRWNDMGNITHNKSTILVELINKEETALFHTDDIENAKYISRLFATRHKFYKQNKICTEQSNSPPPIRRQPTWSRSSLPRQQPYILPPVHVQCGEHYSETHTSQDSIFHGNEEALYCNSHNSLDLNYLNGTVTNGSVCSVHSVNSLNCSQSFIQASPVSSNLSIPGSDIMRADYIPSHRHSAIIVPSYRPTPDYETVMRQMKRGILHTDSQSQSLRNLNIINTHAYNQPEDLVYSQPEMRERHPYTVPYGPQGVYSNKLVSPSDQRNPKNNVVPSKPGASAISHTVSTPELANMQLQGSHNYSTAHMLKNYLFRPPPPYPRPRPATSTPDLASHRHKYVSGSSPDLVTRKVQLSVKTFQEDSSPVVHQSLQEVSEPLTATKHHGTVNKRHSLEVMNSMVRGMEAMTLKSLHLPMARRNTLREQGPPEEGSGSHEVPQLPQYHHKKTFSDATMLIHSSESEEEEEEAPESVPQIPMLREKMEYSAQLQAALARIPNKPPPEYPGPRKSVSNGALRQDQASLPPAMARARVLRHGPAKAISMSRTDPPAVNGASLGPSISEPDLTSVKERVKKEPVKERPVSEMFSLEDSIIEREMMIRNLEKQKMAGLEAQKRPLMLAALNGLSVARVSGREENRVDATRVPMDERFRTLKKKLEEGMVFTEYEQIPKKKANGIFSTAALPENAERSRIREVVPYEENRVELIPTKENNTGYINASHIKVVVGGAEWHYIATQGPLPHTCHDFWQMVWEQGVNVIAMVTAEE

SEQ ID NO: 745305 - protein, 122 aa, Homo sapiens
AFSCTWTWAVGECFLNEGMRNAQREASCLRTLCFLSFLAEGGSAHDAEAPQGAEDVHDPDYRSVQVCLPSPHPVPPKLQTHLITPIQLLEEGPSSIALEESHLQTTSAPPTGVQVAGSKQAL

SEQ ID NO: 745306 - protein, 1187 aa, Homo sapiens
MPFGLKLRRTRRYNVLSKNCFVTRIRLLDSNVIECTLSVESTGQECLEAVAQRLELRETHYFGLWFLSKSQQARWVELEKPLKKHLDKFANEPLLFFGVMFYVPNVSWLQQEATRYQYYLQVKKDVLEGRLRCTLDQVIRLAGLAVQADFGDYNQFDSQDFLREYVLFPMDLALEEAVLEELTQKVAQEHKAHSGILPAEAELMYINEVERLDGFGQEIFPVKDNHGNCVHLGIFFMGIFVRNRIGRQAVIYRWNDMGNITHNKSTILVELINKEETALFHTDDIENAKYISRLFATRHKFYKQNKICTEQSNSPPPIRRQPTWSRSSLPRQQPYILPPVHVQCGEHYSETHTSQDSIFHGNEEALYCNSHNSLDLNYLNGTVTNGSVCSVHSVNSLNCSQSFIQASPVSSNLSIPGSDIMRADYIPSHRHSAIIVPSYRPTPDYETVMRQMKRGILHTDSQSQSLRNLNIINTHAYNQPEDLVYSQPEMRERHPYTVPYGPQGVYSNKLVSPSDQRNPKNNVVPSKPGASAISHTVSTPELANMQLQGSHNYSTAHMLKNYLFRPPPPYPRPRPATSTPDLASHRHKYVSGSSPDLVTRKVQLSVKTFQEDSSPVVHQSLQEVSEPLTATKHHGTVNKRHSLEVMNSMVRGMEAMTLKSLHLPMARRNTLREQGPPEEGSGSHEVPQLPQYHHKKTFSDATMLIHSSESEEEEEEAPESVPQIPMLREKMEYSAQLQAALARIPNKPPPEYPGPRKSVSNGALRQDQASLPPAMARARVLRHGPAKAISMSRTDPPAVNGASLGPSISEPDLTSVKERVKKEPVKERPVSEMFSLEDSIIEREMMIRNLEKQKMAGLEAQKRPLMLAALNGLSVARVSGREENRVDATRVPMDERFRTLKKKLEEGMVFTEYEQIPKKKANGIFSTAALPENAERSRIREVVPYEENRVELIPTKENNTGYINASHIKVVVGGAEWHYIATQGPLPHTCHDFWQMVWEQGVNVIAMVTAEEEGGRTKSHRYWPKLGSKHSSATYGKFKVTTKFRTDSVCYATTGLKVKHLLSGQERTVWHLQYTDWPDHGCPEDVQGFLSYLEEIQSVRRHTNSMLEGTKNRHPPIVVHCSAGVGRTGVLILSELMIYCLEHNEKVEVPMMLRLLREQRMFMIQTIAQYKFVYQVLIQFLQNSRLI

SEQ ID NO: 745307 - protein, 137 aa, Homo sapiens
MEYSAQLQAALARIPNKPPPEYPGPRKSVSNGALRQDQASLPPAMARARVLRHGPAKAISMSRTDPPAVNGASLGPSISEPDLTSVKERVKKEPVKERPVSEMFSLEDSIIEREMMIRVSVLLSQGIFQCESTCFRH

SEQ ID NO: 745308 - protein, 1268 aa, Homo sapiens
CPSLDIRSEVAELRQLENCSVVEGHLQILLMFTATGEDFRGLSFPRLTQVTDYLLLFRVYGLESLRDLFPNLAVIRGTRLFLGYALVIFEMPHLRDVALPALGAVLRGAVRVEKNQELCHLSTIDWGLLQPAPGANHIVGNKLGEECADVCPGVLGAAGEPCAKTTFSGHTDYRCWTSSHCQRVCPCPHGMACTARGECCHTECLGGCSQPEDPRACVACRHLYFQGACLWACPPGTYQYESWRCVTAERCASLHSVPGRASTFGIHQGSCLAQCPSGFTRNSSSIFCHKCEGLCPKECKVGTKTIDSIQAAQDLVGCTHVEGSLILNLRQGYNLEPQLQHSLGLVETITGFLKIKHSFALVSLGFFKNLKLIRGDAMVDGNYTLYVLDNQNLQQLGSWVAAGLTIPVGKIYFAFNPRLCLEHIYRLEEVTGTRGRQNKAEINPRTNGDRAACQTRTLRFVSNVTEADRILLRWERYEPLEARDLLSFIVYYKESPFQNATEHVGPDACGTQSWNLLDVELPLSRTQEPGVTLASLKPWTQYAVFVRAITLTTEEDSPHQGAQSPIVYLRTLPAAPTVPQDVISTSNSSSHLLVRWKPPTQRNGNLTYYLVLWQRLAEDGDLYLNDYCHRGLRLPTSNNDPRFDGEDGDPEAEMESDCCPCQHPPPGQVLPPLEAQEASFQKKFENFLHNAITIPISPWKVTSINKSPQRDSGRHRRAAGPLRLGGNSSDFEIQEDKVPRERAVLSGLRHFTEYRIDIHACNHAAHTVGCSAATFVFARTMPHREADGIPGKVAWEASSKNSVLLRWLEPPDPNGLILKYEIKYRRLGEEATVLCVSRLRYAKFGGVHLALLPPGNYSARVRATSLAGNGSWTDSVAFYILGPEEEDAGGLHVLLTATPVGLTLLIVLAALGFFYGKKRNRTLYASVNPEYFSASDMYVPDEWEVPREQISIIRELGQGSFGMVYEGLARGLEAGEESTPVALKTVNELASPRECIEFLKEASVMKAFKCHHVVRLLGVVSQGQPTLVIMELMTRGDLKSHLRSLRPEAENNPGLPQPALGEMIQMAGEIADGMAYLAANKFVHRDLAARNCMVSQDFTVKIGDFGMTRDVYETDYYRKGGKGLLPVRWMAPESLKDGIFTTHSDVWSFGVVLWEIVTLAEQPYQGLSNEQVLKFVMDGGVLEELEGCPLQLQELMSRCWQPNPRLRPSFTHILDSIQEELRPSFRLLSFYYSPECRGARGSLPTTDAEPDSSPTPRDCSPQNGGPGH

SEQ ID NO: 745309 - protein, 1345 aa, Homo sapiens
CPSLDIRSEVAELRQLENCSVVEGHLQILLMFTATGEDFRGLSFPRLTQVTDYLLLFRVYGLESLRDLFPNLAVIRGTRLFLGYALVIFEMPHLRDVALPALGAVLRGAVRVEKNQELCHLSTIDWGLLQPAPGANHIVGNKLGEECADVCPGVLGAAGEPCAKTTFSGHTDYRCWTSSHCQRVCPCPHGMACTARGECCHTECLGGCSQPEDPRACVACRHLYFQGACLWACPPGTYQYESWRCVTAERCASLHSVPGRASTFGIHQGSCLAQCPSGFTRNSSSIFCHKCEGLCPKECKVGTKTIDSIQAAQDLVGCTHVEGSLILNLRQGYNLEPQLQHSLGLVETITGFLKIKHSFALVSLGFFKNLKLIRGDAMVDGNYTLYVLDNQNLQQLGSWVAAGLTIPVGKIYFAFNPRLCLEHIYRLEEVTGTRGRQNKAEINPRTNGDRAACQTRTLRFVSNVTEADRILLRWERYEPLEARDLLSFIVYYKESPFQNATEHVGPDACGTQSWNLLDVELPLSRTQEPGVTLASLKPWTQYAVFVRAITLTTEEDSPHQGAQSPIVYLRTLPAAPTVPQDVISTSNSSSHLLVRWKPPTQRNGNLTYYLVLWQRLAEDGDLYLNDYCHRGLRLPTSNNDPRFDGEDGDPEAEMESDCCPCQHPPPGQVLPPLEAQEASFQKKFENFLHNAITIPISPWKVTSINKSPQRDSGRHRRAAGPLRLGGNSSDFEIQEDKVPRERAVLSGLRHFTEYRIDIHACNHAAHTVGCSAATFVFARTMPHRGDPHTHLLPPSPTPRTLCKGLGFDFSLTPEPRFAVPLSVPIIPKLSPPPSSAQFSLGLNKGEMNHFWPGCWMPLPAGEADGIPGKVAWEASSKNSVLLRWLEPPDPNGLILKYEIKYRRLGEEATVLCVSRLRYAKFGGVHLALLPPGNYSARVRATSLAGNGSWTDSVAFYILGPEEEDAGGLHVLLTATPVGLTLLIVLAALGFFYGKKRNRTLYASVNPEYFSASDMYVPDEWEVPREQISIIRELGQGSFGMVYEGLARGLEAGEESTPVALKTVNELASPRECIEFLKEASVMKAFKCHHVVRLLGVVSQGQPTLVIMELMTRGDLKSHLRSLRPEAENNPGLPQPALGEMIQMAGEIADGMAYLAANKFVHRDLAARNCMVSQDFTVKIGDFGMTRDVYETDYYRKGGKGLLPVRWMAPESLKDGIFTTHSDVWSFGVVLWEIVTLAEQPYQGLSNEQVLKFVMDGGVLEELEGCPLQLQELMSRCWQPNPRLRPSFTHILDSIQEELRPSFRLLSFYYSPECRGARGSLPTTDAEPDSSPTPRDCSPQNGGPGH

SEQ ID NO: 745310 - protein, 861 aa, Homo sapiens
MTPQLWGWVFSPFQNATEHVGPDACGTQSWNLLDVELPLSRTQEPGVTLASLKPWTQYAVFVRAITLTTEEDSPHQGAQSPIVYLRTLPAAPTVPQDVISTSNSSSHLLVRWKPPTQRNGNLTYYLVLWQRLAEDGDLYLNDYCHRGLRLPTSNNDPRFDGEDGDPEAEMESDCCPCQHPPPGQVLPPLEAQEASFQKKFENFLHNAITIPISPWKVTSINKSPQRDSGRHRRAAGPLRLGGNSSDFEIQEDKVPRERAVLSGLRHFTEYRIDIHACNHAAHTVGCSAATFVFARTMPHRGDPHTHLLPPSPTPRTLCKGLGFDFSLTPEPRFAVPLSVPIIPKLSPPPSSAQFSLGLNKGEMNHFWPGCWMPLPAGEADGIPGKVAWEASSKNSVLLRWLEPPDPNGLILKYEIKYRRLGEEATVLCVSRLRYAKFGGVHLALLPPGNYSARVRATSLAGNGSWTDSVAFYILGPEEEDAGGLHVLLTATPVGLTLLIVLAALGFFYGKKRNRTLYASVNPEYFSASDMYVPDEWEVPREQISIIRELGQGSFGMVYEGLARGLEAGEESTPVALKTVNELASPRECIEFLKEASVMKAFKCHHVVRLLGVVSQGQPTLVIMELMTRGDLKSHLRSLRPEAENNPGLPQPALGEMIQMAGEIADGMAYLAANKFVHRDLAARNCMVSQDFTVKIGDFGMTRDVYETDYYRKGGKGLLPVRWMAPESLKDGIFTTHSDVWSFGVVLWEIVTLAEQPYQGLSNEQVLKFVMDGGVLEELEGCPLQLQELMSRCWQPNPRLRPSFTHILDSIQEELRPSFRLLSFYYSPECRGARGSLPTTDAEPDSSPTPRDCSPQNGGPGH

SEQ ID NO: 745311 - protein, 149 aa, Homo sapiens
MWVAPLQGSQASREVGATALPPASLGLAGLCSDNTAVAGPLQLSRAQFPCWPHYGIGPCVDTDELTPQMPPGRSPRLQWPNSCCVRNQLKESFLLSQTLQEFLVTGRGSDSGPQPLAGKGATSWVGMPSSSVGPARPSLRGSSEHHPRT

SEQ ID NO: 745312 - protein, 108 aa, Homo sapiens
MGAISRAARGWGGGGRRAPGGRSGRGRGLGDPAAHAGTRRPRPGPLPSFVFVLRGRPQPRATGSAGLRGRPGSHRLLRKPRTGLALTPGRPPLPTQLWAPRSDLPVAL

SEQ ID NO: 745313 - protein, 115 aa, Homo sapiens
MPSSSVGPARPSLRGSSEQLAWLRGIFSYRSSPPPSPQQSSPNQTRSRQVGLGFCQPPGQQGWVGRLGPVSAVLPGPRPGWEGTLVLISRLHFCASLCCHKQRSQPHFLDGESGH

SEQ ID NO: 745314 - protein, 115 aa, Homo sapiens; identical to SEQ ID NO: 745313

SEQ ID NO: 745315 - protein, 100 aa, Homo sapiens
VPLLPQGREDGLRSDPRGSMEPPAFAPSLFPGLNLDGEKKLKCFGDGGLKTLGSLIAQPWAHFPFDREDSAPRSRLLGAPGRACAGNAKEDKRPASMLAP

SEQ ID NO: 745316 - protein, 215 aa, Homo sapiens
MGQTIPTDNNKNKPIKTQTNHPQRKTKNKNKTNTSPQPLAGKGATSWVGMPSSSVGPARPSLRGSSEQLAWLRGIFSVEEDQRPHQQHNKQNQNKHTPNKKTKNNQPPTNKKKQTKTRTRKQPKIPKFSVVIESIYSKIGKSARADRRRKAKPEDSVQKGRKKTEVPGGKGEMRSEDRRNGQKAVKMNGSKKVYERCGQGEHGQQGDRAGVELLS

SEQ ID NO: 745317 - protein, 115 aa, Homo sapiens; identical to SEQ ID NO: 745313

SEQ ID NO: 745318 - protein, 241 aa, Homo sapiens
MWVAPLQGSQASREVGATALPPASLGLAGLCSDNTAVAGPLQLSRAQFPCWPHYGIGPCVDTDELTPQMPPGRSPRLQWPNSCCVRNQLKESFLLSQTLQEFLVTGRGSDSGPQPLAGKGATSWVGMPSSSVGPARPSLRGSSEQLAWLRGIFSYRSSPPPSPQQSSPNQTRSRQVGLGFCQPPGQQGWVGRLGPVSAVLPGPRPGWEGTLVLISRLHFCASLCCHKQRSQPHFLDGESGH

SEQ ID NO: 745319 - protein, 633 aa, Homo sapiens
MSAGSERGAAATPGGLPAPCASKVELRLSCRHLLDRDPLTKSDPSVALLQQAQGQWVQVGRTEVVRSSLHPVFSKVFTVDYYFEEVQRLRFEVYDTHGPSGFSCQEDDFLGGMECTLGQPAQKWLLQVVMRVSVDVLGPAGHCAKHFLCCTESSHLARTGPSFLLRYDDLCLPWATAGAVRWWTCRGGHTQGWQIVAQKKVTRPLLLKFGRNAGKSTITVIAEDISGNNGYVELSFRARKLDDKDLFSKSDPFLELYRVNDDQGLQLVYRTEVVKNNLNPVWEAFKVSLSSLCSCEETRPLKCLVWDYDSRGKHDFIGEFSTTFEEMQKAFEEGQAQWDCVNPKYKQKRRSYKNSGVVVLADLKFHRVYSFLDYIMGGCQIHFTVAIDFTASNGDPRNSCSLHYINPYQPNEYLKALVSVGEICQDYDSDKRFSALGFGARIPPKYEVSHDFAINFNPEDDECEGIQGVVEAYQNCLPRVQLYGPTNVAPIISKVARVAAAEESTGKASQYYILLILTDGVVTDMADTREAIVRASRLPMSIIIVGVGNADFTDMQVLDGDDGVLRSPRGEPALRDIVQFVPFRELKNASPAALAKCVLAEVPKQVVEYYSHRGLPPRSLGVPAGEASPGCTP

SEQ ID NO: 745320 - protein, 558 aa, Homo sapiens
MSAGSERGAAATPGGLPAPCASKVELRLSCRHLLDRDPLTKSDPSVALLQQAQGQWVQVGRTEVVRSSLHPVFSKVFTVDYYFEEVQRLRFEVYDTHGPSGFSCQEDDFLGGMECTLGQIVAQKKVTRPLLLKFGRNAGKSTITVIAEDISGNNGYVELSFRARKLDDKDLFSKSDPFLELYRVNDDQGLQLVYRTEVVKNNLNPVWEAFKVSLSSLCSCEETRPLKCLVWDYDSRGKHDFIGEFSTTFEEMQKAFEEGQAQWDCVNPKYKQKRRSYKNSGVVVLADLKFHRVYSFLDYIMGGCQIHFTVAIDFTASNGDPRNSCSLHYINPYQPNEYLKALVSVGEICQDYDSDKRFSALGFGARIPPKYEVSHDFAINFNPEDDECEGIQGVVEAYQNCLPRVQLYGPTNVAPIISKVARVAAAEESTGKASQYYILLILTDGVVTDMADTREAIVRASRLPMSIIIVGVGNADFTDMQVLDGDDGVLRSPRGEPALRDIVQFVPFRELKNASPAALAKCVLAEVPKQVVEYYSHRGLPPRSLGVPAGEASPGCTP

SEQ ID NO: 745321 - protein, 109 aa, Homo sapiens [sequence omitted]

SEQ ID NO: 745322 - protein, 143 aa, Homo sapiens
TSPTAPTSPTGPHAWPCLSQVGGGREIMRDLEGAGSSSTGDPAPMRRGRDWGLCFASNLCGGGPARQSPHARESLGDPDTCPHSQSLGTQTSCPHSQPPVPAGAPTPTYPVLFAVGPLHLGPWGLRGLRGLPGLWVLPVGLQE

SEQ ID NO: 745323 - protein, 169 aa, Homo sapiens
VQGGRAHPLPPTGIQGVVEAYQNCLPRVQLYGPTNVAPIISKVARVAAAEESTGKASVGARGVWCMLGVGSAVCAPARGRQGGTWQREQPAQRPPGRTELRRAGAQLVDYVSLKGAGVSGTGLSIASHGHGHGCSEAAPLLFLWAPQGRAHVYCLAVCVSSFCLHVSFL

SEQ ID NO: 745324 - protein, 42 aa, Homo sapiens
MAAARLPLSSSSGHHKAAHMSTVWLCVYRHFVYMCLSFAQMI

SEQ ID NO: 745325 - protein, 513 aa, Homo sapiens
MSAGSERGAAATPGGLPAPCASKVELRLSCRHLLDRDPLTKSDPSVALLQQAQGQWVQVGRTEVVRSSLHPVFSKVFTVDYYFEEVQRLRFEVYDTHGPSGFSCQEDDFLGGMECTLGQIVAQKKVTRPLLLKFGRNAGKSTITVIAEDISGNNGYVELSFRARKLDDKDLFSKSDPFLELYRVNDDQGLQLVYRTEVVKNNLNPVWEAFKVSLSSLCSCEETRPLKCLVWDYDSRGKHDFIGEFSTTFEEMQKAFEEGQAQWDCVNPKYKQKRRSYKNSGVVVLADLKFHRVYSFLDYIMGGCQIHFTVAIDFTASNGDPRNSCSLHYINPYQPNEYLKALVSVGEICQDYDSDKRFSALGFGARIPPKYEVSHDFAINFNLRTMSVKQYYILLILTDGVVTDMADTREAIVRASRLPMSIIIVGVGNADFTDMQVLDGDDGVLRSPRGEPALRDIVQFVPFRELKNASPAALAKCVLAEVPKQVVEYYSHRGLPPRSLGVPAGEASPGCTP

SEQ ID NO: 745326 - protein, 321 aa, Homo sapiens
MSAGSERGAAATPGGLPAPCASKVELRLSCRHLLDRDPLTKSDPSVALLQQAQGQWVQVGRTEVVRSSLHPVFSKVFTVDYYFEEVQRLRFEVYDTHGPSGFSCQEDDFLGGMECTLGQIVAQKKVTRPLLLKFGRNAGKSTITVIAEDISGNNGYVELSFRARKLDDKDLFSKSDPFLELYRVNDDQGLQLVYRTEVVKNNLNPVWEAFKVSLSSLCSCEETRPLKCLVWDYDSRGKHDFIGEFSTTFEEMQKAFEEGQAQWDCVNPKYKQKRRSYKNSGVVVLADLKFHRVYSFLDYIMGGCQIHFTTKRERGETGVSV

SEQ ID NO: 745327 - protein, 220 aa, Homo sapiens
PKYKQKRRSYKNSGVVVLADLKFHRVYSFLDYIMGGCQIHFTTKRERGETGDERLNQPQSLRVIQGARHRPRVTPMSPADPASPIDTHTPCHPHVTRVSPTDTRPPCHPRVTHRYTAPVSPRVTHRYTAPVSPACHTHRYTAPVSPACHPQIHGPRVTRVLFADALVRVLLNEPQNGFGRSQQVGNVGGPRPGLVHLGPAGEGGRGVGRPLRRMGGAPTR

SEQ ID NO: 745328 - protein, 151 aa, Homo sapiens [sequence omitted]

SEQ ID NO: 745329 - protein, 348 aa, Homo sapiens
QTLPSWRLKGTRMLKEILKIDGSNTVDHKNEIKQIANEIPVSSNRRDEYGLPSQPKQNKKLASYMNKPHSANEYHNVQSMDNMCWPAPSQIPPVSTPVTELSRICSLVGMPQPDFSFLRMPQTMTVCQVKLSNGLLVHGPQCHSENEAKEKAALFALQQLGSLGMNFPLPSQVFANYPSAVPPGTIPPAFPPPTANIMPSSSHLFGSMPWGPSVPVPGKPFHHTLYSGTMPMAGGIPGGVHNQFIPLQVTKKRVANKKNFENKEAQSSQATPVQTSQPDSSNIVKVSPRESSSASLKSSPIAQPASSFQVETASQGHSISHHKSTPISSSRRKSRKLAVNFGVSKPSE

SEQ ID NO: 745330 - protein, 528 aa, Homo sapiens
VLEDPRYTVEAVSDGETKFYLEEPPGTQKLYSGRTAPPSKVVHLGDKEQSNWAKEVQGISEHYLRRKGIIINETSAVVYAQLLTGRKYQINQNGEVRLEKQWSKQVVPFVYQTIVKDIRAFDSRFSNIKTLDDLFPLRSMVFMLGTPYYGCTGEVQDSGDVITEGRIRVIFSIPCEPNLDALIQNQHKYSIKYNPGYVLASRLGVSGYLVSRFTGSIFIGRGSRRNPHGDHKANVGLNLKFNKKNEEVPGYTKKVGSEWMYSSAAEQLLAEYLERAPELFSYIAKNSQEDVFYEDDIWPGENENGAEKVQEIITWLKGHPVSTLSRSSCDLQILDAAIVEKIEEEVEKCKQRKNNKKVRVTVKPHLLYRPLEQQHGVIPDRDAEFCLFDRVVNVRENFSVPVGLRGTIIGIKGANREADVLFEVLFDEEFPGGLTIRCSPGRGYRLPTSALVNLSHGSRSETGNQKLTAIVKPQPAVHQHSSSSSVSSGHLGALNHSPQSLFVPTQVRLSVFNFSSTPFTNHKSQQTL

SEQ ID NO: 745331 - protein, 485 aa, Homo sapiens
VLEDPRYTVEAVSDGETKFYLEEPPGTQKLYSGRTAPPSKVVHLGDKEQSNWAKEVQGISEHYLRRKGIIINETSAVVYAQLLTGRKYQINQNGEVRLEKQWSKQVVPFVYQTIVKDIRAFDSRFSNIKTLDDLFPLRSMVFMLGTPYYGCTGEVQDSGDVITEGRIRVIFSIPCEPNLDALIQNQHKYSIKYNPGYVLASRLGVSGYLVSRFTGSIFIGRGSRRNPHGDHKANVGLNLKFNKKNEEVPGYTKKVGSEWMYSSAAEQLLAEYLERAPELFSYIAKNSQEDVFYEDDIWPGENENGAEKVQEIITWLKGHPVSTLSRSSCDLQILDAAIVEKIEEEVEKCKQRKNNKKVRVTVKPHLLYRPLEQQHGVIPDRDAEFCLFDRVVNVRENFSVPVGLRGTIIGIKGANREADVLFEVLFDEEFPGGLTIRCSPGRGYRLPTSALVNLSHGSRSETGNQKLTAIVKPQPAVHQHSSSTY

SEQ ID NO: 745332 - protein, 431 aa, Homo sapiens
HFGFMLKAVQWILHYYYHGVQSWSWYYPYHYAPFLSDIHNISTLKIHFELGKPFKPFEQLLAVLPAASKNLLPACYQHLMTNEDSPIIEYYPPDFKTDLNGKQQEWEAVVLIPFIDEERLLEAMETCNHSLKKEERKRNQHSECLMCWYDRDTEFIYPSPWPEKFPAIERCCTRYKIISLDAWRVDINKNKITRIDQKALYFCGFPTLKHIRHKFFLKKSGVQVFQQSSRGENMMLEILVDAESDELTVENVASSVLGKSVFVNWPHLEEARVVAVSDGETKFYLEEPPGTQKLYSGRTAPPSKVVHLGDKEQSNWAKEVQGISEHYLRRKGIIINETSAVVYAQLLTGRKYQINQNGEVRLEKQWSKQVVPFVYQTIVKDIRAFDSRFSNIKTLDDLFPLRSMVFMLGTPYYGCTGEVQDSGDVSRGDPL

SEQ ID NO: 745333 - protein, 1240 aa, Homo sapiens
HFGFMLKAVQWILHYYYHGVQSWSWYYPYHYAPFLSDIHNISTLKIHFELGKPFKPFEQLLAVLPAASKNLLPACYQHLMTNEDSPIIEYYPPDFKTDLNGKQQEWEAVVLIPFIDEERLLEAMETCNHSLKKEERKRNQHSECLMCWYDRDTEFIYPSPWPEKFPAIERCCTRYKIISLDAWRVDINKNKITRIDQKALYFCGFPTLKHIRHKFFLKKSGVQVFQQSSRGENMMLEILVDAESDELTVENVASSVLGKSVFVNWPHLEEARVVAVSDGETKFYLEEPPGTQKLYSGRTAPPSKVVHLGDKEQSNWAKEVQGISEHYLRRKGIIINETSAVVYAQLLTGRKYQINQNGEVRLEKQWSKQVVPFVYQTIVKDIRAFDSRFSNIKTLDDLFPLRSMVFMLGTPYYGCTGEVQDSGDVITEGRIRVIFSIPCEPNLDALIQNQHKYSIKYNPGYVLASRLGVSGYLVSRFTGSIFIGRGSRRNPHGDHKANVGLNLKFNKKNEEVPGYTKKVGSEWMYSSAAEQLLAEYLERAPELFSYIAKNSQEDVFYEDDIWPGENENGAEKVQEIITWLKGHPVSTLSRSSCDLQILDAAIVEKIEEEVEKCKQRKNNKKVRVTVKPHLLYRPLEQQHGVIPDRDAEFCLFDRVVNVRENFSVPVGLRGTIIGIKGANREADVLFEVLFDEEFPGGLTIRCSPGRGYRLPTSALVNLSHGSRSETGNQKLTAIVKPQPAVHQHSSSSSVSSGHLGALNHSPQSLFVPTQVPTKDDDEFCNIWQSLQGSGKMQYFQPTIQEKGAVLPQEISQVNQHHKSGFNDNSVKYQQRKHDPHRKFKEECKSPKAECWSQKMSNKQPNSGIENFLASLNISKENEVQSSHHGEPPSEEHLSPQSFAMKGTRMLKEILKIDGSNTVDHKNEIKQIANEIPVSSNRRDEYGLPSQPKQNKKLASYMNKPHSANEYHNVQSMDNMCWPAPSQIPPVSTPVTELSRICSLVGMPQPDFSFLRMPQTMTVCQVKLSNGLLVHGPQCHSENEAKEKAALFALQQLGSLGMNFPLPSQVFANYPSAVPPGTIPPAFPPPTANIMPSSSHLFGSMPWGPSVPVPGKPFHHTLYSGTMPMAGGIPGGVHNQFIPLQVTKKRVANKKNFENKEAQSSQATPVQTSQPDSSNIVKVSPRESSSASLKSSPIAQPASSFQVETASQGHSISHHKSTPISSSRRKSRKLAVNFGVSKPSE

SEQ ID NO: 745334 - protein, 1307 aa, Homo sapiens
MNYTSVSNNKHFLHYHSGIITWSMKFGPPYNLLNVDFISLFNDVRKLSGEWLLFMCVLTYALLPLRVFRPAVKGSHLLWCCQFCFILNFVPKQLLNNQNISSNCLELVNSILNLSKYNFLGYSRTSISNFYKIVSKSTGYNDYKLIFYKIKYEILVMLINKLYYFDSFLFAYLTFYESFIVGRYVVLLGTEEILIVVKFQGVLQYRRHSHQFVTYIIYCLFHSDSIFLVYAELFNDAGILSLHVICECVVQAVTVEIILEFMTISQQGLCLYIYIYLFFSFCDMLIFLRKYVIAYFFKSRNHNLYMEQLVISDFHELIGNSAMTLKVVLLVFENAGIKLNGLLSLTADFRVEMLAGYLCISSAFSIREKYSLSVIYHSRISFHDFIFCYFHKFQMFISSQHCFFICSGILSNEAQVNLNVYNYCLINSLFVFKGNIYYGEYKEKLNCDSNVILTLPTLKCEMFHLSCTNSSIENLPHSLLLCDSYINSMQLTSVLEHRRSGTCHLLKTPKGNFSRHSALKPIRILDQYLSTAADSSIQIGSERVLFSSQAQWLKSQHFGRLRQADHLRSGVPDKPGQHDEALSLLKIQKLAGRDGTCLQSQLLGRLRHENHLNPRGRVCSEPRLHHCTPAWRAEQDSVSKKRKKFYYPYFFFNIIILKVKTEKRLRRRELHNGWIVVRHSLFFSPCRPILNVGLEVNGRCALPMEDVRSRGHFCPMLRKQSVDRPGIQSISEKQLDFKKFKILSLRWGGLRPPPKFKNMLIQLESSEDFFVKMVDCLGHRTDSPNCFMLPHNYEHFNLFKPLSPNWNIISKYFYSISFFFFEQLKRILKIAPSSLVPFHIFLHYLIITSALEFECINLFKHHVDYSLKHLRLSCSCRKKLKSPLLNLGFNLRFFLLFKGVTNKDVKGFFPDWWRNEELLMQVFLLFLSMIRYLLFILDCYFQTKLDFLVLMRGGREREADGRRKTVKEDIPSHCIFGLYRIFLAQGNRQTVRSFLLTFYLCVLFVLVITVYSGCLIFTLLYEIELCRSSLKLVLSRFFPLFRAQFFKATVQFLSLMSLLYFLVSCCFQILFYCRRQLIYCQRSGCESRSLSLKINCRSSFVIFLEINYSTQTGSAQYIHFVSFVSETISFAGASFPSQDKALKFQKLMSFGLTLFIFPSNFSNTVRDSVEPASSLQKHGRADRPLSFTDIIDPFLKEEKHVENSFSESKMSTICSCFCVCVSEQIIMPCSINAFSHLKCNLRRRLWFPKDTFFYKVKPVKSLFFFPSSLHQLHLVVSAVGILLNCPGQIGFCSCFSNLKPNSHAVSH

SEQ ID NO: 745335 - protein, 638 aa, Homo sapiens
VLEDPRYTVEAVSDGETKFYLEEPPGTQKLYSGRTAPPSKVVHLGDKEQSNWAKEVQGISEHYLRRKGIIINETSAVVYAQLLTGRKYQINQNGEVRLEKQWSKQVVPFVYQTIVKDIRAFDSRFSNIKTLDDLFPLRSMVFMLGTPYYGCTGEVQDSGDVITEGRIRVIFSIPCEPNLDALIQNQHKYSIKYNPGYVLASRLGVSGYLVSRFTGSIFIGRGSRRNPHGDHKANVGLNLKFNKKNEEVPGYTKKVGSEWMYSSAAEQLLAEYLERAPELFSYIAKNSQEDVFYEDDIWPGENENGAEKVQEIITWLKGHPVSTLSRSSCDLQILDAAIVEKIEEEVEKCKQRKNNKKVRVTVKPHLLYRPLEQQHGVIPDRDAEFCLFDRVVNVRENFSVPVGLRGTIIGIKGANREADVLFEVLFDEEFPGGLTIRCSPGRGYRLPTSALVNLSHGSRSETGNQKLTAIVKPQPAVHQHSSSSSVSSGHLGALNHSPQSLFVPTQVPTKDDDEFCNIWQSLQGSGKMQYFQPTIQEKGAVLPQEISQVNQHHKSGFNDNSVKYQQRKHDPHRKFKEECKSPKAECWSQKMSNKQPNSGIENFLASLNISKENEVQSSHHGEPPSEEHLSPQSFAMKR

SEQ ID NO: 745336 - protein, 751 aa, Homo sapiens
VLEDPRYTVEAVSDGETKFYLEEPPGTQKLYSGRTAPPSKVVHLGDKEQSNWAKEVQGISEHYLRRKGIIINETSAVVYAQLLTGRKYQINQNGEVRLEKQWSKQVVPFVYQTIVKDIRAFDSRFSNIKTLDDLFPLRSMVFMLGTPYYGCTGEVQDSGDVITEGRIRVIFSIPCEPNLDALIQNQHKYSIKYNPGYVLASRLGVSGYLVSRFTGSIFIGRGSRRNPHGDHKANVGLNLKFNKKNEEVPGYTKKVGSEWMYSSAAEQLLAEYLERAPELFSYIAKNSQEDVFYEDDIWPGENENGAEKVQEIITWLKGHPVSTLSRSSCDLQILDAAIVEKIEEEVEKCKQRKNNKKVRVTVKPHLLYRPLEQQHGVIPDRDAEFCLFDRVVNVRENFSVPVGLRGTIIGIKGANREADVLFEVLFDEEFPGGLTIRCSPGRGYRLPTSALVNLSHGSRSETGNQKLTAIVKPQPAVHQHSSSSSVSSGHLGALNHSPQSLFVPTQVPTKDDDEFCNIWQSLQGSGKMQYFQPTIQEKGAVLPQEISQVNQHHKSGFNDNSVKYQQRKHDPHRKFKEECKSPKAECWSQKMSNKQPNSGIENFLASLNISKENEVQSSHHGEPPSEEHLSPQSFAMKGTRMLKEILKIDGSNTVDHKNEIKQIANEIPVSSNRRDEYGLPSQPKQNKKLASYMNKPHSANEYHNVQSMDNMCWPAPSQIPPVSTPVTELSRICSLVGMPQPDFSFLRMPQV

SEQ ID NO: 745337 - protein, 302 aa, Homo sapiens
VLEDPRYTVEAVSDGETKFYLEEPPGTQKLYSGRTAPPSKVVHLGDKEQSNWAKEVQGISEHYLRRKGIIINETSAVVYAQLLTGRKYQINQNGEVRLEKQWSKQVVPFVYQTIVKDIRAFDSRFSNIKTLDDLFPLRSMVFMLGTPYYGCTGEVQDSGDVITEGRIRVIFSIPCEPNLDALIQNQHKYSIKYNPGYVLASRLGVSGYLVSRFTGSIFIGRGSRRNPHGDHKANVGLNLKFNKKNEEVPGYTKKVGSEWMYSSAAEQLLAEYLERAPELFSYIAKNSQERLTGQERLTGRAT

SEQ ID NO: 745338 - protein, 179 aa, Homo sapiens
MPSKSLVMEYLAHPSTLGLAVGVACGMCLGWSLRVCFGMLPKSKTSKTHTDTESEASILGDSGEYKMILVVRNDLKMGKGKVAAQCSHAAVSAYKQIQRRNPEMLKQWEYCGQPKVVVKAPDEETLIALLAHAKMLGLTVSLIQDAGRTQIAPGSQTVLGIGPGPADLIDKVTGHLKLY

SEQ ID NO: 745339 - protein, 179 aa, Homo sapiens; identical to SEQ ID NO: 745338

SEQ ID NO: 745340 - protein, 181 aa, Homo sapiens
MVIAFVHRGFTFVHDGLGSYLQEEVACGMCLGWSLRVCFGMLPKSKTSKTHTDTESEASILGDSGEYKMILVVRNDLKMGKGKVAAQCSHAAVSAYKQIQRRNPEMLKQWEYCGQPKVVVKAPDEETLIALLAHAKMLGLTVSLIQDAGRTQIAPGSQTVLGIGPGPADLIDKVTGHLKLY

SEQ ID NO: 745341 - protein, 179 aa, Homo sapiens; identical to SEQ ID NO: 745338

SEQ ID NO: 745342 - protein, 432 aa, Homo sapiens
MEKLLVMWMEDQIQKRIPLSLLMIQAKARSLFNMLKDRASDPTYTQMFKASHGWFQRFKRRHNFHNVKITGEAARAGNEGAIAFKEQLHRIIMAKDLCNKELIALEEERGKGVEAVEEVTPTAPRKFTAKKLAEAFAAISSGLHVRRNGRQLREIRHSVTGQIQDALACYREIYSEKKKQAVRSKLGIFLKNNTMLAKPSTSVDVPMPSTTYSRCSSEEREIEDPVASPHPAINSISVLQTFFRTTVLSAVYIMPSKSLVMEYLAHPSTLGLAVGVACGMCLGWSLRVCFGMLPKSKTSKTHTDTESEASILGDSGEYKMILVVRNDLKMGKGKVAAQCSHAAVSAYKQIQRRNPEMLKQWEYCGQPKVVVKAPDEETLIALLAHAKMLGLTVSLIQDAGRTQIAPGSQTVLGIGPGPADLIDKVTGHLKLY

SEQ ID NO: 745343 - protein, 179 aa, Homo sapiens; identical to SEQ ID NO: 745338

SEQ ID NO: 745344 - protein, 418 aa, Homo sapiens
MAKLLQPPPKFLPSEWHIANKNQYHRADAQRSRSERLVAESQRLVDEIEKTTRKSQSDVNKKLEQRLEEVQFWKKELDDKLEQLVNVTDDLLIYKIRLEKALETLKEPLHITETCLAYREKRIGIDLVHDTVEHELIKEAEIIQGIMALLTRTLEEASEQIRMNRSAKYNLEKDLKDKFVALTIDDICFSLNNNSPNIRYSENAVRIEPNSVSLEDWLDFSSTNVEKADKQRNNSLMLKALVDRILSQTANDLRKQCDVVDTAFKNGLKDTKDARDKLADHLAKVMEEIASQEKNITALEKAILDQEGPAKVAHTRLETRTHRPNVELCRDVAQYRLMKEVQEITHNVARLKETLAQAQAELKGLHRRQLALQEEIQVKENTIYIDEVLCMQMRKSIPLRDGEDHGVWAGGLRPDAVC

SEQ ID NO: 745345 - protein, 102 aa, Homo sapiens
CCHGDRVVYLSVLQELEAPVGVRRLPSRACVVVLCGAEEFGNLKWLNYYNLHPSSCPQSGTLLTRTSTTEQTLKGPDQNAWSQKARGLWMKLKRPQENLKAM

SEQ ID NO: 745346 - protein, 322 aa, Homo sapiens
MAKLLQPPPKFLPSEWHIANKNQYHRADAQRSRSERLVAESQRLVDEIEKTTRKSQSDVNKKLEQRLEEVQFWKKELDDKLEQLVNVTDDLLIYKIRLEKALETLKEPLHITETCLAYREKRIGIDLVHDTVEHELIKEAEIIQGIMALLTRTLEEASEQIRMNRSAKYNLEKDLKDKFVALTIDDICFSLNNNSPNIRYSENAVRIEPNSVSLEDWLDFSSTNVEKADKQRNNSLMLKALVDRILSQTANDLRKQCDIEGNFSPSSGRAERAASQTACPAGGDPGQREHHLYRRSAVYADEEIHPTSGWGRPWGLGWGPPP

SEQ ID NO: 745347 - protein, 102 aa, Homo sapiens; identical to SEQ ID NO: 745345

SEQ ID NO: 745348 - protein, 272 aa, Homo sapiens
MALLTRTLEEASEQIRMNRSAKYNLEKDLKDKFVALTIDDICFSLNNNSPNIRYSENAVRIEPNSVSLEDWLDFSSTNVEKADKQRNNSLMLKALVDRILSQTANDLRKQCDVVDTAFKNGLKDTKDARDKLADHLAKVMEEIASQEKNITALEKAILDQEGPAKVAHTRLETRTHRPNVELCRDVAQYRLMKEVQEITHNVARLKETLAQAQAELKGLHRRQLALQEEIQVKENTIYIDEVLCMQMRKSIPLRDGEDHGVWAGGLRPDAVC

SEQ ID NO: 745349 - protein, 585 aa, Homo sapiens
MAKLWFKFQRYFRRKPVRFFTFLALYLTAGSLVFLHSGFVGQPAVSGNQANPAAAGGPAEGAELSFLGDMHLGRGFRDTGEASSIARRYGPWFKGKDGNERAKLGDYGGAWSRALKGRVVREKEEERAKYIGCYLDDTQSRALRGVSFFDYKKMTIFRCQDNCAERGYLYGGLEFGAECYCGHKIQATNVSEAECDMECKGERGSVCGGANRLSVYRLQLAQESARRYGSAVFRGCFRRPDNLSLALPVTAAMLNMSVDKCVDFCTEKEYPLAALAGTACHCGFPTTRFPLHDREDEQLCAQKCSAEEFESCGTPSYFIVYQTQVQDNRCMDRRFLPGKSKQLIALASFPGAGNTWARHLIELATGFYTGSYYFDGSLYNKGFKGERDHWRSGRTICIKTHESGQKEIEAFDAAILLIRNPYKALMAEFNRKYGGHIGFAAHAHWKGKGAVPGSLQILFRSICTASVGEWPEFVRNYAPWWATHTLDWLKFGKKVLVVHFEDLKQDLFVQLGRMVSLLGVAVREDRLLCVESQKDGNFKRSGLRKLEYDPYTADMQKTISAYIKMVDAALKGRNLTGVPDDYYPR

SEQ ID NO: 745350 - protein, 565 aa, Homo sapiens
MAKLWFKFQRYFRRKPVRFFTFLALYLTAGSLVFLHSGFVGQPAVSGNQANPAAAGGPAEGAELSFLGDMHLGRGFRDTGEASSIARRYGPWFKGKDGNERAKLGDYGGAWSRALKGRVVREKEEERAKYIGCYLDDTQSRALRGVSFFDYKKMTIFRCQDNCAERGYLYGGLEFGAECYCGHKIQATNVSEAECDMECKGERGSVCGGANRLSVYRLQLAQESARRYGSAVFRGCFRRPDNLSLALPVTAAMLNMSVDKCVDFCTEKEYPLAALAGTACHCGFPTTRFPLHDREDEQLCAQKCSAEEFESCGTPSYFIVYQTQVQDNRCMDRRFLPGKSKQLIALASFPGAGNTWARHLIELATGFYTGSYYFDGSLYNKGFKGERDHWRSGRTICIKTHESGQKEIEAFDAAILLIRNPYKALMAEFNRKYGGHIGFAAHAHWKGKEWPEFVRNYAPWWATHTLDWLKFGKKVLVVHFEDLKQDLFVQLGRMVSLLGVAVREDRLLCVESQKDGNFKRSGLRKLEYDPYTADMQKTISAYIKMVDAALKGRNLTGVPDDYYPR

SEQ ID NO: 745351 - protein, 369 aa, Homo sapiens
MAKLWFKFQRYFRRKPVRFFTFLALYLTAGSLVFLHSGFVGQPAVSGNQANPAAAGGPAEGAELSFLGDMHLGRGFRDTGEASSIARRYGPWFKGKDGNERAKLGDYGGAWSRALKGRVVREKEEERAKYIGCYLDDTQSRALRGVSFFDYKKMTIFRCQDNCAERGYLYGGLEFGAECYCGHKIQATNVSEAECDMECKGERGSVCGGANRLSVYRLQLAQESARRYGSAVFRGCFRRPDNLSLALPVTAAMLNMSVDKCVDFCTEKEYPLAALAGTACHCGFPTTRFPLHDREDEQLCAQKCSAEEFESCGTPSYFIVYQTQVQGELGPSPVDPRCTPSGFPPRRVPASPSHTACSKEKTMQARGQG

SEQ ID NO: 745352 - protein, 945 aa, Homo sapiens
TAYDGFVQYIPFDDPRLRHFKLAQPQGFCEDIKLDDKSYNSSPVTAQEPAHGGMQPDGAIWNPQSLIPPSGDERGLVLADSSPRWLWGQPPGDGENSGLPNQRDRCVARGQWPDVRGSQHGHTGRQVSSPYSQGESTCETQTKLKKFQTGTRTKKSSKKKMNETIFCLVSIPVKSESHLPDRDMDNNDLKPSADQKNGSDKSPALQEQSLLSMSSTDLELQALTGSMGGRTEFQKQDLGEPEEDRQTNDLSFIHLTKHRELKHSGSWPGHRYRDQQTQTSFSEEPQSSQLLPGAKLGGPSRAALSPKCSDPAASEAQTHTAFPTGDHKQRPSARNLKGHRSLSPSSNSAFSRTSLSVDQAPTPKAGRSQPCVDVHGLGAHPGPKREVVKGEPTGPCNSKQLFGQFLLKPVSRRPWDLISQLESFNKELQEEEESSSSSSSSSSSSEESEAEPQQENRAHCRQEDVGFRGNSPEMRVEPQPRMWVPESPVCRSGRGESKSESWSEELQPGHPRAWPPSPGRFRVEEGGGAPFCSADGSTSAEKGHLEVSNGMDELAGSPFPVTRMSSRSSDAKPLPASYPAEPREPQESPKITSAFSSVKPSEAVPRKFDSGGERGAGLPLSLSNKNRGLSAPDLRSVGLTPGQEQGASELEGSLGEASTIEIPPGESLQARAARILGIEVAVESLLPGIRRAGQNQPAEPDASACTPESPQEELLSRPAPADVPRVSTDAFYGRRKCGWTKSPLFVGDRDSARRAPQAFEHSDVDGVVTSTDPVPEPEPSPLESKFFEQKDVETKPPFRSTLFHFVERTPSVAGSEKRLRSPSKVIESLQEKLASPPRRADPDRLMRMKEVSSVSRMRVLSFRNADSQEDAEELKATTRGQAGLPGGLVSPGSGDRAQRLGHSLSVSKDSISREEKEHPAAQKEKSMDQDFWCPDSYDPSRVERV

SEQ ID NO: 745353 - protein, 683 aa, Homo sapiens
TAYDGFVQYIPFDDPRLRHFKLAQPQGFCEDIKLDDKSYNSSPVTAQEPAHGGMQPDGAIWNPQSLIPPSGDERGLVLADSSPRWLWGQPPGDGENSGLPNQRDRCVARGQWPDVRGSQHGHTGRQVSSPYSQGESTCETQTKLKKFQTGTRTKKSSKKKMNETIFCLVSIPVKSESHLPDRDMDNNDLKPSADQKNGSDKSPALQEQSLLSMSSTDLELQALTGSMGGRTEFQKQDLGEPEEDRQTNDLSFIHLTKHRELKHSGSWPGHRYRDQQTQTSFSEEPQSSQLLPGAKLGGPSRAALSPKCSDPAASEAQTHTAFPTGDHKQRPSARNLKGHRSLSPSSNSAFSRTSLSVDQAPTPKAGRSQPCVDVHGLGAHPGPKREVVKGEPTGPCNSKQLFGQFLLKPVSRRPWDLISQLESFNKELQEEEESSSSSSSSSSSSEESEAEPQQENRAHCRQEDVGFRGNSPEMRVEPQPRMWVPESPVCRRAPQAFEHSDVDGVVTSTDPVPEPEPSPLESKFFEQKDVETKPPFRSTLFHFVERTPSVAGSEKRLRSPSKVIESLQEKLASPPRRADPDRLMRMKEVSSVSRMRVLSFRNADSQEDAEELKATTRGQAGLPGGLVSPGSGDRAQRLGHSLSVSKDSISREEKEHPAAQKEKSMDQDFWCPDSYDPSRVERV

SEQ ID NO: 745354 - protein, 945 aa, Homo sapiens; identical to SEQ ID NO: 745352

SEQ ID NO: 745355 - protein, 842 aa, Homo sapiens
TAYDGFVQYIPFDDPRLRHFKLAQPQGFCEDIKLDDKSYNSSPVTAQEPAHGGMQPDGAIWNPQSLIPPSGDERGLVLADSSPRWLWGQPPGDGENSGLPNQRDRCVARGQWPDVRGSQHGHTGRQVSSPYSQGESTCETQTKLKKFQTGTRTKKSSKKKMNETIFCLVSIPVKSESHLPDRDMDNNDLKPSADQKNGSDKSPALQEQSLLSMSSTDLELQALTGSMGGRTEFQKQDLGEPEEDRQTNDLSFIHLTKHRELKHSGSWPGHRYRDQQTQTSFSEEPQSSQLLPGAKLGGPSRAALSPKCSDPAASEAQTHTAFPTGDHKQRPSARNLKGHRSLSPSSNSAFSRTSLSVDQAPTPKAGRSQPCVDVHGLGAHPGPKREVVKGEPTGPCNSKQLFGQFLLKPVSRRPWDLISQLESFNKELQEEEESSSSSSSSSSSSEESEAEPQQENRAHCRQEDVGFRGNSPEMRVEPQPRMWVPESPVCRSGRGESKSESWSEELQPGHPRAWPPSPGRFRVEEGGGAPFCSADGSTSAEKGASELEGSLGEASTIEIPPGESLQARAARILGIEVAVESLLPGIRRAGQNQPAEPDASACTPESPQEELLSRPAPADVPRVSTDAFYGRRKCGWTKSPLFVGDRDSARRAPQAFEHSDVDGVVTSTDPVPEPEPSPLESKFFEQKDVETKPPFRSTLFHFVERTPSVAGSEKRLRSPSKVIESLQEKLASPPRRADPDRLMRMKEVSSVSRMRVLSFRNADSQEDAEELKATTRGQAGLPGGLVSPGSGDRAQRLGHSLSVSKDSISREEKEHPAAQKEKSMDQDFWCPDSYDPSRVERV

SEQ ID NO: 745356 - protein, 945 aa, Homo sapiens; identical to SEQ ID NO: 745352

SEQ ID NO: 745357 - protein, 392 aa, Homo sapiens
MLKVLNYIFKGPFSMYSNIFNGSGDMDLEPLFYLQQLVLDFIIFYHSCNRERTISLGVASHNVCVGICVGVYLHSLNNCMIRKFLSLFQMFHVVIIVLQNPKGYVLLMKMSSLGGGEQVIMCRFFLAEVCFLWEQPSRINLFCFLFWELRPILRCPKSPSILFDLLIHIDLIAKYDHIDVVKLNTFVQIESLHLLSVKQWKTVMEKQTCFDRFICVKKVSILWNAADQIMSCRLCSKQHSSTTVLLSIPSLAVTEMKNISIDLCFALVQETICREPNIATEDLISCQKIQNLFPFKHDTLSFLVDLAKRKNIALNSPIPSVESLRIFSNELCMVLWYFMFPKENGYMKNLSSVIIFLTKILLVMVVLINLIVIMITQCLPISNHHIVYLKYI

SEQ ID NO: 745358 - protein, 114 aa, Homo sapiens
VRNRSLTEMMATGTPESQARFGQSVKGLLTEKVTTCGTDVIALTKQVLKGSRSSELLGQAARNMVLQEDAILHSEDSLRKMAIITTHLQYQQEAIQKNVEQSSDLQDQLNHLLK

SEQ ID NO: 745359 - protein, 114 aa, Homo sapiens; identical to SEQ ID NO: 745358

SEQ ID NO: 745360 - protein, 161 aa, Homo sapiens
MAGSEPRSGTNSPPPPFSDWGRLEAAILSGWKTFWQSVSKERVARTTSREEVDEAASTLTRLPVSVGRRPRRTVGPARAGGTSPGAPRGLGNSRAPAWVWLRPCSHSWQCSHREATVDQKRLGVDPGAPQGARTSQGSTFMGPLGTLPIALRFSTRQNRHM

SEQ ID NO: 745361 - protein, 361 aa, Homo sapiens
MAGSEPRSGTNSPPPPFSDWGRLEAAILSGWKTFWQSIDVQLYILSFLSPHDLCQLGSTNHYWNETVRDPILWRYFLLRDLPSWSSVDWKSLPDLEILKKPISEVTDGAFFDYMAVYRMCCPYTRRASKSSRPMYGAVTSFLHSLIIQNEPRFAMFGPGLEELNTSLVLSLMSSEELCPTAGLPQRQIDGIGSGVNFQLNNQHKFNILILYSTTRKERDRAREEHTSAVNKMFSRHNEGDDQQGSRYSVIPQIQKVCEVVDGFIYVANAEAHKRHEWQDEFSHIMAMTDPAFGSSGRPLLVLSCISQGDVKRMPCFYLAHELHLNLLNHPWLVQDTEAETLTGFLNGIEWILEEVESKRAR

SEQ ID NO: 745362 - protein, 253 aa, Homo sapiens
MKKLKFRLYRMCCPYTRRASKSSRPMYGAVTSFLHSLIIQNEPRFAMFGPGLEELNTSLVLSLMSSEELCPTAGLPQRQIDGIGSGVNFQLNNQHKFNILILYSTTRKERDRAREEHTSAVNKMFSRHNEGDDQQGSRYSVIPQIQKVCEVVDGFIYVANAEAHKRHEWQDEFSHIMAMTDPAFGSSGRPLLVLSCISQGDVKRMPCFYLAHELHLNLLNHPWLVQDTEAETLTGFLNGIEWILEEVESKRAR

SEQ ID NO: 745363 - protein, 305 aa, Homo sapiens
MAGSEPRSGTNSPPPPFSDWGRLEAAILSGWKTFWQSVSKERVARTTSREEVDEAASTLTRLPIDVQLYILSFLSPHDLCQLGSTNHYWNETVRDPILWRYFLLRDLPSWSSVDWKSLPDLEILKKPISEVTDGAFFDYMAVYRMCCPYTRRASKSSRPMYGAVTSFLHSLIIQNEPRFAMFGPGLEELNTSLVLSLMSSEELCPTAGLPQRQIDGIGSGVNFQLNNQHKFNILILYSTTRKERDRAREEHTSAVNKMFSRHNEGDDQQGSRYSVIPQIQKVCEVVDGFIYVANAEAHKSPGYRG

SEQ ID NO: 745364 - protein, 161 aa, Homo sapiens; identical to SEQ ID NO: 745360

SEQ ID NO: 745365 - protein, 387 aa, Homo sapiens
MAGSEPRSGTNSPPPPFSDWGRLEAAILSGWKTFWQSVSKERVARTTSREEVDEAASTLTRLPIDVQLYILSFLSPHDLCQLGSTNHYWNETVRDPILWRYFLLRDLPSWSSVDWKSLPDLEILKKPISEVTDGAFFDYMAVYRMCCPYTRRASKSSRPMYGAVTSFLHSLIIQNEPRFAMFGPGLEELNTSLVLSLMSSEELCPTAGLPQRQIDGIGSGVNFQLNNQHKFNILILYSTTRKERDRAREEHTSAVNKMFSRHNEGDDQQGSRYSVIPQIQKVCEVVDGFIYVANAEAHKRHEWQDEFSHIMAMTDPAFGSSGRPLLVLSCISQGDVKRMPCFYLAHELHLNLLNHPWLVQDTEAETLTGFLNGIEWILEEVESKRAR

SEQ ID NO: 745366 - protein, 307 aa, Homo sapiens
MAGSEPRSGTNSPPPPFSDWGRLEAAILSGWKTFWQSVSKERVARTTSREEVDEAASTLTRLPIDVQLYILSFLSPHDLCQLGSTNHYWNETVRDPILWRYFLLRDLPSWSSVDWKSLPDLEILKKPISEVTDGAFFDYMAVYRMCCPYTRRASKSSRPMYGAVTSFLHSLIIQNEPRFAMFGPGLEELNTSLVLSLMSSEELCPTAGLPQRQIDGIGSGVNFQLNNQHKFNILILYSTTRKERDRAREEHTSAVNKMFSRHNEGDDQQGSRYSVIPQIQKVCEVVDGFIYVANAEAHKSKYSYVHF

SEQ ID NO: 745367 - protein, 154 aa, Homo sapiens
MAGSEPRSGTNSPPPPFSDWGRLEAAILSGWKTFWQSVSKERVARTTSREEVDEAASTLTRLPIDVQLYILSFLSPHDLCQLGSTNHYWNETVRDPILWRYFLLRDLPSWSSVDWKSLPDLEILKKPISEVTDGAFFDYMAVRDGVSPCYPGWS

SEQ ID NO: 745368 - protein, 309 aa, Homo sapiens
MAGSEPRSGTNSPPPPFSDWGRLEAAILSGWKTFWQSVSKERVARTTSREEVDEAASTLTRLPIDVQLYILSFLSPHDLCQLGSTNHYWNETVRDPILWRYFLLRDLPSWSSVDWKSLPDLEILKKPISEVTDGAFFDYMAVYRMCCPYTRRASKSSRPMYGAVTSFLHSLIIQNEPRFAMFGPGLEELNTSLVLSLMSSEELCPTAGLPQRQIDGIGSGVNFQLNNQHKFNILILYSTTRKERDRAREEHTSAVNKMFSRHNEGDDQQGSRYSVIPQIQKVCEVVDGFIYVANAEAHKRQNSAVMLEH

SEQ ID NO: 745369 - protein, 114 aa, Homo sapiens
MKGLFFFFFFFFWHRWTNGGCDCGHRARRRRLIWFPPSVPLDAPGFSPTGVPAWSPPWCELWLSKWGKREWVSPLWLPGGSGGFDTRIVVGSRSREGAFAIITLSLSLPEGREQ

SEQ ID NO: 745370 - protein, 684 aa, Homo sapiens
MQKLASQYLKRDWPGVKADDRNDYRSMYPVWKSFLEGTMQVAQSRMNICENYKNFISEPARTVRSLKEQQLKRCVDQLTKIQTELQETVKDLAKGKKKYFETEQMAHAVREKADIEAKSKLSLFQSRISLQKASVKLKARRSECNSKATHARNDYLLTLAAANAHQDRYYQTDLVNIMKALDGNVYDHLKDYLIAFSRTELETCQAVQNTFQFLLENSSKVVRDYNLQLFLQENAVFHKPQPFQFQPCDSDTSRQLESETGTTEEHSLNKEARKWATRVAREHKNIVHQQRVLNDLECHGAAVSEQSRAELEQKIDEARENIRKAEIIKLKAEARLDLLKQIGVSVDTWLKSAMNQVMEELENERWARPPAVTSNGTLHSLNADTEREEGEEFEDNMDVFDDSSSSPSGTLRNYPLTCKVVYSYKASQPDELTIEEHEVLEVIEDGDMEDWVKARNKVGQVGYVPEKYLQFPTSNSLLSMLQSLAALDSRSHTSSNSTEAELVSGSLNGDASVCFVKALYDYEGQTDDELSFPEGAIIRILNKENQDDDGFWEGEFNGRIGVFPSVLVEELSASENGDTPWMREIQISPSPKPHASLPPLPLYDQPPSSPYPSPDKRSSLYFPRSPSANEKSLHAESPGFSQASRHTPETSYGKLRPVRAAPPPPTQNHRRPAEKIEDVEITLV

SEQ ID NO: 745371 - protein, 699 aa, Homo sapiens
MDIPQFIHFPVDGHGMQKLASQYLKRDWPGVKADDRNDYRSMYPVWKSFLEGTMQVAQSRMNICENYKNFISEPARTVRSLKEQQLKRCVDQLTKIQTELQETVKDLAKGKKKYFETEQMAHAVREKADIEAKSKLSLFQSRISLQKASVKLKARRSECNSKATHARNDYLLTLAAANAHQDRYYQTDLVNIMKALDGNVYDHLKDYLIAFSRTELETCQAVQNTFQFLLENSSKVVRDYNLQLFLQENAVFHKPQPFQFQPCDSDTSRQLESETGTTEEHSLNKEARKWATRVAREHKNIVHQQRVLNDLECHGAAVSEQSRAELEQKIDEARENIRKAEIIKLKAEARLDLLKQIGVSVDTWLKSAMNQVMEELENERWARPPAVTSNGTLHSLNADTEREEGEEFEDNMDVFDDSSSSPSGTLRNYPLTCKVVYSYKASQPDELTIEEHEVLEVIEDGDMEDWVKARNKVGQVGYVPEKYLQFPTSNSLLSMLQSLAALDSRSHTSSNSTEAELVSGSLNGDASVCFVKALYDYEGQTDDELSFPEGAIIRILNKENQDDDGFWEGEFNGRIGVFPSVLVEELSASENGDTPWMREIQISPSPKPHASLPPLPLYDQPPSSPYPSPDKRSSLYFPRSPSANEKSLHAESPGFSQASRHTPETSYGKLRPVRAAPPPPTQNHRRPAEKIEDVEITLV

SEQ ID NO: 745372 - protein, 556 aa, Homo sapiens
MDIPQFIHFPVDGHGMQKLASQYLKRDWPGVKADDRNDYRSMYPVWKSFLEGTMQVAQSRMNICENYKNFISEPARTVRSLKEQQLKRCVDQLTKIQTELQETVKDLAKGKKKYFETEQMAHAVREKADIEAKSKLSLFQSRISLQKASVKLKARRSECNSKATHARNDYLLTLAAANAHQDRYYQTDLVNIMKALDGNVYDHLKDYLIAFSRTELETCQAVQNTFQFLLENSSKVVRDYNLQLFLQENAVFHKPQPFQFQPCDSDTSRQLESETGTTEEHSLNKEARKWATRVAREHKNIVHQQRVLNDLECHGAAVSEQSRAELEQKIDEARENIRKAEIIKLKAEARLDLLKQIGVSVDTWLKSAMNQVMEELENERWARPPAVTSNGTLHSLNADTEREEGEEFEDNMDVFDDSSSSPSGTLRNYPLTCKVVYSYKASQPDELTIEEHEVLEVIEDGDMEDWVKARNKVGQVGYVPEKYLQFPTSNSLLSMLQSLAALDSRSHTSSNSTEAELVSGSLNGDASDLSFPQATRLPASTAVVRPASQQPLPQPR

SEQ ID NO: 745373 - protein, 462 aa, Homo sapiens
AIFTGQSLKAAQLVDIELSPVSALRMTIAESRQLESETGTTEEHSLNKEARKWATRVAREHKNIVHQQRVLNDLECHGAAVSEQSRAELEQKIDEARENIRKAEIIKLKAEARLDLLKQIGVSVDTWLKSAMNQVMEELENERWARPPAVTSNGTLHSLNADTEREEGEEFEDNMDVFDDSSSSPSGTLRNYPLTCKVVYSYKASQPDELTIEEHEVLEVIEDGDMEDWVKARNKVGQVGYVPEKYLQFPTSNSLLSMLQSLAALDSRSHTSSNSTEAELVSGSLNGDASVCFVKALYDYEGQTDDELSFPEGAIIRILNKENQDDDGFWEGEFNGRIGVFPSVLVEELSASENGDTPWMREIQISPSPKPHASLPPLPLYDQPPSSPYPSPDKRSSLYFPRSPSANEKSLHAESPGFSQASRHTPETSYGKLRPVRAAPPPPTQNHRRPAEKIEDVEITLV

SEQ ID NO: 745374 - protein, 699 aa, Homo sapiens; identical to SEQ ID NO: 745371

SEQ ID NO: 745375 - protein, 699 aa, Homo sapiens; identical to SEQ ID NO: 745371

SEQ ID NO: 745376 - protein, 699 aa, Homo sapiens; identical to SEQ ID NO: 745371

SEQ ID NO: 745377 - protein, 699 aa, Homo sapiens; identical to SEQ ID NO: 745371

SEQ ID NO: 745378 - protein, 627 aa, Homo sapiens
MDIPQFIHFPVDGHGMQKLASQYLKRDWPGVKADDRNDYRSMYPVWKSFLEGTMQVAQSRMNICENYKNFISEPARTVRSLKEQQLKRCVDQLTKIQTELQETVKDLAKGKKKYFETEQMAHAVREKADIEAKSKLSLFQSRISLQKASVKLKARRSECNSKATHARNDYLLTLAAANAHQDRYYQTDLVNIMKALDGNVYDHLKDYLIAFSRTELETCQAVQNTFQFLLENSSKVVRDYNLQLFLQENAVFHKPQPFQFQPCDSDTSRQLESETGTTEEHSLNKEARKWATRVAREHKNIVHQQRVLNDLECHGAAVSEQSRAELEQKIDEARENIRKAEIIKLKAEARLDLLKQIGVSVDTWLKSAMNQVMEELENERWARPPAVTSNGTLHSLNADTEREEGEEFEDNMDVFDDSSSSPSGTLRNYPLTCKVVYSYKASQPDELTIEEHEVLEVIEDGDMEDWVKARNKVGQVGYVPEKYLQFPTSNSLLSMLQSLAALDSRSHTSSNSTEAELVSGSLNGDASVCFVKALYDYEGQTDDELSFPEGAIIRILNKENQDDDGFWEGEFNGRIGVFPSVLVEELSASENGDTPWMREIQISPSPKPHASLPPLPLYDQPPSSPIC

SEQ ID NO: 745379 - protein, 186 aa, Homo sapiens
MQKLASQYLKRDWPGVKADDRNDYRSMYPVWKSFLEGTMQVAQSRMNICENYKNFISEPARTVRSLKEQQLKRCVDQLTKIQTELQETVKDLAKGKKKYFETEQMAHAVREKADIEAKSKLSLFQSRISLQKASVKLKARRSECNSKATHARNDYLLTLAAANAHQDRYYQTDLVNIMKVRQTFVI

SEQ ID NO: 745380 - protein, 530 aa, Homo sapiens
MDIPQFIHFPVDGHGMQKLASQYLKRDWPGVKADDRNDYRSMYPVWKSFLEGTMQVAQSRMNICENYKNFISEPARTVRSLKEQQLKRCVDQLTKIQTELQETVKDLAKGKKKYFETEQMAHAVREKADIEAKSKLSLFQSRISLQKASVKLKARRSECNSKATHARNDYLLTLAAANAHQDRYYQTDLVNIMKALDGNVYDHLKDYLIAFSRTELETCQAVQNTFQFLLENSSKVVRDYNLQLFLQENAVFHKPQPFQFQPCDSDTSRQLESETGTTEEHSLNKEARKWATRVAREHKNIVHQQRVLNDLECHGAAVSEQSRAELEQKIDEARENIRKAEIIKLKAEARLDLLKQIGVSVDTWLKSAMNQVMEELENERWARPPAVTSNGTLHSLNADTEREEGEEFEDNMDVFDDSSSSPSGTLRNYPLTCKVVYSYKASQPDELTIEEHEVLEVIEDGDMEDWVKARNKVGQVGYVPEKYLQFPTSNSLLSMLQSLAALDSRSHTSSNSTEAELVSGSLNGDASGKD

SEQ ID NO: 745381 - protein, 653 aa, Homo sapiens
GKGPKVLRGTAHFIIGLKKHYKNFISEPARTVRSLKEQQLKRCVDQLTKIQTELQETVKDLAKGKKKYFETEQMAHAVREKADIEAKSKLSLFQSRISLQKASVKLKARRSECNSKATHARNDYLLTLAAANAHQDRYYQTDLVNIMKALDGNVYDHLKDYLIAFSRTELETCQAVQNTFQFLLENSSKVVRDYNLQLFLQENAVFHKPQPFQFQPCDSDTSRQLESETGTTEEHSLNKEARKWATRVAREHKNIVHQQRVLNDLECHGAAVSEQSRAELEQKIDEARENIRKAEIIKLKAEARLDLLKQIGVSVDTWLKSAMNQVMEELENERWARPPAVTSNGTLHSLNADTEREEGEEFEDNMDVFDDSSSSPSGTLRNYPLTCKVVYSYKASQPDELTIEEHEVLEVIEDGDMEDWVKARNKVGQVGYVPEKYLQFPTSNSLLSMLQSLAALDSRSHTSSNSTEAELVSGSLNGDASVCFVKALYDYEGQTDDELSFPEGAIIRILNKENQDDDGFWEGEFNGRIGVFPSVLVEELSASENGDTPWMREIQISPSPKPHASLPPLPLYDQPPSSPYPSPDKRSSLYFPRSPSANEKSLHAESPGFSQASRHTPETSYGKLRPVRAAPPPPTQNHRRPAEKIEDVEITLV

SEQ ID NO: 745382 - protein, 493 aa, Homo sapiens
MDIPQFIHFPVDGHGMQKLASQYLKRDWPGVKADDRNDYRSMYPVWKSFLEGTMQVAQSRMNICENYKNFISEPARTVRSLKEQQLKRCVDQLTKIQTELQETVKDLAKGKKKYFETEQMAHAVREKADIEAKSKLSLFQSRISLQKASVKLKARRSECNSKATHARNDYLLTLAAANAHQDRYYQTDLVNIMKALDGNVYDHLKDYLIAFSRTELETCQAVQNTFQFLLENSSKVVRDYNLQLFLQENAVFHKPQPFQFQPCDSDTSRQLESETGTTEEHSLNKEARKWATRVAREHKNIVHQQRVLNDLECHGAAVSEQSRAELEQKIDEARENIRKAEIIKLKAEARLDLLKQIGVSVDTWLKSAMNQVMEELENERWARPPAVTSNGTLHSLNADTEREEGEEFEDNMDVFDDSSSSPSGTLRNYPLTCKVVYSYKASQPDELTIEEHEVLEVIEDGDMEDWVKVYSFAHIALSCDIFRSLFWSLLCPV

SEQ ID NO: 745383 - protein, 403 aa, Homo sapiens
PRVAHASQQRVLNDLECHGAAVSEQSRAELEQKIDEARENIRKAEIIKLKAEARLDLLKQIGVSVDTWLKSAMNQVMEELENERWARPPAVTSNGTLHSLNADTEREEGEEFEDNMDVFDDSSSSPSGTLRNYPLTCKVVYSYKASQPDELTIEEHEVLEVIEDGDMEDWVKARNKVGQVGYVPEKYLQFPTSNSLLSMLQSLAALDSRSHTSSNSTEAELVSGSLNGDASVCFVKALYDYEGQTDDELSFPEGAIIRILNKENQDDDGFWEGEFNGRIGVFPSVLVEELSASENGDTPWMREIQISPSPKPHASLPPLPLYDQPPSSPYPSPDKRSSLYFPRSPSANEKSLHAESPGFSQASRHTPETSYGKLRPVRAAPPPPTQNHRRPAEKIEDVEITLV

SEQ ID NO: 745384 - protein, 699 aa, Homo sapiens; identical to SEQ ID NO: 745371

SEQ ID NO: 745385 - protein, 699 aa, Homo sapiens; identical to SEQ ID NO: 745371

SEQ ID NO: 745386 - protein, 699 aa, Homo sapiens; identical to SEQ ID NO: 745371

SEQ ID NO: 745387 - protein, 699 aa, Homo sapiens; identical to SEQ ID NO: 745371

SEQ ID NO: 745388 - protein, 106 aa, Homo sapiens
MEPPIPQSAPLTPNSVMVQPLLDSRMSHSRLQHPLTILPIDQVKTSHVENDYIDNPSLALTTGPKRTRGGAPELAPTPARCDQDVTHHWISFSGRPCSATCLPPAA

SEQ ID NO: 745389 - protein, 148 aa, Homo sapiens
MEPPIPQSAPLTPNSVMVQPLLDSRMSHSRLQHPLTILPIDQVKTSHVENDYIDNPSLALTTGPKRTRGGAPELAPTPARCDQDVTHHVDLLQRAPLLCYLPATGCVKLAQRGYDRLRRPGCRCKHTNSVICKAASGDAKTSRPDKPF

SEQ ID NO: 745390 - protein, 148 aa, Homo sapiens; identical to SEQ ID NO: 745389

SEQ ID NO: 745391 - protein, 322 aa, Homo sapiens
MLSPLPTGPLEACFSVQSRTSSPMEPPIPQSAPLTPNSVMVQPLLDSRMSHSRLQHPLTILPIDQVKTSHVENDYIDNPSLALTTGPKRTRGGAPELAPTPARCDQDVTHHWISFSGRPSSVSSSSSTSSDQRLLDHMAPPPVADQASPRAVRIQPKVVHCQPLDLKGPAVPPELDKHFLLCEACGKCKCKECASPRTLPSCWVCNQECLCSAQTLVNYGTCMCLVQGIFYHCTNEDDEGSCADHPCSCSRSNCCARWSFMGALSVVLPCLLCYLPATGCVKLAQRGYDRLRRPGCRCKHTNSVICKAASGDAKTSRPDKPF

SEQ ID NO: 745392 - protein, 330 aa, Homo sapiens
MATKESRDAKAQLALSSSANQSKEVPENPNYALKCTLVGHTEAVSSVKFSPNGEWLASSSADRLIIIWGAYDGKYEKTLYGHNLEISDVAWSSDSSRLVSASDDKTLKLWDVRSGKCLKTLKGHSNYVFCCNFNPPSNLIISGSFDETVKIWEVKTGKCLKTLSAHSDPVSAVHFNCSGSLIVSGSYDGLCRIWDAASGQCLKTLVDDDNPPVSFVKFSPNGKYILTATLDNTLKLWDYSRGRCLKTYTGHKNEKYCIFANFSVTGGKWIVSGSEDNLVYIWNLQTKEIVQKLQGHTDVVISAACHPTENLIASAALENDKTIKLWMSNH

SEQ ID NO: 745393 - protein, 312 aa, Homo sapiens
MATKESRDAKAQLALSSSANQSKEVPENPNYALKCTLVGHTEAVSSVKFSPNGEWLASSSADRLIIIWGAYDGKYEKTLYGHNLEISDVAWSSDSSRLVSASDDKTLKLWDVRSGKCLKTLKGHSNYVFCCNFNPPSNLIISGSFDETVKIWEVKTGKCLKTLSAHSDPVSAVHFNCSGSLIVSGSYDGLCRIWDAASGQCLKTLVDDDNPPVSFVKFSPNGKYILTATLDNTLKLWDYSRGRCLITGGKWIVSGSEDNLVYIWNLQTKEIVQKLQGHTDVVISAACHPTENLIASAALENDKTIKLWMSNH

SEQ ID NO: 745394 - protein, 330 aa, Homo sapiens; identical to SEQ ID NO: 745392

SEQ ID NO: 745395 - protein, 577 aa, Homo sapiens
MCICHLPCRPVKPNIIGEQITSKMGAHYHCIICSATITRRTDMLGHVRRHMNKGETKSSYIAASTAKPPKEILKEADTDVQVCPNYSIPQKTDSYFNPKMKLNRQLIFCTLAALAEERKPLECLDAFGATGIMGLQWAKHLGNAVKVTINDLNENSVTLIQENCHLNKLKVVVDSKEKEKSDDILEEGEKNLGNIKVTKMDANVLMHLRSFDFIHLDPFGTSVNYLDSAFRNIRNLGIVSVTSTDISSLYAKAQHVARRHYGCNIVRTEYYKELAARIVVAAVARAAARCNKGIEVLFAVALEHFVLVVVRVLRGPTSADETAKKIQYLIHCQWCEERIFQKDGNMVEENPYRQLPCNCHGSMPGKTAIELGPLWSSSLFNTGFLKRMLFESLHHGLDDIQTLIKTLIFESECTPQSQFSIHASSNVNKQEENGVFIKTTDDTTTDNYIAQGKRKSNEMITNLGKKQKTDVSTEHPPFYYNIHRHSIKGMNMPKLKKFLCYLSQAGFRVSRTHFDPMGVRTDAPLMQFKSILLKYSTPTYTGGQSESHVQSASEDTVTERVEMSVNDKAEASGCRRW

SEQ ID NO: 745396 - protein, 733 aa, Homo sapiens
MENMAEEELLPLEKEEVEVAQVQVPTPARDSAGVPAPAPDSALDSAPTPASAPAPAPALAQAPALSPSLASAPEEAKSKRHISIQRQLADLENLAFVTDGNFDSASSLNSDNLDAGNRQACPLCPKEKFRACNSHKLRRHLQNLHWKVSVEFEGYRMCICHLPCRPVKPNIIGEQITSKMGAHYHCIICSATITRRTDMLGHVRRHMNKGETKSSYIAASTAKPPKEILKEADTDVQVCPNYSIPQKTDSYFNPKMKLNRQLIFCTLAALAEERKPLECLDAFGATGIMGLQWAKHLGNAVKVTINDLNENSVTLIQENCHLNKLKVVVDSKEKEKSDDILEEGEKNLGNIKVTKMDANVLMHLRSFDFIHLDPFGTSVNYLDSAFRNIRNLGIVSVTSTDISSLYAKAQHVARRHYGCNIVRTEYYKELAARIVVAAVARAAARCNKGIEVLFAVALEHFVLVVVRVLRGPTSADETAKKIQYLIHCQWCEERIFQKDGNMVEENPYRQLPCNCHGSMPGKTAIELGPLWSSSLFNTGFLKRMLFESLHHGLDDIQTLIKTLIFESECTPQSQFSIHASSNVNKQEENGVFIKTTDDTTTDNYIAQGKRKSNEMITNLGKKQKTDVSTEHPPFYYNIHRHSIKGMNMPKLKKFLCYLSQAGFRVSRTHFDPMGVRTDAPLMQFKSILLKYSTPTYTGGQSESHVQSASEDTVTERVEMSVNDKAEASGCRRW

SEQ ID NO: 745397 - protein, 588 aa, Homo sapiens [sequence omitted]

SEQ ID NO: 745398 - protein, 649 aa, Homo sapiens
MISAAWSIFLIGTKIGLFLQVAPLSVMAKSCPSVCRCDAGFIYCNDRFLTSIPTGIPEDATTLYLQNNQINNAGIPSDLKNLLKVERIYLYHNSLDEFPTNLPKYVKELHLQENNIRTITYDSLSKIPYLEELHLDDNSVSAVSIEEGAFRDSNYLRLLFLSRNHLSTIPWGLPRTIEELRLDDNRISTISSPSLQGLTSLKRLVLDGNLLNNHGLGDKVFFNLVNLTELSLVRNSLTAAPVNLPGTNLRKLYLQDNHINRVPPNAFSYLRQLYRLDMSNNNLSNLPQGIFDDLDNITQLILRNNPWYCGCKMKWVRDWLQSLPVKVNVRGLMCQAPEKVRGMAIKDLNAELFDCKDSGIVSTIQITTAIPNTVYPAQGQWPAPVTKQPDIKNPKLTKDHQTTGSPSRKTITITVKSVTSDTIHISWKLALPMTALRLSWLKLGHSPAFGSITETIVTGERSEYLVTALEPDSPYKVCMVPMETSNLYLFDETPVCIETETAPLRMYNPTTTLNREQEKEPYKNPNLPLAAIIGGAVALVTIALLALVCWYVHRNGSLFSRNCAYSKGRRRKDDYAEAGTKKDNSILEIRETSFQMLPISNEPISKEEFVIHTIFPPNGMNLYKNNHSESSSNRSYRDSGIPDSDHSHS

SEQ ID NO: 745399 - protein, 631 aa, Homo sapiens
MISAAWSIFLIGSPSVCRCDAGFIYCNDRFLTSIPTGIPEDATTLYLQNNQINNAGIPSDLKNLLKVERIYLYHNSLDEFPTNLPKYVKELHLQENNIRTITYDSLSKIPYLEELHLDDNSVSAVSIEEGAFRDSNYLRLLFLSRNHLSTIPWGLPRTIEELRLDDNRISTISSPSLQGLTSLKRLVLDGNLLNNHGLGDKVFFNLVNLTELSLVRNSLTAAPVNLPGTNLRKLYLQDNHINRVPPNAFSYLRQLYRLDMSNNNLSNLPQGIFDDLDNITQLILRNNPWYCGCKMKWVRDWLQSLPVKVNVRGLMCQAPEKVRGMAIKDLNAELFDCKDSGIVSTIQITTAIPNTVYPAQGQWPAPVTKQPDIKNPKLTKDHQTTGSPSRKTITITVKSVTSDTIHISWKLALPMTALRLSWLKLGHSPAFGSITETIVTGERSEYLVTALEPDSPYKVCMVPMETSNLYLFDETPVCIETETAPLRMYNPTTTLNREQEKEPYKNPNLPLAAIIGGAVALVTIALLALVCWYVHRNGSLFSRNCAYSKGRRRKDDYAEAGTKKDNSILEIRETSFQMLPISNEPISKEEFVIHTIFPPNGMNLYKNNHSESSSNRSYRDSGIPDSDHSHS

SEQ ID NO: 745400 - protein, 649 aa, Homo sapiens; identical to SEQ ID NO: 745398

SEQ ID NO: 745401 - protein, 802 aa, Homo sapiens
SQEPLVSHEQMQVFQMITKSQRIFSHAQVAAVSSQLPAPEGKPAALRPLQGPWPQQPPPLAPAVDSLHAGPGNPEAEGSPARRRKTTPGVPREASPGSTRRDAKGGLKVAAVPTPLAAPSLDPSRNPDISSLAKQLRSSKGTLDLEDIFPSTGQRQTQLGGEEPPGASLPGKQAPAENGAASRITKGEKGPACSRGGGYRLLGNPRAPRFSGFRKEKAKMDMCCAASPSQVAMASFSSAGPPADPSKSKLTIFSRIQGGNIYRLPHPVKEENVAGRGNQQNGSPTDWTKPRSTFVCKNCSQMFYTEKGLSSHMCFHSDQWPSPRGKQEPQVFGTEFCKPLRQVLRPEGDRHSPPGTKKPLDPTAAAPLVVPQSIPVVPVTRHIGSMAMGQEKDGEERDSKESSQQRKRKKRPPPSTAGEPGPAGCHQSRLRSPMFLVDCLLKGLFQCSPYTPPPMLSPIREGSGVYFNTLCSTSTQASPDQLISSMLDQVDGSFGICVVKDDTKISIEPHINIGSRFQAEIPELQERSLAGTDEHVASLVWKPWGDMMISSETQDRVTELCNVACSSVMPGGGTNLELALHCLHEAQGNVQVALETLLLRGPHKPRTHLLADYRYTGSDVWTPIEKRLFKKAFYAHKKDFYLIHKMIQTKTVAQCVEYYYIWKKMIKFDCGRAPGLEKRVKREPEEVERTEEKVPCSPRERPSHHPTPKLKTKSYRRESILSSSPNAGSKRTPELLGSAESQGIFPCRECERVFDKIKSRNAHMKRHRLQDHVEPIIRVKWPVKPFQLKEEELGADIGPLQW

SEQ ID NO: 745402 - protein, 165 aa, Homo sapiens
MLPPSTHLQVPIGQHVYLKLPITGTEIVKPYTPVSGSLLSEFKEPVLPNNKYIYFLIKIYPTGLFTPELDRLQIGDFVSVSSPEGNFKISKFQELEDLFLLAAGTGFTPMVKILNYALTDIPSLRKSEAECSFIKPGRWLYLENPLRELALGIKTGCDFVSQPYF

SEQ ID NO: 745403 - protein, 557 aa, Homo sapiens
LRQNAPHPWRPRKWVGGLASARPQSRSWRCCPVWRRSPGRARGRGLKMLNVPSQSFPAPRSQQRVASGGRSKVPLKQGRSLMDWIRLTKSGKDLTGLKGRLIEVTEEELKKHNKKDDCWICIRGFVYNVSPYMEYHPGGEDELMRAAGSDGTELFDQVHRWVNYESMLKECLVGRMAIKPAVLKGMLPKSQVTDTLAKEGPSYPSYDWFQTDSLVTIAIYTKQKDINLDSIIVDHQNDSFRAETIIKDCLYLIHIGLSHEVQEDFSVRVVESVGKIEIVLQKKENTSWDFLGHPLKNHNSLIPRKDTGLYYRKCQLISKEDVTHDTRLFCLMLPPSTHLQVPIGQHVYLKLPITGTEIVKPYTPVSGSLLSEFKEPVLPNNKYIYFLIKIYPTGLFTPELDRLQIGDFVSVSSPEGNFKISKFQELEDLFLLAAGTGFTPMVKILNYALTDIPSLRKVKLMFFNKTEDDIIWRSQLEKLAFKDKRLDVEFVLSAPISEWNGKQGHISPALLSEFLKRNLDKSKVLVCICGPVPFTEQGVRLLHDLNFSKNEIHSFTA

SEQ ID NO: 745404 - protein, 190 aa, Homo sapiens
LRQNAPHPWRPRKWVGGLASARPQSRSWRCCPVWRRSPGRARGRGLKMLNVPSQSFPAPRSQQRVASGGRSKVPLKQGRSLMDWIRLTKSGKDLTGLKGRLIEVTEEELKKHNKKDDCWICIRGFVYNVSPYMEYHPGGEDELMRAAGSDGTELFDQVHRWVNYESMLKECLVGRMAIKPAVLKGKLWHL

SEQ ID NO: 745405 - protein, 568 aa, Homo sapiens
LRQNAPHPWRPRKWVGGLASARPQSRSWRCCPVWRRSPGRARGRGLKMLNVPSQSFPAPRSQQRVASGGRSKVPLKQGRSLMDWIRLTKSGKDLTGLKGRLIEVTEEELKKHNKKDDCWICIRGFVYNVSPYMEYHPGGEDELMRAAGSDGTELFDQVHRWVNYESMLKECLVGRMAIKPAVLKDYREEEKKVLNGMLPKSQVTDTLAKEGPSYPSYDWFQTDSLVTIAIYTKQKDINLDSIIVDHQNDSFRAETIIKDCLYLIHIGLSHEVQEDFSVRVVESVGKIEIVLQKKENTSWDFLGHPLKNHNSLIPRKDTGLYYRKCQLISKEDVTHDTRLFCLMLPPSTHLQVPIGQHVYLKLPITGTEIVKPYTPVSGSLLSEFKEPVLPNNKYIYFLIKIYPTGLFTPELDRLQIGDFVSVSSPEGNFKISKFQELEDLFLLAAGTGFTPMVKILNYALTDIPSLRKVKLMFFNKTEDDIIWRSQLEKLAFKDKRLDVEFVLSAPISEWNGKQGHISPALLSEFLKRNLDKSKVLVCICGPVPFTEQGVRLLHDLNFSKNEIHSFTA

SEQ ID NO: 745406 - protein, 242 aa, Homo sapiens
LRQNAPHPWRPRKWVGGLASARPQSRSWRCCPVWRRSPGRARGRGLKMLNVPSQSFPAPRSQQRVASGGRSKVPLKQGRSLMDWIRLTKSGKDLTGLKGRLIEVTEEELKKHNKKDDCWICIRGFVYNVSPYMEYHPGGEDELMRAAGSDGTELFDQVHRWVNYESMLKECLVGRMAIKPAVLKDYREEEKKVLNGMLPKSQVTDTLAKEGPSYPSYDWFQTDSLVTIAIYTKQKVNMSLKS

SEQ ID NO: 745407 - protein, 1113 aa, Homo sapiens
YDVVLDAIDTMQRVAWHINDMKRKHEHAVRLQEIQSLLTNWKGPDLTSYGELVLEGTFRIQRAKNERTLFLFDKLLLITKKRDDTFTYKAHILCGNLMLVEVIPKEPLSFSVFHYKNPKLQHTVQAKSQQDKRLWVLHLKRLILENHAAKIPAKAKQAILEMDAIHHPGFCYSPEGGTKALFGSKEGSAPYRLRRKSEPSSRSHKVLKTSETAQDIQKVSREEGSPQLSSARPSPAQRNSQPSSSTMISVLRAGGALRNIWTDHQIRQALFPSRRSPQENEDDEDDYQMFVPSFSSSDLNSTRLCEDSTSSRPCSWHMGQMESTETSSSGHRIVRRASSAGESNTCPPEIGTSDRTRELQNSPKTEGQEEMTPFGSSIELTIDDIDHVYDNISYEDLKLMVAKREEAESTPSKSARDSVRPKSTPELAFTKRQAGHSKGSLYAQTDGTLSGGEASSQSTHELQAVEENIYDTIGLPDPPSLGFKCSSLKRAKRSTFLGLEADFVCCDSLRPFVSQDSLQLSEDEAPYHQATPDHGYLSLLYDSPSGNLSMPHKPVSDKLSEEVDEIWNDLENYIKKNEDKARDRLLAAFPVSKDDVPDRLHAESTPELSRDVGRSVSTLSLPESQALLTPVKSRAGRASRANCPFEEDLISKEGSFMSLNRLSLASEMPLMDNPYDLANSGLSQTDPENPDLGMEATDKTKSRVFMMARQYSQKIKKANQLLKVKSLELEQPPASQHQKSMHKDLAAILEEKKQGGPAIGARIAEYSQLYDQIVFRESPLKIQKDGWASPQESSLLRSVSPSQVHHGSGDWLLHSTYSNGELADFCLPPEQDLRSRYPTFEINTKSTPRQLSAACSVPSLQTSDPLPGSVQRCSVVVSQPNKENWCQDHLYNSLGRKGISAKSQPYHRSQSSSSVLINKSMDSINYPSDVGKQQLLSLHRSSRCESHQDLLPDIADSHQQGTEKLSDLTLQDSQKVVVVNRNLPLNAQIATQNYFSNFKETDGDEDDYVEIKSEEDESELELSHNRRRKSDSKFVDADFSDNVCSGNTLHSLNSPRTPKKPVNSKLGLSPYLTPYNDSDKLNDYLWRGPSPNQQNIVQSLREKFQCLSSSSFA

SEQ ID NO: 745408 - protein, 1113 aa, Homo sapiens; identical to SEQ ID NO: 745407

SEQ ID NO: 745409 - protein, 1113 aa, Homo sapiens; identical to SEQ ID NO: 745407

SEQ ID NO: 745410 - protein, 1113 aa, Homo sapiens; identical to SEQ ID NO: 745407

SEQ ID NO: 745411 - protein, 89 aa, Homo sapiens
VAAGPWPLRKAPLCNDECCVPCGFLRAFWPHGHFPSHQRVLWVVESSCLTVYISSWQAKSQQDKRLWVLHLKRLILENHAAKIPAKVGH

SEQ ID NO: 745412 - protein, 70 aa, Homo sapiens
CPSPCHWVCFQPARGGKGGQQHDPPSGCMLETAQIICSQILLTRTWFHDQHLVQSMLGNPAFLLGSRVPR

SEQ ID NO: 745413 - protein, 254 aa, Homo sapiens
IKRQAADSEELGAAQREGSPSRSASVSTTCLDTTKMPPVGGKKAKKGILERLNAGEIVIGDGGFVFALEKRGYVKAGPWTPEAAVEHPEAVRQLHREFLRAGSNVMQTFTFYASEDKLENRGNYVLEKISGQEVNEAACDIARQVADEGDALVAGGVSQTPSYLSCKSETEVKKVFLQQLEVFMKKNVDFLIAEYFEHVEEAVWAVETLIASGKPVAATMCIGPRRRFAWRAPRRVCSAPGESRSIHHWCELPL

SEQ ID NO: 745414 - protein, 41 aa, Homo sapiens
MQTFTFYASEDKLENRGNYVLEKISGQEVNGCFDIGPRHPP

SEQ ID NO: 745415 - protein, 303 aa, Homo sapiens
SGLDMHTKPWVRARARKEYWENLRIASGRPYNPSMSKPDGWGVTKGTAELMQQKEAMKEGLEAAQLKAHLMSQPLAYHTPDCNKQGFIDLPEFPFGLEPRVATRWDIQKYAREAYNLGVRYIGGVLGFEPYHIRAIAEAVRQLHREFLRAGSNVMQTFTFYASEDKLENRGNYVLEKISGQEVNEAACDIARQVADEGDALVAGGVSQTPSYLSCKSETEVKKVFLQQLEVFMKKNVDFLIAEYFEHVEEAVWAVETLIASGKPVAATMCIGPRRRFAWRAPRRVCSAPGESRSIHHWCELPL

SEQ ID NO: 745416 - protein, 187 aa, Homo sapiens
IKRQAADSEELGAAQREGSPSRSASVSTTCLDTTKMPPVGGKKAKKGILERLNAGEIVIGDGGFVFALEKRGYVKAGPWTPEAAVEHPEAVRQLHREFLRAGSNVMQTFTFYASEDKLENRGNYVLEKISGQEVNEAACDIARQVADEGDALVAGGVSQTPSYLSCKSETEVNILNTLKKLCGQLKP

SEQ ID NO: 745417 - protein, 127 aa, Homo sapiens
IKRQAADSEELGAAQREGSPSRSASVSTTCLDTTKMPPVGGKKAKKGILERLNAGEIVIGDGGFVFALEKRGYVKAGPWTPEAAVEHPEAVRQLHREFLRAGSNVMQTFTFYASEDKLENREHPSLV

SEQ ID NO: 745418 - protein, 254 aa, Homo sapiens; identical to SEQ ID NO: 745413

SEQ ID NO: 745419 - protein, 90 aa, Homo sapiens
ECIMPNGIMPLITGLEPRVATRWDIQKYAREAYNLGVRYIGGCCGFEPYHIRAIAEELAPERGFLPPASEKHGSWGSGLDMHTKPWVRAR

SEQ ID NO: 745420 - protein, 149 aa, Homo sapiens
MQTFTFYASEDKLENRGNYVLEKISGQEVNEAACDIARQVADEGDALVAGGVSQTPSYLSCKSETEVKKVFLQQLEVFMKKNVDFLIAEYFEHVEEAVWAVETLIASGKPVAATMCIGPRRRFAWRAPRRVCSAPGESRSIHHWCELPL

SEQ ID NO: 745421 - protein, 176 aa, Homo sapiens
MKEGLEAARLKAHLMSQPLAYHTPDCNKQGFIDLPEFPFGLEPRVATRWDIQKYAREAYNLGVRYIGGCCGFEPYHIRAIAEELAPERGFLPPASEKHGSWGSGLDMHTKPWVRARARKEYWENLRIASGRPYNPSMSKPDGWGVTKGTAELMQQKEATTEQQLKELFEKQKFKSQ

SEQ ID NO: 745422 - protein, 254 aa, Homo sapiens; identical to SEQ ID NO: 745413

SEQ ID NO: 745423 - protein, 370 aa, Homo sapiens
SRLRQNRCLAPGSGGSTRSAAGSGCPEAAAFAEFARWPPITMSAFDTNPFADPVDVNPFQDPSVTQLTNAPQGGLAEFNPFSETNAATTVPVTQLPGSSQPAVLQPSVEPTQPTPQAVVSAAQAGLLRQQEELDRKAAELERKERELQNTVANLHVRQNNWPPLPSWCPVKPCFYQDFSTEIPADYQRICKMLYYLWMLHSVTLFLNLLACLAWFSGNSSKGVDFGLSILWFLIFTPCAFLCWYRPIYKAFRSDNSFSFFVFFFVFFCQIGIYIIQLVGIPGLGDSGWIAALSTLDNHSLAISVIMMVVAGFFTLCAVLSVFLLQRVHSLYRRTGASFQQAQEEFSQGIFSSRTFHRAASSAAQGAFQGN

SEQ ID NO: 745424 - protein, 381 aa, Homo sapiens
  misc_feature (6)..(6): Xaa can be any naturally occurring amino acid
  misc_feature (8)..(8): Xaa can be any naturally occurring amino acid
QAGTPXSXGYRRPRRRGRVGAPGSGGSTRSAAGSGCPEAAAFAEFARWPPITMSAFDTNPFADPVDVNPFQDPSVTQLTNAPQGGLAEFNPFSETNAATTVPVTQLPGSSQPAVLQPSVEPTQPTPQAVVSAAQAGLLRQQEELDRKAAELERKERELQNTVANLHVRQNNWPPLPSWCPVKPCFYQDFSTEIPADYQRICKMLYYLWMLHSVTLFLNLLACLAWFSGNSSKGVDFGLSILWFLIFTPCAFLCWYRPIYKAFRSDNSFSFFVFFFVFFCQIGIYIIQLVGIPGLGDSGWIAALSTLDNHSLAISVIMMVVAGFFTLCAVLSVFLLQRVHSLYRRTGASFQQAQEEFSQGIFSSRTFHRAASSAAQGAFQGN

SEQ ID NO: 745425 - protein, 370 aa, Homo sapiens; identical to SEQ ID NO: 745423

SEQ ID NO: 745426 - protein, 370 aa, Homo sapiens; identical to SEQ ID NO: 745423

SEQ ID NO: 745427 - protein, 370 aa, Homo sapiens; identical to SEQ ID NO: 745423

SEQ ID NO: 745428 - protein, 370 aa, Homo sapiens; identical to SEQ ID NO: 745423

SEQ ID NO: 745429 - protein, 370 aa, Homo sapiens; identical to SEQ ID NO: 745423

SEQ ID NO: 745430 - protein, 347 aa, Homo sapiens
SRLRQNRCLAPGSGGSTRSAAGSGCPEAAAFAEFARWPPITMSAFDTNPFADPVDVNPFQTNAATTVPVTQLPGSSQPAVLQPSVEPTQPTPQAVVSAAQAGLLRQQEELDRKAAELERKERELQNTVANLHVRQNNWPPLPSWCPVKPCFYQDFSTEIPADYQRICKMLYYLWMLHSVTLFLNLLACLAWFSGNSSKGVDFGLSILWFLIFTPCAFLCWYRPIYKAFRSDNSFSFFVFFFVFFCQIGIYIIQLVGIPGLGDSGWIAALSTLDNHSLAISVIMMVVAGFFTLCAVLSVFLLQRVHSLYRRTGASFQQAQEEFSQGIFSSRTFHRAASSAAQGAFQGN

SEQ ID NO: 745431 - protein, 179 aa, Homo sapiens
MLYYLWMLHSVTLFLNLLACLAWFSGNSSKGVDFGLSILWFLIFTPCAFLCWYRPIYKAFRSDNSFSFFVFFFVFFCQIGIYIIQLVGIPGLGDSGWIAALSTLDNHSLAISVIMMVVAGFFTLCAVLSVFLLQRVHSLYRRTGASFQQAQEEFSQGIFSSRTFHRAASSAAQGAFQGN

SEQ ID NO: 745432 - protein, 264 aa, Homo sapiens
MSLYLPCSLQAVVSAAQAGLLRQQEELDRKAAELERKERELQNTVANLHVRQNNWPPLPSWCPVKPCFYQDFSTEIPADYQRICKMLYYLWMLHSVTLFLNLLACLAWFSGNSSKGVDFGLSILWFLIFTPCAFLCWYRPIYKAFRSDNSFSFFVFFFVFFCQIGIYIIQLVGIPGLGDSGWIAALSTLDNHSLAISVIMMVVAGFFTLCAVLSVFLLQRVHSLYRRTGASFQQAQEEFSQGIFSSRTFHRAASSAAQGAFQGN

SEQ ID NO: 745433 - protein, 106 aa, Homo sapiens
AQYPLIRLRSSSWFGIPGLGDSGWIAALSTLDNHSLAISVIMMVVAGFFTLCAVLSVFLLQRVHSLYRRTGASFQQAQEEFSQGIFSSRTFHRAASSAAQGAFQGN

SEQ ID NO: 745434 - protein, 175 aa, Homo sapiens
VLVGPGLNRARSFPGHISHHDGGGWLLHPLCRALSLPPAAGALPLPTDRGQLPAGPGGVFPGHLQQQNLPQSCFICCPRSLPGELVLLSSLPLSLSLACLLSCTFRGCLMWWWLCPAQTWQGSCRGSSSSLSDQLSLEREGQGIFSPSMYKKKQSSLSFSGDGLVGFFCLWKQWD

SEQ ID NO: 745435 - protein, 146 aa, Homo sapiens
WEYNLDGWLPGGPKGQASLTPPLFARCTPSTDGQGPASSRPRRSFPRASSAAEPSTELLHLLPKEPSRGISPPLFSPPQPFSRLPSELHFPWVPYVVVVVPSTDLAGFLPWLFLLPQRPALPGTGGTGNFFPLYVQKKTKLSFLLW

SEQ ID NO: 745436 - protein, 286 aa, Homo sapiens
SRLRQNRCLAPGSGGSTRSAAGSGCPEAAAFAEFARWPPITMSAFDTNPFADPVDVNPFQDPSVTQLTNAPQGGLAEFNPFSETNAATTVPVTQLPGSSQPAVLQPSVEPTQPTPQAVVSAAQAGLLRQQEELDRKAAELERKERELQNTVANLHVRQNNWPPLPSWCPVKPCFYQDFSTEIPADYQRICKMLYYLWMLHSVTLFLNLLACLAWFSGNSSKGVDFGLSILWFLIFTPCAFLCWYRPIYKAFRSDNSFSFFVFFFVFFCQIGIYIIQLVGIPGLGDR

SEQ ID NO: 745437 - protein, 139 aa, Homo sapiens
SRLRQNRCLAPGSGGSTRSAAGSGCPEAAAFAEFARWPPITMSAFDTNPFADPVDVNPFQDPSVTQLTNAPQGGLAEFNPFSETNAATTVPVTQLPGSSQPAVLQPSVEPTQPTPQVVLTKNSGLFSPVRESSRPVAEP

SEQ ID NO: 745438 - protein, 413 aa, Homo sapiens
SRLRQNRCLAPGSGGSTRSAAGSGCPEAAAFAEFARWPPITMSAFDTNPFADPVDVNPFQDPSVTQLTNAPQGGLAEFNPFSETNAATTVPVTQLPGSSQPAVLQPSVEPTQPTPQLLLRQASKFPPAQFLAVSELSERQMLLGGESILRDSYMRKLPKAVVSAAQAGLLRQQEELDRKAAELERKERELQNTVANLHVRQNNWPPLPSWCPVKPCFYQDFSTEIPADYQRICKMLYYLWMLHSVTLFLNLLACLAWFSGNSSKGVDFGLSILWFLIFTPCAFLCWYRPIYKAFRSDNSFSFFVFFFVFFCQIGIYIIQLVGIPGLGDSGWIAALSTLDNHSLAISVIMMVVAGFFTLCAVLSVFLLQRVHSLYRRTGASFQQAQEEFSQGIFSSRTFHRAASSAAQGAFQGN

SEQ ID NO: 745439 - protein, 277 aa, Homo sapiens
SRLRQNRCLAPGSGGSTRSAAGSGCPEAAAFAEFARWPPITMSAFDTNPFADPVDVNPFQDPSVTQLTNAPQGGLAEFNPFSETNAATTVPVTQLPGSSQPAVLQPSVEPTQPTPQAVVSAAQAGLLRQQEELDRKAAELERKERELQNTVANLHVRQNNWPPLPSWCPVKPCFYQDFSTEIPADYQRICKMLYYLWMLHSVTLFLNLLACLAWFSGNSSKGVDFGLSILWFLIFTPCAFLCWYRPIYKAFRDLHHPVGWHPWPGGQRLDCSPVYTG

SEQ ID NO: 745440 - protein, 155 aa, Homo sapiens
MRRGWEVRRFGLSILWFLIFTPCAFLCWYRPIYKAFRSDNSFSFFVFFFVFFCQIGIYIIQLVGIPGLGDSGWIAALSTLDNHSLAISVIMMVVAGFFTLCAVLSVFLLQRVHSLYRRTGASFQQAQEEFSQGIFSSRTFHRAASSAAQGAFQGN

SEQ ID NO: 745441 - protein, 232 aa, Homo sapiens
MGPPGVQVNEDRSACRVHVLLPWRGGEEEAIEEAAAEVLKGKFVGQQRKVAREQVEEDVAKGQVAKGLHQPGQQAEERVLVPLLGDVQDVVQPHLAGHALLLQKLSEAFGKCVWICDWGFLLSRKFLIHIESVVTTRKDMSIGRNLVMSSTSILGSLKNHSLAISVIMMVVAGFFTLCAVLSVFLLQRVHSLYRRTGASFQQAQEEFSQGIFSSRTFHRAASSAAQGAFQGN

SEQ ID NO: 745442 - protein, 340 aa, Homo sapiens
SRLRQNRCLAPGSGGSTRSAAGSGCPEAAAFAEFARWPPITMSAFDTNPFADPVDVNPFQDPSVTQLTNAPQGGLAEFNPFSETNAATTVPVTQLPGSSQPAVLQPSVEPTQPTPQAVVSAAQAGLLRQQEELDRKAAELERKERELQNTVANLHVRQNNWPPLPSWCPVKPCFYQDFSTEIPADYQRICKMLYYLWMLHSVTLFLNLLACLAWFSGNSSKGVDFGLSILWFLIFTPCAFLCWYRPIYKAFRSDNSFSFFVFFFVFFCQIGIYIIQLVGIPGLGDSGWIAALSTLDNHSLAISVIMMVVAGFFTLCAVLSVFLLQRVHSLYRRRVSMVPT

SEQ ID NO: 745443 - protein, 88 aa, Homo sapiens
EDPPRPPPAQGISPPLFSPPQPFSRLPSELHFPWVPYVVVVVPSTDLAGFLPWLFLLPQRPALPGTGGTGNFFPLYVQKKTKLSFLLW

SEQ ID NO: 745444 - protein, 122 aa, Homo sapiens
RLELPAIPAQIFLGGSRILLSLEAVGLKFSSSCAHTDTPTQLGSQADLGPSQLELSARVLGLDSPTLQAWPESGFLDTAQSFLPGLGISLSQVLVDRSVPQVTPVVSRLPEKAGCLKLFSAS

SEQ ID NO: 745445 - protein, 132 aa, Homo sapiens
LVGFFSPTASRDKRILPNHHQRRKESRILLSLEAVGLKFSSSCAHTDTPTQLGSQADLGPSQLELSARVLGLDSPTLQAWPESGFLDTAQSFLPGLGISLSQVLVDRSVPQVTPVVSRLPEKAGCLKLFSAS

SEQ ID NO: 745446 - protein, 275 aa, Homo sapiens
MSAEVKVTGQNQEQFLLLAKSAKGAALATLIHQVLEAPGVYVFGELLDMPNVRELAESDFASTFRLLTVFAYGTYADYLAEARNLPPLTEAQKNKLRHLSVVTLAAKVKCIPYAVLLEALALRNVRQLEDLVIEAVYADVLRGSLDQRNQRLEVDYSIGRDIQRQDLSAIARTLQEWCVGCEVVLSGIEEQVSRANQHKEQQLGLKQQIESEVANLKKTIKVTTAAAAAATSQDPEQHLTELREPAPGTNQRQPSKKASKGKGLRGSAKIWSKSN

SEQ ID NO: 745447 - protein, 275 aa, Homo sapiens; identical to SEQ ID NO: 745446

SEQ ID NO: 745448 - protein, 275 aa, Homo sapiens; identical to SEQ ID NO: 745446

SEQ ID NO: 745449 - protein, 275 aa, Homo sapiens; identical to SEQ ID NO: 745446

SEQ ID NO: 745450 - protein, 302 aa, Homo sapiens
AGQQWRAEGASSGSGHPEPKSPTLSAVMSAEVKVTGQNQEQFLLLAKSAKGAALATLIHQVLEAPGVYVFGELLDMPNVRELAESDFASTFRLLTVFAYGTYADYLAEARNLPPLTEAQKNKLRHLSVVTLAAKVKCIPYAVLLEALALRNVRQLEDLVIEAVYADVLRGSLDQRNQRLEVDYSIGRDIQRQDLSAIARTLQEWCVGCEVVLSGIEEQVSRANQHKEQQLGLKQQIESEVANLKKTIKVTTAAAAAATSQDPEQHLTELREPAPGTNQRQPSKKASKGKGLRGSAKIWSKSN

SEQ ID NO: 745451 - protein, 656 aa, Homo sapiens
QRANPIYWNFTDNKLRGRLPPPLKHAILSALRAQHRDKTPTPHVPRGQHSRGVGGRGGVLYARLGSWDRREDVHPHLLAQSLSPGPGAAPSPWGGLADRAHATMSRQEVARKRGLGAPWRGREDKGAMLWPQRVQMEVSAVYIQEGWREASFSLGCAWGQERGEVQLALPCQGQGPGQPCHLSGHSELELGYSLARPMMVRMYRKMLMMSVYRFSAANTYSSGLRDSCLFPSSSWVSTARKQVKSRAPSEAYTISRMRFRMKMQRMAKMKSTTMLTRSTPMHEVKSVAGLHGEDDDGEADGCGDAHGHDDCLGVVEAGDHPHHVRQAGGQDRQCNKVPGVLSPEVPTTAEDDERDEEDSIGDIVVQTFSRTKPFTSATKVNTDTVDRVTDSCKVSTRNTLRMKACRMLLYPSWWQGSPGCHSRMGDPPPGSFHAGVSQGLVLGRPVAVHRGWGGRGSGDMAPGGSPLGGRGPVGSPLVGRGPVGSPLGGRDPVGSPLGGRGWGHGGTLADRRGRAGKGAVGKGPQGREAEHRGAWVAGAPPDIQGWGEDSCPQTPKNSFHGTWPRVPRSAPVAGRRRPVRTVSAARPRGDGQMRPHPHPLGATLQGGGRKGLEQLPEVTERRPRPVRWRSKLPGSGPQSLTQALDILSPSPPHSVQ

SEQ ID NO: 745452 - protein, 670 aa, Homo sapiens
QRANPIYWNFTDNKLRGRLPPPLKHAILSALRAQHRDKTPTPHVPRGQHSRGVGGRGGVLYARLGSWDRREDVHPHLLAQSLSPGPGAAPSPWGGLADRAHATMSRQEVARKRGLGAPWRGREDKGAMLWPQRVQMEVSAVYIQEGWREASFSLGCAWGQERGEVQLALPCQGQGPGQPCHLSGHSELELGYSLARPMMVRMYRKMLMMSVYRFSAANTYSSGLRDSCLFPSSSWVSTARKQVKSRAPSEAYTISRMRFRMKMQRMAKMKSTTMLTRSTPMHEVKSVAGLHGEDDDGEADGCGDAHGHDDCLGVVEAGDHPHHVRQAGGQDRQCNKVPGVLSPEVPTTAEDDERDEEDSIGDIVVQTFSRTKPFTSATKVNTDTVDRVTDSCKVSTRNTLRMKACRMLLYPSWWQGSPGCHSRMGDPPPGSFHAGVSQGLVLGRPVAVHRGWGGRGSGDMAPGGSPLGGRGPVGSPLVGRGPVGSPLGGRDPVGSPLGGRGWGHGGTLADRRGRAGKGAVGKGPQGREAEHRGAWVAGAPPDIQGWGEDSCPQTPKNSFHGTWPRVPRSAPVAGRRRPVRTVSAARPRGDGQMRPHPHPLGATLQGGGRKGLEQLPEVTERRPRPVRWRSKLPGSGPQSLTQGTTKQSAGAHGRWAVSLREGAEPRLWTS

SEQ ID NO: 745453 - protein, 104 aa, Homo sapiens
VRGSNGELRERRQGGHHATPISPLHPVSSGHPEPKSPTLSAVMSAEVKVTGQNQEQFLLLAKSAKGAALATLIHQVLEAPGVYVFGELLDMPNVRELKPGIFLH

SEQ ID NO: 745454 - protein, 263 aa, Homo sapiens
MSAEVKVTGQNQEQFLLLAKSAKGAALATLIHQVLEAPGVYVFGELLDMPNVRELAESDFASTFRLLTVFAYGTYADYLAEARNLPPLTEAQKNKLRHLSVVTLAAKVKCIPYAVLLEALALRNVRQLEDLVIEAVYADVLRGSLDQRNQRLEVDYSIGRDIQRQDLSAIARTLQEWCVGCEVVLSGIEEQVSRANQHKEQQLGLKQQIESEVANLKKTIKVTTAAAAAATSQDPEQHLTELREPAPGTNQRQPSKKASKGKG

SEQ ID NO: 745455 - protein, 829 aa, Homo sapiens
QRANPIYWNFTDNKLRGRLPPPLKHAILSALRAQHRDKTPTPHVPRGQHSRGVGGRGGVLYARLGSWDRREDVHPHLLAQSLSPGPGAAPSPWGGLADRAHATMSRQEVARKRGLGAPWRGREDKGAMLWPQRVQMEVSAVYIQEGWREASFSLGCAWGQERGEVQLALPCQGQGPGQPCHLSGHSELELGYSLARPMMVRMYRKMLMMSVYRFSAANTYSSGLRDSCLFPSSSWVSTARKQVKSRAPSEAYTISRMRFRMKMQRMAKMKSTTMLTRSTPMHEVKSVAGLHGEDDDGEADGCGDAHGHDDCLGVVEAGDHPHHVRQAGGQDRQCNKVPGVLSPEVPTTAEDDERDEEDSIGDIVVQTFSRTKPFTSATKVNTDTVDRVTDSCKVSTRNTLRMKACRMLLYPSWWQGSPGCHSRMGDPPPGSFHAGVSQGLVLGRPVAVHRGWGGRGSGDMAPGGSPLGGRGPVGSPLVGRGPVGSPLGGRDPVGSPLGGRGWGHGGTLADRRGRAGKGAVGKGPQGREAEHRGAWVAGAPPDIQGWGEDSCPQTPKNSFHGTWPRVPRSAPVAGRRRPVRTVSAARPRGDGQMRPHPHPLGATLQGGGRKGLEQLPEVTERRPRPVRWRSKLPAEARNLPPLTEAQKNKLRHLSVVTLAAKVKCIPYAVLLEALALRNVRQLEDLVIEAVYADVLRGSLDQRNQRLEVDYSIGRDIQRQDLSAIARTLQEWCVGCEVVLSGIEEQVSRANQHKEQQLGLKQQIESEVANLKKTIKVTTAAAAAATSQDPEQHLTELREPAPGTNQRQPSKKASKGKGLRGSAKIWSKSN

SEQ ID NO: 745456 - protein, 275 aa, Homo sapiens; identical to SEQ ID NO: 745446

SEQ ID NO: 745457 - protein, 904 aa, Homo sapiens
QRANPIYWNFTDNKLRGRLPPPLKHAILSALRAQHRDKTPTPHVPRGQHSRGVGGRGGVLYARLGSWDRREDVHPHLLAQSLSPGPGAAPSPWGGLADRAHATMSRQEVARKRGLGAPWRGREDKGAMLWPQRVQMEVSAVYIQEGWREASFSLGCAWGQERGEVQLALPCQGQGPGQPCHLSGHSELELGYSLARPMMVRMYRKMLMMSVYRFSAANTYSSGLRDSCLFPSSSWVSTARKQVKSRAPSEAYTISRMRFRMKMQRMAKMKSTTMLTRSTPMHEVKSVAGLHGEDDDGEADGCGDAHGHDDCLGVVEAGDHPHHVRQAGGQDRQCNKVPGVLSPEVPTTAEDDERDEEDSIGDIVVQTFSRTKPFTSATKVNTDTVDRVTDSCKVSTRNTLRMKACRMLLYPSWWQGSPGCHSRMGDPPPGSFHAGVSQGLVLGRPVAVHRGWGGRGSGDMAPGGSPLGGRGPVGSPLVGRGPVGSPLGGRDPVGSPLGGRGWGHGGTLADRRGRAGKGAVGKGPQGREAEHRGAWVAGAPPDIQGWGEDVVPRHQKTLFMGHGLGFRGPPRWPGAAGRYARCPLRGRAVMADAPAPAPARSDSSGRWQERLGTAAGGDGAAAPPGALEVEASSSGHPEPKSPTLSAVMSAEVKVTGQNQEQFLLLAKSAKGAALATLIHQVLEAPGVYVFGELLDMPNVRELAESDFASTFRLLTVFAYGTYADYLAEARNLPPLTEAQKNKLRHLSVVTLAAKVKLEDLVIEAVYADVLRGSLDQRNQRLEVDYSIGRDIQRQDLSAIARTLQEWCVGCEVVLSGIEEQVSRANQHKEQQLGLKQQIESEVANLKKTIKVTTAAAAAATSQDPEQHLTELREPAPGTNQRQPSKKASKGKGLRGSAKIWSKSN

SEQ ID NO: 745458 - protein, 656 aa, Homo sapiens; identical to SEQ ID NO: 745451

SEQ ID NO: 745459 - protein, 670 aa, Homo sapiens; identical to SEQ ID NO: 745452

SEQ ID NO: 745460 - protein, 275 aa, Homo sapiens; identical to SEQ ID NO: 745446

SEQ ID NO: 745461 - protein, 275 aa, Homo sapiens; identical to SEQ ID NO: 745446

SEQ ID NO: 745462 - protein, 275 aa, Homo sapiens; identical to SEQ ID NO: 745446

SEQ ID NO: 745463 - protein, 275 aa, Homo sapiens; identical to SEQ ID NO: 745446

SEQ ID NO: 745464 - protein, 317 aa, Homo sapiens
VRGSNGELRERRQGGHHATPISPLHPVSSGHPEPKSPTLSAVMSAEVKVTGQNQEQFLLLAKSAKGAALATLIHQVLEAPGVYVFGELLDMPNVRELAESDFASTFRLLTVFAYGTYADYLAEARNLPPLTEAQKNKLRHLSVVTLAAKVKCIPYAVLLEALALRNVRQLEDLVIEAVYADVLRGSLDQRNQRLEVDYSIGRDIQRQDLSAIARTLQEWCVGCEVVLSGIEEQVSRANQHKEQQLGLKQQIESEVANLKKTIKVTTAAAAAATSQDPEQHLTELREPAPGTNQRQPSKKASKGKGLRGSAKIWSKSN

SEQ ID NO: 745465 - protein, 269 aa, Homo sapiens
MEPILWIHILEVSTNGESSHAPKFIHQVLEAPGVYVFGELLDMPNVRELAESDFASTFRLLTVFAYGTYADYLAEARNLPPLTEAQKNKLRHLSVVTLAAKVKCIPYAVLLEALALRNVRQLEDLVIEAVYADVLRGSLDQRNQRLEVDYSIGRDIQRQDLSAIARTLQEWCVGCEVVLSGIEEQVSRANQHKEQQLGLKQQIESEVANLKKTIKVTTAAAAAATSQDPEQHLTELREPAPGTNQRQPSKKASKGKGLRGSAKIWSKSN

SEQ ID NO: 745466 - protein, 345 aa, Homo sapiens
AGQQWRAEGASSGSGHPEPKSPTLSAVMSAEVKVTGQNQEQFLLLAKSAKGAALATLIHQVLEAPGVYVFGELLDMPNVREGRNWMSMEQEGIVVWENSVNKSLKVEMSPSYVKSDQRGRELLLLAESDFASTFRLLTVFAYGTYADYLAEARNLPPLTEAQKNKLRHLSVVTLAAKVKCIPYAVLLEALALRNVRQLEDLVIEAVYADVLRGSLDQRNQRLEVDYSIGRDIQRQDLSAIARTLQEWCVGCEVVLSGIEEQVSRANQHKEQQLGLKQQIESEVANLKKTIKVTTAAAAAATSQDPEQHLTELREPAPGTNQRQPSKKASKGKGLRGSAKIWSKSN

SEQ ID NO: 745467 - protein, 257 aa, Homo sapiens
MSAEVKVTGQNQEQFLLLAKSAKGAALATLIHQVLEAPGVYVFGELLDMPNVRELAESDFASTFRLLTVFAYGTYADYLAEARNLPPLTEAQKNKLRHLSVVTLAAKVKLEDLVIEAVYADVLRGSLDQRNQRLEVDYSIGRDIQRQDLSAIARTLQEWCVGCEVVLSGIEEQVSRANQHKEQQLGLKQQIESEVANLKKTIKVTTAAAAAATSQDPEQHLTELREPAPGTNQRQPSKKASKGKGLRGSAKIWSKSN

SEQ ID NO: 745468 - protein, 238 aa, Homo sapiens
MFVLVEETLVLERGTKVQEKKAENKRRGEDEDTADLAESDFASTFRLLTVFAYGTYADYLAEARNLPPLTEAQKNKLRHLSVVTLAAKVKLEDLVIEAVYADVLRGSLDQRNQRLEVDYSIGRDIQRQDLSAIARTLQEWCVGCEVVLSGIEEQVSRANQHKEQQLGLKQQIESEVANLKKTIKVTTAAAAAATSQDPEQHLTELREPAPGTNQRQPSKKASKGKGLRGSAKIWSKSN

SEQ ID NO: 745469 - protein, 142 aa, Homo sapiens
DLEDPFRLALTLKLLDMPNVRELAESDFASTFRLLTVFAYGTYADYLAEARNLPPLTEAQKNKLRHLSVVTLAAKVKCIPYAVLLEALALRNVRQLEDLVIEAVYADVLRGSLDQRNQRLEVDYSIGRDIQRQDLSAIVCGL

SEQ ID NO: 745470 - protein, 228 aa, Homo sapiens
MSAEVKVTGQNQEQFLLLAKSAKGAALATLIHQVLEAPGVYVFGELLDMPNVRELAESDFASTFRLLTVFAYGTYADYLAEARNLPPLTEAQKNKLRHLSVVTLAAKVKCIPYAVLLEALALRNVRQLEDLVIEAVYADVLRGSLDQRNQRLEVDYSIGRDIQRQDLSAIARTLQEWCVGCEVVLSGIEEQVSRANQHKEQQLGLKQQIESEVPPLRNPKDTGAAARP

SEQ ID NO: 745471 - protein, 219 aa, Homo sapiens
MSAEVKVTGQNQEQFLLLAKSAKGAALATLIHQVLEAPGVYVFGELLDMPNVRELAESDFASTFRLLTVFAYGTYADYLAEARNLPPLTEAQKNKLRHLSVVTLAAKVKCIPYAVLLEALALRNVRQLEDLVIEAVYADVLRGSLDQRNQRLEVDYSIGRDIQRQDLSAIARTLQEWCVGCEVVLSGIEEQVSRANQHKEQQLGLKQQIESEGANLKKP

SEQ ID NO: 745472 - protein, 1258 aa, Homo sapiens
MITSELPVLQDSTNETTAHSDAGSELEETEVKGKRKRGRPGRPPSTNKKPRKSPGEKSRIEAGIRGAGRGRANGHPQQNGEGEPVTLFEVVKLGKSAMQSVVDDWIESYKQDRDIALLDLINFFIQCSGCRGTVRIEMFRNMQNAEIIRKMTEEFDEDSGDYPLTMPGPQWKKFRSNFCEFIGVLIRQCQYSIIYDEYMMDTVISLLTGLSDSQVRAFRHTSTLAAMKLMTALVNVALNLSIHQDNTQRQYEAERNKMIGKRANERLELLLQKRKELQENQDEIENMMNSIFKGIFVHRYRDAIAEIRAICIEEIGVWMKMYSDAFLNDSYLKYVGWTLHDRQGEVRLKCLKALQSLYTNRELFPKLELFTNRFKDRIVSMTLDKEYDVAVEAIRLVTLILHGSEEALSNEDCENVYHLVYSAHRPVAVAAGEFLHKKLFSRHDPQAEEALAKRRGRNSPNGNLIRMLVLFFLESELHEHAAYLVDSLWESSQELLKDWECMTELLLEEPVQGEEAMSDRQESALIELMVCTIRQAAEAHPPVGRGTGKRVLTAKERKTQIDDRNKLTEHFIITLPMLLSKYSADAEKVANLLQIPQYFDLEIYSTGRMEKHLDALLKQIKFVVEKHVESDVLEACSKTYSILCSEEYTIQNRVDIARSQLIDEFVDRFNHSVEDLLQEGEEADDDDIYNVLSTLKRLTSFHNAHDLTKWDLFGNCYRLLKTGIEHGAMPEQIVVQALQCSHYSILWQLVKITDGSPSKEDLLVLRKTVKSFLAVCQQCLSNVNTPVKEQAFMLLCDLLMIFSHQLMTGGREGLQPLVFNPDTGLQSELLSFVMDHVFIDQDEENQSMEGDEEDEANKIEALHKRRNLLAAFSKLIIYDIVDMHAAADIFKHYMKYYNDYGDIIKETLSKTRQIDKIQCAKTLILSLQQLFNELVQEQGPNLDRTSAHVSGIKELARRFALTFGLDQIKTREAVATLHKDGIEFAFKYQNQKGQEYPPPNLAFLEVLSEFSSKLLRQDKKTVHSYLEKFLTEQMMERREDVWLPLISYRNSLVTGGEDDRMSVNSGSSSSKTSSVRNKKGRPPLHKKRVEDESLDNTWLNRTDTMIQTPGPLPAPQLTSTVLRENSRPMGDQIQEPESEHGSEPDFLHNPQMQISWLGQPKLEDLNRKDRTGMNYMKVRTGVRHAVRGLMEEDAEPIFEDVMMSSRSQLEDMNEEFEDTMVIDLPPSRNRRERAELRPDFFDSAAIIEDDSGFGMPMF

SEQ ID NO: 745473 - protein, 1258 aa, Homo sapiens; identical to SEQ ID NO: 745472

SEQ ID NO: 745474 - protein, 1258 aa, Homo sapiens; identical to SEQ ID NO: 745472

SEQ ID NO: 745475 - protein, 482 aa, Homo sapiens
MITSELPVLQDSTNETTAHSDAGSELEETEVKGKRKRGRPGRPPSTNKKPRKSPGEKSRIEAGIRGAGRGRANGHPQQNGEGEPVTLFEVVKLGKSAMQSVVDDWIESYKQDRDIALLDLINFFIQCSGCRGTVRIEMFRNMQNAEIIRKMTEEFDEDSGDYPLTMPGPQWKKFRSNFCEFIGVLIRQCQYSIIYDEYMMDTVISLLTGLSDSQVRAFRHTSTLAAMKLMTALVNVALNLSIHQDNTQRQYEAERNKMIGKRANERLELLLQKRKELQENQDEIENMMNSIFKGIFVHRYRDAIAEIRAICIEEIGVWMKMYSDAFLNDSYLKYVGWTLHDRQGEVRLKCLKALQSLYTNRELFPKLELFTNRFKDRIVSMTLDKEYDVAVEAIRLVTLILHGSEEALSNEDCENVYHLVYSAHRPVAVAAGEFLHKKLFSRHDPQAEEALAKRRGRNSPNGNLIRMLVLFFLESEVKNVLR

SEQ ID NO: 745476 - protein, 232 aa, Homo sapiens
MITSELPVLQDSTNETTAHSDAGSELEETEVKGKRKRGRPGRPPSTNKKPRKSPGEKSRIEAGIRGAGRGRANGHPQQNGEGEPVTLFEVVKLGKSAMQSVVDDWIESYKQDRDIALLDLINFFIQCSGCRGTVRIEMFRNMQNAEIIRKMTEEFDEDSGDYPLTMPGPQWKKFRSNFCEFIGVLIRQCQYSIIYDEYMMDTVISLLTGLSDSQVRAFRHTSTLAGQVLGTR

SEQ ID NO: 745477 - protein, 105 aa, Homo sapiens
MITSELPVLQDSTNETTAHSDAGSELEETEVKGKRKRGRPGRPPSTNKKPRKSPGEKSRIEAGIRGAGRGRANGHPQQNGEGEPVTLFEVVKLGKSAMQRCGPFK

SEQ ID NO: 745478 - protein, 1258 aa, Homo sapiens; identical to SEQ ID NO: 745472

SEQ ID NO: 745479 - protein, 1258 aa, Homo sapiens; identical to SEQ ID NO: 745472

SEQ ID NO: 745480 - protein, 940 aa, Homo sapiens
MKMYSDAFLNDSYLKYVGWTLHDRQGEVRLKCLKALQSLYTNRELFPKLELFTNRFKDRIVSMTLDKEYDVAVEAIRLVTLILHGSEEALSNEDCENVYHLVYSAHRPVAVAAGEFLHKKLFSRHDPQAEEALAKRRGRNSPNGNLIRMLVLFFLESELHEHAAYLVDSLWESSQELLKDWECMTELLLEEPVQGEEAMSDRQESALIELMVCTIRQAAEAHPPVGRGTGKRVLTAKERKTQIDDRNKLTEHFIITLPMLLSKYSADAEKVANLLQIPQYFDLEIYSTGRMEKHLDALLKQIKFVVEKHVESDVLEACSKTYSILCSEEYTIQNRVDIARSQLIDEFVDRFNHSVEDLLQEGEEADDDDIYNVLSTLKRLTSFHNAHDLTKWDLFGNCYRLLKTGIEHGAMPEQIVVQALQCSHYSILWQLVKITDGSPSKEDLLVLRKTVKSFLAVCQQCLSNVNTPVKEQAFMLLCDLLMIFSHQLMTGGREGLQPLVFNPDTGLQSELLSFVMDHVFIDQDEENQSMEGDEEDEANKIEALHKRRNLLAAFSKLIIYDIVDMHAAADIFKHYMKYYNDYGDIIKETLSKTRQIDKIQCAKTLILSLQQLFNELVQEQGPNLDRTSAHVSGIKELARRFALTFGLDQIKTREAVATLHKDGIEFAFKYQNQKGQEYPPPNLAFLEVLSEFSSKLLRQDKKTVHSYLEKFLTEQMMERREDVWLPLISYRNSLVTGGEDDRMSVNSGSSSSKTSSVRNKKGRPPLHKKRVEDESLDNTWLNRTDTMIQTPGPLPAPQLTSTVLRENSRPMGDQIQEPESEHGSEPDFLHNPQMQISWLGQPKLEDLNRKDRTGMNYMKVRTGVRHAVRGLMEEDAEPIFEDVMMSSRSQLEDMNEEFEDTMVIDLPPSRNRRERAELRPDFFDSAAIIEDDSGFGMPMF

SEQ ID NO: 745481 - protein, 836 aa, Homo sapiens
MVHALSFALESFFTAKLFSRHDPQAEEALAKRRGRNSPNGNLIRMLVLFFLESELHEHAAYLVDSLWESSQELLKDWECMTELLLEEPVQGEEAMSDRQESALIELMVCTIRQAAEAHPPVGRGTGKRVLTAKERKTQIDDRNKLTEHFIITLPMLLSKYSADAEKVANLLQIPQYFDLEIYSTGRMEKHLDALLKQIKFVVEKHVESDVLEACSKTYSILCSEEYTIQNRVDIARSQLIDEFVDRFNHSVEDLLQEGEEADDDDIYNVLSTLKRLTSFHNAHDLTKWDLFGNCYRLLKTGIEHGAMPEQIVVQALQCSHYSILWQLVKITDGSPSKEDLLVLRKTVKSFLAVCQQCLSNVNTPVKEQAFMLLCDLLMIFSHQLMTGGREGLQPLVFNPDTGLQSELLSFVMDHVFIDQDEENQSMEGDEEDEANKIEALHKRRNLLAAFSKLIIYDIVDMHAAADIFKHYMKYYNDYGDIIKETLSKTRQIDKIQCAKTLILSLQQLFNELVQEQGPNLDRTSAHVSGIKELARRFALTFGLDQIKTREAVATLHKDGIEFAFKYQNQKGQEYPPPNLAFLEVLSEFSSKLLRQDKKTVHSYLEKFLTEQMMERREDVWLPLISYRNSLVTGGEDDRMSVNSGSSSSKTSSVRNKKGRPPLHKKRVEDESLDNTWLNRTDTMIQTPGPLPAPQLTSTVLRENSRPMGDQIQEPESEHGSEPDFLHNPQMQISWLGQPKLEDLNRKDRTGMNYMKVRTGVRHAVRGLMEEDAEPIFEDVMMSSRSQLEDMNEEFEDTMVIDLPPSRNRRERAELRPDFFDSAAIIEDDSGFGMPMF

SEQ ID NO: 745482 - protein, 1028 aa, Homo sapiens
MITSELPVLQDSTNETTAHSDAGSELEETEVKGKRKRGRPGRPPSTNKKPRKSPGEKSRIEAGIRGAGRGRANGHPQQNGEGEPVTLFEVVKLGKSAMQSVVDDWIESYKQDRDIALLDLINFFIQCSGCRGTVRIEMFRNMQNAEIIRKMTEEFDEDSGDYPLTMPGPQWKKFRSNFCEFIGVLIRQCQYSIIYDEYMMDTVISLLTGLSDSQVRAFRHTSTLAAMKLMTALVNVALNLSIHQDNTQRQYEAERNKMIGKRANERLELLLQKRKELQENQDEIENMMNSIFKGIFVHRYRDAIAEIRAICIEEIGVWMKMYSDAFLNDSYLKYVGWTLHDRQGEVRLKCLKALQSLYTNRELFPKLELFTNRFKDRIVSMTLDKEYDVAVEAIRLVTLILHGSEEALSNEDCENVYHLVYSAHRPVAVAAGEFLHKKLFSRHDPQAEEALAKRRGRNSPNGNLIRMLVLFFLESELHEHAAYLVDSLWESSQELLKDWECMTELLLEEPVQGEEAMSDRQESALIELMVCTIRQAAEAHPPVGRGTGKRVLTAKERKTQIDDRNKLTEHFIITLPMLLSKYSADAEKVANLLQIPQYFDLEIYSTGRMEKHLDALLKQIKFVVEKHVESDVLEACSKTYSILCSEEYTIQNRVDIARSQLIDEFVDRFNHSVEDLLQEGEEADDDDIYNVLSTLKRLTSFHNAHDLTKWDLFGNCYRLLKTGIEHGAMPEQIVVQALQCSHYSILWQLVKITDGSPSKEDLLVLRKTVKSFLAVCQQCLSNVNTPVKEQAFMLLCDLLMIFSHQLMTGGREGLQPLVFNPDTGLQSELLSFVMDHVFIDQDEENQSMEGDEEDEANKIEALHKRRNLLAAFSKLIIYDIVDMHAAADIFKHYMKYYNDYGDIIKETLSKTRQIDKIQCAKTLILSLQQLFNELVQEQGPNLDRTSAHVSGIKELARRFALTFGLDQIKTREAVATLHKDGIEFAFKYQNQKGQEYPPPNLAFLEVLSEFSSTSFCVNSCFQFSWVYI

SEQ ID NO: 745483 - protein, 720 aa, Homo sapiens
MITSELPVLQDSTNETTAHSDAGSELEETEVKGKRKRGRPGRPPSTNKKPRKSPGEKSRIEAGIRGAGRGRANGHPQQNGEGEPVTLFEVVKLGKSAMQSVVDDWIESYKQDRDIALLDLINFFIQCSGCRGTVRIEMFRNMQNAEIIRKMTEEFDEDSGDYPLTMPGPQWKKFRSNFCEFIGVLIRQCQYSIIYDEYMMDTVISLLTGLSDSQVRAFRHTSTLAAMKLMTALVNVALNLSIHQDNTQRQYEAERNKMIGKRANERLELLLQKRKELQENQDEIENMMNSIFKGIFVHRYRDAIAEIRAICIEEIGVWMKMYSDAFLNDSYLKYVGWTLHDRQGEVRLKCLKALQSLYTNRELFPKLELFTNRFKDRIVSMTLDKEYDVAVEAIRLVTLILHGSEEALSNEDCENVYHLVYSAHRPVAVAAGEFLHKKLFSRHDPQAEEALAKRRGRNSPNGNLIRMLVLFFLESELHEHAAYLVDSLWESSQELLKDWECMTELLLEEPVQGEEAMSDRQESALIELMVCTIRQAAEAHPPVGRGTGKRVLTAKERKTQIDDRNKLTEHFIITLPMLLSKYSADAEKVANLLQIPQYFDLEIYSTGRMEKHLDALLKQIKFVVEKHVESDVLEACSKTYSILCSEEYTIQNRVDIARSQLIDEFVDRFNHSVEDLLQEGEEADDDDIYNVLSTLKRLTSFHKYVILFKVKATRWLMPVT

SEQ ID NO: 745484 - protein, 301 aa, Homo sapiens [sequence omitted]

SEQ ID NO: 745485 - protein, 108 aa, Homo sapiens
MITSELPVLQDSTNETTAHSDAGSELEETEVKGKRKRGRPGRPPSTNKKPRKSPGEKSRIEAGIRGAGRGRANGHPQQNGEGEPVTLFEVVKLGKSAMQVNFKFLFHV

SEQ ID NO: 745486 - protein, 101 aa, Homo sapiens
EFSFLNHLLNWQKLKKMDKLTAGRDVGKGTVMHCFWTCVLCVVTAFLENNLAISTISKLNTRFDPEILLQELYCREIKLQCVRTCMYIPPPRMFIVVFFWK

SEQ ID NO: 745487 - protein, 161 aa, Homo sapiens
CLGLVGRASAPAEPDSACCMELPAAAGDAVRSPAAAAALIFPGGSGELELALEEELALLAAGERPSDPGEHPQAEPGSLAEGAGPQPPPSQDPELLSVIRQKEKDLVLAARLGKALLERNQDMSRQYEQMHKELTDKLETRSHSIPQAAVEWLIMAYCTLK

SEQ ID NO: 745488 - protein, 104 aa, Homo sapiens
MTALKEERDRLRVTSEDKEPKEQLQKAIRDRDEAIAKKNAVELELAKCRMDMMSLNSQLLDAIQQKLNLSQQLEAWQFASSGLFTIWLLWFLISGLSQFPYQQL

SEQ ID NO: 745489 - protein, 222 aa, Homo sapiens
ESSETSSAKDVPAGSLRTALNELKRLIQSIVDGMEPTGSRRLDDDSLEEQIRQTSEDSRALRELMEGERGKLRQSLEELQRLHSQVTLLSVEMTALKEERDRLRVTSEDKEPKEQLQKAIRDRDEAIAKKNAVELELAKCRMDMMSLNSQLLDAIQQKLNLSQQLEAWQDDMHRVIDRQLMDTHLKERSQPAAALCRGHSAGRGDEPSIAEGKRLFSFFRKI

SEQ ID NO: 745490 - protein, 338 aa, Homo sapiens
MSWRGSRFICGKQIEKNHGLSRNCRNRTKGYWISSAGKLRLGFTILPQPFLYIENKTTNSSVTGGKRTSLISSLSTDVLMGAVPCLHVFQASEVERQLSMQVHALREDFREKNSSTNQHIIRLESLQAEIKMLSDRKRELEHRLSATLEENDLLQGTVEELQDRVLILERQGHDKDLQLHQSQLELQEVRLSCRQLQVKVEELTEERSLQSSAATSTSLLSEIEQSMEAEELEQEREQVTLLSVEMTALKEERDRLRVTSEDKEPKEQLQKAIRDRDEAIAKKNAVELELAKCRMDMMSLNSQLLDAIQQKLNLSQQLEAWQFASSGLFTIWLLWFLI

SEQ ID NO: 745491 - protein, 549 aa, Homo sapiens
CLGLVGRASAPAEPDSACCMELPAAAGDAVRSPAAAAALIFPGGSGELELALEEELALLAAGERPSDPGEHPQAEPGSLAEGAGPQPPPSQDPELLSVIRQKEKDLVLAARLGKALLERNQDMSRQYEQMHKELTDKLEHLEQEKHELRRRFENREGEWEGRVSELESDVKQLQDELERQQIHLREADREKSRAVQELSEQNQRLLDQLSRKIKTWIYYSPQPFLYIENKTTNSSVTGGKRTSLISSLSTDVLMGAVPCLHVFQASEVERQLSMQVHALREDFREKNSSTNQHIIRLESLQAEIKMLSDRKRELEHRLSATLEENDLLQGTVEELQDRVLILERQGHDKDLQLHQSQLELQEVRLSCRQLQVKVEELTEERSLQSSAATSTSLLSEIEQSMEAEELEQEREQVTLLSVEMTALKEERDRLRVTSEDKEPKEQLQKAIRDRDEAIAKKNAVELELAKCRMDMMSLNSQLLDAIQQKLNLSQQLEAWQDDMHRVIDRQLMDTHLKERSQPAAALCRGHSAGRGDEPSIAEGKRLFSFFRKI

SEQ ID NO: 745492 - protein, 462 aa, Homo sapiens
CLGLVGRASAPAEPDSACCMELPAAAGDAVRSPAAAAALIFPGGSGELELALEEELALLAAGERPSDPGEHPQAEPGSLAEGAGPQPPPSQDPELLSVIRQKEKDLVLAARLGKALLERNQDMSRQYEQMHKELTDKLEHLEQEKHELRRRFENREGEWEGRVSELESDVKQLQDELERQQIHLREADREKSRAVQELSEQNQRLLDQLSRCFRHQKLRDNSPCRSTPSEKTFGRKTHQPTSTVIRLESLQAEIKMLSDRKRELEHRLSATLEENDLLQGTVEELQDRVLILERQGHDKDLQLHQSQLELQEVRLSCRQLQVKVEELTEERSLQSSAATSTSLLSEIEQSMEAEELEQEREQVTLLSVEMTALKEERDRLRVTSEDKEPKEQLQKAIRDRDEAIAKKNAVELELAKCRMDMMSLNSQLLDAIQQKLNLSQQLEAWQFASSGLFTIWLLWFLI

SEQ ID NO: 745493 - protein, 116 aa, Homo sapiens
ESSETSSAKDVPAGSLRTALNELKRLIQSIVDGMEPTGSRRLDDDSLEEQIRQTSEDSRALRELMEGERGKLRQSLEELQRLHSQVSTPTFSSVQGMCTCPWLSWDPFEFLSPISV

SEQ ID NO: 745494 - protein, 96 aa, Homo sapiens
VGPTTDLRVGSGWKKPHRVPPPRNTEDSSNKFHVLPIRPSQKRPKGMTMESSNYSQHSSLWERTWNEVTANNRTPRSPSKAQTPDNKDTSGSESRQ

SEQ ID NO: 745495 - protein, 86 aa, Homo sapiens
RRLQLPVGRAANHSPRPMGVSAGLAFDQWKHYGRWPMGAPTRWPLANGSTQLRLVGAVLLGAAMPLRLRATRGLTRGQEARADPER

SEQ ID NO: 745496 - protein, 86 aa, Homo sapiens; identical to SEQ ID NO: 745495

SEQ ID NO: 745497 - protein, 86 aa, Homo sapiens; identical to SEQ ID NO: 745495

SEQ ID NO: 745498 - protein, 784 aa, Homo sapiens
MPHTLWMVWVLGVIISLSKEESSNQASLSCDRNGICKGSSGSLNSIPSGLTEAVKSLDLSNNRITYISNSDLQRCVNLQALVLTSNGINTIEEDSFSSLGSLEHLDLSYNYLSNLSSSWFKPLSSLTFLNLLGNPYKTLGETSLFSHLTKLQILRVGNMDTFTKIQRKDFAGLTFLEELEIDASDLQSYEPKSLKSIQNVSHLILHMKQHILLLEIFVDVTSSVECLELRDTDLDTFHFSELSTGETNSLIKKFTFRNVKITDESLFQVMKLLNQISGLLELEFDDCTLNGVGNFRASDNDRVIDPGKVETLTIRRLHIPRFYLFYDLSTLYSLTERVKRITVENSKVFLVPCLLSQHLKSLEYLDLSENLMVEEYLKNSACEDAWPSLQTLILRQNHLASLEKTGETLLTLKNLTNIDISKNSFHSMPETCQWPEKMKYLNLSSTRIHSVTGCIPKTLEILDVSNNNLNLFSLNLPQLKELYISRNKLMTLPDASLLPMLLVLKISRNAITTFSKEQLDSFHTLKTLEAGGNNFICSCEFLSFTQEQQALAKVLIDWPANYLCDSPSHVRGQQVQDVRLSVSECHRTALVSGMCCALFLLILLTGVLCHRFHGLWYMKMMWAWLQAKRKPRKAPSRNICYDAFVSYSERDAYWVENLMVQELENFNPPFKLCLHKRDFIPGKWIIDNIIDSIEKSHKTVFVLSENFVKSEWCKYELDFSHFRLFDENNDAAILILLEPIEKKAIPQRFCKLRKIMNTKTYLEWPMDEAQREGFWVNLRAAIKS

SEQ ID NO: 745499 - protein, 784 aa, Homo sapiens; identical to SEQ ID NO: 745498

SEQ ID NO: 745500 - protein, 784 aa, Homo sapiens; identical to SEQ ID NO: 745498

SEQ ID NO: 745501 - protein, 784 aa, Homo sapiens; identical to SEQ ID NO: 745498

SEQ ID NO: 745502 - protein, 518 aa, Homo sapiens
PSSLLHLSFVSTSNMSRQFTCKSGAAAKGGFSGFSGGFGSRSLYSLGGVRSLNVASGSGKSGGYGFGRGRASGFAGSMFGSVALGPVCPTVCPPGGIHQVTVNESLLAPLNVELDPEIQKVRAQEREQIKALNNKFASFIDKVRFLEQQNQVLETKWELLQQLDLNNCKNNLEPILEGYISNLRKQLETLSGDRVRLDSELRNVRDVVEDYKKRYEEEINKRTAAENEFVLLKKDVDAAYANKVELQAKVESMDQEIKFFRCLFEAEITQIQSHISDMSVILSMDNNRNLDLDSIIDEVRTQYEEIALKSKAEAEALYQTKFQELQLAAGRHGDDLKNTKNEISELTRLIQRIRSEIENVKKQASNLETAIADAEQRGDNALKDARAKLDELEGALHQAKEELARMLREYQELMSLKLALDMEIATYRKLLESEECRMSGEFPSPVSISIISSTSGGSVYGFRPSMVSGGYVANSSNCISGVCSVRGGEGRSRGSANDYKDTLGKGSSLSAPSKKTSR

SEQ ID NO: 745503 - protein, 432 aa, Homo sapiens
PSSLLHLSFVSTSNMSRQFTCKSGAAAKGGFSGCSAVLSGGSSSSFRAGSKGLSGGFGSRSLYSLGGVRSLNVASGSGKSGGYGFGRGRASGFAGSMFGSVALGPVCPTVCPPGGIHQVTVNESLLAPLNVELDPEIQKVRAQEREQIKALNNKFASFIDKVRFLEQQNQVLETKWELLQQLDLNNCKNNLEPILEGYISNLRKQLETLSGDRVRLDSELRNVRDVVEDYKKRYEEEINKRTAAENEFVLLKKDVDAAYANKVELQAKVESMDQEIKFFRCLFEAEITQIQSHISDMSVILSMDNNRNLDLDSIIDEVRTQYEEIALKSKAEAEALYQTKFQELQLAAGRHGDDLKNTKLGEIPPCTHPINSLAVVPQLHHQPRSWLPAFLLCPASSAVANYSAGLPGSLPKAPHTLGPSIVPAYARSWLCV

SEQ ID NO: 745504 - protein, 537 aa, Homo sapiens
PSSLLHLSFVSTSNMSRQFTCKSGAAAKGGFSGCSAVLSGGSSSSFRAGSKGLSGGFGSRSLYSLGGVRSLNVASGSGKSGGYGFGRGRASGFAGSMFGSVALGPVCPTVCPPGGIHQVTVNESLLAPLNVELDPEIQKVRAQEREQIKALNNKFASFIDKVRFLEQQNQVLETKWELLQQLDLNNCKNNLEPILEGYISNLRKQLETLSGDRVRLDSELRNVRDVVEDYKKRYEEEINKRTAAENEFVLLKKDVDAAYANKVELQAKVESMDQEIKFFRCLFEAEITQIQSHISDMSVILSMDNNRNLDLDSIIDEVRTQYEEIALKSKAEAEALYQTKFQELQLAAGRHGDDLKNTKNEISELTRLIQRIRSEIENVKKQASNLETAIADAEQRGDNALKDARAKLDELEGALHQAKEELARMLREYQELMSLKLALDMEIATYRKLLESEECRMSGEFPSPVSISIISSTSGGSVYGFRPSMVSGGYVANSSNCISGVCSVRGGEGRSRGSANDYKDTLGKGSSLSAPSKKTSR

SEQ ID NO: 745505 - protein, 147 aa, Homo sapiens
MSQTRDLQGGKAFGLLKAQQEERLDEINKQFLDDPKYSSDEDLPSKLEGFKEKYMEFDLNGNGDIDIMSLKRMLEKLGVPKTHLELKKLIGEVSSGSGETFSYPDFLRMMLGKRSAILKMILMYEEKAREKEKPTGPPAKKAISELP

SEQ ID NO: 745506 - protein, 147 aa, Homo sapiens; identical to SEQ ID NO: 745505

SEQ ID NO: 745507 - protein, 147 aa, Homo sapiens; identical to SEQ ID NO: 745505

SEQ ID NO: 745508 - protein, 130 aa, Homo sapiens
MSQTRDLQGGKAFGLLKAQQEERLDEINKQFLDDPKYSSDEDLPSKLEGFKEKYMEFDLNGNGDIDIMSLKRMLEKLGVPKTHLELKKLIGEVSSGSGETFSYPDFLRMMLGKRSAILKITSIYEKNQKE

SEQ ID NO: 745509 - protein, 167 aa, Homo sapiens
EGKGKFGRKASEKTGGREGEPADRGLQLGGKAFGLLKAQQEERLDEINKQFLDDPKYSSDEDLPSKLEGFKEKYMEFDLNGNGDIDIMSLKRMLEKLGVPKTHLELKKLIGEVSSGSGETFSYPDFLRMMLGKRSAILKMILMYEEKAREKEKPTGPPAKKAISELP

SEQ ID NO: 745510 - protein, 132 aa, Homo sapiens
MEFDLNGNGDIGEKRVICGGRVVCRPKKTEVSPTCSIPHDLGGGPPTTVGGRRMGMRKWERRERVSPPSPHPHPLPPDIMSLKRMLEKLGVPKTHLELKKLIGEVSSGSGETFSYPDFLRMMLGKRSAILKM

SEQ ID NO: 745511 - protein, 147 aa, Homo sapiens; identical to SEQ ID NO: 745505

SEQ ID NO: 745512 - protein, 147 aa, Homo sapiens; identical to SEQ ID NO: 745505

SEQ ID NO: 745513 - protein, 147 aa, Homo sapiens; identical to SEQ ID NO: 745505

SEQ ID NO: 745514 - protein, 167 aa, Homo sapiens; identical to SEQ ID NO: 745509

SEQ ID NO: 745515 - protein, 131 aa, Homo sapiens
  misc_feature (5)..(5): Xaa can be any naturally occurring amino acid
  misc_feature (14)..(14): Xaa can be any naturally occurring amino acid
FAAAXDTAARRRHXGRSPAENPPVSAYPFLLSPLTQKYMEFDLNGNGDIDIMSLKRMLEKLGVPKTHLELKKLIGEVSSGSGETFSYPDFLRMMLGKRSAILKMILMYEEKAREKEKPTGPPAKKAISELP

SEQ ID NO: 745516 - protein, 100 aa, Homo sapiens
EGKGKFGRKASEKTGGREGEPADRGLQLGGKAFGLLKAQQEERLDEINKQFLDDPKYSSDEDLPSKLEGFKGEGETVGGGDRAGGRRVRISTRTRQEQQR

SEQ ID NO: 745517 - protein, 200 aa, Homo sapiens
PSLDLSVLISLKQEVATLASLIPPSTGWDSMASNVTHISLAPKESALPQITNPYPAPCHPLCSFPGADLTAVDPVRGKTALEWAVLTDSFDTVWRIRQLLRRPQVEQLSQHYKPEWPALSGLVAQAQAQAQVAPSLLERLQATLSLPFAPSPQEGGVLDHLVTATTSLASPFVTTACHTLCPDHPPSLGTRSKSVPELLG

SEQ ID NO: 745518 - protein, 99 aa, Homo sapiens
RTSWDRSFCDTCCITRLGERTQLPELTEEKYQHRNLTGKMLLSRFAAARPSNYNISSSPGLQLQDPQTRTSVPPRVFICMTLKLEHQLLSESSAARPSN

SEQ ID NO: 745519 - protein, 99 aa, Homo sapiens; identical to SEQ ID NO: 745518

SEQ ID NO: 745520 - protein, 232 aa, Homo sapiens
CWPLLFSVSSLPSVALLRTGGFSQLLAQTNTSMLSSSPASCTSPSPDGENPCKKVHWASGRRRTSSTDSESKSHPDSSKIPRSRRPSRLTVKYDRGQLQRWLEMEQWVDAQVQELFQSLALSPRLECSGVIHSLQLLPPGFNRFSCLSSWSSWDYGIKQPLLSLRLTWKLSWIYPQRSRRLSWRPFLGTAPAPQRLLSLSCSVNSRNSGDSAGLRNKPERPSLAASALPGLP

SEQ ID NO: 745521 - protein, 177 aa, Homo sapiens
CWPLLFSVSSLPSVALLRTGGFSQLLAQTNTSMLSSSPASCTSPSPDGENPCKKVHWASGRRRTSSTDSESKSHPDSSKIPRSRRPSRLTVKYDRGQLQRWLEMEQWVDAQVQELFQDQATPSEPEIDLEALMDLSTEEQKTQLEAILGNCPRPTEAFISELLSQLKKLRRLSRPQK

SEQ ID NO: 745522 - protein, 103 aa, Homo sapiens
GAQSRQWRVQWAVLFTPGLNNARGLGGPFGWALSQGGHAELLTPKPSSPAPFHHHRECSFKLSKTHANKNKENDLLVVIYMVNLLWGDFFSSPACNNFLRKIK

SEQ ID NO: 745523 - protein, 461 aa, Homo sapiens
GQGNTEVIHTGTLHRQASHHIGEFCFHEIEKDIHGFEFQWKEDETNGHAAPMTEIKELAGSTGQHDQRHAGNKRIKDQLGSSFHLHLPEPHIFQSEGKIGNQVEKSINNASSVSTSQRICCRPKTHISNKYGNNSLHSSLLTQKWEVHMREKSFECIQSFKSFNCSSLLKKHQIIHLEEKQCKCDVCGKVFNQKRYLACHRRCHTGEKPYKCNECGKTFGHNSSLFIHKALHTGEKPYECEECDKVFSRKSHLERHKRIHTGEKPYKCKVRDEAFAYNSYLAKHTILHTGEKPYTCNECGKVFNRLSTLARHHRLHTGEKPYKCEECDKVFSRKSHLERHRRIHSGEKPYKCEECCKVFSRKSNLERHRRIHTGEKPYKCKVCDKAFQRDSHLAQHQRVHTGEKPYKCNECGKTFGQTSSLIIHRRLHTGEKPYKCNECGKTFSQMSSLVYHHRLHSGEKP

SEQ ID NO: 745524 - protein, 461 aa, Homo sapiens; identical to SEQ ID NO: 745523

SEQ ID NO: 745525 - protein, 461 aa, Homo sapiens; identical to SEQ ID NO: 745523

SEQ ID NO: 745526 - protein, 461 aa, Homo sapiens; identical to SEQ ID NO: 745523

SEQ ID NO: 745527 - protein, 505 aa, Homo sapiens
IEFLGHRAPAPLGCQSEAAWRSLGAVAACRELSYSCDFCPARPHTSWLTRFVKMEFQAVVMAVGGGSRMTDLTSSIPKPLLPVGNKPLIWYPLNLLERVGFEEVIVVTTRDVQKALCAEFKMKMKPDIVCIPDDADMGTADSLRYIYPKLKTDVLVLSCDLITDVALHEVVDLFRAYDASLAMLMRKGQDSIEPVPGQKGKKKAVEQRDFIGVDSTGKRLLFMANEADLDEELVIKGSILQKHPRIRFHTGLVDAHLYCLKKYIVDFLMENGSITSIRSELIPYLVRKQFSSASSQQGQEEKEEDLKKKELKSLDIYSFIKEANTLNLAPYDACWNACRGDRWEDLSRSQVRCYVHIMKEGLCSRVSTLGLYMEANRQVPKLLSALCPEEPPVHSSAQIVSKHLVGVDSLIGPETQIGEKSSIKRSVIGSSCLIKDRVTITNCLLMNSVTVEEGSNIQGSVICNNAVIEKGADIKDCLIGSGQRIEAKAKRVNEVIVGNDQLMEI

SEQ ID NO: 745528 - protein, 251 aa, Homo sapiens
IEFLGHRAPAPLGCQSEAAWRSLGAVAACRELSYSCDFCPARPHTSWLTRFVKMEFQAVVMAVGGGSRMTDLTSSIPKPLLPVGNKPLIWYPLNLLERVGFEEVIVVTTRDVQKALCAEFKMKMKPDIVCIPDDADMGTADSLRYIYPKLKTDVLVLSCDLITDVALHEVVDLFRAYDASLAMLMRKGQDSIEPVPGQKGKKKADGDSLCCQAGVQWHHLGSLQSPPPGFKHFTCLSLPSSWDYMHMPPHP

SEQ ID NO: 745529 - protein, 66 aa, Homo sapiens
TTTKFSGRVDLWRKRSNIQGSVICNNAVIEKGADIKDCLIGSGQRIEAKAKRVNEVIVGNDQLMEI

SEQ ID NO: 745530 - protein, 505 aa, Homo sapiens; identical to SEQ ID NO: 745527

SEQ ID NO: 745531 - protein, 481 aa, Homo sapiens
IEFLGHRAPAPLGCQSEAAWRSLGAVAACRELSYSCDFCPARPHTSWLTRFVKMEFQAVVMAVGGGSRMTDLTSSIPKPLLPVGNKPLIWYPLNLLERVGFEEVIVVTTRDVQKALCAEFKMKMKPDIVCIPDDADMGTADSLRYIYPKLKTDVLVLSCDLITDVALHEVVDLFRAYDASLAMLMRKGQDSIEPVPGQKGKKKAVEQRDFIGVDSTGKRLLFMANEADLDEELVIKGSILQKHPRIRFHTGLVDAHLYCLKKYIVDFLMENGSITSIRSELIPYLVRKQFSSASSQQGQEEKEEDLKKKELKSLDIYSFIKEANTLNLAPYDACWNACRGDRWEDLSRSQVRCYVHIMKEGLCSRVSTLGLYMEANRQVPKLLSALCPEEPPVHSSAQIVSKHLVGVDSLIGPETQIGEKSSIKRSVIGSSCLIKDRVTITNCLLMNSVTVEEGVCFPLYPLEAKIMEKCLQNSEGRLILT

SEQ ID NO: 745532 - protein, 506 aa, Homo sapiens
IEFLGHRAPAPLGCQSEAAWRSLGAVAACRELSYSCDFCPARPHTSWLTRFVKMEFQAVVMAVGGGSRMTDLTSSIPKPLLPVGNKPLIWYPLNLLERVGFEEVIVVTTRDVQKALCAEFKMKMKPDIVCIPDDADMGTADSLRYIYPKLKTDVLVLSCDLITDVALHEVVDLFRAYDASLAMLMRKGQDSIEPVPGQKGKKKAVEQRDFIGVDSTGKRLLFMANEADLDEELVIKGSILQKHPRIRFHTGLVDAHLYCLKKYIVDFLMENGSITSIRSELIPYLVRKQFSSASSQQGQEEKEEDLKKKELKSLDIYSFIKEANTLNLAPYDACWNACRGDRWEDLSRSQVRCYVHIMKEGLCSRVSTLGLYMEANRQVPKLLSALCPEEPPVHSSAQIVSKHLVGVDSLIGPETQIGEKSSIKRSVIGSSCLIKDRVTITNCLLMNSVTVEEGVMSSLESLSTHQKRKEPPHPQLLRSFMALCRIFSKSISEAGARDTVECHFRP

SEQ ID NO: 745533 - protein, 461 aa, Homo sapiens
IEFLGHRAPAPLGCQSEAAWRSLGAVAACRELSYSCDFCPARPHTSWLTRFVKMEFQAVVMAVGGGSRMTDLTSSIPKPLLPVGNKPLIWYPLNLLERVGFEEVIVVTTRDVQKALCAEFKMKMKPDIVCIPDDADMGTADSLRYIYPKLKTDVLVLSCDLITDVALHEVVDLFRAYDASLAMLMRKGQDSIEPVPGQKGKKKAVEQRDFIGVDSTGKRLLFMANEADLDEELVIKGSILQKHPRIRFHTGLVDAHLYCLKKYIVDFLMENGSITSIRSELIPYLVRKQFSSASSQQGQEEKEEDLKKKELKSLDIYSFIKEANTLNLAPYDACWNACRGDRWEDLSRSQVRCYVHIMKEGLCSRVSTLGLYMEANRQVPKLLSALCPEEPPVHSSAQIVSKHLVGVDSLIGPETQIGEKSSIKRSVIGSSCLIKDRVTITNCLLMNSVTVEEGESTNSKA

SEQ ID NO: 745534 - protein, 407 aa, Homo sapiens
IEFLGHRAPAPLGCQSEAAWRSLGAVAACRELSYSCDFCPARPHTSWLTRFVKMEFQAVVMAVGGGSRMTDLTSSIPKPLLPVGNKPLIWYPLNLLERVGFEEVIVVTTRDVQKALCAEFKMKMKPDIVCIPDDADMGTADSLRYIYPKLKTDVLVLSCDLITDVALHEVVDLFRAYDASLAMLMRKGQDSIEPVPGQKGKKKAVEQRDFIGVDSTGKRLLFMANEADLDEELVIKGSILQKHPRIRFHTGLVDAHLYCLKKYIVDFLMENGSITSIRSELIPYLVRKQFSSASSQQGQEEKEEDLKKKELKSLDIYSFIKEANTLNLAPYDACWNACRGDRWEDLSRSQVRCYVHIMKEGLCSRVSTLGLYMEANRQVPKLLSALCPEEPPVHSSAQIVSKHLLNE

SEQ ID NO: 745535 - protein, 558 aa, Homo sapiens
IEFLGHRAPAPLGCQSEAAWRSLGAVAACRELSYSCDFCPARPHTSWLTRFVKMEFQAVVMAVGGGSRMTDLTSSIPKPLLPVGNKPLIWYPLNLLERVGFEEVIVVTTRDVQKALCAEFKMKMKPDIVCIPDDADMGTADSLRYIYPKLKLPKPLSLTYQERLWFIHSPRPWTDVLVLSCDLITDVALHEVVDLFRAYDASLAMLMRKGQDSIEPVPGQKGKKKAAPGPVMSHGEQSINIIEWPAYKGSSSCPPPQVEQRDFIGVDSTGKRLLFMANEADLDEELVIKGSILQKHPRIRFHTGLVDAHLYCLKKYIVDFLMENGSITSIRSELIPYLVRKQFSSASSQQGQEEKEEDLKKKELKSLDIYSFIKEANTLNLAPYDACWNACRGDRWEDLSRSQVRCYVHIMKEGLCSRVSTLGLYMEANRQVPKLLSALCPEEPPVHSSAQIVSKHLVGVDSLIGPETQIGEKSSIKRSVIGSSCLIKDRVTITNCLLMNSVTVEEGSNIQGSVICNNAVIEKGADIKDCLIGSGQRIEAKAKRVNEVIVGNDQLMEI

SEQ ID NO: 745536 - protein, 242 aa, Homo sapiens
IEFLGHRAPAPLGCQSEAAWRSLGAVAACRELSYSCDFCPARPHTSWLTRFVKMEFQAVVMAVGGGSRMTDLTSSIPKPLLPVGNKPLIWYPLNLLERVGFEEVIVVTTRDVQKALCAEFKMKMKPDIVCIPDDADMGTADSLRYIYPKLKTDVLVLSCDLITDVALHEVVDLFRAYDASLAMLMRKGQDSIEPVPGQKGKKKAVEQRDFIGVDSTGKRLLFMANEADLDEELVIKGSILQK

SEQ ID NO: 745537 - protein, 505 aa, Homo sapiens; identical to SEQ ID NO: 745527

SEQ ID NO: 745538 - protein, 199 aa, Homo sapiens
IEFLGHRAPAPLGCQSEAAWRSLGAVAACRELSYSCDFCPARPHTSWLTRFVKMEFQAVVMAVGGGSRMTDLTSSIPKPLLPVGNKPLIWYPLNLLERVGFEEVIVVTTRDVQKALCAEFKMKMKPDIVCIPDDADMGTADSLRYIYPKLKMALSLDEIVFLIEMFLMYLICPEAHCSGANVQHDLLSQSCQYHSFIFL

SEQ ID NO: 745539 - protein, 162 aa, Homo sapiens
IEFLGHRAPAPLGCQSEAAWRSLGAVAACRELSYSCDFCPARPHTSWLTRFVKMEFQAVVMAVGGGSRMTDLTSSIPKPLLPVGNKPLIWYPLNLLERVGFEEVIVVTTRDVQKALCAEFKMKMKPDIVCIPDDADMGTADSLRYIYPKLKVKSNFLTLLVY

SEQ ID NO: 745540 - protein, 495 aa, Homo sapiens
QADLRKTPATHEMFELVLRRELSYSCDFCPARPHTSWLTRFVKMEFQAVVMAVGGGSRMTDLTSSIPKPLLPVGNKPLIWYPLNLLERVGFEEVIVVTTRDVQKALCAEFKMKMKPDIVCIPDDADMGTADSLRYIYPKLKTDVLVLSCDLITDVALHEVVDLFRAYDASLAMLMRKGQDSIEPVPGQKGKKKAVEQRDFIGVDSTGKRLLFMANEADLDEELVIKGSILQKHPRIRFHTGLVDAHLYCLKKYIVDFLMENGSITSIRSELIPYLVRKQFSSASSQQGQEEKEEDLKKKELKSLDIYSFIKEANTLNLAPYDACWNACRGDRWEDLSRSQVRCYVHIMKEGLCSRVSTLGLYMEANRQVPKLLSALCPEEPPVHSSAQIVSKHLVGVDSLIGPETQIGEKSSIKRSVIGSSCLIKDRVTITNCLLMNSVTVEEGSNIQGSVICNNAVIEKGADIKDCLIGSGQRIEAKAKRVNEVIVGNDQLMEI

SEQ ID NO: 745541 - protein, 454 aa, Homo sapiens
IEFLGHRAPAPLGCQSEAAWRSLGAVAACRELSYSCDFCPARPHTSWLTRFVKMEFQAVVMAVGGGSRMTDLTSSIPKPLLPVGNKPLIWYPLNLLERVGFEEVIVVTTRDVQKALCAEFKMKMKPDIVCIPDDADMGTADSLRYIYPKLKTDVLVLSCDLITDVALHEVVDLFRAYDASLAMLMRKGQDSIEPVPGQKGKKKAVEQRDFIGVDSTGKRLLFMANEADLDEELVIKGSILQKHPRIRFHTGLVDAHLYCLKKYIVDFLMENGSITSIRSELIPYLVRKQFSSASSQQGQEEKEEDLKKKELKSLDIYSFIKEANTLNLAPYDACWNACRGDRWEDLSRSQVRCYVHIMKEGLCSRVSTLGLYMEANRQVPKLLSALCPEEPPVHSSAQIVSKHLVGVDSLIGPETQIGEKSSIKRSVIGSSCLIKDRVTITNCLLMNSVTVEEG

SEQ ID NO: 745542 - protein, 470 aa, Homo sapiens
MMGHTERSYTSTKCQYQAAGFEAVVMAVGGGSRMTDLTSSIPKPLLPVGNKPLIWYPLNLLERVGFEEVIVVTTRDVQKALCAEFKMKMKPDIVCIPDDADMGTADSLRYIYPKLKTDVLVLSCDLITDVALHEVVDLFRAYDASLAMLMRKGQDSIEPVPGQKGKKKAVEQRDFIGVDSTGKRLLFMANEADLDEELVIKGSILQKHPRIRFHTGLVDAHLYCLKKYIVDFLMENGSITSIRSELIPYLVRKQFSSASSQQGQEEKEEDLKKKELKSLDIYSFIKEANTLNLAPYDACWNACRGDRWEDLSRSQVRCYVHIMKEGLCSRVSTLGLYMEANRQVPKLLSALCPEEPPVHSSAQIVSKHLVGVDSLIGPETQIGEKSSIKRSVIGSSCLIKDRVTITNCLLMNSVTVEEGSNIQGSVICNNAVIEKGADIKDCLIGSGQRIEAKAKRVNEVIVGNDQLMEI

SEQ ID NO: 745543 - protein, 527 aa, Homo sapiens
IEFLGHRAPAPLGCQSEAAWRSLGAVAACRELSYSCDFCPARPHTSWLTRFVKMEFQAVVMAVGGGSRMTDLTSSIPKPLLPVGNKPLIWYPLNLLERVGFEEVIVVTTRDVQKALCAEFKMKMKPDIVCIPDDADMGTADSLRYIYPKLKLPKPLSLTYQERLLVHSFSQALTDVLVLSCDLITDVALHEVVDLFRAYDASLAMLMRKGQDSIEPVPGQKGKKKAVEQRDFIGVDSTGKRLLFMANEADLDEELVIKGSILQKHPRIRFHTGLVDAHLYCLKKYIVDFLMENGSITSIRSELIPYLVRKQFSSASSQQGQEEKEEDLKKKELKSLDIYSFIKEANTLNLAPYDACWNACRGDRWEDLSRSQVRCYVHIMKEGLCSRVSTLGLYMEANRQVPKLLSALCPEEPPVHSSAQIVSKHLVGVDSLIGPETQIGEKSSIKRSVIGSSCLIKDRVTITNCLLMNSVTVEEGSNIQGSVICNNAVIEKGADIKDCLIGSGQRIEAKAKRVNEVIVGNDQLMEI

SEQ ID NO: 745544 - protein, 421 aa, Homo sapiens
IEFLGHRAPAPLGCQSEAAWRSLGAVAACRELSYSCDFCPARPHTSWLTRFVKMEFQAVVMAVGGGSRMTDLTSSIPKPLLPVGNKPLIWYPLNLLERVGFEEVIVVTTRDVQKALCAEFKMKMKPDIVCIPDDADMGTADSLRYIYPKLKTDVLVLSCDLITDVALHEVVDLFRAYDASLAMLMRKGQDSIEPVPGQKGKKKAVEQRDFIGVDSTGKRLLFMANEADLDEELVIKGSILQKHPRIRFHTGLVDAHLYCLKKYIVDFLMENGSITSIRSELIPYLVRKQFSSASSQQGQEEKEEDLKKKELKSLDIYSFIKEANTLNLAPYDACWNACRGDRWEDLSRSQVRCYVHIMKEGLCSRVSTLGLYMEANRQVPKLLSALCPEEPPVHSSAQIVSKHLHFGRLRQVHHLRSGVRD

SEQ ID NO: 745545 - protein, 290 aa, Homo sapiens
IEFLGHRAPAPLGCQSEAAWRSLGAVAACRELSYSCDFCPARPHTSWLTRFVKMEFQAVVMAVGGGSRMTDLTSSIPKPLLPVGNKPLIWYPLNLLERVGFEEVIVVTTRDVQKALCAEFKMKMKPDIVCIPDDADMGTADSLRYIYPKLKTDVLVLSCDLITDVALHEVVDLFRAYDASLAMLMRKGQDSIEPVPGQKGKKKAVEQRDFIGVDSTGKRLLFMANEADLDEELVIKGSILQKHLSCCHLLAIVNSAAVNVGVQTSLQDLAFSSFGYIFRSGITGSYGREL

SEQ ID NO: 745546 - protein, 320 aa, Homo sapiens
ASAPAVSQPTAPAPSCLPKAGQVIPTLLREAPFSSVIAPTLLCGFLFLAWVAAEVPEESSRMAGSGARSEEGRRQHAFVPEPFDGANVVPNLWLHSFEVINDLNHWDHITKLRFLKESLRGEALGVYNRLSPQDQGDYGTVKEALLKAFGVPGAAPSHLPKEIVFANSMGKGYYLKGKIGKVPVRFLVDSGAQVSVVHPNLWEEVTDGDLDTLQPFENVVKVANGAEMKILGVWDTAVSLGKLKLKAQFLVANASAEEAIIGTDVLQDHNAILDFEHRTCTLKGKKFRLLPVGGSLEDEFDLELIEEDPSSEEGRQELSH

SEQ ID NO: 745547 - protein, 38 aa, Homo sapiens
MAHPTLSSSPSSWAPILVAVRAVALVHAHTVLPVCMCA

SEQ ID NO: 745548 - protein, 222 aa, Homo sapiens
KDSGVPQMSSTGTVHITVIDQNDNPSQSRTVEIFVNYYGNLFPGGILGSVKPQDPDVLDSFHCSLTSGVTSLFSIPGGTCDLNSQPRSTDGTFDLTVLSNDGVHSTVTSNIRVFFAGFSNATVDNSILLRLGVPTVKDFLTNHYLHFLRIASSQLTGLGTAVQLYSAYEENNRTFLLAAVKRNHNQYVNPSGVATFFESIKEILLRQSGVKVESVDHDSCVH

SEQ ID NO: 745549 - protein, 213 aa, Homo sapiens
  misc_feature (10)..(10): Xaa can be any naturally occurring amino acid
PCDLSGRCHXATGEAQKALECFCQAASEVGKEEFLDRLIRSEDGEIVSTPRLQYYDKVLRLLDVIGLPELVIQLATSAITEAGDDWKSQATLRTCIFKHHLDLGHNSQAYEALTQIPDSSRQLDCLRQLVVVLCERSQLQDLVEFPYVNLHNEVVGIIESRARAVDLMTHNYYELLYAFHIYRHNYRKAGTVMLYVWMRLPESRLSGTAPAYG

SEQ ID NO: 745550 - protein, 1394 aa, Homo sapiens
PATGRFPQIESASPAPFSSGFLAAHPHSPGGSLATKGRSRLSAPGMLHLSAAPPAPPPEVTATARPCLCSVGRRGDGGKMAAAGALERSFVELSGAERERPRHFREFTVCSIGTANAVAGAVKYSESAGGFYYVESGKLFSVTRNRFIHWKTSGDTLELMEESLDINLLNNAIRLKFQNCSVLPGGVYVSETQNRVIILMLTNQTVHRLLLPHPSRMYRSELVVDSQMQSIFTDIGKVDFTDPCNYQLIPAVPGISPNSTASTAWLSSDGEALFALPCASGGIFVLKLPPYDIPGMVSVVELKQSSVMQRLLTGWMPTAIRGDQSPSDRPLSLAVHCVEHDAFIFALCQDHKLRMWSYKEQMCLMVADMLEYVPVKKDLRLTAGTGHKLRLAYSPTMGLYLGIYMHAPKRGQFCIFQLVSTESNRYSLDHISSLFTSQETLIDFALTSTDIWALWHDAENQTVVKYINFEHNVAGQWNPVFMQPLPEEEIVIRDDQDPREMYLQSLFTPGQFTNEALCKALQIFCRGTERNLDLSWSELKKEVTLAVENELQGSVTEYEFSQEEFRNLQQEFWCKFYACCLQYQEALSHPLALHLNPHTNMVCLLKKGYLSFLIPSSLVDHLYLLPYENLLTEDETTISDDVDIARDVICLIKCLRLIEESVTVDMSVIMEMSCYNLQSPEKAAEQILEDMITIDVENVMEDICSKLQEIRNPIHAIGLLIREMDYETEVEMEKGFNPAQPLNIRMNLTQLYGSNTAGYIVCRGVHKIASTRFLICRDLLILQQLLMRLGDAVIWGTGQLFQAQQDLLHRTAPLLLSYYLIKWGSECLATDVPLDTLESNLQHLSVLELTDSGALMANRFVSSPQTIVELFFQEVARKHIISHLFSQPKAPLSQTGLNWPEMITAITSYLLQLLWPSNPGCLFLECLMGNCQYVQLQDYIQLLHPWCQVNVGSCRFMLGRCYLVTGEGQKALECFCQAASEVGKEEFLDRLIRSEDGEIVSTPRLQYYDKVLRLLDVIGLPELVIQLATSAITEAGDDWKSQATLRTCIFKHHLDLGHNSQAYEALTQIPDSSRQLDCLRQLVVVLCERSQLQDLVEFPYVNLHNEVVGIIESRARAVDLMTHNYYELLYAFHIYRHNYRKAGTVMFEYGMRLGREVRTLRGLEKQGNCYLAALNCLRLIRPEYAWIVQPVSGAVYDRPGASPKRNHDGECTAAPTNRQIEILELEDLEKECSLARIRLTLAQHDPSAVAVAGSSSAEEMVTLLVQAGLFDTAISLCQTFKLPLTPVFEGLAFKCIKLQFGGEAAQAEAWAWLAANQLSSVITTKESSATDEAWRLLSTYLERYKVQNNLYHHCVINKLLSHGVPLPNWLINSYKDYQQKVDKATRDLLYRRTL

SEQ ID NO: 745551 - protein, 1254 aa, Homo sapiens
MQSIFTDIGKVDFTDPCNYQLIPAVPGISPNSTASTAWLSSDGEALFALPCASGGIFVLKLPPYDIPGMVSVVELKQSSVMQRLLTGWMPTAIRGDQSPSDRPLSLAVHCVEHDAFIFALCQDHKLRMWSYKEQMCLMVADMLEYVPVKKDLRLTAGTGHKLRLAYSPTMGLYLGIYMHAPKRGQFCIFQLVSTESNRYSLDHISSLFTSQETLIDFALTSTDIWALWHDAENQTVVKYINFEHNVAGQWNPVFMQPLPEEEIVIRDDQDPREMYLQSLFTPGQFTNEALCKALQIFCRGTERNLDLSWSELKKEVTLAVENELQGSVTEYEFSQEEFRNLQQEFWCKFYACCLQYQEALSHPLALHLNPHTNMVCLLKKGYLSFLIPSSLVDHLYLLPYENLLTEDETTISDDVDIARDVICLIKCLRLIEESVTVDMSVIMEMSCYNLQSPEKAAEQILEDMITIDVENVMEDICSKLQEIRNPIHAIGLLIREMDYETEVEMEKGFNPAQPLNIRMNLTQLYGSNTAGYIVCRGVHKIASTRFLICRDLLILQQLLMRLGDAVIWGTGQLFQAQQDLLHRTAPLLLSYYLIKWGSECLATDVPLDTLESNLQHLSVLELTDSGALMANRFVSSPQTIVELFFQEVARKHIISHLFSQPKAPLSQTGLNWPEMITAITSYLLQLLWPSNPGCLFLECLMGNCQYVQLQDYIQLLHPWCQVNVGSCRFMLGRCYLVTGEGQKALECFCQAASEVGKEEFLDRLIRSEDGEIVSTPRLQYYDKVLRLLDVIGLPELVIQLATSAITEAGDDWKSQATLRTCIFKHHLDLGHNSQAYEALTQIPDSSRQLDCLRQLVVVLCERSQLQDLVEFPYVNLHNEVVGIIESRARAVDLMTHNYYELLYAFHIYRHNYRKAGTVMFEYGMRLGREVRTLRGLEKQGNCYLAALNCLRLIRPEYAWIVQPVSGAVYDRPGASPKRNHDGECTAAPTNRQIEILELEDLEKECSLARIRLTLAQHDPSAVAVAGSSSAEEMVTLLVQAGLFDTAISLCQTFKLPLTPVFEGLAFKCIKLQFGGEAAQAEAWAWLAANQLSSVITTKESSATDEAWRLLSTYLERYKVQNNLYHHCVINKLLSHGVPLPNWLINSYKKVDAAELLRLYLNYDLLEEAVDLVSEYVDAVLGKGHQYFGIEFPLSATAPMVWLPYSSIDQLLQALGENSANSHNIALSQKILDKLEDYQQKVDKATRDLLYRRTL

SEQ ID NO: 745552 - protein, 1268 aa, Homo sapiens
MQSIFTDIGKVDFTDPCNYQLIPAVPGISPNSTASTAWLSSDGEALFALPCASGGIFVLKLPPYDIPGMVSVVELKQSSVMQRLLTGWMPTAIRGDQSPSDRPLSLAVHCVEHDAFIFALCQDHKLRMWSYKEQMCLMVADMLEYVPVKKDLRLTAGTGHKLRLAYSPTMGLYLGIYMHAPKRGQFCIFQLVSTESNRYSLDHISSLFTSQETLIDFALTSTDIWALWHDAENQTVVKYINFEHNVAGQWNPVFMQPLPEEEIVIRDDQDPREMYLQSLFTPGQFTNEALCKALQIFCRGTERNLDLSWSELKKEVTLAVENELQGSVTEYEFSQEEFRNLQQEFWCKFYACCLQYQEALSHPLALHLNPHTNMVCLLKKGYLSFLIPSSLVDHLYLLPYENLLTEDETTISDDVDIARDVICLIKCLRLIEESVTVDMSVIMEMSCYNLQSPEKAAEQILEDMITIDVENVMEDICSKLQEIRNPIHAIGLLIREMDYETEVEMEKGFNPAQPLNIRMNLTQLYGSNTAGYIVCRGVHKIASTRFLICRDLLILQQLLMRLGDAVIWGTGQLFQAQQDLLHRTAPLLLSYYLIKWGSECLATDVPLDTLESNLQHLSVLELTDSGALMANRFVSSPQTIVELFFQEVARKHIISHLFSQPKAPLSQTGLNWPEMITAITSYLLQLLWPSNPGCLFLECLMGNCQYVQLQDYIQLLHPWCQVNVGSCRFMLGRCYLVTGEGQKALECFCQAASEVGKEEFLDRLIRSEDGEIVSTPRLQYYDKVLRLLDVIGLPELVIQLATSAITEAGDDWKSQATLRTCIFKHHLDLGHNSQAYEALTQIPDSSRQLDCLRQLVVVLCERSQLQDLVEFPYVNLHNEVVGIIESRARAVDLMTHNYYELLYAFHIYRHNYRKAGTVMFEYGMRLGREVRTLRGLEKQGNCYLAALNCLRLIRPEYAWIVQPVSGAVYDRPGASPKRNHDGECTAAPTNRQIEILELEDLEKECSLARIRLTLAQHDPSAVAVAGSSSAEEMVTLLVQAGLFDTAISLCQTFKLPLTPVFEGLAFKCIKLQFGGEAAQAEAWAWLAANQLSSVITTKESSATDEAWRLLSTYLERYKVQNNLYHHCVINKLLSHGVPLPNWLINSYKKKLWIWCQNMWMLYWEKDINTSELSFHCPQQPQWCGFHTPLLISFSKLWERTVPTVTTSHCPRKYLTNWRTTSKKLIRQHGIYYIVGPCDLDCHLAFVTAWCLLGLKTTLQEPCTQGRFL

SEQ ID NO: 745553 - protein, 1001 aa, Homo sapiens
MQSIFTDIGKVDFTDPCNYQLIPAVPGISPNSTASTAWLSSDGEALFALPCASGGIFVLKLPPYDIPGMVSVVELKQSSVMQRLLTGWMPTAIRGDQSPSDRPLSLAVHCVEHDAFIFALCQDHKLRMWSYKEQMCLMVADMLEYVPVKKDLRLTAGTGHKLRLAYSPTMGLYLGIYMHAPKRGQFCIFQLVSTESNRYSLDHISSLFTSQETLIDFALTSTDIWALWHDAENQTVVKYINFEHNVAGQWNPVFMQPLPEEEIVIRDDQDPREMYLQSLFTPGQFTNEALCKALQIFCRGTERNLDLSWSELKKEVTLAVENELQGSVTEYEFSQEEFRNLQQEFWCKFYACCLQYQEALSHPLALHLNPHTNMVCLLKKGYLSFLIPSSLVDHLYLLPYENLLTEDETTISDDVDIARDVICLIKCLRLIEESVTVDMSVIMEMSCYNLQSPEKAAEQILEDMITIDVENVMEDICSKLQEIRNPIHAIGLLIREMDYETEVEMEKGFNPAQPLNIRMNLTQLYGSNTAGYIVCRGVHKIASTRFLICRDLLILQQLLMRLGDAVIWGTGQLFQAQQDLLHRTAPLLLSYYLIKWGSECLATDVPLDTLESNLQHLSVLELTDSGALMANRFVSSPQTIVELFFQEVARKHIISHLFSQPKAPLSQTGLNWPEMITAITSYLLQLLWPSNPGCLFLECLMGNCQYVQLQDYIQLLHPWCQVNVGSCRFMLGRCYLVTGEGQKALECFCQAASEVGKEEFLDRLIRSEDGEIVSTPRLQYYDKVLRLLDVIGLPELVIQLATSAITEAGDDWKSQATLRTCIFKHHLDLGHNSQAYEALTQIPDSSRQLDCLRQLVVVLCERSQLQDLVEFPYVNLHNEVVGIIESRARAVDLMTHNYYELLYAFHIYRHNYRKAGTVMFEYGMRLGREVRTLRGLEKQGNCYLAALNCLRLIRPEYAWIVQPVSGAVYDRPGASPKRNHDGECTAAPSESGVSHWFFARQ

SEQ ID NO: 745554 - protein, 969 aa, Homo sapiens
MQSIFTDIGKVDFTDPCNYQLIPAVPGISPNSTASTAWLSSDGEALFALPCASGGIFVLKLPPYDIPGMVSVVELKQSSVMQRLLTGWMPTAIRGDQSPSDRPLSLAVHCVEHDAFIFALCQDHKLRMWSYKEQMCLMVADMLEYVPVKKDLRLTAGTGHKLRLAYSPTMGLYLGIYMHAPKRGQFCIFQLVSTESNRYSLDHISSLFTSQETLIDFALTSTDIWALWHDAENQTVVKYINFEHNVAGQWNPVFMQPLPEEEIVIRDDQDPREMYLQSLFTPGQFTNEALCKALQIFCRGTERNLDLSWSELKKEVTLAVENELQGSVTEYEFSQEEFRNLQQEFWCKFYACCLQYQEALSHPLALHLNPHTNMVCLLKKGYLSFLIPSSLVDHLYLLPYENLLTEDETTISDDVDIARDVICLIKCLRLIEESVTVDMSVIMEMSCYNLQSPEKAAEQILEDMITIDVENVMEDICSKLQEIRNPIHAIGLLIREMDYETEVEMEKGFNPAQPLNIRMNLTQLYGSNTAGYIVCRGVHKIASTRFLICRDLLILQQLLMRLGDAVIWGTGQLFQAQQDLLHRTAPLLLSYYLIKWGSECLATDVPLDTLESNLQHLSVLELTDSGALMANRFVSSPQTIVELFFQEVARKHIISHLFSQPKAPLSQTGLNWPEMITAITSYLLQLLWPSNPGCLFLECLMGNCQYVQLQDYIQLLHPWCQVNVGSCRFMLGRCYLVTGEGQKALECFCQAASEVGKEEFLDRLIRSEDGEIVSTPRLQYYDKVLRLLDVIGLPELVIQLATSAITEAGDDWKSQATLRTCIFKHHLDLGHNSQAYEALTQIPDSSRQLDCLRQLVVVLCERSQLQDLVEFPYVNLHNEVVGIIESRARAVDLMTHNYYELLYAFHIYRHNYRKAGTVMFEYGMRLGREVRTLRGLEKQGNCYLAALNCLRLIRPEYAWIVQPVSGAVV

SEQ ID NO: 745555 - protein, 728 aa, Homo sapiens
MQSIFTDIGKVDFTDPCNYQLIPAVPGISPNSTASTAWLSSDGEALFALPCASGGIFVLKLPPYDIPGMVSVVELKQSSVMQRLLTGWMPTAIRGDQSPSDRPLSLAVHCVEHDAFIFALCQDHKLRMWSYKEQMCLMVADMLEYVPVKKDLRLTAGTGHKLRLAYSPTMGLYLGIYMHAPKRGQFCIFQLVSTESNRYSLDHISSLFTSQETLIDFALTSTDIWALWHDAENQTVVKYINFEHNVAGQWNPVFMQPLPEEEIVIRDDQDPREMYLQSLFTPGQFTNEALCKALQIFCRGTERNLDLSWSELKKEVTLAVENELQGSVTEYEFSQEEFRNLQQEFWCKFYACCLQYQEALSHPLALHLNPHTNMVCLLKKGYLSFLIPSSLVDHLYLLPYENLLTEDETTISDDVDIARDVICLIKCLRLIEESVTVDMSVIMEMSCYNLQSPEKAAEQILEDMITIDVENVMEDICSKLQEIRNPIHAIGLLIREMDYETEVEMEKGFNPAQPLNIRMNLTQLYGSNTAGYIVCRGVHKIASTRFLICRDLLILQQLLMRLGDAVIWGTGQLFQAQQDLLHRTAPLLLSYYLIKWGSECLATDVPLDTLESNLQHLSVLELTDSGALMANRFVSSPQTIVELFFQEVARKHIISHLFSQPKAPLSQTGLNWPEMITAITSYLLQLLWPSNPGCLFLECLMGNCQYVQLQVSSCEHFMSTHSCKAWDC

SEQ ID NO: 745556 - protein, 269 aa, Homo sapiens
PATGRFPQIESASPAPFSSGFLAAHPHSPGGSLATKGRSRLSAPGMLHLSAAPPAPPPEVTATARPCLCSVGRRGDGGKMAAAGALERSFVELSGAERERPRHFREFTVCSIGTANAVAGAVKYSESAGGFYYVESGKLFSVTRNRFIHWKTSGDTLELMEESLDINLLNNAIRLKFQNCSVLPGGVYVSETQNRVIILMLTNQTVHRLLLPHPSRMYRSVSWLSAISFISQITLGVTNVVLERCLLELKEIWILVIPHQAYFDSYRLK

SEQ ID NO: 745557 - protein, 1254 aa, Homo sapiens; identical to SEQ ID NO: 745551

SEQ ID NO: 745558 - protein, 1394 aa, Homo sapiens; identical to SEQ ID NO: 745550

SEQ ID NO: 745559 - protein, 111 aa, Homo sapiens
  misc_feature (8)..(8): Xaa can be any naturally occurring amino acid
  misc_feature (10)..(10): Xaa can be any naturally occurring amino acid
  misc_feature (15)..(15): Xaa can be any naturally occurring amino acid
YSESYRDXAXIVSRXGFHCPQQPQWCGFHTPLLISFSKLWERTVPTVTTSHCPRKYLTNWRTTSKKLIRQHGIYYIVGPCDLDCHLAFVTAWCLLGLKTTLQEPCTQGRFL

SEQ ID NO: 745560 - protein, 896 aa, Homo sapiens
MQSIFTDIGKVDFTDPCNYQLIPAVPGISPNSTASTAWLSSDGEALFALPCASGGIFVLKLPPYDIPGMVSVVELKQSSVMQRLLTGWMPTAIRGDQSPSDRPLSLAVHCVEHDAFIFALCQDHKLRMWSYKEQMCLMVADMLEYVPVKKDLRLTAGTGHKLRLAYSPTMGLYLGIYMHAPKRGQFCIFQLVSTESNRYSLDHISSLFTSQETLIDFALTSTDIWALWHDAENQTVVKYINFEHNVAGQWNPVFMQPLPEEEIVIRDDQDPREMYLQSLFTPGQFTNEALCKALQIFCRGTERNLDLSWSELKKEVTLAVENELQGSVTEYEFSQEEFRNLQQEFWCKFYACCLQYQEALSHPLALHLNPHTNMVCLLKKGYLSFLIPSSLVDHLYLLPYENLLTEDETTISDDVDIARDVICLIKCLRLIEESVTVDMSVIMEMSCYNLQSPEKAAEQILEDMITIDVENVMEDICSKLQEIRNPIHAIGLLIREMDYETEVEMEKGFNPAQPLNIRMNLTQLYGSNTAGYIVCRGVHKIASTRFLICRDLLILQQLLMRLGDAVIWGTGQLFQAQQDLLHRTAPLLLSYYLIKWGSECLATDVPLDTLESNLQHLSVLELTDSGALMANRFVSSPQTIVELFFQEVARKHIISHLFSQPKAPLSQTGLNWPEMITAITSYLLQLLWPSNPGCLFLECLMGNCQYVQLQDYIQLLHPWCQVNVGSCRFMLGRCYLVTGEGQKALECFCQAASEVGKEEFLDRLIRSEDGEIVSTPRLQYYDKVLRLLDVIGLPELVIQLATSAITEAGDDWKSQATLRTCIFKHHLDLGHNSQAYEALTQIPDSSRQLDCLRQLVVVLCERSQLQDLVEFPYVNLHNEVVGIIESRARAVQVNPH

SEQ ID NO: 745561 - protein, 269 aa, Homo sapiens; identical to SEQ ID NO: 745556

SEQ ID NO: 745562 - protein, 107 aa, Homo sapiens
LYLLQECCAENMEGTTKFINSFNCLPSPFSMSSTRLGDGSKTLQINLASALKDLHVQMYSILAMVGWQNMPQQTFPLWHKDYFVLKAIEKKKIQEKLSVLLSSKSRT

SEQ ID NO: 745563 - protein, 462 aa, Homo sapiens
MAQVSINNDYSEWDLSTDAGERARLLQSPCVDTAPKSEWEASPGGLDRGTTSTLGAIFIVVNACLGAGLLNFPAAFSTAGGVAAGIALQMGMLVFIISGLVILAYCSQASNERTYQEVVWAVCGKLTGVLCEVAIAVYTFGTCIAFLIIIGDQQDKIIAVMAKEPEGASGPWYTDRKFTISLTAFLFILPLSIPREIGFQKYASFLSVVGTWYVTAIVIIKYIWPDKEMTPGNILTRPASWMAVFNAMPTICFGFQCHVSSVPVFNSMQQPEVKTWGGVVTAAMVIALAVYMGTGICGFLTFGAAVDPDVLLSYPSEDMAVAVARAFIILSVLTSYPILHFCGRAVVEGLWLRYQGVPVEEDVGRERRRRVLQTLVWFLLTLLLALFIPDIGKVISVIGGLAACFIFVFPGLCLIQAKLSEMEEVKPASWWVLVSYGVLLVTLGAFIFGQTTANAIFVDLLA

SEQ ID NO: 745564 - protein, 177 aa, Homo sapiens
MPCPPSASDFRCQCQLQGPCCPLRSPHPGMEPSKEEEPRQNGGNPGGKDGTGASGLAPCSWGLCSQGTFLWKLGLRSFPHHDGALHLEQCHVSSVPVFNSMQQPEVKTWGGVVTAAMVIALAVYMGTGICGFLTFGAAVDPDVLLSYPSEDMAVAVARAFIILSVLTSYPILHFCGR

SEQ ID NO: 745565 - protein, 505 aa, Homo sapiens
MAQVSINNDYSEWDLSTDAGERARLLQSPCVDTAPKSEWEASPGGLDRGTTSTLGAIFIVVNACLGAGLLNFPAAFSTAGGVAAGIALQMGMLVFIISGLVILAYCSQASNERTYQEVVWAVCGKLTGVLCEVAIAVYTFGTCIAFLIIIGDQQDKIIAVMAKEPEGASGPWYTDRKFTISLTAFLFILPLSIPREIGFQKYASFLSVVGTWYVTAIVIIKYIWPDKEMTPGNILTRPASWMAVFNAMPTICFGFQCHVSSVPVFNSMQQPEVKTWGGVVTAAMVIALAVYMGTAETRSHYVAQPGLEFLGSSNSPASASQSAGVTGMSHQPSQNGEGICGFLTFGAAVDPDVLLSYPSEDMAVAVARAFIILSVLTSYPILHFCGRAVVEGLWLRYQGVPVEEDVGRERRRRVLQTLVWFLLTLLLALFIPDIGKVISVIGGLAACFIFVFPGLCLIQAKLSEMEEVKPASWWVLVSYGVLLVTLGAFIFGQTTANAIFVDLLA

SEQ ID NO: 745566 - protein, 462 aa, Homo sapiens; identical to SEQ ID NO: 745563

SEQ ID NO: 745567 - protein, 462 aa, Homo sapiens; identical to SEQ ID NO: 745563

SEQ ID NO: 745568 - protein, 462 aa, Homo sapiens; identical to SEQ ID NO: 745563

SEQ ID NO: 745569 - protein, 1294 aa, Homo sapiens
VQSFYAVRHTESWKLMSTDDQQKIQAAAFDKGDDRRLGKKPIFSSSQQRKQVSDSGDIKIKSWRGNNKKECWSYLSTNKKMKSDGLGASGHSSSTNRNSINKTLKQDDVKEKDGTKIASKITKELKTGGKNVSGKPKTVTKSKTENGDKARLENMSPRQVVERSATAAAAATGQKNLLNGKGVRNQEGQISGARPKVLTGNLNVQAKAKPLKKATGKDSPCLSIAGPSSRSTDSSMEFSISTECLDEPKENGSTEEEKPSGHKLSFCDSPGQMMKNSVDSVKNSTVAIKSRPVSRVTNGTSNKKSIHEQDTNVNNSVLKKVSGKGCSEPVPQAILKKRGTSNGCTAAQQRTKSTPSNLTKTQGSQGESPNSVKSSVSSRQSDENVAKLDHNTTTEKQAPKRKMVKQVHTALPKVNAKIVAMPKNLNQSKKGETLNNKDSKQKMPPGQVISKTQPSSQRPLKHETSTVQKSMFHDVRDNNNKDSVSEQKPHKPLINLASEISDAEALQSSCRPDPQKPLNDQEKEKLALECQNISKLDKSLKHELESKQICLDKSETKFPNHKETDDCDAANICCHSVGSDNVNSKFYSTTALKYMVSNPNENSLNSNPVCDLDSTSAGQIHLISDRENQVGRKDTNKQSSIKCVEDVSLCNPERTNGTLNSAQEDKKSKVPVEGLTIPSKLSDESAMDEDKHATADSDVSSKCFSGQLSEKNSPKNMETSESPESHETPETPFVGHWNLSTGVLHQRESPESDTGSATTSSDDIKPRSEDYDAGGSQDDDGSNDRGISKCGTMLCHDFLGRSSSDTSTPEELKIYDSNLRIEVKMKKQSNNDLFQVNSTSDDEIPRKRPEIWSRSAIVHSRERENIPRGSVQFAQEIDQVSSSADETEDERSEAENVAENFSISNPAPQQFQGIINLAFEDATENECREFSANKKFKRSVLLSVDECEELGSDEGEVHTPFQASVDSFSPSDVFDGISHEHHGRTCYSRFSRESEDNILECKQNKGNSVCKNESTVLDLSSIDSSRKNKQSVSATEKKNTIDVLSSRSRQLLREDKKVNNGSNVENDIQQRSKFLDSDVKSQERPCHLDLHQREPNSDIPKNSSTKSLDSFRSQVLPQEGPVKESHSTTTEKANIALSAGDIDDCDTLAQTRMYDHRPSKTLSPIYEMDVIEAFEQKVESETHVTDMDFEDDQHFAKQDWTLLKQLLSEQDSNLDVTNSVPEDLSLAQYLINQTLLLARDSSKPQGITHIDTLNRWSELTSPLDSSASITMASFSSEDCSPQGEWTILELETQH

SEQ ID NO: 745570 - protein, 285 aa, Homo sapiens
ADSRGSTSGCSVQFAQEIDQVSSSADETEDERSEAENVAENFSISNPAPQQFQGIINLAFEDATENECREFSANKKFKRSVLLSVDECEELGSDEGEVHTPFQASVDSFSPSDVFDGISHEHHGRTCYSRFSRESEDNILECKQNKGNSVCKNESTVLDLSSIDSSRKNKQSVSATEKKNTIDVLSSRSRQLLREDKKVNNGSNVENDIQQRSKFLDSDVKSQERPCHLDLHQREPNSDIPKNSSTKSLDSFRSQVLPQEGPVKESHSTTTEKANIALSAGNVQK

SEQ ID NO: 745571 - protein, 1144 aa, Homo sapiens
VQSFYAVRHTESWKLMSTDDQQKIQAAAFDKGDDRRLGKKPIFSSSQQRKQVSDSGDIKIKSWRGNNKKECWSYLSTNKKMKSDGLGASGHSSSTNRNSINKTLKQDDVKEKDGTKIASKITKELKTGGKNVSGKPKTVTKSKTENGDKARLENMSPRQVVERSATAAAAATGQKNLLNGKGVRNQEGQISGARPKVLTGNLNVQAKAKPLKKATGKDSPCLSIAGPSSRSTDSSMEFSISTECLDEPKENGSTEEEKPSGHKLSFCDSPGQMMKNSVDSVKNSTVAIKSRPVSRVTNGTSNKKSIHEQDTNVNNSVLKKVSGKGCSEPVPQAILKKRGTSNGCTAAQQRTKSTPSNLTKTQGSQGESPNSVKSSVSSRQSDENVAKLDHNTTTEKQAPKRKMVKQVHTALPKVNAKIVAMPKNLNQSKKGETLNNKDSKQKMPPGQVISKTQPSSQRPLKHETSTVQKSMFHDVRDNNNKDSVSEQKPHKPLINLASEISDAEALQSSCRPDPQKPLNDQEKEKLALECQNISKLDKSLKHELESKQICLDKSETKFPNHKETDDCDAANICCHSVGSDNVNSKFYSTTALKYMVSNPNENSLNSNPVCDLDSTSAGQIHLISDRENQVGRKDTNKQSSIKCVEDVSLCNPERTNGTLNSAQEDKKSKVPVEGLTIPSKLSDESAMDEDKHATADSDVSSKCFSGQLSEKNSPKNMETSESPESHETPETPFVGHWNLSTGVLHQRESPESDTGSATTSSDDIKPRSEDYDAGGSQDDDGSNDRGISKCGTMLCHDFLGRSSSDTSTPEELKIYDSNLRIEVKMKKQSNNDLFQVNSTSDDEIPRKRPEIWSRSAIVHSRERENIPRGSVQFAQEIDQVSSSADETEDERSEAENVAENFSISNPAPQQFQGIINLAFEDATENECREFSANKKFKRSVLLSVDECEELGSDEGEVHTPFQASVDSFSPSDVFDGISHEHHGRTCYSRFSRESEDNILECKQNKGNSVCKNESTVLDLSSIDSSRKNKQSVSATEKKNTIDVLSSRSRQLLREDKKVNNGSNVENDIQQRSKFLDSDVKSQERPCHLDLHQREPNSDIPKNSSTKSLDSFRSQVLPQEGPVKESHSTTTEKANIALSAGNVQK

SEQ ID NO: 745572 - protein, 144 aa, Homo sapiens
MAGSGAKRSRDGELETSLNTQGCTTEGDLLFAQKCKELQGFIPPLTDLLNGLKMGRFERGLSSFQQSVAMDRIQRIVGVLQKPQMGERYLGTLLQVEGMLKTWFPQIAAQKSSLGGGKHQLTKHFFQGHPQVNLSLLFLFPGIF

SEQ ID NO: 745573 - protein, 385 aa, Homo sapiens
MDSPSSVSSYSSYSLSSSFPTSPVNSDFGFPSDSEREDKGAHGPRPDTVGQRGGSRPSPGPIRCRHRSKVSGNQHTPSHPKQRGSASPMAGSGAKRSRDGELETSLNTQGCTTEGDLLFAQKCKELQGFIPPLTDLLNGLKMGRFERGLSSFQQSVAMDRIQRIVGVLQKPQMGERYLGTLLQVEGMLKTWFPQIAAQKSSLGGGKHQLTKHFPSHHSDSAASSPASPMEKMDQTQLGHLALKPKQPWHLTQWPAMNLTWIHTTPICNPPLSSPGTISFSHGPLGTGTGIGVILFLQHGVQPFTHSAPTTPVPPTTASPVIPGEPMKLSGEGPRCYSLPVTLPSDWSYTLSPPSLPTLARKMTIGHREQQRSHPPVAADAHLLNL

SEQ ID NO: 745574 - protein, 385 aa, Homo sapiens; identical to SEQ ID NO: 745573

SEQ ID NO: 745575 - protein, 228 aa, Homo sapiens
MDRIQRIVGVLQKPQMGERYLGTLLQVEGMLKTWFPQIAAQKSSLGGGKHQLTKHFPSHHSDSAASSPASPMEKMDQTQLGHLALKPKQPWHLTQWPAMNLTWIHTTPICNPPLSSPGTISFSHGPLGTGTGIGVILFLQHGVQPFTHSAPTTPVPPTTASPVIPGEPMKLSGEGPRCYSLPVTLPSDWSYTLSPPSLPTLARKMTIGHREQQRSHPPVAADAHLLNL

SEQ ID NO: 745576 - protein, 297 aa, Homo sapiens
MAGSGAKRSRDGELETSLNTQGCTTEGDLLFAQKCKELQGFIPPLTDLLNGLKMGRFERGLSSFQQSVAMDRIQRIVGVLQKPQMGERYLGTLLQVEGMLKTWFPQIAAQKSSLGGGKHQLTKHFPSHHSDSAASSPASPMEKMDQTQLGHLALKPKQPWHLTQWPAMNLTWIHTTPICNPPLSSPGTISFSHGPLGTGTGIGVILFLQHGVQPFTHSAPTTPVPPTTASPVIPGEPMKLSGEGPRCYSLPVTLPSDWSYTLSPPSLPTLARKMTIGHREQQRSHPPVAADAHLLNL

SEQ ID NO: 745577 - protein, 297 aa, Homo sapiens; identical to SEQ ID NO: 745576

SEQ ID NO: 745578 - protein, 297 aa, Homo sapiens; identical to SEQ ID NO: 745576

SEQ ID NO: 745579 - protein, 131 aa, Homo sapiens
MEKMDQTQLGHLALKPKQPWHLTQWPAMNLTWIHTTPICNPPLSSPGTISFSHGPLGTGTGIGVILFLQHGVQPFTHSAPTTPVPPTTASPVIPGEPMKLSGEGPRCYSLPVTLPSDWSYTLSPPSLPTLA

SEQ ID NO: 745580 - protein, 340 aa, Homo sapiens
GETTKEAGTRARSDTWMMTRHRSKVSGNQHTPSHPKQRGSASPMAGSGAKRSRDGELETSLNTQGCTTEGDLLFAQKCKELQGFIPPLTDLLNGLKMGRFERGLSSFQQSVAMDRIQRIVGVLQKPQMGERYLGTLLQVEGMLKTWFPQIAAQKSSLGGGKHQLTKHFPSHHSDSAASSPASPMEKMDQTQLGHLALKPKQPWHLTQWPAMNLTWIHTTPICNPPLSSPGTISFSHGPLGTGTGIGVILFLQHGVQPFTHSAPTTPVPPTTASPVIPGEPMKLSGEGPRCYSLPVTLPSDWSYTLSPPSLPTLARKMTIGHREQQRSHPPVAADAHLLNL

SEQ ID NO: 745581 - protein, 380 aa, Homo sapiens
MLRRKPSNASEKEPTQKKKLSLQRSSSFKDFAKSKPSSPVVSEKEFNLDDNIPEDDSGVPTPEDAGKSGKKLGKKWRAVISRTMNRKMGKMMVKALSEEMADTLEEGSASPTSPDYSLDSPGPEKMALAFSEQEEHELPVLSRQASTGSELCSPSPGSGSFGEEPPAPQYTGPFCGRARVHTDFTPSPYDHDSLKLQKGDVIQIIEKPPVGTWLGLLNGKVGSFKFIYVDVLPEEAVGHARPSRRQSKGKRPKPKTLHELLERIGLEEHTSTLLLNGYQTLEDFKELRETHLNELNIMDPQHRAKLLTAAELLLDYDTGSEEAEEGAESSQEPVAHTVSEPKVDIPRDSGCFEGSESGRDDAELAGTEEQLQGLSLAGAP

SEQ ID NO: 745582 - protein, 380 aa, Homo sapiens; identical to SEQ ID NO: 745581

SEQ ID NO: 745583 - protein, 380 aa, Homo sapiens; identical to SEQ ID NO: 745581

SEQ ID NO: 745584 - protein, 380 aa, Homo sapiens; identical to SEQ ID NO: 745581

SEQ ID NO: 745585 - protein, 104 aa, Homo sapiens
GGSPYPASPLLGRPLYYTSPFYGNYTNYGNLNAALQGQGLLRYNSAAAAPGEALHTAPKAASDAGKAGAHPLESHYRSPGGGYEPKKDASEGCTVVGGGVQPYL

SEQ ID NO: 745586 - protein, 104 aa, Homo sapiens; identical to SEQ ID NO: 745585

SEQ ID NO: 745587 - protein, 104 aa, Homo sapiens; identical to SEQ ID NO: 745585

SEQ ID NO: 745588 - protein, 104 aa, Homo sapiens; identical to SEQ ID NO: 745585

SEQ ID NO: 745589 - protein, 104 aa, Homo sapiens; identical to SEQ ID NO: 745585

SEQ ID NO: 745590 - protein, 130 aa, Homo sapiens
GGSPYPASPLLGRPLYYTSPFYGNYTNYGNLNAALQGQGLLRYNSAAAAPGEALHTAPKAASDAGKAGAHPLESHYRSPGGGYEPKKGRRPAAGGAREGRESQPRGGGAPGRPEGGSGKKIQGATPGTQN

SEQ ID NO: 745591 - protein, 130 aa, Homo sapiens
MASDLIRTILVVALISKLGTAVDAELMPSGAILQNKRENLPRVCHALAFLGMARCQDLFLVRLQGWKLGTRFQDGPRSTPQEEGGSPQRKRGMPVQIHFLLKSFLSSPITFAFISLARTVSLATAICKIV

SEQ ID NO: 745592 - protein, 261 aa, Homo sapiens
SLLGKSLASSRAPERISAKRKALVPAGRVCAGFPQLLGAFPRSRGRQSTDPGVGAHSGTPSRGAGVRESRAAALDWCSGDHSCNDSLGLQKEGWNNGRWKLSANAAPLVSMNLTCPSFFLDKRLLKSQGVQNGFRSYQDNLGVALISKLGTAVDAELMPSGAILQNKRENLPRVCHALAFLGMARCQDLFLVRLQGWKLGTRFQDGPRSTPQEEGGSPQRKRGMPVQIHFLLKSFLSSPITFAFISLARTVSLATAICKIV

SEQ ID NO: 745593 - protein, 234 aa, Homo sapiens
SLLGKSLASSRAPERISAKRKALVPAGRVCAGFPQLLGAFPRSRGRQSTDPGVGAHSGTPSRGAGVRERGCAGGALALQLQPAPSAQGSERRRLQHGVGTQLAALPGALLLPALLTFPPALRGHQAAEELRGQHGRGAPARAPLGAPRALGLLPRASGVTRVRALAGGHRAARALGWVSASILRPRGLPASRAELLPLTGAQGTTAAMTVWACKKKAGTTGDGSFLQMQHHWYP

SEQ ID NO: 745594 - protein, 234 aa, Homo sapiens; identical to SEQ ID NO: 745593

SEQ ID NO: 745595 - protein, 33 aa, Homo sapiens
TELRGRWAGSPPRFSVLAASQLPGAGLGGSDGS

SEQ ID NO: 745596 - protein, 209 aa, Homo sapiens
TPRDLSRKSHHQLRVDERQPLLVGPPESMREHVVAASKAMKMGDWKTCHSFIINEKMNGKVWDLFPEADKVRTMLVRKIQEESLRTYLFTYSSVYDSISMETLSDMFELDLPTVHSIISKMIINEELMASLDQPTQTVVMHRTEPTAQQNLALQLAEKLGSLVENNERVFDHKQGTYGGYFRDQKDGYRKNEGYMRRGGYRQQQSQTAY

SEQ ID NO: 745597 - protein, 143 aa, Homo sapiens
IISKMMECTVGRSSSNMSDSVSMLMEIIDTAVGEEVGPQWLFLDLPTVHSIISKMIINEELMASLDQPTQTVVMHRTEPTAQQNLALQLAEKLGSLVENNERVFDHKQGTYGGYFRDQKDGYRKNEGYMRRGGYRQQQSQTAY

SEQ ID NO: 745598 - protein, 209 aa, Homo sapiens; identical to SEQ ID NO: 745596

SEQ ID NO: 745599 - protein, 163 aa, Homo sapiens
EESLRTYLDLPNQAGADFVSLGEKVRTMLVRKIQEESLRTYLFTYSSVYDSISMETLSDMFELDLPTVHSIISKMIINEELMASLDQPTQTVVMHRTEPTAQQNLALQLAEKLGSLVENNERVFDHKQGTYGGYFRDQKDGYRKNEGYMRRGGYRQQQSQTAY

SEQ ID NO: 745600 - protein, 209 aa, Homo sapiens; identical to SEQ ID NO: 745596

SEQ ID NO: 745601 - protein, 128 aa, Homo sapiens
GIPMENSGAGSLSLLFLVLCLFPSPMLLLFLPFHSPFIFLSSWLPPLPSCLLCSDVLPFWMLVAGYTLPTVPRSVGRQHLEAATATTGSALAPPCPAQGQGPSPPETGSLPLEPQRGKKKKTEVIAAI

SEQ ID NO: 745602 - protein, 520 aa, Homo sapiens
MGKPSSMDTKFKDDLFRKYVQFHESKVDTTTSRQRPGSDECLRVAASTLLSLHKVDPFYRFRLIQFYEVVESSLRSLSSSSLRALHGAFSMLETVGINLFLYPWKKEFRSIKTYTGPFVYYVKSTLLEEDIRAILSCMGYTPELGTAYKLRELVETLQVKMVSFELFLAKVECEQMLEIHSQVKDKGYSELDIVSERKSSAEDVRGCSDALRRRAEGREHLTASMSRVALQKSASERAAKDYYKPRVTKPSRSVDAYDSYWESRKPPLKASLSLRKEPVATDVGDDLKDEIIRPSPSLLTMASSPHGSPDVLPPASPSNGPALLRGTYFSTQDDVDLYTDSEPRATYRRQDALRPDVWLLRNDAHSLYHKRSPPAKESALSKCQSCGLSCSSSLCQRCDSLLTCPPASKPSAFPSKASTHDSLAHGASLREKYPGQTQGLDRLPHLHSKSKPSTTPTSRCGFCNRPGATNTCTQCSKVSCDACLSAYHYDPCYKKSELHKFMPNNQLNYKSTQLSHLVYR

SEQ ID NO: 745603 - protein, 520 aa, Homo sapiens; identical to SEQ ID NO: 745602

SEQ ID NO: 745604 - protein, 520 aa, Homo sapiens; identical to SEQ ID NO: 745602

SEQ ID NO: 745605 - protein, 464 aa, Homo sapiens
MGKPSSMDTKFKDDLFRKYVQFHESKVDTTTSRQRPGSDECLRVAASTLLSLHKVDPFYRFRLIQFYEVVESSLRSLSSSSLRALHGAFSMLETVGINLFLYPWKKEFRSIKTYTGPFVYYVKSTLLEEDIRAILSCMGYTPELGTAYKLRELVETLQVKMVSFELFLAKVECEQMLEIHSQVKDKGYSELDIVSERKSSAEDVRGCSDALRRRAEGREHLTASMSRVALQKSASERAAKDYYKPRVTKPSRSVDAYDSYWESRKPPLKASLSLRKEPVATDVGDDLKDEIIRPSPSLLTMASSPHGSPDVLPPASPSNGPALLRGTYFSTQDDVDLYTDSEPRATYRRQDALRPDVWLLRNDAHSLYHKRSPPAKESALSKCQSCGLSCSSSLCQRCDSLLTCPPASKPSAFPSKASTHDSLAHGASLREKYPGQTQARRSELDQSSLHSHSVCLKRRHKLTW

SEQ ID NO: 745606 - protein, 520 aa, Homo sapiens; identical to SEQ ID NO: 745602

SEQ ID NO: 745607 - protein, 520 aa, Homo sapiens; identical to SEQ ID NO: 745602

SEQ ID NO: 745608 - protein, 458 aa, Homo sapiens
MGKPSSMDTKFKDDLFRKYVQFHESKVDTTTSRQRPGSDECLRVAASTLLSLHKVDPFYRFRLIQFYEVVESSLRSLSSSSLRALHGAFSMLETVGINLFLYPWKKEFRSIKTYTGPFVYYVKSTLLEEDIRAILSCMGYTPELGTAYKLRELVETLQVKMVSFELFLAKVECEQMLEIHSQVKDKGYSELDIVSERKSSAEDVRGCSDALRRRAEGREHLTASMSRVALQKSASERAAKDYYKPRVTKPSRSVDAYDSYWESRKPPLKASLSLRKEPVATDVGDDLKDEIIRPSPSLLTMASSPHGSPDVLPPASPSNGPALLRGTYFSTQDDVDLYTDSEPRATYRRQDALRPDVWLLRNDAHSLYHKRSPPAKESALSKCQSCGLSCSSSLCQRCDSLLTCPPASKPSAFPSKASTHDSLAHGASLREKYPGQTQGLDRLPHLHSKSKPLSRCQR

SEQ ID NO: 745609 - protein, 114 aa, Homo sapiens
MRREPRYQGQVGPDIHTDSERAGQAGTWGPGYPLFPAVAWEAGKGWGLGYHGMCFLNGSFVSLPDFVQPSATASRQHQDGSQRSADQLSYLQCPSCPVRRGCPPGEVRASAGAA

SEQ ID NO: 745610 - protein, 725 aa, Homo sapiens
GRWPRHLPLLLTATTSRSQGLVETTIFEARLVAVTHGPLRRRCKSAQLPTCCALTQCEGNQGTRAKWVQTSTRILKGQVKQTLSSHQPRPLDSTKMEVKGQLISSPTFNAPAALFGEAAPQVKSERLRGLLDRQRTLQEALSLKLQELRKVCLQEAELTGQLPPECPLEPGERPQLVRRRPPTARAYPPPHPNQAHHSLCPAEELALEALEREVSVQQQIAAAARRLALAPDLSTEQRRRRRQVQADALRRLHELEEQLRDVRARLGLPVLPLPQPLPLSTGSVITTQGVCLGMRLAQLSQEDVVLHSESSSLSESGASHDNEEPHGCFSLAERPSPPKAWDQLRAVSGGSPERRTPWKPPPSDLYGDLKSRRNSVASPTSPTRSLPRSASSFEGRSVPATPVLTRGAGPQLCKPEGLHSRQWSGSQDSQMGFPRADPASDRASLFVARTRRSNSSEALLVDRAAGGGAGSPPAPLAPSASGPPVCKSSEVLYERPQPTPAFSSRTAGPPDPPRAARPSSAAPASRGAPRLPPVCGDFLLDYSLDRGLPRSGGGTGWGELPPAAEVPGPLSRRDGLLTMLPGPPPVYAADSNSPLLRTKDPHTRATRTKPCGLPPEAAEGPEVHPNPLLWMPPPTRIPSAGERSGHKNLALEGLRDWYIRNSGLAAGPQRRPVLPSVGPPHPPFLHARCYEVGQALYGAPSQAPLPHSRSFTAPPVSGRYGGCFY

SEQ ID NO: 745611 - protein, 725 aa, Homo sapiens; identical to SEQ ID NO: 745610

SEQ ID NO: 745612 - protein, 630 aa, Homo sapiens
MEVKGQLISSPTFNAPAALFGEAAPQVKSERLRGLLDRQRTLQEALSLKLQELRKVCLQEAELTGQLPPECPLEPGERPQLVRRRPPTARAYPPPHPNQAHHSLCPAEELALEALEREVSVQQQIAAAARRLALAPDLSTEQRRRRRQVQADALRRLHELEEQLRDVRARLGLPVLPLPQPLPLSTGSVITTQGVCLGMRLAQLSQEDVVLHSESSSLSESGASHDNEEPHGCFSLAERPSPPKAWDQLRAVSGGSPERRTPWKPPPSDLYGDLKSRRNSVASPTSPTRSLPRSASSFEGRSVPATPVLTRGAGPQLCKPEGLHSRQWSGSQDSQMGFPRADPASDRASLFVARTRRSNSSEALLVDRAAGGGAGSPPAPLAPSASGPPVCKSSEVLYERPQPTPAFSSRTAGPPDPPRAARPSSAAPASRGAPRLPPVCGDFLLDYSLDRGLPRSGGGTGWGELPPAAEVPGPLSRRDGLLTMLPGPPPVYAADSNSPLLRTKDPHTRATRTKPCGLPPEAAEGPEVHPNPLLWMPPPTRIPSAGERSGHKNLALEGLRDWYIRNSGLAAGPQRRPVLPSVGPPHPPFLHARCYEVGQALYGAPSQAPLPHSRSFTAPPVSGRYGGCFY

SEQ ID NO: 745613 - protein, 319 aa, Homo sapiens [sequence omitted]

SEQ ID NO: 745614 - protein, 69 aa, Homo sapiens
FTYSVKSRDRKMVGDVTGAQAYASTAKCLNIWALILGILMTIGFILLLVFGSVTVSHIMFQIIQEKRGY

SEQ ID NO: 745615 - protein, 88 aa, Homo sapiens
FTYSVKSRDRKMVGDVTGAQAYASTAKCLNIWALILGILMTILLIVIPVLIFQAYDRSGGITEARSSAHDLYATYSNFHSSPCPRSQV

SEQ ID NO: 745616 - protein, 566 aa, Homo sapiens
MNVNQVAENLALSHQEELVDLPKNYPLSENEDEGDSDGERKHQKLLEAIISLDGKNRRKLAERSEASLKVSEFSVSSEGSGEKLGLADLLEPVKTSSSLATVKKQLNRVKSKKVVELPLNKEKIEQIHREVAFSKTSQVLSKWDPIILKNQQAEQLVFPLGKEQPAIAPIEHALSGWKARTPLEQEIFNLLHKNKQPVTDPLLTPMEKASLQAMSLEEAKMHRAELQRARALQSYYEAKARKEKKIKSKKYHKVVKKGKAKKALKEFEQLQKVNPTVALEEMEKIENARMMERMSLKHQNSGKWAKSKAIMAKYDLEARQAMQEQLAKNKELTQKLQVASESEEEEGGTEVEELLVPHVANEVQMNVDGPNPWMFRSCTSDTKEAATQEDPEQVPELAAHEVSASEAEERPVAEEEILLREFEERQSLRKRSELNQDAEPASSQETKDSSSQEVLSELRALSQKLKEKHQSRKQKASSEGTVPQVQREEPAPEEAEPLLLQRSERVQTLEELEELGKEDCFQNKELPRPVLEGQQSERTPNNRPDAPKEKKEKEQLINLQNFLTTQ

SEQ ID NO: 745617 - protein, 566 aa, Homo sapiens; identical to SEQ ID NO: 745616

SEQ ID NO: 745618 - protein, 566 aa, Homo sapiens; identical to SEQ ID NO: 745616

SEQ ID NO: 745619 - protein, 566 aa, Homo sapiens; identical to SEQ ID NO: 745616

SEQ ID NO: 745620 - protein, 500 aa, Homo sapiens
PEFGGRRKMAAGERSWCLCKLLRFFYSLFFPGLIVCGTLCVCLVIVLWGIRLLLQRKKKLVSTSKNGKNQMVIAFFHPYCNAGGGGERVLWCALRALQKKYPEAVYVVYTGDVNVNGQQILEGAFRRFNIRLIHPVQFVFLRKRYLVEDSLYPHFTLLGQSLGSIFLGWEALMQCVPDVYIDSMGYAFTLPLFKYIGGCQVGSYVHYPTISTDMLSVVKNQNIGFNNAAFITRNPFLSKVKLIYYYLFAFIYGLVGSCSDVVMVNSSWTLNHILSLWKVGNCTNIVYPPCDVQTFLDIPLHEKKMTPGHLLVSVGQFRPEKNHPLQIRAFAKLLNKKMVESPPSLKLVLIGGCRNKDDELRVNQLRRLSEDLGVQEYVEFKINIPFDELKNYLSEATIGLHTMWNEHFGIGVVECMAAGTIILAHNSGGPKLDIVVPHEGDITGFLAESEEDYAETIAHILSMSAEKRLQIRKSARASVSRFSDQEFEVTFLSSVEKLFK

SEQ ID NO: 745621 - protein, 191 aa, Homo sapiens
GRIGTAPVYSSQRERRRRRVISAFPSETSDLFYFIVNKLHEYLPESRDKNALQNQSQRVDELVACIEIIQTLVLMFRETETESSRLNTLAAKNYRSLFWSIQILLQHFYMRYFCVFQQGNLGLGSTKFAISWIMSFLQSCPPIITFVASIVTTSGEGSFSFISAAKSLPSSSVVPAILHPQELSAAQKDSS

SEQ ID NO: 745622 - protein, 171 aa, Homo sapiens
GRIGTAPVYSSQRERRRRRVISAFPSETSDLFYFIVNKLHEYLPESRDKNALQNQSQRVDELVACIEIIQTLVLMFRETETESSRLNTLAAKKGALFNLLVILISEPQIPKSCPVFDIQLVADSALVRMSFDAELQKLILEYTNTATALLYEILLCLSAGKSRIGIHKVCY

SEQ ID NO: 745623 - protein, 339 aa, Homo sapiens
SVVFLRRHLPPEVYDAVRAYEPCIVVSNSENHILKYVVLSDRLVYLTENPPKSIRRVVALRDVVAIDLIDDYPEFLSSPDREISQHIRIIYSSTVLKKECKKSNSVRKFLFPFHHTKANNKKVKEEKNGLAFWRSKESRSLKESPLRSEEKIKHFSQLKSELFLKDNSLRRILSLLMELKVAAQKNFILKRLFWKTSDLFYFIVNKLHEYLPESRDKNALQNQSQRVDELVACIEIIQTLVLMFRETETESSRLNTLAAKKGALFNLLVILISEPQIPKSCPVFDIQLVADSALVRMSFDAELQKLILEYTNTATALLYEILLCLSAGKSRIGIHKVCY

SEQ ID NO: 745624 - protein, 171 aa, Homo sapiens; identical to SEQ ID NO: 745622

SEQ ID NO: 745625 - protein, 232 aa, Homo sapiens
LINISALKKSWNNYIIKATLWKIPSMLVSSVLLWKSKAIRSEEKIKHFSQLKSELFLKDNSLRRILSLLMELKVAAQKNFILKRLFWKTSDLFYFIVNKLHEYLPESRDKNALQNQSQRVDELVACIEIIQTLVLMFRETETESSRLNTLAAKKGALFNLLVILISEPQIPKSCPVFDIQLVADSALVRMSFDAELQKLILEYTNTATALLYEILLCLSAGKSRIGIHKVCY

SEQ ID NO: 745626 - protein, 226 aa, Homo sapiens
VAAASDFNRHPGSSAEAHPDDLAACGACAEPRPGPALGVLPSAYLSTATGVCDGTPVLEPQPGEATRLPGPGPTPRTPAQTEVPLPSPAGAAPPCAPRPSPPTHLWRALCTQRGLEMPSGHERERKEQLMPRAGPERRVYVHVPPAAGGTTQPGHSVHWTVHMFLRKAGGRFWNAVRMNFSARVSPSSSSPVYHFVLIGDGNTRSLMALPWAGNTSPTPSSRKASS

SEQ ID NO: 745627 - protein, 138 aa, Homo sapiens
EDDEGDARARARIALYSVFPRDQVDRVMAAFPELSDLARLILLVTEMPERGGAPGQALRDQHALAGNGPASPCVLDGWTCGCQPGPEWAHHGAPFSLKMVREACFLLLSGVVGAWWHLVILTEAGACCGEVHPLPWRE

SEQ ID NO: 745628 - protein, 233 aa, Homo sapiens
GGRNRGRAGSQGGRGGGAQAAARVNRGGGPIRNRPAIARGAAGGGGRNRPAPYSRPKQLPDKWQHDLFDSGFGGGAGVETGGKLLVSNLDFGVSDADIQELFAEFGTLKKAAVHYDRSGRSLGTADVHFERKADALKAMKQYNGVPLDGRPMNIQLVTSQIDAQRRPAQSVNRGGMTRNRGAGGFGGGGGTRRGTRGGARGRGRGAGRNSKQQLSAEELDAQLDAYNARMDTS

SEQ ID NO: 745629 - protein, 233 aa, Homo sapiens; identical to SEQ ID NO: 745628

SEQ ID NO: 745630 - protein, 255 aa, Homo sapiens
RWLGLCGNDGLVAFGGPQDFGPLRGLPSLLGGNIVTPKLLASSPIRPPTHVTRQESEPGTSVSCMFIDNQPGALQAGPKQLPDKWQHDLFDSGFGGGAGVETGGKLLVSNLDFGVSDADIQELFAEFGTLKKAAVHYDRSGRSLGTADVHFERKADALKAMKQYNGVPLDGRPMNIQLVTSQIDAQRRPAQSVNRGGMTRNRGAGGFGGGGGTRRGTRGGARGRGRGAGRNSKQQLSAEELDAQLDAYNARMDTS

SEQ ID NO: 745631 - protein, 146 aa, Homo sapiens
SICINLFPSVLQELFAEFGTLKKAAVHYDRSGRSLGTADVHFERKADALKAMKQYNGVPLDGRPMNIQLVTSQIDAQRRPAQSVNRGGMTRNRGAGGFGGGGGTRRGTRGGARGRGRGAGRNSKQQLSAEELDAQLDAYNARMDTS

SEQ ID NO: 745632 - protein, 149 aa, Homo sapiens
GGRNRGRAGSQGGRGGGAQAAARVNRGGGPIRNRPAIARGAAGGGGRNRPAPYSRPKQLPDKWQHDLFDSGFGGGAGVETGGKLLVSNLDFGVSDADIQELFAEFGTLKKAAVHYDRSGRSLGTADVHFERKADALKAMKQYNGVPLDA

SEQ ID NO: 745633 - protein, 129 aa, Homo sapiens
GRGGTVRPRAGAAAAPEGALAAPFRPDPLRPGRGRVRSSREGQESPGLRLTDLLLLRFFFQPKQLPDKWQHDLFDSGFGGGAGVETGGKLLVSNLDFGVSDADIQVRDEGFSVSRSPCTGRIVILGMWP

SEQ ID NO: 745634 - protein, 233 aa, Homo sapiens; identical to SEQ ID NO: 745628

SEQ ID NO: 745635 - protein, 301 aa, Homo sapiens
GRGGTVRPRAGAAAAPEGALAAPFRPDPLRPGRGRVRSSREGQESPGLRLTDLLLLRFFFQPKQLPDKWQHDLFDSGFGGGAGVETGGKLLVSNLDFGVSDADIQVVSSIHWKPLLVNSSSRCVPAAGVSPHSGFPLQLPACLRSGQFPGQRLTSDFAQAGVGGEGKELFAEFGTLKKAAVHYDRSGRSLGTADVHFERKADALKAMKQYNGVPLDGRPMNIQLVTSQIDAQRRPAQSVNRGGMTRNRGAGGFGGGGGTRRGTRGGARGRGRGAGRNSKQQLSAEELDAQLDAYNARMDTS

SEQ ID NO: 745636 - protein, 165 aa, Homo sapiens
GGRNRGRAGSQGGRGGGAQAAARVNRGGGPIRNRPAIARGAAGGGGRNRPAPYSRPKQLPDKWQHDLFDSGFGGGAGVETGGKLLVSNLDFGVSDADIQELFAEFGTLKKAAVHYDRSGRSLGTADVHFERKADALKAMKQYNGVPLDASYIPPLLQLLPEDSLL

SEQ ID NO: 745637 - protein, 537 aa, Homo sapiens
LQPELEEGEARKKMAAVAAEAAATAASPGEGGAGEAEPEMEPIPGSEAGTDPLPVTATEASVPDGETDGQQSAPQADEPPLPPPPPPPGELARSPEAVGPELEAEEKLSVRVAESAAAAPQGGPELPPSPASPPEQPPAPEEREEPPLPQPVAPALVPPAGGDSTVSQLIPGSEVRVTLDHIIEDALVVSFRFGEKLFSGVLMDLSKRFGPHGIPVTVFPKREYKDKPEAMPLQSNTFQEGTEVKCEANGAVPDDPSPVPHPELSLAESLWTSKPPPLFHEGAPYPPPLFIRDTYNQSIPQPPPRKIKRPKRKMYREEPTSIMNAIKLRPRQVLCDKCKNSVVAEKKEIRKGSSATDSSKYEDKKRRNESVTTVNKKLKTDHKVDGKNQNESQKRNAVVKVSNIAHSRGRVVKVSAQANTSKAQLSTKKVLQSKNMDHAKAREVLKIAKEKAQKKQNETSTSKNAHSKVHFTRRYQNPSSGSLPPRVRLKPQRYRNEENDSSLKTGLEKMRSGKMAPKPQSRCTSTRSAEFIDQEAD

SEQ ID NO: 745638 - protein, 556 aa, Homo sapiens
LQPELEEGEARKKMAAVAAEAAATAASPGEGGAGEAEPEMEPIPGSEAGTDPLPVTATEASVPDGETDGQQSAPQADEPPLPPPPPPPGELARSPEAVGPELEAEEKLSVRVAESAAAAPQGGPELPPSPASPPEQPPAPEEREEPPLPQPVAPALVPPAGGDSTVSQLIPGSEVRVTLDHIIEDALVVSFRFGEKLFSGVLMDLSKRDHETYGAIALLWWEKYTAILVKQFGPHGIPVTVFPKREYKDKPEAMPLQSNTFQEGTEVKCEANGAVPDDPSPVPHPELSLAESLWTSKPPPLFHEGAPYPPPLFIRDTYNQSIPQPPPRKIKRPKRKMYREEPTSIMNAIKLRPRQVLCDKCKNSVVAEKKEIRKGSSATDSSKYEDKKRRNESVTTVNKKLKTDHKVDGKNQNESQKRNAVVKVSNIAHSRGRVVKVSAQANTSKAQLSTKKVLQSKNMDHAKAREVLKIAKEKAQKKQNETSTSKNAHSKVHFTRRYQNPSSGSLPPRVRLKPQRYRNEENDSSLKTGLEKMRSGKMAPKPQSRCTSTRSAAQRH

SEQ ID NO: 745639 - protein, 533 aa, Homo sapiens
LQPELEEGEARKKMAAVAAEAAATAASPGEGGAGEAEPEMEPIPGSEAGTDPLPVTATEASVPDGETDGQQSAPQADEPPLPPPPPPPGELARSPEAVGPELEAEEKLSVRVAESAAAAPQGGPELPPSPASPPEQPPAPEEREEPPLPQPVAPALVPPAGGDSTVSQLIPGSEVRVTLDHIIEDALVVSFRFGEKLFSGVLMDLSKRFGPHGIPVTVFPKREYKDKPEAMPLQSNTFQEGTEVKCEANGAVPDDPSPVPHPELSLAESLWTSKPPPLFHEGAPYPPPLFIRDTYNQSIPQPPPRKIKRPKRKMYREEPTSIMNAIKLRPRQVLCDKCKNSVVAEKKEIRKGSSATDSSKYEDKKRRNESVTTVNKKLKTDHKVDGKNQNESQKRNAVVKVSNIAHSRGRVVKVSAQANTSKAQLSTKKVLQSKNMDHAKAREVLKIAKEKAQKKQNETSTSKNAHSKVHFTRRYQNPSSGSLPPRVRLKPQRYRNEENDSSLKTGLEKMRSGKMAPKPQSRCTSTRSAAQRH

SEQ ID NO: 745640 - protein, 768 aa, Homo sapiens
LQPELEEGEARKKMAAVAAEAAATAASPGEGGAGEAEPEMEPIPGSEAGTDPLPVTATEASVPDGETDGQQSAPQADEPPLPPPPPPPGELARSPEAVGPELEAEEKLSVRVAESAAAAPQGGPELPPSPASPPEQPPAPEEREEPPLPQPVAPALVPPAGGDSTVSQLIPGSEVRVTLDHIIEDALVVSFRFGEKLFSGVLMDLSKRFGPHGIPVTVFPKREYKDKPEAMPLQSNTFQEGTEVKCEANGAVPDDPSPVPHPELSLAESLWTSKPPPLFHEGAPYPPPLFIRDTYNQSIPQPPPRKIKRPKRKMYREEPTSIMNAIKLRPRQVLCDKCKNSVVAEKKEIRKGSSATDSSKYEDKKRRNESVTTVNKKLKTDHKVDGKNQNESQKRNAVVKVSNIAHSRGRVVKVSAQANTSKAQLSTKKVLQSKNMDHAKAREVLKIAKEKAQKKQNETSTSKNAHSKVHFTRRYQNPSSGSLPPRVRLKPQRYRNEENDSSLKTGLEKMRSGKMAPKPQSRCTSTRSAGEAPSENQSPSKGPEEASSEVQDTNEVHVPGDQDEPQTLGKKGSKNNISVYMTLNQKKSDSSSASVCSIDSTDDLKSSNSECSSSESFDFPPGSMHAPSTSSTSSSSKEEKKLSNSLKMKVFSKNVSKCVTPDGRTICVGDIVWAKIYGFPWWPARILTITVSRKDNGLLVRQEARISWFGSPTTSFLALSQLSPFLENFQSRFNKKRKGLYRKAITEAAKAAKQLTPEVRALLTQFET

SEQ ID NO: 745641 - protein, 114 aa, Homo sapiens
MIEYQIPVSFKDVVVGFTQEEWHRLSPAQRALYRDVMLETYSNLVSVGYEGTKPDVILRLEQEEAPWIGEAACPGCHCWEDIWRVNIQRKRRQDMLLRPGAAIKQENIAQGEKL

SEQ ID NO: 745642 - protein, 114 aa, Homo sapiens; identical to SEQ ID NO: 745641

SEQ ID NO: 745643 - protein, 114 aa, Homo sapiens; identical to SEQ ID NO: 745641

SEQ ID NO: 745644 - protein, 147 aa, Homo sapiens
WCATNLMVQGRNGSWVGRKGYMELQELREIEKDSRVERIIPKVLMTFENLSLCGREPESLENLFLDPDMAQEKMKLGFKSLPSSTTADGNILRRVNSAPLINGLGFNSQVLQADMLRIRTNRTTFRNRRSLEITSPTSVEQKPKDLF

SEQ ID NO: 745645 - protein, 195 aa, Homo sapiens
MAQEKMKLGFKSLPSSTTADGNILRRVNSAPLINGLGFNSQVLQADMLRIRTNRTTFRNRRSLLLPPPPFHGSISRLHQIKQEEAMDLINRETMSEWKLQSEIQISHSWEEGLKLVKWHFNINQKRFSKAQPTCFLLILPNCQKIMCIYFQLLLMETTAMLDLLVIRQLKSALSQTLLCHLLILVLICSSRQTFN

SEQ ID NO: 745646 - protein, 101 aa, Homo sapiens
QIDRHLLVGRGPLGRPRSAPNSASAVALRFAVSPGEGGGNEVDPNPEEGEEGAGPLAGGAFPKEEQEMLKTYLKTQDLAKDPRSPKAKQCFEKKNNNNKAL

SEQ ID NO: 745647 - protein, 103 aa, Homo sapiens
MGIWGARVDHVLGALCHVCVLTRGPCVGRVLGASCHACDPGSWPVCRSCAGCILSCVCPGSWPVCRSCAGCILSCVCPASWCVCRLCAGCILSCVCPGSWPVC

SEQ ID NO: 745648 - protein, 604 aa, Homo sapiens
MARISFSYLCPASWYFTVPTVSPFLRQRVAFLGLFFISCLLLLMLIIDFRHWSASLPRDRQYERYLARVGELEATDTEDPNLNYGLVVDCGSSGSRIFVYFWPRHNGNPHDLLDIKQMRDRNSQPVVKKIKPGISAMADTPEHASDYLRPLLSFAAAHVPVKKHKETPLYILCTAGMRLLPERKQLAILADLVKDLPLEFDFLFSQSQAEVISGKQEGVYAWIGINFVLGRFDHEDESDAEATQELAAGRRRTVGILDMGGASLQIAYEVPTSTSVLPAKQEEAAKILLAEFNLGCDVQHTEHVYRVYVTTFLGFGGNFARQRYEDLVLNETLNKNRLLGQKTGLSPDNPFLDPCLPVGLTDVVERNSQVLHVRGRGDWVSCGAMLSPLLARSNTSQASLNGIYQSPIDFNNSEFYGFSEFFYCTEDVLRIGGRYHGPTFAKAAQDYCGMAWSVLTQRFKNGLFSSHADEHRLKYQCFKSAWMYQVLHEGFHFPYDYPNLRTAQLVYDREVQWTLGAILYKTRFLPLRDLRQEGVRQAHGSWFRLSFVYNHYLFFACILVVLLAIFLYLLRLRRIHHRQTRASAPLDLLWLEEVVPMMGVQVGP

SEQ ID NO: 745649 - protein, 220 aa, Homo sapiens
MLSPLLARSNTSQASLNGIYQSPIDFNNSEFYGFSEFFYCTEDVLRIGGRYHGPTFAKAAQDYCGMAWSVLTQRFKNGLFSSHADEHRLKYQCFKSAWMYQVLHEGFHFPYDYPNLRTAQLVYDREVQWTLGAILYKTRFLPLRDLRQEGVRQAHGSWFRLSFVYNHYLFFACILVVLLAIFLYLLRLRRIHHRQTRASAPLDLLWLEEVVPMMGVQVGP

SEQ ID NO: 745650 - protein, 510 aa, Homo sapiens
MAAELVEAKNMVMSFRVSDLQMLLGFVGRSKSGLKHELVTRALQLVQFDCSPELFKKIKELYETRYAKKNSEPAPQPHRPLDPLTMHSTYDRAGAVPRTPLAGPNIDYPVLYGKYLNGLGRLPAKTLKPEVRLVKLPFFNMLDELLKPTELVPQNNEKLQESPCIFALTPRQVELIRNSRELQPGVKAVQVVLRICYSDTSCPQEDQYPPNIAVKVNHSYCSVPGYYPSNKPGVEPKRPCRPINLTHLMYLSSATNRITVTWGNYGKSYSVALYLVRQLTSSELLQRLKTIGVKHPELCKALVKEKLRLDPDSEIATTGVRVSLICPLVKMRLSVPCRAETCAHLQCFDAVFYLQMNEKKPTWMCPVCDKPAPYDQLIIDGLLSKILSECEDADEIEYLVDGSWCPIRAEKERSCSPQGAILVLGPSDANGLLPAPSVNGSGALGSTGGGGPVGSMENGKPGADVVDLTLDSSSSSEDEEEEEEEEEDEDEEGPRPKRRCPFQKGLVPAC

SEQ ID NO: 745651 - protein, 510 aa, Homo sapiens; identical to SEQ ID NO: 745650

SEQ ID NO: 745652 - protein, 180 aa, Homo sapiens
MRLSVPCRAETCAHLQCFDAVFYLQMNEKKPTWMCPVCDKPAPYDQLIIDGLLSKILSECEDADEIEYLVDGSWCPIRAEKERSCSPQGAILVLGPSDANGLLPAPSVNGSGALGSTGGGGPVGSMENGKPGADVVDLTLDSSSSSEDEEEEEEEEEDEDEEGPRPKRRCPFQKGLVPAC

SEQ ID NO: 745653 - protein, 507 aa, Homo sapiens
HASEAKNMVMSFRVSDLQMLLGFVGRSKSGLKHELVTRALQLVQFDCSPELFKKIKELYETRYAKKNSEPAPQPHRPLDPLTMHSTYDRAGAVPRTPLAGPNIDYPVLYGKYLNGLGRLPAKTLKPEVRLVKLPFFNMLDELLKPTELVPQNNEKLQESPCIFALTPRQVELIRNSRELQPGVKAVQVVLRICYSDTSCPQEDQYPPNIAVKVNHSYCSVPGYYPSNKPGVEPKRPCRPINLTHLMYLSSATNRITVTWGNYGKSYSVALYLVRQLTSSELLQRLKTIGVKHPELCKALVKEKLRLDPDSEIATTGVRVSLICPLVKMRLSVPCRAETCAHLQCFDAVFYLQMNEKKPTWMCPVCDKPAPYDQLIIDGLLSKILSECEDADEIEYLVDGSWCPIRAEKERSCSPQGAILVLGPSDANGLLPAPSVNGSGALGSTGGGGPVGSMENGKPGADVVDLTLDSSSSSEDEEEEEEEEEDEDEEGPRPKRRCPFQKGLVPAC

SEQ ID NO: 745654 - protein, 352 aa, Homo sapiens
MRKSPGLSDCLWAWILLLSTLTGRSYGQPSLQDELKDNTTVFTRILDRLLDGYDNRLRPGLGERVTEVKTDIFVTSFGPVSDHDMEYTIDVFFRQSWKDERLKFKGPMTVLRLNNLMASKIRTPDTFMPNKLLRITEDGTLLYTMRLTVRAECPMHLEDFPMDAHACPLKFGSYAYTRAEVVYEWTREPARSVVVAEDGSRLNQYDLLGQTVDSGIVQSSTGEYVVMTTHFHLKRKIGYFVIQTYLPCIMTVILSQVSFWLNRESVPARTVFGVTTVLTMTTLSISARNSLPKVAYATAMDWFIAVCYAFVFSALIEFATVNYFTKRGYAWDGKSVVPEKVNALMVTVVHQY

SEQ ID NO: 745655 - protein, 456 aa, Homo sapiens
MRKSPGLSDCLWAWILLLSTLTGRSYGQPSLQDELKDNTTVFTRILDRLLDGYDNRLRPGLGERVTEVKTDIFVTSFGPVSDHDMEYTIDVFFRQSWKDERLKFKGPMTVLRLNNLMASKIRTPDTFFHNGKKSVAHNMTMPNKLLRITEDGTLLYTMRLTVRAECPMHLEDFPMDAHACPLKFGSYAYTRAEVVYEWTREPARSVVVAEDGSRLNQYDLLGQTVDSGIVQSSTGEYVVMTTHFHLKRKIGYFVIQTYLPCIMTVILSQVSFWLNRESVPARTVFGVTTVLTMTTLSISARNSLPKVAYATAMDWFIAVCYAFVFSALIEFATVNYFTKRGYAWDGKSVVPEKPKKVKDPLIKKNNTYAPTATSYTPNLARGDPGLATIAKSATIEPKEVKPETKPPEPKKTFNSVSKIDRLSRIAFPLLFGIFNLVYWATYLNREPQLKAPTPHQ

SEQ ID NO: 745656 - protein, 456 aa, Homo sapiens; identical to SEQ ID NO: 745655

SEQ ID NO: 745657 - protein, 770 aa, Homo sapiens [sequence omitted]

SEQ ID NO: 745658 - protein, 770 aa, Homo sapiens [sequence omitted]

SEQ ID NO: 745659 - protein, 770 aa, Homo sapiens [sequence omitted]

SEQ ID NO: 745660 - protein, 770 aa, Homo sapiens [sequence omitted]

SEQ ID NO: 745661 - protein, 585 aa, Homo sapiens
MIMDDRLIANTLHWWYFGPDNTGDIMTLKFLTGLQNFISSMATVHLVTADGSFDCQGNPGEQEALVSSLHYCEVVTALTTLGNGGSFVLKMFTMFEHCSINLMYLLNCCFDQVHVFKPATSKAGNSEVYVVCLHYKGREAIHPLLSKMTLNFGTEMKRKALFPHHVIPDSFLKRHEECCVFFHKYQLETISENIRLFECMGKAEQEKLNNLRDCAIQYFMQKFQLKHLSRSNWLVKKSSIGCSTNTKWFGQRNKYFKTYNERKMLEALSWKDKVAKGYFNSWAEEHGVYHPGQSSILEGTASNLECHLWHILEGKKLPKVKCSPFCNGEILKTLNEAIEKSLGGAFNLDSKFRPKQQYSCSCHVFSEELIFSELCSLTECLQDEQVVVPSNQIKCLLVGFSTLRNIKMHIPLEVRLLESAELTTFSCSLLHDGDPTYQRLFLDCLLHSLRELHTGDVMILPVLSCFTRFMAGLIFVLHSCFRFITFVCPTSSDPLRTCAVLLCVGYQDLPNPVFRYLQSVNELLSTLLNSDSPQQVLQFVPMEVLLKGALLDFLWDLNAAIAKRHLHFIIQREREEIINSLQLQN

SEQ ID NO: 745662 - protein, 770 aa, Homo sapiens [sequence omitted]

SEQ ID NO: 745663 - protein, 770 aa, Homo sapiens [sequence omitted]

SEQ ID NO: 745664 - protein, 585 aa, Homo sapiens; identical to SEQ ID NO: 745661

SEQ ID NO: 745665 - protein, 393 aa, Homo sapiens
MEENNLQCSSVVDGNFEEVPRETAIQFKPPLYRQRYQFVKNLVDQHEPKKVADLGCGDTSLLRLLKVNPCIELLVGVDINEDKLRWRGDSLAPFLGDFLKPRDLNLTITLYHGSVVERDSRLLGFDLITCIELIEHLDSGDLARFPEVVFGYLSPSMIVISTPNSEFNPLFPSVTLRDSDHKFEWTRMEFQTWALYVANRYDYSVEFTGVGEPPAGAENVGYCTQIGIFRKNGGKATESCLSEQHDQHVYKAVFTTSYPSLQQERFFKLVLVNEVSQQVESLRVSHLPRRKEQAGERGDKPKDIGGSKAPVPCFGPVFTEVEKAKIENSPTPFCVGDKFFVPLQRLLAYPKLNRLCANEEMMRSVIADSIPLSSDGSAVVADLRNYFDEQFEF

SEQ ID NO: 745666 - protein, 289 aa, Homo sapiens
MEIVFDKSIRKIGASEARFYYVFLINHFRIEHLDSGDLARFPEVVFGYLSPSMIVISTPNSEFNPLFPSVTLRDSDHKFEWTRMEFQTWALYVANRYDYSVEFTGVGEPPAGAENVGYCTQIGIFRKNGGKATESCLSEQHDQHVYKAVFTTSYPSLQQERFFKLVLVNEVSQQVESLRVSHLPRRKEQAGERGDKPKDIGGSKAPVPCFGPVFTEVEKAKIENSPTPFCVGDKFFVPLQRLLAYPKLNRLCANEEMMRSVIADSIPLSSDGSAVVADLRNYFDEQFEF

SEQ ID NO: 745667 - protein, 393 aa, Homo sapiens; identical to SEQ ID NO: 745665

SEQ ID NO: 745668 - protein, 393 aa, Homo sapiens; identical to SEQ ID NO: 745665

SEQ ID NO: 745669 - protein, 2174 aa, Homo sapiens
MSASFVPNGASLEDCHCNLFCLADLTGIKWKKYVWQGPTSAPILFPVTEEDPILSSFSRCLKADVLGVWRRDQRPGRRELWIFWWGEDPSFADLIHHDLSEEEDGVWENGLSYECRTLLFKAVHNLLERCLMNRNFVRIGKWFVKPYEKDEKPINKSEHLSCSFTFFLHGDSNVCTSVEINQHQPVYLLSEEHITLAQQSNSPFQVILCPFGLNGTLTGQAFKMSDSATKKLIGEWKQFYPISCCLKEMSEEKQEDMDWEDDSLAAVEVLVAGVRMIYPACFVLVPQSDIPTPSPVGSTHCSSSCLGVHQVPASTRDPAMSSVTLTPPTSPEEVQTVDPQSVQKWVKFSSVSDGFNSDSTSHHGGKIPRKLANHVVDRVWQECNMNRAQNKRKYSASSGGLCEEATAAKVASWDFVEATQRTNCSCLRHKNLKSRNAGQQGQAPSLGQQQQILPKHKTNEKQEKSEKPQKRPLTPFHHRVSVSDDVGMDADSASQRLVISAPDSQVRFSNIRTNDVAKTPQMHGTEMANSPQPPPLSPHPCDVVDEGVTKTPSTPQSQHFYQMPTPDPLVPSKPMEDRIDSLSQSFPPQYQEAVEPTVYVGTAVNLEEDEANIAWKYYKFPKKKDVEFLPPQLPSDKFKDDPVGPFGQESVTSVTELMVQCKKPLKVSDELVQQYQIKNQCLSAIASDAEQEPKIDPYAFVEGDEEFLFPDKKDRQNSEREAGKKHKVEDGTSSVTVLSHEEDAMSLFSPSIKQDAPRPTSHARPPSTSLIYDSDLAVSYTDLDNLFNSDEDELTPGSKRSANGSDDKASCKESKTGNLDPLSCISTADLHKMYPTPPSLEQHIMGFSPMNMNNKEYGSMDTTPGGTVLEGNSSSIGAQFKIEVDEGFCSPKPSEIKDFSYVYKPENCQILVGCSMFAPLKTLPSQYLPLIKLPEECIYRQSWTVGKLELLSSGPSMPFIKEGDGSNMDQEYGTAYTPQTHTSCGMPPSSAPPSNSGAGILPSPSTPRFPTPRTPRTPRTPRGAGGPASAQGSVKYENSDLYSPASTPSTCRPLNSVEPATVPSIPEAHSLYVNLILSESVMNLFKDCNSDSCCICVCNMNIKGADVGVYIPDPTQEAQYRCTCGFSAVMNRKFGNNSGLFLEDELDIIGRNTDCGKEAEKRFEALRATSAEHVNGGLKESEKLSDDLILLLQDQCTNLFSPFGAADQDPFPKSGVISNWVRVEERDCCNDCYLALEHGRQFMDNMSGGKVDEALVKSSCLHPWSKRNDVSMQCSQDILRMLLSLQPVLQDAIQKKRTVRPWGVQGPLTWQQFHKMAGRGSYGTDESPEPLPIPTFLLGYDYDYLVLSPFALPYWERLMLEPYGSQRDIAYVVLCPENEALLNGAKSFFRDLTAIYESCRLGQHRPVSRLLTDGIMRVGSTASKKLSEKLVAEWFSQAADGNNEAFSKLKLYAQVCRYDLGPYLASLPLDSSLLSQPNLVAPTSQSLITPPQMTNTGNANTPSATLASAASSTMTVTSGVAISTSVATANSTLTTASTSSSSSSNLNSGVSSNKLPSFPPFGSMNSNAAGSMSTQANTVQSGQLGGQQTSALQTAGISGESSSLPTQPHPDVSESTMDRDKVGIPTDGDSHAVTYPPAIVVYIIDPFTYENTDESTNSSSVWTLGLLRCFLEMVQTLPPHIKSTVSVQIIPCQYLLQPVKHEDREIYPQHLKSLAFSAFTQCRRPLPTSTNVKTLTGFGPGLAMETALRSPDRPECIRLYAPPFILAPVKDKQTELGETFGEAGQKYNVLFVGYCLSHDQRWILASCTDLYGELLETCIINIDVPNRARRKKSSARKFGLQKLWEWCLGLVQMSSLPWRVVIGRLGRIGHGELKDWSCLLSRRNLQSLSKRLKDMCRMCGISAADSPSILSACLVAMEPQGSFVIMPDSVSTGSVFGRSTTLNMQTSQLNTPQDTSCTHILVFPTSASVQVASATYTTENLDLAFNPNNDGADGMGIFDLLDTGDDLDPDIINILPASPTGSPVHSPGSHYPHGGDAGKGQSTDRLLSTEPHEEVPNILQQPLALGYFVSTAKAGPLPDWFWSACPQAQYQCPLFLKASLHLHVPSVQSDELLHSKHSHPLDSNQTSDVLRFVLEQYNALSWLTCDPATQDRRSCLPIHFVVLNQLYNFIMNML

SEQ ID NO: 745670 - protein, 2174 aa, Homo sapiens; identical to SEQ ID NO: 745669

SEQ ID NO: 745671 - protein, 1944 aa, Homo sapiens
RNLALSLLRLECNGVISAHCNLHLPGSSSSPASPSQVAGITAGVRMIYPACFVLVPQSDIPTPSPVGSTHCSSSCLGVHQVPASTRDPAMSSVTLTPPTSPEEVQTVDPQSVQKWVKFSSVSDGFNSDSTSHHGGKIPRKLANHVVDRVWQECNMNRAQNKRKYSASSGGLCEEATAAKVASWDFVEATQRTNCSCLRHKNLKSRNAGQQGQAPSLGQQQQILPKHKTNEKQEKSEKPQKRPLTPFHHRVSVSDDVGMDADSASQRLVISAPDSQVRFSNIRTNDVAKTPQMHGTEMANSPQPPPLSPHPCDVVDEGVTKTPSTPQSQHFYQMPTPDPLVPSKPMEDRIDSLSQSFPPQYQEAVEPTVYVGTAVNLEEDEANIAWKYYKFPKKKDVEFLPPQLPSDKFKDDPVGPFGQESVTSVTELMVQCKKPLKVSDELVQQYQIKNQCLSAIASDAEQEPKIDPYAFVEGDEEFLFPDKKDRQNSEREAGKKHKVEDGTSSVTVLSHEEDAMSLFSPSIKQDAPRPTSHARPPSTSLIYDSDLAVSYTDLDNLFNSDEDELTPGSKRSANGSDDKASCKESKTGNLDPLSCISTADLHKMYPTPPSLEQHIMGFSPMNMNNKEYGSMDTTPGGTVLEGNSSSIGAQFKIEVDEGFCSPKPSEIKDFSYVYKPENCQILVGCSMFAPLKTLPSQYLPLIKLPEECIYRQSWTVGKLELLSSGPSMPFIKEGDGSNMDQEYGTAYTPQTHTSCGMPPSSAPPSNSGAGILPSPSTPRFPTPRTPRTPRTPRGAGGPASAQGSVKYENSDLYSPASTPSTCRPLNSVEPATVPSIPEAHSLYVNLILSESVMNLFKDCNSDSCCICVCNMNIKGADVGVYIPDPTQEAQYRCTCGFSAVMNRKFGNNSGLFLEDELDIIGRNTDCGKEAEKRFEALRATSAEHVNGGLKESEKLSDDLILLLQDQCTNLFSPFGAADQDPFPKSGVISNWVRVEERDCCNDCYLALEHGRQFMDNMSGGKVDEALVKSSCLHPWSKRNDVSMQCSQDILRMLLSLQPVLQDAIQKKRTVRPWGVQGPLTWQQFHKMAGRGSYGTDESPEPLPIPTFLLGYDYDYLVLSPFALPYWERLMLEPYGSQRDIAYVVLCPENEALLNGAKSFFRDLTAIYESCRLGQHRPVSRLLTDGIMRVGSTASKKLSEKLVAEWFSQAADGNNEAFSKLKLYAQVCRYDLGPYLASLPLDSSLLSQPNLVAPTSQSLITPPQMTNTGNANTPSATLASAASSTMTVTSGVAISTSVATANSTLTTASTSSSSSSNLNSGVSSNKLPSFPPFGSMNSNAAGSMSTQANTVQSGQLGGQQTSALQTAGISGESSSLPTQPHPDVSESTMDRDKVGIPTDGDSHAVTYPPAIVVYIIDPFTYENTDESTNSSSVWTLGLLRCFLEMVQTLPPHIKSTVSVQIIPCQYLLQPVKHEDREIYPQHLKSLAFSAFTQCRRPLPTSTNVKTLTGFGPGLAMETALRSPDRPECIRLYAPPFILAPVKDKQTELGETFGEAGQKYNVLFVGYCLSHDQRWILASCTDLYGELLETCIINIDVPNRARRKKSSARKFGLQKLWEWCLGLVQMSSLPWRVVIGRLGRIGHGELKDWSCLLSRRNLQSLSKRLKDMCRMCGISAADSPSILSACLVAMEPQGSFVIMPDSVSTGSVFGRSTTLNMQTSQLNTPQDTSCTHILVFPTSASVQVASATYTTENLDLAFNPNNDGADGMGIFDLLDTGDDLDPDIINILPASPTGSPVHSPGSHYPHGGDAGKGQSTDRLLSTEPHEEVPNILQQPLALGYFVSTAKAGPLPDWFWSACPQAQYQCPLFLKASLHLHVPSVQSDELLHSKHSHPLDSNQTSDVLRFVLEQYNALSWLTCDPATQDRRSCLPIHFVVLNQLYNFIMNML

SEQ ID NO: 745672 - protein, 1741 aa, Homo sapiens
SFNNAYGSILGSVLHQMLLLKDTGFEFDIAALIHQKLLKVSYIATINSVSDDVGMDADSASQRLVISAPDSQVRFSNIRTNDVAKTPQMHGTEMANSPQPPPLSPHPCDVVDEGVTKTPSTPQSQHFYQMPTPDPLVPSKPMEDRIDSLSQSFPPQYQEAVEPTVYVGTAVNLEEDEANIAWKYYKFPKKKDVEFLPPQLPSDKFKDDPVGPFGQESVTSVTELMVQCKKPLKVSDELVQQYQIKNQCLSAIASDAEQEPKIDPYAFVEGDEEFLFPDKKDRQNSEREAGKKHKVEDGTSSVTVLSHEEDAMSLFSPSIKQDAPRPTSHARPPSTSLIYDSDLAVSYTDLDNLFNSDEDELTPGSKRSANGSDDKASCKESKTGNLDPLSCISTADLHKMYPTPPSLEQHIMGFSPMNMNNKEYGSMDTTPGGTVLEGNSSSIGAQFKIEVDEGFCSPKPSEIKDFSYVYKPENCQILVGCSMFAPLKTLPSQYLPLIKLPEECIYRQSWTVGKLELLSSGPSMPFIKEGDGSNMDQEYGTAYTPQTHTSCGMPPSSAPPSNSGAGILPSPSTPRFPTPRTPRTPRTPRGAGGPASAQGSVKYENSDLYSPASTPSTCRPLNSVEPATVPSIPEAHSLYVNLILSESVMNLFKDCNSDSCCICVCNMNIKGADVGVYIPDPTQEAQYRCTCGFSAVMNRKFGNNSGLFLEDELDIIGRNTDCGKEAEKRFEALRATSAEHVNGGLKESEKLSDDLILLLQDQCTNLFSPFGAADQDPFPKSGVISNWVRVEERDCCNDCYLALEHGRQFMDNMSGGKVDEALVKSSCLHPWSKRNDVSMQCSQDILRMLLSLQPVLQDAIQKKRTVRPWGVQGPLTWQQFHKMAGRGSYGTDESPEPLPIPTFLLGYDYDYLVLSPFALPYWERLMLEPYGSQRDIAYVVLCPENEALLNGAKSFFRDLTAIYESCRLGQHRPVSRLLTDGIMRVGSTASKKLSEKLVAEWFSQAADGNNEAFSKLKLYAQVCRYDLGPYLASLPLDSSLLSQPNLVAPTSQSLITPPQMTNTGNANTPSATLASAASSTMTVTSGVAISTSVATANSTLTTASTSSSSSSNLNSGVSSNKLPSFPPFGSMNSNAAGSMSTQANTVQSGQLGGQQTSALQTAGISGESSSLPTQPHPDVSESTMDRDKVGIPTDGDSHAVTYPPAIVVYIIDPFTYENTDESTNSSSVWTLGLLRCFLEMVQTLPPHIKSTVSVQIIPCQYLLQPVKHEDREIYPQHLKSLAFSAFTQCRRPLPTSTNVKTLTGFGPGLAMETALRSPDRPECIRLYAPPFILAPVKDKQTELGETFGEAGQKYNVLFVGYCLSHDQRWILASCTDLYGELLETCIINIDVPNRARRKKSSARKFGLQKLWEWCLGLVQMSSLPWRVVIGRLGRIGHGELKDWSCLLSRRNLQSLSKRLKDMCRMCGISAADSPSILSACLVAMEPQGSFVIMPDSVSTGSVFGRSTTLNMQTSQLNTPQDTSCTHILVFPTSASVQVASATYTTENLDLAFNPNNDGADGMGIFDLLDTGDDLDPDIINILPASPTGSPVHSPGSHYPHGGDAGKGQSTDRLLSTEPHEEVPNILQQPLALGYFVSTAKAGPLPDWFWSACPQAQYQCPLFLKASLHLHVPSVQSDELLHSKHSHPLDSNQTSDVLRFVLEQYNALSWLTCDPATQDRRSCLPIHFVVLNQLYNFIMNML

SEQ ID NO: 745673 - protein, 1688 aa, Homo sapiens
RPRDTAARDDEGISAPDSQVRFSNIRTNDVAKTPQMHGTEMANSPQPPPLSPHPCDVVDEGVTKTPSTPQSQHFYQMPTPDPLVPSKPMEDRIDSLSQSFPPQYQEAVEPTVYVGTAVNLEEDEANIAWKYYKFPKKKDVEFLPPQLPSDKFKDDPVGPFGQESVTSVTELMVQCKKPLKVSDELVQQYQIKNQCLSAIASDAEQEPKIDPYAFVEGDEEFLFPDKKDRQNSEREAGKKHKVEDGTSSVTVLSHEEDAMSLFSPSIKQDAPRPTSHARPPSTSLIYDSDLAVSYTDLDNLFNSDEDELTPGSKRSANGSDDKASCKESKTGNLDPLSCISTADLHKMYPTPPSLEQHIMGFSPMNMNNKEYGSMDTTPGGTVLEGNSSSIGAQFKIEVDEGFCSPKPSEIKDFSYVYKPENCQILVGCSMFAPLKTLPSQYLPLIKLPEECIYRQSWTVGKLELLSSGPSMPFIKEGDGSNMDQEYGTAYTPQTHTSCGMPPSSAPPSNSGAGILPSPSTPRFPTPRTPRTPRTPRGAGGPASAQGSVKYENSDLYSPASTPSTCRPLNSVEPATVPSIPEAHSLYVNLILSESVMNLFKDCNSDSCCICVCNMNIKGADVGVYIPDPTQEAQYRCTCGFSAVMNRKFGNNSGLFLEDELDIIGRNTDCGKEAEKRFEALRATSAEHVNGGLKESEKLSDDLILLLQDQCTNLFSPFGAADQDPFPKSGVISNWVRVEERDCCNDCYLALEHGRQFMDNMSGGKVDEALVKSSCLHPWSKRNDVSMQCSQDILRMLLSLQPVLQDAIQKKRTVRPWGVQGPLTWQQFHKMAGRGSYGTDESPEPLPIPTFLLGYDYDYLVLSPFALPYWERLMLEPYGSQRDIAYVVLCPENEALLNGAKSFFRDLTAIYESCRLGQHRPVSRLLTDGIMRVGSTASKKLSEKLVAEWFSQAADGNNEAFSKLKLYAQVCRYDLGPYLASLPLDSSLLSQPNLVAPTSQSLITPPQMTNTGNANTPSATLASAASSTMTVTSGVAISTSVATANSTLTTASTSSSSSSNLNSGVSSNKLPSFPPFGSMNSNAAGSMSTQANTVQSGQLGGQQTSALQTAGISGESSSLPTQPHPDVSESTMDRDKVGIPTDGDSHAVTYPPAIVVYIIDPFTYENTDESTNSSSVWTLGLLRCFLEMVQTLPPHIKSTVSVQIIPCQYLLQPVKHEDREIYPQHLKSLAFSAFTQCRRPLPTSTNVKTLTGFGPGLAMETALRSPDRPECIRLYAPPFILAPVKDKQTELGETFGEAGQKYNVLFVGYCLSHDQRWILASCTDLYGELLETCIINIDVPNRARRKKSSARKFGLQKLWEWCLGLVQMSSLPWRVVIGRLGRIGHGELKDWSCLLSRRNLQSLSKRLKDMCRMCGISAADSPSILSACLVAMEPQGSFVIMPDSVSTGSVFGRSTTLNMQTSQLNTPQDTSCTHILVFPTSASVQVASATYTTENLDLAFNPNNDGADGMGIFDLLDTGDDLDPDIINILPASPTGSPVHSPGSHYPHGGDAGKGQSTDRLLSTEPHEEVPNILQQPLALGYFVSTAKAGPLPDWFWSACPQAQYQCPLFLKASLHLHVPSVQSDELLHSKHSHPLDSNQTSDVLRFVLEQYNALSWLTCDPATQDRRSCLPIHFVVLNQLYNFIMNML

SEQ ID NO: 745674 - protein, 431 aa, Homo sapiens [sequence omitted]

SEQ ID NO: 745675 - protein, 667 aa, Homo sapiens [sequence omitted]

SEQ ID NO: 745676 - protein, 667 aa, Homo sapiens [sequence omitted]

SEQ ID NO: 745677 - protein, 428 aa, Homo sapiens
MSASFVPNGASLEDCHCNLFCLADLTGIKWKKYVWQGPTSAPILFPVTEEDPILSSFSRCLKADVLGVWRRDQRPGRRELWIFWWGEDPSFADLIHHDLSEEEDGVWENGLSYECRTLLFKAVHNLLERCLMNRNFVRIGKWFVKPYEKDEKPINKSEHLSCSFTFFLHGDSNVCTSVEINQHQPVYLLSEEHITLAQQSNSPFQVILCPFGLNGTLTGQAFKMSDSATKKLIGEWKQFYPISCCLKEMSEEKQEDMDWEDDSLAAVEVLVAGVRMIYPACFVLVPQSDIPTPSPVGSTHCSSSCLGVHQVPASTRDPAMSSVTLTPPTSPEEVQTVDPQSVQKWVKFSSVSDGFNSDSTSHHGGKIPRKLANHVVDRVWQECNMNRAQNKRKYSASSGGLCEEATAAKVASWDFVEATQRTNCSCLR

SEQ ID NO: 745678 - protein, 2174 aa, Homo sapiens; identical to SEQ ID NO: 745669

SEQ ID NO: 745679 - protein, 1756 aa, Homo sapiens
MSASFVPNGASLEDCHCNLFCLADLTGIKWKKYVWQGPTSAPILFPVTEEDPILSSFSRCLKADVLGVWRRDQRPGRRELWIFWWGEDPSFADLIHHDLSEEEDGVWENGLSYECRTLLFKAVHNLLERCLMNRNFVRIGKWFVKPYEKDEKPINKSEHLSCSFTFFLHGDSNVCTSVEINQHQPVYLLSEEHITLAQQSNSPFQVILCPFGLNGTLTGQAFKMSDSATKKLIGEWKQFYPISCCLKEMSEEKQEDMDWEDDSLAAVEVLVAGVRMIYPACFVLVPQSDIPTPSPVGSTHCSSSCLGVHQVPASTRDPAMSSVTLTPPTSPEEVQTVDPQSVQKWVKFSSVSDGFNSDSTSHHGGKIPRKLANHVVDRVWQECNMNRAQNKRKYSASSGGLCEEATAAKVASWDFVEATQRTNCSCLRHKNLKSRNAGQQGQAPSLGQQQQILPKHKTNEKQEKSEKPQKRPLTPFHHRVSVSDDVGMDADSASQRLVISAPDSQVRFSNIRTNDVAKTPQMHGTEMANSPQPPPLSPHPCDVVDEGVTKTPSTPQSQHFYQMPTPDPLVPSKPMEDRIDSLSQSFPPQYQEAVEPTVYVGTAVNLEEDEANIAWKYYKFPKKKDVEFLPPQLPSDKFKDDPVGPFGQESVTSVTELMVQCKKPLKVSDELVQQYQIKNQCLSAIASDAEQEPKIDPYAFVEGDEEFLFPDKKDRQNSEREAGKKHKVEDGTSSVTVLSHEEDAMSLFSPSIKQDVNGGLKESEKLSDDLILLLQDQCTNLFSPFGAADQDPFPKSGVISNWVRVEERDCCNDCYLALEHGRQFMDNMSGGKVDEALVKSSCLHPWSKRNDVSMQCSQDILRMLLSLQPVLQDAIQKKRTVRPWGVQGPLTWQQFHKMAGRGSYGTDESPEPLPIPTFLLGYDYDYLVLSPFALPYWERLMLEPYGSQRDIAYVVLCPENEALLNGAKSFFRDLTAIYESCRLGQHRPVSRLLTDGIMRVGSTASKKLSEKLVAEWFSQAADGNNEAFSKLKLYAQVCRYDLGPYLASLPLDSSLLSQPNLVAPTSQSLITPPQMTNTGNANTPSATLASAASSTMTVTSGVAISTSVATANSTLTTASTSSSSSSNLNSGVSSNKLPSFPPFGSMNSNAAGSMSTQANTVQSGQLGGQQTSALQTAGISGESSSLPTQPHPDVSESTMDRDKVGIPTDGDSHAVTYPPAIVVYIIDPFTYENTDESTNSSSVWTLGLLRCFLEMVQTLPPHIKSTVSVQIIPCQYLLQPVKHEDREIYPQHLKSLAFSAFTQCRRPLPTSTNVKTLTGFGPGLAMETALRSPDRPECIRLYAPPFILAPVKDKQTELGETFGEAGQKYNVLFVGYCLSHDQRWILASCTDLYGELLETCIINIDVPNRARRKKSSARKFGLQKLWEWCLGLVQMSSLPWRVVIGRLGRIGHGELKDWSCLLSRRNLQSLSKRLKDMCRMCGISAADSPSILSACLVAMEPQGSFVIMPDSVSTGSVFGRSTTLNMQTSQLNTPQDTSCTHILVFPTSASVQVASATYTTENLDLAFNPNNDGADGMGIFDLLDTGDDLDPDIINILPASPTGSPVHSPGSHYPHGGDAGKGQSTDRLLSTEPHEEVPNILQQPLALGYFVSTAKAGPLPDWFWSACPQAQYQCPLFLKASLHLHVPSVQSDELLHSKHSHPLDSNQTSDVLRFVLEQYNALSWLTCDPATQDRRSCLPIHFVVLNQLYNFIMNML

SEQ ID NO: 745680 - protein, 1739 aa, Homo sapiens
RAAYYYYFRGRSTQQQILPKHKTNEKQEKSEKPQKRPLTPFHHRVSVSDDVGMDADSASQRLVISAPDSQVRFSNIRTNDVAKTPQMHGTEMANSPQPPPLSPHPCDVVDEGVTKTPSTPQSQHFYQMPTPDPLVPSKPMEDRIDSLSQSFPPQYQEAVEPTVYVGTAVNLEEDEANIAWKYYKFPKKKDVEFLPPQLPSDKFKDDPVGPFGQESVTSVTELMVQCKKPLKVSDELVQQYQIKNQCLSAIASDAEQEPKIDPYAFVEGDEEFLFPDKKDRQNSEREAGKKHKVEDGTSSVTVLSHEEDAMSLFSPSIKQDAPRPTSHARPPSTSLIYDSDLAVSYTDLDNLFNSDEDELTPGSKRSANGSDDKASCKESKTGNLDPLSCISTADLHKMYPTPPSLEQHIMGFSPMNMNNKEYGSMDTTPGGTVLEGNSSSIGAQFKIEVDEGFCSPKPSEIKDFSYVYKPENCQILVGCSMFAPLKTLPSQYLPLIKLPEECIYRQSWTVGKLELLSSGPSMPFIKEGDGSNMDQEYGTAYTPQTHTSCGMPPSSAPPSNSGAGILPSPSTPRFPTPRTPRTPRTPRGAGGPASAQGSVKYENSDLYSPASTPSTCRPLNSVEPATVPSIPEAHSLYVNLILSESVMNLFKDCNSDSCCICVCNMNIKGADVGVYIPDPTQEAQYRCTCGFSAVMNRKFGNNSGLFLEDELDIIGRNTDCGKEAEKRFEALRATSAEHVNGGLKESEKLSDDLILLLQDQCTNLFSPFGAADQDPFPKSGVISNWVRVEERDCCNDCYLALEHGRQFMDNMSGGKVDEALVKSSCLHPWSKRNDVSMQCSQDILRMLLSLQPVLQDAIQKKRTVRPWGVQGPLTWQQFHKMAGRGSYGTDESPEPLPIPTFLLGYDYDYLVLSPFALPYWERLMLEPYGSQRDIAYVVLCPENEALLNGAKSFFRDLTAIYESCRLGQHRPVSRLLTDGIMRVGSTASKKLSEKLVAEWFSQAADGNNEAFSKLKLYAQVCRYDLGPYLASLPLDSSLLSQPNLVAPTSQSLITPPQMTNTGNANTPSATLASAASSTMTVTSGVAISTSVATANSTLTTASTSSSSSSNLNSGVSSNKLPSFPPFGSMNSNAAGSMSTQANTVQSGQLGGQQTSALQTAGISGESSSLPTQPHPDVSESTMDRDKVGIPTDGDSHAVTYPPAIVVYIIDPFTYENTDESTNSSSVWTLGLLRCFLEMVQTLPPHIKSTVSVQIIPCQYLLQPVKHEDREIYPQHLKSLAFSAFTQCRRPLPTSTNVKTLTGFGPGLAMETALRSPDRPECIRLYAPPFILAPVKDKQTELGETFGEAGQKYNVLFVGYCLSHDQRWILASCTDLYGELLETCIINIDVPNRARRKKSSARKFGLQKLWEWCLGLVQMSSLPWRVVIGRLGRIGHGELKDWSCLLSRRNLQSLSKRLKDMCRMCGISAADSPSILSACLVAMEPQGSFVIMPDSVSTGSVFGRSTTLNMQTSQLNTPQDTSCTHILVFPTSASVQVASATYTTENLDLAFNPNNDGADGMGIFDLLDTGDDLDPDIINILPASPTGSPVHSPGSHYPHGGDAGKGQSTDRLLSTEPHEEVPNILQQPLALGYFVSTAKAGPLPDWFWSACPQAQYQCPLFLKASLHLHVPSVQSDELLHSKHSHPLDSNQTSDVLRFVLEQYNALSWLTCDPATQDRRSCLPIHFVVLNQLYNFIMNML

SEQ ID NO: 745681 - protein, 2174 aa, Homo sapiens; identical to SEQ ID NO: 745669

SEQ ID NO: 745682 - protein, 1840 aa, Homo sapiens
MSASFVPNGASLEDCHCNLFCLADLTGIKWKKYVWQGPTSAPILFPVTEEDPILSSFSRCLKADVLGVWRRDQRPGRRELWIFWWGEDPSFADLIHHDLSEEEDGVWENGLSYECRTLLFKAVHNLLERCLMNRNFVRIGKWFVKPYEKDEKPINKSEHLSCSFTFFLHGDSNVCTSVEINQHQPVYLLSEEHITLAQQSNSPFQVILCPFGLNGTLTGQAFKMSDSATKKLIGEWKQFYPISCCLKEMSEEKQEDMDWEDDSLAAVEVLVAGVRMIYPACFVLVPQSDIPTPSPVGSTHCSSSCLGVHQVPASTRDPAMSSVTLTPPTSPEEVQTVDPQSVQKWVKFSSVSDGFNSDSTSHHGGKIPRKLANHVVDRVWQECNMNRAQNKRKYSASSGGLCEEATAAKVASWDFVEATQRTNCSCLRHKNLKSRNAGQQGQAPSLGQQQQILPKHKTNEKQEKSEKPQKRPLTPFHHRVSVSDDVGMDADSASQRLVISAPDSQVRFSNIRTNDVAKTPQMHGTEMANSPQPPPLSPHPCDVVDEGVTKTPSTPQSQHFYQMPTPDPLVPSKPMEDRIDSLSQSFPPQYQEAVEPTVYVGTAVNLEEDEANIAWKYYKFPKKKDVEFLPPQLPSDKFKDDPVGPFGQESVTSVTELMVQCKKPLKVSDELVQQYQIKNQCLSAIASDAEQEPKIDPYAFVEGDEEFLFPDKKDRQNSEREAGKKHKVEDGTSSVTVLSHEEDAMSLFSPSIKQDAPRPTSHARPPSTSLIYDSDLAVSYTDLDNLFNSDEDELTPGSKRSANGSDDKASCKESKTGNLDPLSCISTADLHKMYPTPPSLEQHIMGFSPMNMNNKEYGSMDTTPGGTVLEGNSSSIGAQFKIEVDEGFCSPKPSEIKDFSYVYKPENCQILVGCSMFAPLKTLPSQYLPLIKLPEECIYRQSWTVGKLELLSSGPSMPFIKEGDGSNMDQEYGTAYTPQTHTSCGMPPSSAPPSNSGAGILPSPSTPRFPTPRTPRTPRTPRGAGGPASAQGSVKYENSDLYSPASTPSTCRPLNSVEPATVPSIPEAHSLYVNLILSESVMNLFKDCNSDSCCICVCNMNIKGADVGVYIPDPTQEAQYRCTCGFSAVMNRKFGNNSGLFLEDELDIIGRNTDCGKEAEKRFEALRATSAEHVNGGLKESEKLSDDLILLLQDQCTNLFSPFGAADQDPFPKSGVISNWVRVEERDCCNDCYLALEHGRQFMDNMSGGKVDEALVKSSCLHPWSKRNDVSMQCSQDILRMLLSLQPVLQDAIQKKRTVRPWGVQGPLTWQQFHKMAGRGSYGTDESPEPLPIPTFLLGYDYDYLVLSPFALPYWERLMLEPYGSQRDIAYVVLCPENEALLNGAKSFFRDLTAIYESCRLGQHRPVSRLLTDGIMRVGSTASKKLSEKLVAEWFSQAADGNNEAFSKLKLYAQVCRYDLGPYLASLPLDSSLLSQPNLVAPTSQSLITPPQMTNTGNANTPSATLASAASSTMTVTSGVAISTSVATANSTLTTASTSSSSSSNLNSGVSSNKLPSFPPFGSMNSNAAGSMSTQANTVQSGQLGGQQTSALQTAGISGESSSLPTQPHPDVSESTMDRDKVGIPTDGDSHAVTYPPAIVVYIIDPFTYENTDESTNSSSVWTLGLLRCFLEMVQTLPPHIKSTVSVQIIPCQYLLQPVKHEDREIYPQHLKSLAFSAFTQCRRPLPTSTNVKTLTGFGPGLAMETALRSPDRPECIRLYAPPFILAPVKDKQTELGETFGEAGQKYNVLFVGYCLSHDQRWILASCTDLYGELLETCIINIDVPNRYLYFPKYIISFHL

SEQ ID NO: 745683 - protein, 1991 aa, Homo sapiens
MSASFVPNGASLEDCHCNLFCLADLTGIKWKKYVWQGPTSAPILFPVTEEDPILSSFSRCLKADVLGVWRRDQRPGRRELWIFWWGEDPSFADLIHHDLSEEEDGVWENGLSYECRTLLFKAVHNLLERCLMNRNFVRIGKWFVKPYEKDEKPINKSEHLSCSFTFFLHGDSNVCTSVEINQHQPVYLLSEEHITLAQQSNSPFQVILCPFGLNGTLTGQAFKMSDSATKKLIGEWKQFYPISCCLKEMSEEKQEDMDWEDDSLAAVEVLVAGVRMIYPACFVLVPQSDIPTPSPVGSTHCSSSCLGVHQVPASTRDPAMSSVTLTPPTSPEEVQTVDPQSVQKWVKFSSVSDGFNSDSTSHHGGKIPRKLANHVVDRVWQECNMNRAQNKRKYSASSGGLCEEATAAKVASWDFVEATQRTNCSCLRHKNLKSRNAGQQGQAPSLGQQQQILPKHKTNEKQEKSEKPQKRPLTPFHHRVSVSDDVGMDADSASQRLVISAPDSQVRFSNIRTNDVAKTPQMHGTEMANSPQPPPLSPHPCDVVDEGVTKTPSTPQSQHFYQMPTPDPLVPSKPMEDRIDSLSQSFPPQYQEAVEPTVYVGTAVNLEEDEANIAWKYYKFPKKKDVEFLPPQLPSDKFKDDPVGPFGQESVTSVTELMVQCKKPLKVSDELVQQYQIKNQCLSAIASDAEQEPKIDPYAFVEGDEEFLFPDKKDRQNSEREAGKKHKVEDGTSSVTVLSHEEDAMSLFSPSIKQDAPRPTSHARPPSTSLIYDSDLAVSYTDLDNLFNSDEDELTPGSKRSANGSDDKASCKESKTGNLDPLSCISTADLHKMYPTPPSLEQHIMGFSPMNMNNKEYGSMDTTPGGTVLEGNSSSIGAQFKIEVDEGFCSPKPSEIKDFSYVYKPENCQILVGCSMFAPLKTLPSQYLPLIKLPEECIYRQSWTVGKLELLSSGPSMPFIKEGDGSNMDQEYGTAYTPQTHTSCGMPPSSAPPSNSGAGILPSPSTPRFPTPRTPRTPRTPRGAGGPASAQGSVKYENSDLYSPASTPSTCRPLNSVEPATVPSIPEAHSLYVNLILSESVMNLFKDCNSDSCCICVCNMNIKGADVGVYIPDPTQEAQYRCTCGFSAVMNRKFGNNSGLFLEDELDIIGRNTDCGKEAEKRFEALRATSAEHVNGGLKESEKLSDDLILLLQDQCTNLFSPFGAADQDPFPKSGVISNWVRVEERDCCNDCYLALEHGRQFMDNMSGGKVDEALVKSSCLHPWSKRNDVSMQCSQDILRMLLSLQPVLQDAIQKKRTVRPWGVQGPLTWQQFHKMAGRGSYGTDESPEPLPIPTFLLGYDYDYLVLSPFALPYWERLMLEPYGSQRDIAYVVLCPENEALLNGAKSFFRDLTAIYESCRLGQHRPVSRLLTDGIMRVGSTASKKLSEKLVAEWFSQAADGNNEAFSKLKLYAQVCRYDLGPYLASLPLDSSLLSQPNLVAPTSQSLITPPQMTNTGNANTPSATLASAASSTMTVTSGVAISTSVATANSTLTTASTSSSSSSNLNSGVSSNKLPSFPPFGSMNSNAAGSMSTQANTVQSGQLGGQQTSALQTAGISGESSSLPTQPHPDVSESTMDRDKVGIPTDGDSHAVTYPPAIVVYIIDPFTYENTDESTNSSSVWTLGLLRCFLEMVQTLPPHIKSTVSVQIIPCQYLLQPVKHEDREIYPQHLKSLAFSAFTQCRRPLPTSTNVKTLTGFGPGLAMETALRSPDRPECIRLYAPPFILAPVKDKQTELGETFGEAGQKYNVLFVGYCLSHDQRWILASCTDLYGELLETCIINIDVPNRARRKKSSARKFGLQKLWEWCLGLVQMSSLPWRVVIGRLGRIGHGELKDWSCLLSRRNLQSLSKRLKDMCRMCGISAADSPSILSACLVAMEPQGSFVIMPDSVSTGSVFGRSTTLNMQTSQLNTPQDTSCTHILVFPTSASVQVASATYTTENLDLAFNPNNGT

SEQ ID NO: 745684 - protein, 450 aa, Homo sapiens
MSASFVPNGASLEDCHCNLFCLADLTGIKWKKYVWQGPTSAPILFPVTEEDPILSSFSRCLKADVLGVWRRDQRPGRRELWIFWWGEDPSFADLIHHDLSEEEDGVWENGLSYECRTLLFKAVHNLLERCLMNRNFVRIGKWFVKPYEKDEKPINKSEHLSCSFTFFLHGDSNVCTSVEINQHQPVYLLSEEHITLAQQSNSPFQVILCPFGLNGTLTGQAFKMSDSATKKLIGEWKQFYPISCCLKEMSEEKQEDMDWEDDSLAAVEVLVAGVRMIYPACFVLVPQSDIPTPSPVGSTHCSSSCLGVHQVPASTRDPAMSSVTLTPPTSPEEVQTVDPQSVQKWVKFSSVSDGFNSDSTSHHGGKIPRKLANHVVDRVWQECNMNRAQNKRKYSASSGGLCEEATAAKVASWDFVEATQRTNCSCLRHKTLKSKNVVLQRQASSFRVRR

SEQ ID NO: 745685 - protein, 33 aa, Homo sapiens
MPLTVLPPSRLFIKKGKTPFEDGEVGTISCASW

SEQ ID NO: 745686 - protein, 160 aa, Homo sapiens
MKRNEPMQIYSIRMGTNFRSPTLDRFSPFVQLPLENFPYVYQKRYTSYFLVISICIVLFYKNIFLYIFLKVVISQGFICPLCMKRCITAIDLLEHYQKVHDENETRGQELLNDSSVTVGPVYFVLAAWFWVAQNSWFFLASVLLNFLCYKGIWIALIMHA

SEQ ID NO: 745687 - protein, 56 aa, Homo sapiens
CVVQAFLSSAPSLGFTPHKSAVLQEWLCLSPLRAFETNCCCARWMSCLTNDVLSCL

SEQ ID NO: 745688 - protein, 98 aa, Homo sapiens
MTISKPNLIMLSPGLTSSGAFQGCWDLAPRAQPVQQACGTWGGQGGHPQLLLLLLWSPQHQTLLGITEPGGSASSQAGGGFHESEPWVIQGRGLTEAK

SEQ ID NO: 745689 - protein, 113 aa, Homo sapiens
LSNSIPPQSSTYRSAQESAPHLLQPQFSLLPSALGGSQQTPQAYSSTLFTSSTASIERALLRECSVIKHHQRPSGTQSIQAQLTGSQHSLHSYLSNSSVVNFQETTRAVIFIL

SEQ ID NO: 745690 - protein, 101 aa, Homo sapiens
PHRHTRAHTHHMHTQHVHTHHACNDGTGMGKPFWMILFKKVENGTPQESLVHSINNSEIQPGICHQFLVQGSVLQPRNCSPSLSAPPSWLFLSSESFLPFP

SEQ ID NO: 745691 - protein, 110 aa, Homo sapiens
PNSTALCAVGQRCAVYLSCSISWSPPGLCHHQRVNHIWHARFTYPIFFTNISLISNSLPPRCPLPYISELTEILLSTDPATFSLTISLFPSFPALFIQLRLLLFIINSLM

SEQ ID NO: 745692 - protein, 179 aa, Homo sapiens
VKEPVLVSQCWASQCPHFRTIRSTGRGQDDRAPEVRGDRWLSVHLGRERQNGPLRAAAIPCTPREQEKGQAARKASPAIDFPETGFPVPSPCRQVPRQRNALFGEGGQDLPEAEEGLVGAEGPHQCCHSCVTDGIALQAAERGGALGVAVPGPRGSCPVPVWDSRHWAQQGVGGSRDSG

SEQ ID NO: 745693 - protein, 220 aa, Homo sapiens
MATLTVVQPLTLDRDVARAIELLEKLQESGEVPVHKLQSLKKVLQSEFCTAIREVYQYMHETITVNGCPEFRARATAKATVAAFAASEGHSHPRVVELPKTDEGLGFNVMGGKEQNSPIYISRIIPGGVAERHGGLKRGDQLLSVNGVSVEGEHHEKAVELLKAAKDSVKLVVRYTPKVLEEMEARFEKLRTARRRQQQQLLIQQQQQQQQQQTQQNHMS

SEQ ID NO: 745694 - protein, 230 aa, Homo sapiens
YILILPGFGIISHMYVVQPLTLDRDVARAIELLEKLQESGEVPVHKLQSLKKVLQSEFCTAIREVYQYMHETITVNGCPEFRARATAKATVAAFAASEGHSHPRVVELPKTDEGLGFNVMGGKEQNSPIYISRIIPGGVAERHGGLKRGDQLLSVNGVSVEGEHHEKAVELLKAAKDSVKLVVRYTPKVLEEMEARFEKLRTARRRQQQQLLIQQQQQQQQQQTQQNHMS

SEQ ID NO: 745695 - protein, 220 aa, Homo sapiens; identical to SEQ ID NO: 745693

SEQ ID NO: 745696 - protein, 220 aa, Homo sapiens; identical to SEQ ID NO: 745693

SEQ ID NO: 745697 - protein, 246 aa, Homo sapiens
MATLTVVQPLTLDRDVARAIELLEKLQESGEVPVHKLQSLKKVLQSEFCTAIREVYQYMHETITVNGCPEFRARATAKVFSCVHCEENLDISGSPESRTSTTSQATVAAFAASEGHSHPRVVELPKTDEGLGFNVMGGKEQNSPIYISRIIPGGVAERHGGLKRGDQLLSVNGVSVEGEHHEKAVELLKAAKDSVKLVVRYTPKVLEEMEARFEKLRTARRRQQQQLLIQQQQQQQQQQTQQNHMS

SEQ ID NO: 745698 - protein, 151 aa, Homo sapiens
MATLTVVQPLTLDRDVARAIELLEKLQESGEVPVHKLQSLKKVLQSEFCTAIREVYQYMHETITVNGCPEFRARATAKATVAAFAASEGHSHPRVVELPKTDEGLGFNVMGGKEQNSPIYISRIIPGGVAERHGGLKRGDQLLSVNGVVCL

SEQ ID NO: 745699 - protein, 66 aa, Homo sapiens
QTGGGGGGSVILEAQIRVKQSQTKECRQLPEAGGWRSGFSLRASRGNRPCPTPSFWPSEMNVDCWP

SEQ ID NO: 745700 - protein, 103 aa, Homo sapiens
GEHLGSAGGRVPLAGGLVTRRPCHPRLGRCCPRACGGASLPPGQPHRLDPGQETSQVPSSVQLSGMEPPCLVLKRPALTQRLTSVGSCCLQPRILRSSYVAHT

SEQ ID NO: 745701 - protein, 493 aa, Homo sapiens
MEEPQPPRPPASMALLGSQHSGAPSAAGPPGGTSSAATAAVLSFSTVATAALGNLSDASGGGTAAAPGGGGLGGSGAAREAGAAVRRPLGPEAAPLLSHGAAVAAQALVLLLIFLLSSLGNCAVMGVIVKHRQLRTVTNAFILSLSLSDLLTALLCLPAAFLDLFTPPGGSAPALPAGPWRGFCRPSRFFSSCFGIVYAQRGAHLVGPLLRYRRPPREKIGRRRALQLLAGAWLTALGFSLPWELLGAPRELAAAQSFHGCLYRTSPDPAQLGAAFSVGLVVACYLLPFLLMCFCHYHICKTVRLSDVRVRPVNTYARVLRFFSEVRTATTVLIMIVFVICCWGPYCFLVLLAAARQAQTMQAPSLLSVVAVWLTWANGAINPVIYAIRNPNISMLLGRNREEGYRTRNVDAFLPSQGPGLQARSRSRLRNRYANRLGACNRMSSSNPASGVAGDVAMWARKNPVVLFCREGPPEPVTAVTKQPKSEAGDTSL

SEQ ID NO: 745702 - protein, 54 aa, Homo sapiens
VWGLGSGRSESPPVESSALWEGLTFLALLCPVFENSSKIVIVMEYASTRTHGVP

SEQ ID NO: 745703 - protein, 670 aa, Homo sapiens
CFTARSGTAVAPRPGAGPVPRASALPAQPTDSPAALAHLLLAMESLVFARRSGPTPSAAELARPLAEGLIKSPKPLMKKQAVKRHHHKHNLRHRYEFLETLGKGTYGKVKKARESSGRLVAIKSIRKDKIKDEQDLMHIRREIEIMSSLNHPHIIAIHEVFENSSKIVIVMEYASRGDLYDYISERQQLSEREARHFFRQIVSAVHYCHQNRVVHRDLKLENILLDANGNIKIADFGLSNLYHQGKFLQTFCGSPLYASPEIVNGKPYTGPEVDSWSLGVLLYILVHGTMPFDGHDHKILVKQISNGAYREPPKPSDACGLIRWLLMVNPTRRATLEDVASHWWVNWGYATRVGEQEAPHEGGHPGSDSARASMADWLRRSSRPLLENGAKVCSFFKQHAPGGGSTTPGLERQHSLKKSRKENDMAQSLHSDTADDTAHRPGKSNLKLPKGILKKKVSASAEGVQEDPPELSPIPASPGQAAPLLPKKGILKKPRQRESGYYSSPEPSESGELLDAGDVFVSGDPKEQKPPQASGLLLHRKGILKLNGKFSQTALELAAPTTFGSLDELAPPRPLARASRPSGAVSEDSILSSESFDQLDLPERLPEPPLRGCVSVDNLTGLEEPPSEGPGSCLRRWRQDPLGDSCFSLTDCQEVTATYRQALRVCSKLT

SEQ ID NO: 745704 - protein, 130 aa, Homo sapiens [sequence omitted]

SEQ ID NO: 745705 - protein, 77 aa, Homo sapiens
CTTPAGQDSGQRLVPLGSFRRRRSELIRELKRAARWEVKSVPQLLEEEHWKKEETNVGVYGFSSSLMMWPSKEIILP

SEQ ID NO: 745706 - protein, 130 aa, Homo sapiens [sequence omitted]

SEQ ID NO: 745707 - protein, 130 aa, Homo sapiens [sequence omitted]

SEQ ID NO: 745708 - protein, 130 aa, Homo sapiens [sequence omitted]

SEQ ID NO: 745709 - protein, 130 aa, Homo sapiens [sequence omitted]

SEQ ID NO: 745710 - protein, 130 aa, Homo sapiens [sequence omitted]

SEQ ID NO: 745711 - protein, 130 aa, Homo sapiens [sequence omitted]

SEQ ID NO: 745712 - protein, 130 aa, Homo sapiens [sequence omitted]

SEQ ID NO: 745713 - protein, 130 aa, Homo sapiens [sequence omitted]

SEQ ID NO: 745714 - protein, 137 aa, Homo sapiens
HQSVGCIPSANPAKTMQVSEVVNVFKILMSNLDEVKKEREGLENDLKSVNFDMTSKFLTALAQDGVINEEALSVTELDRVYGGLTTKVQESLKKQEGLLKNIQVSHQEFSKMKQSNNEANLREEVLKNLATAYDNFV

SEQ ID NO: 745715 - protein, 158 aa, Homo sapiens
  misc_feature (158)..(158): Xaa can be any naturally occurring amino acid
MAADDVEEYMIERPEPEFQDLNEKARALKQILSKIPDEINDRVRFLQTIKDIASAIKELLDTVNNVFKKYQYQNRRTEALEPKRKMESPQFGTRTDLRARHKGPWCPEYQHNFALKGEGDLKDPERHVEKRGKPQDTGEHTGGHTERRNTPPRRVTRX

SEQ ID NO: 745716 - protein, 130 aa, Homo sapiens [sequence omitted]

SEQ ID NO: 745717 - protein, 130 aa, Homo sapiens [sequence omitted]

SEQ ID NO: 745718 - protein, 132 aa, Homo sapiens
GRSRGSRAEEYMIERPEPEFQDLNEKARALKQILSKIPDEINDRVRFLQTIKDIASAIKELLDTVNNVFKKYQYQNRRALEHQKKEFVKYSKSFSDTLKTYFKDGKAINVFVSANRLIHQTNLILQTFKTVA

SEQ ID NO: 745719 - protein, 77 aa, Homo sapiens; identical to SEQ ID NO: 745705

SEQ ID NO: 745720 - protein, 130 aa, Homo sapiens [sequence omitted]

SEQ ID NO: 745721 - protein, 104 aa, Homo sapiens
MAADDVEEYMIERPEPEFQDLNEKARALKQILSKIPDEINDRVRFLQTIKDIASAIKELLDTVNNVFKKYQYQNRRALEHQKKEFVKYSKSFSDTLKTYFKDGK

SEQ ID NO: 745722 - protein, 121 aa, Homo sapiens
MIERPEPEFQDLNEKARALKQILSKIPDEINDRVRFLQTIKDIASAIKELLDTVNNVFKKYQYQNRRALEHQKKEFVKYSKSFSDTLKTYFKDGKAINVFVSANRLIHQTNLILQTFKTVA

SEQ ID NO: 745723 - protein, 31 aa, Homo sapiens
MDHCSAASMGHCYPDLLHALPQNSSKSCLLP

SEQ ID NO: 745724 - protein, 47 aa, Homo sapiens
MTTYRAIPSDGVDLAASCGARVGDVLPGPHTGDYAPLGFWAQNGSMS

SEQ ID NO: 745725 - protein, 320 aa, Homo sapiens
NRLVPAWRLGWRRAEQWSEMWRPVQLCHFHSALLHRRQKPWPSPAVFFRRNVRGLPPRFSSPTPLWRKVLSTAVVGAPLLLGARYVMAEAREKRRMRLVVDGMGRFGRSLKVGLQISLDYWWCTNVVLRGVEENSPGYLEVMSACHQRAADALVAGAISNGGLYVKLGQGLCSFNHLLPPEYTRTLRVLEDRALKRGFQEVDELFLEDFQALPHELFQEFDYQPIAAASLAQVHRAKLHDGTSVAVKVQYIDLRDRFDGDIHTLELLLRLVEVMHPSFGFSWVLQDLKGTLAQELDFENEGRNAERCARELAHFPYVVVP

SEQ ID NO: 745726 - protein, 234 aa, Homo sapiens
MAEAREKRRMRLVVDGMGRFGRSLKVGLQISLDYWWCTNVVLRGVEENSPGYLEVMSACHQRAADALVAGAISNGGLYVKLGQGLCSFNHLLPPEYTRTLRVLEDRALKRGFQEVDELFLEDFQALPHELFQEFDYQPIAAASLAQVHRAKLHDGTSVAVKVQYIDLRDRFDGDIHTLELLLRLVEVMHPSFGFSWVLQDLKGTLAQELDFENEGRNAERCARELAHFPYVVVP

SEQ ID NO: 745727 - protein, 375 aa, Homo sapiens
ETLSGAGREKSGAVVGDVATGWSAVSQSWLTAISAYQDQAILLSQPPNYLGLQVQLCHFHSALLHRRQKPWPSPAVFFRRNVRGLPPRFSSPTPLWRKVLSTAVVGAPLLLGARYVMAEAREKRRMRLVVDGMGRFGRPCLPRPWRPTLLVSSSLPEWTSGCRSLKVGLQISLDYWWCTNVVLRGVEENSPGYLEVMSACHQRAADALVAGAISNGGLYVKLGQGLCSFNHLLPPEYTRTLRVLEDRALKRGFQEVDELFLEDFQALPHELFQEFDYQPIAAASLAQVHRAKLHDGTSVAVKVQYIDLRDRFDGDIHTLELLLRLVEVMHPSFGFSWVLQDLKGTLAQELDFENEGRNAERCARELAHFPYVVVP

SEQ ID NO: 745728 - protein, 301 aa, Homo sapiens
MWRPVQLCHFHSALLHRRQKPWPSPAVFFRRNVRGLPPRFSSPTPLWRKVLSTAVVGAPLLLGARYVMAEAREKRRMRLVVDGMGRFGRSLKVGLQISLDYWWCTNVVLRGVEENSPGYLEVMSACHQRAADALVAGAISNGGLYVKLGQGLCSFNHLLPPEYTRTLRVLEDRALKRGFQEVDELFLEDFQALPHELFQEFDYQPIAAASLAQVHRAKLHDGTSVAVKVQYIDLRDRFDGDIHTLELLLRLVEVMHPSFGFSWVLQDLKGTLAQELDFENEGRNAERCARELAHFPYVVVP

SEQ ID NO: 745729 - protein, 377 aa, Homo sapiens
ETLSGAGREKSGAVVGDVATGWSAVSQSWLTAISAYQDQAILLSQPPNYLGLQVQLCHFHSALLHRRQKPWPSPAVFFRRNVRGLPPRFSSPTPLWRKVLSTAVVGAPLLLGARYVMAEAREKRRMRLVVDGMGRFGRSLKVGLQISLDYWWCTNVVLRGVEENSPGYLEVMSACHQRAADALVAGAISNGGLYVKLGQGLCSFNHLLPPEYTRTLRVLEDRALKRGFQEVDELFLEDFQALPHELFQEFDYQPIAAASLAQVHRAKLHDGTSVAVKVQTSNCGNRLEGKSHLETLLASREGMHPDGQLVFQDLRDLARTDERGEERGAETGTQRGRAGNQAAAMTEQGEGGPEQTTGKDPQAREGGPKQQDAAAGS

SEQ ID NO: 745730 - protein, 80 aa, Homo sapiens
LVETGFHHVDQAGLELLTSGDLPASASQSARITGVSHHAQPAFLNNVFANDFQDFALLEHFPGDVWGKILKSQPYHGQSR

SEQ ID NO: 745731 - protein, 80 aa, Homo sapiens
SHGRALGPPPCAPGPAPRLPPLASLPATCRPAANWSGRRRPEGPGQPREGGEAEQERPGSGHILRVRKRGERPHVSLSPN

SEQ ID NO: 745732 - protein, 80 aa, Homo sapiens; identical to SEQ ID NO: 745731

SEQ ID NO: 745733 - protein, 80 aa, Homo sapiens; identical to SEQ ID NO: 745731

SEQ ID NO: 745734 - protein, 80 aa, Homo sapiens; identical to SEQ ID NO: 745731

SEQ ID NO: 745735 - protein, 80 aa, Homo sapiens; identical to SEQ ID NO: 745731

SEQ ID NO: 745736 - protein, 580 aa, Homo sapiens
MADLVPDLQPILFWMSNSIELLYFIQQKCPLYMQSMEEQLDITGSKESLFSCTLTASEEAMAVLEEVVLYAFQQCVYYVSKSLYICLPALLECPPFQTERRESWSSAPELPEELRRVVSVYQAALDLLRQLQVHPEVASQMLAYLFFFSGTLLLNQLLDRGPSLSCFHWPRGVQACARLQQLLEWMRSAGFGAAGEHFFQKLSCTLNLLATPRAQLIQMSWTALRAAFPALSPAQLHRLLTHYQLASAMGPMSTWEPGAQDSPEAFRSEDVLESYENPPPIVLPSDGFQVDLEANCLDDSIYQHLLYVRHFLWGLRSRASPGSPGRPGSGASQPVCPEGMHHVVLDGHLEAPSCPLAPRDPGPAAREVAPERTLPLRGAPWAQAPPGRQPGRGGSQAGPPHTDSSCLLTPPSTPLGPEPGDPDWPESGGPCGKALPERQRNGLSGLRGAAPEGDSAALAEESPPAPSSRSSSTEDFCYVFTVELERGPSGLGMGLIDGMHTHLGAPGLYIQTLLPGSPAAADGRLSLGDRILEVNGSSLLGLGYLRAVDLIRHGGKKMRFLVAKSDVETAKKIHFRTPPL

SEQ ID NO: 745737 - protein, 312 aa, Homo sapiens
LLGIWRRRLRAPPAPARAPAPAPGADQVPLAPAARPPTCCCRRRAPQALPATRALSPGPDSHGSAAMFAPRLLDFQKTKYARFMNHRVPAHKRYQPTEYEHAANCATHAFWIIPSILGSSNLYFLSDDDWETISAWIYGLGLCGLFVVSTVFHTISWKKSHLRMVEHCLHMFDRMVIYFFIAASYAPWLNLRELGPWASHMRWLVWIMASVGTIYVFFFHERYKLVELLCYVVMGFFPALVILSMPNTEGIWELVTGGVFYCLGMVFFKSDGRIPFAHAIWHLFVAFGAGTHYYAIWRYLYLPSTLQTKVSK

SEQ ID NO: 745738 - protein, 1132 aa, Homo sapiens
RCAAGRRRRGTRGSGRRPQPTASGSSAGTWRRGGLCRRSRPPHILWLKPTVLIHEASPTMFYGTHFIMSPPTKSKLKRQSQLLSSMLSRTLSYKYRDLDSTFSSLGASDDPAELSTQLSAPGVLKVFGDSVCTGTHYKSVLATGTSSARELVKEALERYALDPRQAGQYVLCDVVGQAGDAGQRWQARCFRVFGDSEKPLLIQELWKPREGLSRRFELRKRSDVEELAAKEVDTITAGINAQARRLQRSRAKGTPTPALGDARSSPPPRLRRTVSETSLSPVNALPAAAQGPEEPGPDAMRYSLYQSPHLLLLQGYSQQHPGVCAQPGPAHGGPADPSSKPSISLSAPDILPLHCTIRRQPLPDSGQAAGRLVLEPIPGAHISVNFSEVGHRTVVLHHGDLLSLGLYYLLLFKDPAQAQPLPARALARLRAVPQSCRLCGAALGARGAASPTQAALPRRQQLLLEFEPHLEDTLLQRIMTLIEPGGDDHKLTPAFLLCLCIQHSATHFQPGTFGQLLLKIARLIRETVWEKTKELAEKQAQLQEPISLASCAMADLVPDLQPILFWMSNSIELLYFIQQKCPLYMQSMEEQLDITGSKESLFSCTLTASEEAMAVLEEVVLYAFQQCVYYVSKSLYICLPALLECPPFQTERRESWSSAPELPEELRRVVSVYQAALDLLRQLQVHPEVASQMLAYLFFFSGTLLLNQLLDRGPSLSCFHWPRGVQACARLQQLLEWMRSAGFGAAGEHFFQKLSCTLNLLATPRAQLIQMSWTALRAAFPALSPAQLHRLLTHYQLASAMGPMSTWEPGAQDSPEAFRSEDVLESYENPPPIVLPSDGFQVDLEANCLDDSIYQHLLYVRHFLWGLRSRASPGSPGRPGSGASQPVCPEGMHHVVLDGHLEAPSCPLAPRDPGPAAREVAPERTLPLRGAPWAQAPPGRQPGRGGSQAGPPHTDSSCLLTPPSTPLGPEPGDPDWPESGGPCGKALPERQRNGLSGLRGAAPEGDSAALAEESPPAPSSRSSSTEDFCYVFTVELERGPSGLGMGLIDGMHTHLGAPGLYIQTLLPGSPAAADGRLSLGDRILEVNGSSLLGLGYLRAVDLIRHGGKKMRFLVAKSDVETAKKIHFRTPPL

SEQ ID NO: 745739 - protein, 1176 aa, Homo sapiens
LLGIWRRRLRAPPAPARAPAPAPGADQVPLAPAARPPTCCCRRRAPQALPATRALSPGPDSHGSAAMFAPRLLDFQKTKYARSRPPHILWLKPTVLIHEASPTMFYGTHFIMSPPTKSKLKRQSQLLSSMLSRTLSYKYRDLDSTFSSLGASDDPAELSTQLSAPGVLKVFGDSVCTGTHYKSVLATGTSSARELVKEALERYALDPRQAGQYVLCDVVGQAGDAGQRWQARCFRVFGDSEKPLLIQELWKPREGLSRRFELRKRSDVEELAAKEVDTITAGINAQARRLQRSRAKGTPTPALGDARSSPPPRLRRTVSETSLSPVNALPAAAQGPEEPGPDAMRYSLYQSPHLLLLQGYSQQHPGVCAQPGPAHGGPADPSSKPSISLSAPDILPLHCTIRRQPLPDSGQAAGRLVLEPIPGAHISVNFSEVGHRTVVLHHGDLLSLGLYYLLLFKDPAQAQPLPARALARLRAVPQSCRLCGAALGARGAASPTQAALPRRQQLLLEFEPHLEDTLLQRIMTLIEPGGDDHKLTPAFLLCLCIQHSATHFQPGTFGQLLLKIARLIRETVWEKTKELAEKQAQLQEPISLASCAMADLVPDLQPILFWMSNSIELLYFIQQKCPLYMQSMEEQLDITGSKESLFSCTLTASEEAMAVLEEVVLYAFQQCVYYVSKSLYICLPALLECPPFQTERRESWSSAPELPEELRRVVSVYQAALDLLRQLQVHPEVASQMLAYLFFFSGTLLLNQLLDRGPSLSCFHWPRGVQACARLQQLLEWMRSAGFGAAGEHFFQKLSCTLNLLATPRAQLIQMSWTALRAAFPALSPAQLHRLLTHYQLASAMGPMSTWEPGAQDSPEAFRSEDVLESYENPPPIVLPSDGFQVDLEANCLDDSIYQHLLYVRHFLWGLRSRASPGSPGRPGSGASQPVCPEGMHHVVLDGHLEAPSCPLAPRDPGPAAREVAPERTLPLRGAPWAQAPPGRQPGRGGSQAGPPHTDSSCLLTPPSTPLGPEPGDPDWPESGGPCGKALPERQRNGLSGLRGAAPEGDSAALAEESPPAPSSRSSSTEDFCYVFTVELERGPSGLGMGLIDGMHTHLGAPGLYIQTLLPGSPAAADGRLSLGDRILEVNGSSLLGLGYLRAVDLIRHGGKKMRFLVAKSDVETAKKIHFRTPPL

SEQ ID NO: 745740 - protein, 1132 aa, Homo sapiens; identical to SEQ ID NO: 745738

SEQ ID NO: 745741 - protein, 383 aa, Homo sapiens
MSHRVVGGNSEGMSPRVGPVTVARIPASCVHRAGDSGLNLLAPGFPHRWAGRPGEGGSFSCGHYGHPLSPAEDVLESYENPPPIVLPSDGFQVDLEANCLDDSIYQHLLYVRHFLWGLRSRASPGSPGRPGSGASQPVCPEGMHHVVLDGHLEAPSCPLAPRDPGPAAREVAPERTLPLRGAPWAQAPPGRQPGRGGSQAGPPHTDSSCLLTPPSTPLGPEPGDPDWPESGGPCGKALPERQRNGLSGLRGAAPEGDSAALAEESPPAPSSRSSSTEDFCYVFTVELERGPSGLGMGLIDGMHTHLGAPGLYIQTLLPGSPAAADGRLSLGDRILEVNGSSLLGLGYLRAVDLIRHGGKKMRFLVAKSDVETAKKIHFRTPPL

SEQ ID NO: 745742 - protein, 336 aa, Homo sapiens
LLGIWRRRLRAPPAPARAPAPAPGADQVPLAPAARPPTCCCRRRAPQALPATRALSPGPDSHGSAAMFAPRLLDFQKTKYARFMNHRVPAHKRYQPTEYEHAANCATHAFWIIPSILGSSNLYFLSDDDWETISAWIYGLGLCGLFVVSTVFHTISWKKSHLRMVEHCLHMFDRMVIYFFIAASYAPWLNLRELGPWASHMRWLVWIMASVGTIYVFFFHERTGSCVQFLRGEACPKAGTACLPARYKLVELLCYVVMGFFPALVILSMPNTEGIWELVTGGVFYCLGMVFFKSDGRIPFAHAIWHLFVAFGAGTHYYAIWRYLYLPSTLQTKVSK

SEQ ID NO: 745743 - protein, 1132 aa, Homo sapiens; identical to SEQ ID NO: 745738

SEQ ID NO: 745744 - protein, 118 aa, Homo sapiens
RISCKDLGRGDCEGWLWKKKDAKSYFSQKWKKYWFVLKDASLYWYINEEDEKAEGFISLPEFKIDRASECRKKYAFKACHPKIKSFYFAAEHLDDMNRWALTELICWTAGIWQKGERV

SEQ ID NO: 745745 - protein, 113 aa, Homo sapiens
ANGPARSWLGPRPSQQKGCGWSPQQRGMGRGAPQGHVCWVQIRYGRQVGMLPLPPPLLSWKPASLFPPGSVSWCSGKCHSREVVGGAVTCDIPTHIHHCPLGEHSPGRCLKES

SEQ ID NO: 745746 - protein, 560 aa, Homo sapiens
MEPLQQQQQQQQQQQKQPHLAPLQMDAREKQGQQMREAQFLYAQKLVTQPTLLSATAGRPSGSTPLGPLARVPPTAAVAQVFERGNMNSEPEEEDGGLEDEDGDDEVAEVAEKETQAASKYFHVQKVARQDPRVAPMSNLLPAPGLPPHGQQAKEDHTKDASKASPSVSTAGQPNWNLDEQLKQNGGLAWSDDADGGRGREISRDFAKLYELDGDPERKEFLDDLFVFMQKRGTPINRIPIMAKQILDLYMLYKLVTEKGGLVEIINKKIWREITKGLNLPTSITSAAFTLRTQYMKYLYAYECEKKALSSPAELQAAIDGNRREGRRPSYSSSLFGYSPAAATAAAAAGAPALLSPPKIRFPILGLGSSSGTNTSSPRISPATTLRKGDGAPVTTVPVPNRLAVPVTLASQQAGTRTAALEQLRERLESGEPAEKKASRLSEEEQRLVQQAFQRNFFSMARQLPMKIRINGREDRAEASAAALNLTTSSIGSINMSVDIDGTTYAGVLFAQKPVVHLITGSAPQSLGSSASSSSSSHCSPSPTSSRGTPSAEPSTSWSL

SEQ ID NO: 745747 - protein, 349 aa, Homo sapiens
MVVWPEGKEFRDDLFFFLQKRGTPINRIPIMAKQILDLYMLYKLVTEKGGLVEIINKKIWREITKGLNLPTSITSAAFTLRTQYMKYLYAYECEKKALSSPAELQAAIDGNRREGRRPSYSSSLFGYSPAAATAAAAAGAPALLSPPKIRFPILGLGSSSGTNTSSPRISPATTLRKGDGAPVTTVPVPNRLAVPVTLASQQAGTRTAALEQLRERLESGEPAEKKASRLSEEEQRLVQQAFQRNFFSMARQLPMKIRINGREDRAEASAAALNLTTSSIGSINMSVDIDGTTYAGVLFAQKPVVHLITGSAPQSLGSSASSSSSSHCSPSPTSSRGTPSAEPSTSWSL

SEQ ID NO: 745748 - protein, 560 aa, Homo sapiens; identical to SEQ ID NO: 745746

SEQ ID NO: 745749 - protein, 560 aa, Homo sapiens; identical to SEQ ID NO: 745746

SEQ ID NO: 745750 - protein, 87 aa, Homo sapiens
GRSREDWVRLQGSEAGWGVRGFLALENLIEILSRRFFKQVTMSTDTGVSLPSYEEDQGSKLIRKAKEAPFVPVGIAGFCSNCCIWII

SEQ ID NO: 745751 - protein, 79 aa, Homo sapiens
GRSREDWVRLQGSEAGWGVRGFLALGRFFKQVTMSTDTGVSLPSYEEDQGSKLIRKAKEAPFVPVGIAGFCSNCCIWII

SEQ ID NO: 745752 - protein, 79 aa, Homo sapiens; identical to SEQ ID NO: 745751

SEQ ID NO: 745753 - protein, 79 aa, Homo sapiens; identical to SEQ ID NO: 745751

SEQ ID NO: 745754 - protein, 87 aa, Homo sapiens; identical to SEQ ID NO: 745750

SEQ ID NO: 745755 - protein, 79 aa, Homo sapiens; identical to SEQ ID NO: 745751

SEQ ID NO: 745756 - protein, 72 aa, Homo sapiens
LVLEVSIALATDAKPQAAIVAYGLYKLKSRGNTKMSIHLIHMRVAAQGFVVGAMTVGMGYSMYREFWAKPKP

SEQ ID NO: 745757 - protein, 89 aa, Homo sapiens
SADNKGLPGGYRAVLKETHYQWPLSEVMTVSLINGELLGESRSQDSAPPTKMSIHLIHMRVAAQGFVVGAMTVGMGYSMYREFWAKPKP

SEQ ID NO: 745758 - protein, 102 aa, Homo sapiens
GRSREDWVRLQGSEAGWGVRGFLALGRFFKQVTMSTDTGVSLPSYEEDQGSKLIRKAKEAPFVPVVFGDSPALSPRLECSGRISAHCSLCLLGSSDSPTSAS

SEQ ID NO: 745759 - protein, 79 aa, Homo sapiens; identical to SEQ ID NO: 745751

SEQ ID NO: 745760 - protein, 79 aa, Homo sapiens; identical to SEQ ID NO: 745751

SEQ ID NO: 745761 - protein, 79 aa, Homo sapiens; identical to SEQ ID NO: 745751

SEQ ID NO: 745762 - protein, 79 aa, Homo sapiens; identical to SEQ ID NO: 745751

SEQ ID NO: 745763 - protein, 79 aa, Homo sapiens; identical to SEQ ID NO: 745751

SEQ ID NO: 745764 - protein, 102 aa, Homo sapiens; identical to SEQ ID NO: 745758

SEQ ID NO: 745765 - protein, 109 aa, Homo sapiens
MSTDTGVSLPSYEEDQGSQISSGENANNEEGSHFWYTPIEQVVLEFYIARRYSVSQYRIYNDKLKSRGNTKMSIHLIHMRVAAQGFVVGAMTVGMGYSMYREFWAKPKP

SEQ ID NO: 745766 - protein, 31 aa, Homo sapiens
MSIHLIHMRVAAQGFVVGAMTVTKCKRSGSS

SEQ ID NO: 745767 - protein, 91 aa, Homo sapiens
QFCTQEALDRVYGFVRTSKVPEFDFPVTPRRDKEMAVSFASLKGTHSLVMGYGNTGRGRALRSHQRAVSAAGQRLFIRVTIMYAHEGDSNS

SEQ ID NO: 745768 - protein, 911 aa, Homo sapiens
MDTCGVGYVALGEAGPVGNMTVVDSPGQEVLNQLDVKTSSEMTSAEASVEMSLPTPLPGFEDSPDQRRLPPEQESLSRLEQPDLSSEMSKVSKPRASKPGRKRGGRTRKGPKRPQQPNPPSAPLVPGLLDQSNPLSTPMPKKRGRKSKAELLLLKLSKDLDRPESQSPKRPPEDFETPSGERPRRRAAQVALLYLQELAEELSTALPAPVSCPEGPKVSSPTKPKKIRQPAACPGGEEVDGAPRDEDFFLQVEAEDVEESEGPSESSSEPEPVVPRSTPRGSTSGKQKPHCRGMAPNGLPNHIMAPVWKCLHLTKDFREQKHSYWEFAEWIPLAWKWHLLSELEAAPYLPQEEKSPLFSVQREGLPEDGTLYRINRFSSITAHPERWDVSFFTGGPLWALDWCPVPEGAGASQYVALFSSPDMNETHPLSQLHSGPGLLQLWGLGTLQQESCPGNRAHFVYGIACDNGCIWDLKFCPSGAWELPGTPRKAPLLPRLGLLALACSDGKVLLFSLPHPEALLAQQPPDAVKPAIYKVQCVATLQVGSMQATDPSECGQCLSLAWMPTRPHQHLAAGYYNGMVVFWNLPTNSPLQRIRLSDGSLKLYPFQCFLAHDQAVRTLQWCKANSHFLVSAGSDRKIKFWDLRRPYEPINSIKRFLSTELAWLLPYNGVTVAQDNCYASYGLCGIHYIDAGYLGFKAYFTAPRKGTVWSLSGSDWLGTIAAGDISGELIAAILPDMALNPINVKRPVERRFPIYKADLIPYQDSPEGPDHSSASSGVPNPPKARTYTETVNHHYLLFQDTDLGSFHDLLRREPMLRMQEGEGHSQLCLDRLQLEAIHKVRFSPNLDSYGWLVSGGQSGLVRIHFVRGLASPLGHRMQLESRAHFNAMFQPSSPTRRPGFSPTSHRLLPTP

SEQ ID NO: 745769 - protein, 451 aa, Homo sapiens
TRGSRTRGCIWDLKFCPSGAWELPGTPRKAPLLPRLGLLALACSDGKVLLFSLPHPEALLAQQPPDAVKPAIYKVQCVATLQVGSMQATDPSECGQCLSLAWMPTRPHQHLAAGYYNGMVVFWNLPTNSPLQRIRLSDGSLKLYPFQCFLAHDQAVRTLQWCKANSHFLVSAGSDRKIKFWDLRRPYEPINSIKRFLSTELAWLLPYNGVTVAQDNCYASYGLCGIHYIDAGYLGFKAYFTAPRKGTVWSLSGSDWLGTIAAGDISGELIAAILPDMALNPINVKRPVERRFPIYKADLIPYQDSPEGPDHSSASSGVPNPPKARTYTETVNHHYLLFQDTDLGSFHDLLRREPMLRMQEGEGHSQLCLDRLQLEAIHKVRFSPNLDSYGWLVSGGQSGLVRIHFVRGLASPLGHRMQLESRAHFNAMFQPSSPTRRPGFSPTSHRLLPTP

SEQ ID NO: 745770 - protein, 796 aa, Homo sapiens [sequence omitted]

SEQ ID NO: 745771 - protein, 928 aa, Homo sapiens
MDTCGVGYVALGEAGPVGNMTVVDSPGQEVLNQLDVKTSSEMTSAEASVEMSLPTPLPGFEDSPDQRRLPPEQESLSRLEQPDLSSEMSKVSKPRASKPGRKRGGRTRKGPKRPQQPNPPSAPLVPGLLDQSNPLSTPMPKKRGRKSKAELLLLKLSKDLDRPESQSPKRPPEDFETPSGERPRRRAAQVALLYLQELAEELSTALPAPVSCPEGPKVSSPTKPKKIRQPAACPGGEEVDGAPRDEDFFLQVEAEDVEESEGPSESSSEPEPVVPRSTPRGSTSGKQKPHCRGMAPNGLPNHIMAPVWKCLHLTKDFREQKHSYWEFAEWIPLAWKWHLLSELEAAPYLPQEEKSPLFSVQREGLPEDGTLYRINRFSSITAHPERWDVSFFTGGPLWALDWCPVPEGAGASQYVALFSSPDMNETHPLSQLHSGPGLLQLWGLGTLQQESCPGNRAHFVYGIACDNGCIWDLKFCPSGAWELPGTPRKAPLLPRLGLLALACSDGKVLLFSLPHPEALLAQQPPDAVKPAIYKVQCVATLQVGSMQATDPSECGQCLSLAWMPTRPHQHLAAGYYNGMVVFWNLPTNSPLQRIRLSDGSLKLYPFQCFLAHDQAVRTLQWCKANSHFLVSAGSDRKIKFWDLRRPYEPINSIKRFLSTELAWLLPYNGVTVAQDNCYASYGLCGIHYIDAGYLGFKAYFTAPRKGTVWRCLFEEQEVGLEDGTVWSLSGSDWLGTIAAGDISGELIAAILPDMALNPINVKRPVERRFPIYKADLIPYQDSPEGPDHSSASSGVPNPPKARTYTETVNHHYLLFQDTDLGSFHDLLRREPMLRMQEGEGHSQLCLDRLQLEAIHKVRFSPNLDSYGWLVSGGQSGLVRIHFVRGLASPLGHRMQLESRAHFNAMFQPSSPTRRPGFSPTSHRLLPTP

SEQ ID NO: 745772 - protein, 911 aa, Homo sapiens; identical to SEQ ID NO: 745768

SEQ ID NO: 745773 - protein, 848 aa, Homo sapiens
MDTCGVGYVALGEAGPVGNMTVVDSPGQEVLNQLDVKTSSEMTSAEASVEMSLPTPLPGFEDSPDQRRLPPEQESLSRLEQPDLSSEMSKVSKPRASKPGRKRGGRTRKGPKRPQQPNPPSAPLVPGLLDQSNPLSTPMPKKRGRKSKAELLLLKLSKDLDRPESQSPKRPPEDFETPSGERPRRRAAQVALLYLQELAEELSTALPAPVSCPEGPKVSSPTKPKKIRQPAACPGGEEVDGAPRDEDFFLQVEAEDVEESEGPSESSSEPEPVVPRSTPRGSTSGKQKPHCRGMAPNGLPNHIMAPVWKCLHLTKDFREQKHSYWEFAEWIPLAWKWHLLSELEAAPYLPQEEKSPLFSVQREGLPEDGTLYRINRFSSITAHPERWDVSFFTGGPLWALDWCPVPEGAGASQYVALFSSPDMNETHPLSQLHSGPGLLQLWGLGTLQQESCPGNRAHFVYGIACDNGCIWDLKFCPSGAWELPGTPRKAPLLPRLGLLALACSDGKVLLFSLPHPEALLAQQPPDAVKPAIYKVQCVATLQVGSMQATDPSECGQCLSLAWMPTRPHQHLAAGYYNGMVVFWNLPTNSPLQRIRLSDGSLKLYPFQCFLAHDQAVRTLQWCKANSHFLVSAGSDRKIKFWDLRRPYEPINSIKRFLSTELAWLLPYNGVTVAQDNCYASYGLCGIHYIDAGYLGFKAYFTAPRKGTVWSLSGSDWLGTIAAGDISGELIAAILPDMALNPINVKRPVERRFPIYKADLIPYQDSPEGPDHSSASSGVPNPPKARTYTETVNHHYLLFQDTDLGSFHDLLRREPMLRMQEGEGHSQLCLDRLQLEAIHKGNHHVCPRG

SEQ ID NO: 745774 - protein, 715 aa, Homo sapiens
MDTCGVGYVALGEAGPVGNMTVVDSPGQEVLNQLDVKTSSEMTSAEASVEMSLPTPLPGFEDSPDQRRLPPEQESLSRLEQPDLSSEMSKVSKPRASKPGRKRGGRTRKGPKRPQQPNPPSAPLVPGLLDQSNPLSTPMPKKRGRKSKAELLLLKLSKDLDRPESQSPKRPPEDFETPSGERPRRRAAQVALLYLQELAEELSTALPAPVSCPEGPKVSSPTKPKKIRQPAACPGGEEVDGAPRDEDFFLQVEAEDVEESEGPSESSSEPEPVVPRSTPRGSTSGKQKPHCRGMAPNGLPNHIMAPVWKCLHLTKDFREQKHSYWEFAEWIPLAWKWHLLSELEAAPYLPQEEKSPLFSVQREGLPEDGTLYRINRFSSITAHPERWDVSFFTGGPLWALDWCPVPEGAGASQYVALFSSPDMNETHPLSQLHSGPGLLQLWGLGTLQQESCPGNRAHFVYGIACDNGCIWDLKFCPSGAWELPGTPRKAPLLPRLGLLALACSDGKVLLFSLPHPEALLAQQPPDAVKPAIYKVQCVATLQVGSMQATDPSECGQCLSLAWMPTRPHQHLAAGYYNGMVVFWNLPTNSPLQRIRLSDGSLKLYPFQCFLAHDQAVRTLQWCKANSHFLVSAGSDRRFLSTELAWLLPYNGVTVAQDNCYASYGLCGIHYIDAGYLGFKAYFTAPRKGTVWGTGWSFSDPLAWTMLAVIYANYCV

SEQ ID NO: 745775 - protein, 594 aa, Homo sapiens
MDTCGVGYVALGEAGPVGNMTVVDSPGQEVLNQLDVKTSSEMTSAEASVEMSLPTPLPGFEDSPDQRRLPPEQESLSRLEQPDLSSEMSKVSKPRASKPGRKRGGRTRKGPKRPQQPNPPSAPLVPGLLDQSNPLSTPMPKKRGRKSKAELLLLKLSKDLDRPESQSPKRPPEDFETPSGERPRRRAAQVALLYLQELAEELSTALPAPVSCPEGPKVSSPTKPKKIRQPAACPGGEEVDGAPRDEDFFLQVEAEDVEESEGPSESSSEPEPVVPRSTPRGSTSGKQKPHCRGMAPNGLPNHIMAPVWKCLHLTKDFREQKHSYWEFAEWIPLAWKWHLLSELEAAPYLPQEEKSPLFSVQREGLPEDGTLYRINRFSSITAHPERWDVSFFTGGPLWALDWCPVPEGAGASQYVALFSSPDMNETHPLSQLHSGPGLLQLWGLGTLQQESCPGNRAHFVYGIACDNGCIWDLKFCPSGAWELPGTPRKAPLLPRLGLLALACSDGKVLLFSLPHPEALLAQQPPDAVKPAIYKVQCVATLQVGSMQATDPSECGQCLSLAWMPTRPHQHLAAGYYNGKKTKIKHKELLLFKFF

SEQ ID NO: 745776 - protein, 950 aa, Homo sapiens
MQVFFSLSVRQNPLKSLLKHKVLAPSRIADSGQPFWGVLMDTCGVGYVALGEAGPVGNMTVVDSPGQEVLNQLDVKTSSEMTSAEASVEMSLPTPLPGFEDSPDQRRLPPEQESLSRLEQPDLSSEMSKVSKPRASKPGRKRGGRTRKGPKRPQQPNPPSAPLVPGLLDQSNPLSTPMPKKRGRKSKAELLLLKLSKDLDRPESQSPKRPPEDFETPSGERPRRRAAQVALLYLQELAEELSTALPAPVSCPEGPKVSSPTKPKKIRQPAACPGGEEVDGAPRDEDFFLQVEAEDVEESEGPSESSSEPEPVVPRSTPRGSTSGKQKPHCRGMAPNGLPNHIMAPVWKCLHLTKDFREQKHSYWEFAEWIPLAWKWHLLSELEAAPYLPQEEKSPLFSVQREGLPEDGTLYRINRFSSITAHPERWDVSFFTGGPLWALDWCPVPEGAGASQYVALFSSPDMNETHPLSQLHSGPGLLQLWGLGTLQQESCPGNRAHFVYGIACDNGCIWDLKFCPSGAWELPGTPRKAPLLPRLGLLALACSDGKVLLFSLPHPEALLAQQPPDAVKPAIYKVQCVATLQVGSMQATDPSECGQCLSLAWMPTRPHQHLAAGYYNGMVVFWNLPTNSPLQRIRLSDGSLKLYPFQCFLAHDQAVRTLQWCKANSHFLVSAGSDRKIKFWDLRRPYEPINSIKRFLSTELAWLLPYNGVTVAQDNCYASYGLCGIHYIDAGYLGFKAYFTAPRKGTVWSLSGSDWLGTIAAGDISGELIAAILPDMALNPINVKRPVERRFPIYKADLIPYQDSPEGPDHSSASSGVPNPPKARTYTETVNHHYLLFQDTDLGSFHDLLRREPMLRMQEGEGHSQLCLDRLQLEAIHKVRFSPNLDSYGWLVSGGQSGLVRIHFVRGLASPLGHRMQLESRAHFNAMFQPSSPTRRPGFSPTSHRLLPTP

SEQ ID NO: 745777 - protein, 911 aa, Homo sapiens; identical to SEQ ID NO: 745768

SEQ ID NO: 745778 - protein, 333 aa, Homo sapiens
MVVFWNLPTNSPLQRIRLSDGSLKLYPFQCFLAHDQAVRTLQWCKANSHFLVSAGSDRKIKFWDLRRPYEPINSIKRFLSTELAWLLPYNGVTVAQDNCYASYGLCGIHYIDAGYLGFKAYFTAPRKGTVWSLSGSDWLGTIAAGDISGELIAAILPDMALNPINVKRPVERRFPIYKADLIPYQDSPEGPDHSSASSGVPNPPKARTYTETVNHHYLLFQDTDLGSFHDLLRREPMLRMQEGEGHSQLCLDRLQLEAIHKVRFSPNLDSYGWLVSGGQSGLVRIHFVRGLASPLGHRMQLESRAHFNAMFQPSSPTRRPGFSPTSHRLLPTP

SEQ ID NO: 745779 - protein, 932 aa, Homo sapiens
MDTCGVGYVALGEAGPVGNMTVVDSPGQEVLNQLDVKTSSEMTSAEASVEMSLPTPLPGFEDSPDQRRLPPEQESLSRLEQPDLSSEMSKVSKPRASKPGRKRGGRTRKGPKRPQQPNPPSAPLVPGLLDQSNPLSTPMPKKRGRKSKAELLLLKLSKDLDRPESQSPKRPPEDFETPSGERPRRRAAQVALLYLQELAEELSTALPAPVSCPEGPKVSSPTKPKKIRQPAACPGGEEVDGAPRDEDFFLQVEAEDVEESEGPSESSSEPEPVVPRSTPRGSTSGKQKPHCRGMAPNGLPNHIMAPVWKCLHLTKDFREQKHSYWEFAEWIPLAWKWHLLSELEAAPYLPQEEKSPLFSVQREGLPEDGTLYRINRFSSITAHPERWDVSFFTGGPLWALDWCPVPEGAGASQYVALFSSPDMNETHPLSQLHSGPGLLQLWGLGTLQQESCPGNRAHFVYGIACDNGCIWDLKFCPSGAWELPGTPRKAPLLPRLGLLALACSDGKVLLFSLPHPEALLAQQPPDAVKPAIYKVQCVATLQVGSMQATDPSECGQCLSLAWMPTRPHQHLAAGYYNGMVVFWNLPTNSPLQRIRLSDGSLKLYPFQCFLAHDQAVRTLQWCKANSHFLVSAGSDRKIKFWDLRRPYEPINSIKRFLSTELAWLLPYNGVTVAQDNCYASYGLCGIHYIDAGYLGFKAYFTAPRKGTVWSLSGSDWLGTIAAGDISGELIAAILPDMALNPINVKRPVERRFVRIRTSNSSCWILTHMPSQILPIYKADLIPYQDSPEGPDHSSASSGVPNPPKARTYTETVNHHYLLFQDTDLGSFHDLLRREPMLRMQEGEGHSQLCLDRLQLEAIHKVRFSPNLDSYGWLVSGGQSGLVRIHFVRGLASPLGHRMQLESRAHFNAMFQPSSPTRRPGFSPTSHRLLPTP

SEQ ID NO: 745780 - protein, 911 aa, Homo sapiens; identical to SEQ ID NO: 745768

SEQ ID NO: 745781 - protein, 58 aa, Homo sapiens
MGFEKSVRASYKELQETGLNSRGNLKSRVKGYRGSSLVLAPESLHLMPLQLHNPKTEL

SEQ ID NO: 745782 - protein, 127 aa, Homo sapiens
CFPVLSRNSFRRLRLGPSQECCLSVLNMGGAQGMFTGRCCPPSWPMGDPGNINCLTTFVPQLPVDVVRVTILTLVGDKEQLTQHTGFFCSQNGILQCTKSKKALELTLVSPLFLLNSGNRNFCSSSI

SEQ ID NO: 745783 - protein, 114 aa, Homo sapiens
MALLASNSCFIRCNEAGDIEAKSKTAGEEEMIKIRSCAEKETKKKDDIPEEDKGNVKQCEINYVKKFQSFQDHKLKISKEESKILKKAQKDGFLHETLLDSVAIYLFSLFFSSQ

SEQ ID NO: 745784 - protein, 114 aa, Homo sapiens
MALLASNSCFIRCNEAGDIEAKSKTAGEEEMIKIRSCAEKETKKKDDIPEEDKGNVKQCEINYVKKFQSFQDHKLKISKEESKILKKAQKDGFLHETLLDRSAIYLFSLFFSSQ

SEQ ID NO: 745785 - protein, 183 aa, Homo sapiens
MDEGTYIHALDNGLFTLGAPHKEVDEGPSPPEQFMAVKLSDSRIALKSGYGKYLGINSDELVGHSDAIGPREQWEPVFQNGKMALLASNSCFIRCNEAGDIEAKSKTAGEEEMIKIRSCAEKETKKKDDIPEEDKGNVKQCEINYVKKFQSFQDHKLKISKEESKILKKAQKDGFLHETLLDR

SEQ ID NO: 745786 - protein, 150 aa, Homo sapiens
MALLASNSCFIRCNEAGDIEAKSKTAGEEEMIKIRSCAEKETKKKDDIPEEDKGNVKQCEINYVKKFQSFQDHKLKISKEESKILKKAQKDGFLHETLLDRRSWNCTDDISEIHWKASMTEYYCHSDLAEMTDKEENTPNKHDLVQQYKK

SEQ ID NO: 745787 - protein, 118 aa, Homo sapiens
MALLASNSCFIRCNEAGDIEAKSKTAGEEEMIKIRSCAEKETKKKDDIPEEDKGNVKQCEINYVKKFQSFQDHKLKISKEESKILKKAQKDGFLHETLLDRPKLDCTAAISAHCNLPA

SEQ ID NO: 745788 - protein, 104 aa, Homo sapiens
MALLASNSCFIRCNEAGDIEAKSKTAGEEEMIKIRSCAEKETKKKDDIPEEDKGNVKQCEINYVKKFQSFQDHKLKISKEESKILKKAQKDGFLHETLLDREPN

SEQ ID NO: 745789 - protein, 114 aa, Homo sapiens; identical to SEQ ID NO: 745784

SEQ ID NO: 745790 - protein, 629 aa, Homo sapiens
MLSYVWPKDRPDLRARVAISLGFLGGAKAMNIVVPFMFKYAVDSLNQMSGNMLNLSDAPNTVATMATAVLIGYGVSRAGAAFFNEVRNAVFGKVAQNSIRRIAKNVFLHLHNLDLGFHLSRQTGALSKAIDRGTRGISFVLSALVFNLLPIMFEVMLVSGVLYYKCGAQFALVTLGTLGTYTAFTVAVTRWRTRFRIEMNKADNDAGNAAIDSLLNYETVKYFNNERYEAQRYDGFLKTYETASLKSTSTLAMLNFGQSAIFSVGLTAIMVLASQGIVAGTLTVGDLVMVNGLLFQLSLPLNFLGTVYRETRQALIDMNTLFTLLKVDTQIKDKVMASPLQITPQTATVAFDNVHFEYIEGQKVLSGISFEVPAGKKVAIVGGSGSGKSTIVRLLFRFYEPQKGSIYLAGQNIQDVSLESLRRAVGVVPQDAVLFHNTIYYNLLYGNISASPEEVYAVAKLAGLHDAILRMPHGYDTQVGERGLKLSGGEKQRVAIARAILKDPPVILYDEATSSLDSITEETILGAMKDVVKHRTSIFIAHRLSTVVDADEIIVLDQGKVAERGTHHGLLANPHSIYSEMWHTQSSRVQNHDNPKWEAKKENISKEEERKKLQEEIVNSVKGCGNCSC

SEQ ID NO: 745791 - protein, 108 aa, Homo sapiens
MVGPNHQNLPFSIGHHQIGPTSGLIARMEIHWSLGSRGKVAERGTHHGLLANPHSIYSEMWHTQSSRVQNHDNPKWEAKKENISKEEERKKLQEEIVNSVKGCGNCSC

SEQ ID NO: 745792 - protein, 629 aa, Homo sapiens; identical to SEQ ID NO: 745790

SEQ ID NO: 745793 - protein, 390 aa, Homo sapiens
MLSYVWPKDRPDLRARVAISLGFLGGAKAMNIVVPFMFKYAVDSLNQMSGNMLNLSDAPNTVATMATAVLIGYGVSRAGAAFFNEVRNAVFGKVAQNSIRRIAKNVFLHLHNLDLGFHLSRQTGALSKAIDRGTRGISFVLSALVFNLLPIMFEVMLVSGVLYYKCGAQFALVTLGTLGTYTAFTVAVTRWRTRFRIEMNKADNDAGNAAIDSLLNYETVKYFNNERYEAQRYDGFLKTYETASLKSTSTLAMLNFGQSAIFSVGLTAIMVLASQGIVAGTLTVGDLVMVNGLLFQLSLPLNFLGTVYRETRQALIDMNTLFTLLKVDTQIKDKVMASPLQITPQTATVAFDNVHFEYIEGQKVLSGISFEVPAGKKVAIVGGSGSGWVI

SEQ ID NO: 745794 - protein, 102 aa, Homo sapiens
MKDVVKHRTSIFIAHRLSTVVDADEIIVLDQGKVAERGTHHGLLANPHSIYSEMWHTQSSRVQNHDNPKWEAKKENISKEEERKKLQEEIVNSVKGCGNCSC

SEQ ID NO: 745795 - protein, 629 aa, Homo sapiens; identical to SEQ ID NO: 745790

SEQ ID NO: 745796 - protein, 390 aa, Homo sapiens; identical to SEQ ID NO: 745793

SEQ ID NO: 745797 - protein, 43 aa, Homo sapiens
MPGLVDSNPAPPESQEKKPLKPCCACPETKKARDACISAQPER

SEQ ID NO: 745798 - protein, 158 aa, Homo sapiens
MVAKSTFIFHLDYCFALQCWNLFVGEMSSESEKDKERLIQAAKMFFFHVQDLASVINTLTELFSRSMNTQILLMAVKNNSYIKDFFEQMLKIFKEMQSVVDARHDKIQKESLCSKVAMAMCSVVQKSTNVEELHQSAKEVFKSAHTPVIISVLNSSNI

SEQ ID NO: 745799 - protein, 245 aa, Homo sapiens
MSSESEKDKERLIQAAKMFFFHVQDLASVINTLTELFSRSMNTQILLMAVKNNSYIKDFFEQMLKIFKEMQSVVDARHDKIQKESLCSKVAMAMCSVVQKSTNVEELHQSAKEVFKSAHTPVIISVLNSSNILGSLESSLSHLMKFPIMNLQLSDFYTEDTKEQSDVTTSERTRSPPGSSKTTMIDTLKKLQDVLKTEDSKNPTKSAADLLEQIVKAMGPILEILQKAIKTMEMNISVFKKASDK

SEQ ID NO: 745800 - protein, 123 aa, Homo sapiens
YKQLLDLQNLLDMKCVVMVFCCYSSEVLSVSTIQGETANIYLPVLKHYVQVHTHIIPFHLLRFSKRLHVEQFSSLLSDFSFAIKVRRYMVLGNAHGLSLYILGPTISGMLGKLLNSEVLYFEL

SEQ ID NO: 745801 - protein, 111 aa, Homo sapiens
LPRSRGDFPPNRYDEDQLIISFLPQKCPEALAGGCSWALASGLMVAEAAWSSENGAVGACEMEARRDHREPARLESSSASPQSRPLFHPPANYRQSFPHPLRERPRGGPRP

SEQ ID NO: 745802 - protein, 102 aa, Homo sapiens
KNKNHKILSNNTGNPLNKIQHSFMIKNTRETKNGRKLPQPVIGHLPKNPQLMSYLMVKDSMLSPKIRNQTRISAFNTSIQHCTGVFRQGIRCKRNRKHSEWK

SEQ ID NO: 745803 - protein, 51 aa, Homo sapiens
MDRMDAGAAFHLPQTPTQSSGPPPSNAHMGQGPPLSEEGPLPCSFPSCPRS

SEQ ID NO: 745804 - protein, 238 aa, Homo sapiens
AARSCLRGGTKAGQASTLDRKSSLESIWSQPGLCSHLGGRTLCSSRQKRVGLAGHASLWRGAVGCRGSGSMTTETFVKDIKPGLKNLNLIFIVLETGRVTKTKDGHEVRTCKVADKTGSINISVWDDVGNLIQPGDIIRLTKGYASVFKGCLTLYTGRGGDLQKIGEFCMVYSEVPNFSEPNPEYSTQQAPNKACRTTATFNFPATLDLCASQLWERGMADATGRVPSNNASQPGNGT

SEQ ID NO: 745805 - protein, 236 aa, Homo sapiens
MGAKDPSIEPSSSIPHPVGCRGSGSMTTETFVKDIKPGLKNLNLIFIVLETGRVTKTKDGHEVRTCKVADKTGSINISVWDDVGNLIQPGDIIRLTKGYASVFKGCLTLYTGRGGDLQKIGEFCMVYSEVPNFSEPNPEYSTQQAPNKAVQNDSNPSASQPTTGPSAASPASENQNGNGLSAPPGPGGGPHPPHTPSHPPSTRITRSQPNHTPAGPPGPSSNPVSNGKETRRSSKR

SEQ ID NO: 745806 - protein, 211 aa, Homo sapiens
MTTETFVKDIKPGLKNLNLIFIVLETGRVTKTKDGHEVRTCKVADKTGSINISVWDDVGNLIQPGDIIRLTKGYASVFKGCLTLYTGRGGDLQKIGEFCMVYSEVPNFSEPNPEYSTQQAPNKAVQNDSNPSASQPTTGPSAASPASENQNGNGLSAPPGPGGGPHPPHTPSHPPSTRITRSQPNHTPAGPPGPSSNPVSNGKETRRSSKR

SEQ ID NO: 745807 - protein, 227 aa, Homo sapiens
MRVPEDLAMGCRGSGSMTTETFVKDIKPGLKNLNLIFIVLETGRVTKTKDGHEVRTCKVADKTGSINISVWDDVGNLIQPGDIIRLTKGYASVFKGCLTLYTGRGGDLQKIGEFCMVYSEVPNFSEPNPEYSTQQAPNKAVQNDSNPSASQPTTGPSAASPASENQNGNGLSAPPGPGGGPHPPHTPSHPPSTRITRSQPNHTPAGPPGPSSNPVSNGKETRRSSKR

SEQ ID NO: 745808 - protein, 134 aa, Homo sapiens
MGAKDPSIEPSSSIPHPVGCRGSGSMTTETFVKDIKPGLKNLNLIFIVLETGRVTKTKDGHEVRTCKVADKTGSINISVWDDVGNLIQPGDIIRLTKGYASVFKGCLTLYTGRGGDLQKIGDHCRIRYRARSYQ

SEQ ID NO: 745809 - protein, 254 aa, Homo sapiens
MSALPRSTGQHPAAAEPVAPPAGCSAACTVLPAGLVGCRGSGSMTTETFVKDIKPGLKNLNLIFIVLETGRVTKTKDGHEVRTCKVADKTGSINISVWDDVGNLIQPGDIIRLTKGYASVFKGCLTLYTGRGGDLQKIGEFCMVYSEVPNFSEPNPEYSTQQAPNKAVQNDSNPSASQPTTGPSAASPASENQNGNGLSAPPGPGGGPHPPHTPSHPPSTRITRSQPNHTPAGPPGPSSNPVSNGKETRRSSKR

SEQ ID NO: 745810 - protein, 236 aa, Homo sapiens; identical to SEQ ID NO: 745805

SEQ ID NO: 745811 - protein, 236 aa, Homo sapiens; identical to SEQ ID NO: 745805

SEQ ID NO: 745812 - protein, 152 aa, Homo sapiens
MGAKDPSIEPSSSIPHPVGCRGSGSMTTETFVKDIKPGLKNLNLIFIVLETGRVTKTKDGHEVRTCKVADKTGSINISVWDDVGNLIQPGDIIRLTKGYASVFKGCLTLYTGRGGDLQKIGECRTTATLQLPSLPLDPLLPLQPLRTRMGMD

SEQ ID NO: 745813 - protein, 121 aa, Homo sapiens
MGAKDPSIEPSSSIPHPVGCRGSGSMTTETFVKDIKPGLKNLNLIFIVLETGRVTKTKDGHEVRTCKVADKTGSINISVWDDVGNLIQHFGKPRWADHLRSGVQDQPDQHGETPCLLKIQN

SEQ ID NO: 745814 - protein, 538 aa, Homo sapiens
MERLGEKASRLLEKFGRRKGESSRSGSDGTPGPGKGRLSGLGGPRKSGPRGATGGPGDEPLEPAREQGSLDAERNQRGSFEAPRYEGSFPAGPPPTRALPLPQSLPPDFRLEPTAPALSPRSSFASSSASDASKPSSPRGSLLLDGAGAGGAGGSRPCSNRTSGISMGYDQRHGSPLPAGPCLFGPPLAGAPAGYSPGGVPSAYPELHAALDRLYAQRPAGFGCQESRHSYPPALGSPGALAGAGVGAAGPLERRGAQPGRHSVTGYGDCAVGARYQDELTALLRLTVGTGGREAGARGEPSGIEPSGLEEPPGPFVPEAARARMREPEAREDYFGTCIKCNKGIYGQSNACQALDSLYHTQCFVCCSCGRTLRCKAFYSVNGSVYCEEDYLFSGFQEAAEKCCVCGHLILEKILQAMGKSYHPGCFRCIVCNKCLDGIPFTVDFSNQVYCVTDYHKNYAPKCAACGQPILPSEGCEDIVRVISMDRDYHFECYHCEDCRMQLSDEEGCCCFPLDGHLLCHGCHMQRLNARQPPANYI

SEQ ID NO: 745815 - protein, 538 aa, Homo sapiens; identical to SEQ ID NO: 745814

SEQ ID NO: 745816 - protein, 538 aa, Homo sapiens; identical to SEQ ID NO: 745814

SEQ ID NO: 745817 - protein, 538 aa, Homo sapiens; identical to SEQ ID NO: 745814

SEQ ID NO: 745818 - protein, 458 aa, Homo sapiens
MERLGEKASRLLEKFGRRKGESSRSGSDGTPGPGKGRLSGLGGPRKSGPRGATGGPGDEPLEPAREQGSLDAERNQRGSFEAPRYEGSFPAGPPPTRALPLPQSLPPDFRLEPTAPALSPRSSFASSSASDASKPSSPRGSLLLDGAGAGGAGGSRPCSNRTSGISMGYDQRHGSPLPAGPCLFGPPLAGAPAGYSPGGVPSAYPELHAALDRLYAQRPAGFGCQESRHSYPPALGSPGALAGAGVGAAGPLERRGAQPGRHSVTGYGDCAVGARYQDELTALLRLTVGTGGREAGARGEPSGIEPSGLEEPPGPFVPEAARARMREPEAREDYFGTCIKCNKGIYGQSNACQALDSLYHTQCFVCCSCGRTLRCKAFYSVNGSVYCEEDYLFSGFQEAAEKCCVCGHLILEKILQAMGKSYHPGCFRCIVCNKCLDGIPFTVDFSNQVYCVTDYHKC

SEQ ID NO: 745819 - protein, 369 aa, Homo sapiens
MERLGEKASRLLEKFGRRKGESSRSGSDGTPGPGKGRLSGLGGPRKSGPRGATGGPGDEPLEPAREQGSLDAERNQRGSFEAPRYEGSFPAGPPPTRALPLPQSLPPDFRLEPTAPALSPRSSFASSSASDASKPSSPRGSLLLDGAGAGGAGGSRPCSNRTSGISMGYDQRHGSPLPAGPCLFGPPLAGAPAGYSPGGVPSAYPELHAALDRLYAQRPAGFGCQESRHSYPPALGSPGALAGAGVGAAGPLERRGAQPGRHSVTGYGDCAVGARYQDELTALLRLTVGTGGREAGARGEPSGIEPSGLEEPPGPFVPEAARARMREPEAREDYFGIMLTWSPLHGALCQARSFSPSLEVCSGEKSFYN

SEQ ID NO: 745820 - protein, 538 aa, Homo sapiens; identical to SEQ ID NO: 745814

SEQ ID NO: 745821 - protein, 538 aa, Homo sapiens; identical to SEQ ID NO: 745814

SEQ ID NO: 745822 - protein, 99 aa, Homo sapiens
GKQSSLVFAPNPSFSSMMSLTPESTCTPSALSSQQAPAMDVCLSSAQQPGRRREGLSSPGGWLEAEKKGAPQKDSTGGVLEGNLLLHHFNSFPQLFSWR

SEQ ID NO: 745823 - protein, 243 aa, Homo sapiens
MRPLLVLLLLGLAAGSPPLDDNKIPSLCPGHPGLPGTPGHHGSQGLPGRDGRDGRDGAPGAPGEKGEGGRPGLPGPRGDPGPRGEAGPAGPTGPAGECSVPPRSAFSAKRSESRVPPPSDAPLPFDRVLVNEQGHYDAVTGKFTCQVPGVYYFAVHATVYRASLQFDLVKNGESIASFFQFFGGWPKPASLSGGAMVRLEPEDQVWVQVGVGDYIGIYASIKTDSTFSGFLVYSDWHSSPVFA

SEQ ID NO: 745824 - protein, 154 aa, Homo sapiens
  misc_feature (1)..(2): Xaa can be any naturally occurring amino acid
  misc_feature (4)..(4): Xaa can be any naturally occurring amino acid
XXSXQLPVSGTRVSRQGAPLPALCSPERGRGPGGGSPLGQPPRSALREGVEEVPVREEALAEAQAGAGRGTVTLESPPRCGLSRRYSHPAAPLTPQDCRDLEGTPGREERRDPRGPPGLPGSARCLRDPPSAPSAPRAGCLRRLTHPCPSTACW

SEQ ID NO: 745825 - protein, 154 aa, Homo sapiens; identical to SEQ ID NO: 745824
  misc_feature (1)..(2): Xaa can be any naturally occurring amino acid
  misc_feature (4)..(4): Xaa can be any naturally occurring amino acid

SEQ ID NO: 745826 - protein, 243 aa, Homo sapiens
MRPLLVLLLLGLAAGSPPLDDNKIPSLCPGHPGLPGTPGHHGSQGLPGRDGRDGRDGAPGAPGEKGEGGRPGLPGPRGDPGPRGEAGPAGPTGPAGECSVPPRSAFSAKRSESRVPPPSDAPLPFDRVLVNEQGHYDAVTGKFTCQVPGVYYFAVHATVYRASLQFDLVKNGESIASFFQFFGGWPKPASLSGGAMVRLEPEDQVWVQVGVGDYIGIYASIKTDSTFSGFSAQDQRSVLCWQV

SEQ ID NO: 745827 - protein, 299 aa, Homo sapiens
GLRALSLRCTAVGWGPTGPRRGGERGRSQDSGSRLQSCLVHRLREDPGVRAPGASAMRPLLVLLLLGLAAGSPPLDDNKIPSLCPGHPGLPGTPGHHGSQGLPGRDGRDGRDGAPGAPGEKGEGGRPGLPGPRGDPGPRGEAGPAGPTGPAGECSVPPRSAFSAKRSESRVPPPSDAPLPFDRVLVNEQGHYDAVTGKFTCQVPGVYYFAVHATVYRASLQFDLVKNGESIASFFQFFGGWPKPASLSGGAMVRLEPEDQVWVQVGVGDYIGIYASIKTDSTFSGFSAQDQRSVLCWQV

SEQ ID NO: 745828 - protein, 201 aa, Homo sapiens [sequence omitted]

SEQ ID NO: 745829 - protein, 625 aa, Homo sapiens
MNVTSIALRAETWLLAAWHVKVPPMWLEACINWIQEENNNVNLSQAQMNKQVFEQWLLTDLRDLEHPLLPDGILEIPKGELNGFYALQINSLVDVSQPAYSQIQKLRGKNTTNDLVTAEAQVTPKPWEAKPSRMLMLQLTDGIVQIQGMEYQPIPILHSDLPPGTKILIYGNISFRLGVLLLKPENVKVLGGEVDALLEEYAQEKVLARLIGEPDLVVSVIPNNSNENIPRVTDVLDPALGPSDEELLASLDENDELTANNDTSSERCFTTGSSSNTIPTRQSSFEPEFVISPRPKEEPSNLSIHVMDGELDDFSLEEALLLEETVQKEQMETKELQPLTFNRNADRSIERFSHNPNTTNNFSLTCKNGNNNWSEKNVSEQMTNEDKSFGCPSVRDQNRSIFSVHCNVPLAHDFTNKEKNLETDNKIKQTSSSDSHSLNNKILNREVVNYVQKRSSQISNENDCNLQSCSLRSSENSINLSIAMDLYSPPFVYLSVLMASKPKEVTTVKVKAFIVTLTGNLSSSGGIWSITAKVSDGTAYLDVDFVDEILTSLIGFSVPEMKQSKKDPLQYQKFLEGLQKCQRDLIDLCCLMTISFNPSLSKAMVLALQDVNMEHLENLKKRLNK

SEQ ID NO: 745830 - protein, 121 aa, Homo sapiens
  misc_feature (1)..(1): Xaa can be any naturally occurring amino acid
XPRPKALEEAAEETVQKEQMETKELQPLTFNRNADRSIERFSHNPNTTNNFSLTCKNGNNNWSEKNVSEQMTNEDKSFGCPSVRDQNRSIFSVHCNVPLAHDFTNKEKKLETVLLVPNSSA

SEQ ID NO: 745831 - protein, 625 aa, Homo sapiens; identical to SEQ ID NO: 745829

SEQ ID NO: 745832 - protein, 625 aa, Homo sapiens; identical to SEQ ID NO: 745829

SEQ ID NO: 745833 - protein, 149 aa, Homo sapiens
LPSFFQNQQSSAAPTSQERSSNPAPRRQQAFVAPLSQAPYTFQHGSPLHSTGHPHLAPAPAHLPSQAHLYTYAAPTSAAALGSTSSIAHLFSPQGSSRHAAAYTTHPSTLVHQVPVSVGPSLLTSASVAPAQYYQQLQRPPFKGTMHLT

SEQ ID NO: 745834 - protein, 550 aa, Homo sapiens
IAGLQATTKHSGFPVRMDNAVPIVPQAPAAQPLQIQSGVLTQGSCTPLMVATLHPQVATITPQYAVPFTLSCAAGRPALVEQTAAVLAWPGGTQQILLPSTWQQLPGVALHNSVQPTAMIPEAMGSGQQLADWRNAHSHGNQYSTIMQQPSLLTNHVTLATAQPLNVGVAHVVRQQQSSSLPSKKNKQSAPVSSKSSLDVLPSQVYSLVGSSPLRTTSSYNSLVPVQDQHQPIIIPDTPSPPVSVITIRSDTDEEEDNKYKPSSSGLKPRSNVISYVTVNDSPDSDSSLSSPYSTDTLSALRGNSGSVLEGPGRVVADGTGTRTIIVPPLKTQLGDCTVATQASGLLSNKTKPVASVSGQSSGCCITPTGYRAQRGGTSAAQPLNLSQNQQSSAAPTSQERSSNPAPRRQQAFVAPLSQAPYTFQHGSPLHSTGHPHLAPAPAHLPSQAHLYTYAAPTSAAALGSTSSIAHLFSPQGSSRHAAAYTTHPSTLVHQVPVSVGPSLLTSASVAPAQYQHQFATQSYIGSSRGSTIYTGYPLSPTKISQYSYL

SEQ ID NO: 745835 - protein, 169 aa, Homo sapiens
MLFVIKCVVITLELVLSVYVILQCYPGDGLMSPLYLNQNELILVGMYVNYLQLSSSMAARYTRQGTHTLPRPLLTCQARLICIRMLPRLLLLHWAQPAPLLIFSPHRVPQGMLQPIPLTLALWCTRSLSVLGPASSLLPAWPLLSTNTSLPPNPTLGLPEAQQFTLDTR

SEQ ID NO: 745836 - protein, 113 aa, Homo sapiens
MAARYTRQGTHTLPRPLLTCQARLICIRMLPRLLLLHWAQPAPLLIFSPHRVPQGMLQPIPLTLALWCTRSLSVLGPASSLLPAWPLLSTNTSLPPNPTLGLPEAQQFTLDTR

SEQ ID NO: 745837 - protein, 446 aa, Homo sapiens
IAGLQATTKHSGFPVRMDNAVPIVPQAPAAQPLQIQSGVLTQGSCTPLMVATLHPQVATITPQYAVPFTLSCAAGRPALVEQTAAVLAWPGGTQQILLPSTWQQLPGVALHNSVQPTAMIPEAMGSGQQLADWRNAHSHGNQYSTIMQQPSLLTNHVTLATAQPLNVGVAHVVRQQQSSSLPSKKNKQSAPVSSKSSLDVLPSQVYSLVGSSPLRTTSSYNSLVPVQDQHQPIIIPDTPSPPVSVITIRSDTDEEEDNKYKPSSSGLKPRSNVISYVTVNDSPDSDSSLSSPYSTDTLSALRGNSGSVLEGPGRVVADGTGTRTIIVPPLKTQLGDCTVATQASGLLSNKTKPVASVSGQSSGCCITPTGYRAQRGGTSAAQPLNLSQNQQSSAAPTSQERSSNPAPRRQQAFVAPLSQAPYTNTSLPPNPTLGLPEAQQFTLDTR

SEQ ID NO: 745838 - protein, 550 aa, Homo sapiens; identical to SEQ ID NO: 745834

SEQ ID NO: 745839 - protein, 550 aa, Homo sapiens; identical to SEQ ID NO: 745834

SEQ ID NO: 745840 - protein, 550 aa, Homo sapiens; identical to SEQ ID NO: 745834

SEQ ID NO: 745841 - protein, 415 aa, Homo sapiens
IAGLQATTKHSGFPVRMDNAVPIVPQAPAAQPLQIQSGVLTQGSCTPLMVATLHPQVATITPQYAVPFTLSCAAGRPALVEQTAAVLAWPGGTQQILLPSTWQQLPGVALHNSVQPTAMIPEAMGSGQQLADWRNAHSHGNQYSTIMQQPSLLTNHVTLATAQPLNVGVAHVVRQQQSSSLPSKKNKQSAPVSSKSSLDVLPSQVYSLVGSSPLRTTSSYNSLVPVQDQHQPIIIPDTPSPPVSVITIRSDTDEEEDNKYKPSSSGLKPRSNVISYVTVNDSPDSDSSLSSPYSTDTLSALRGNSGSVLEGPGRVVADGTGTRTIIVPPLKTQLGDCTVATQASGLLSNKTKPVASVSGQSSGCCITPTGYRAQRGGTSAAQPLNLSQVSAMGYCLLFGPCTVVTFWRTLLLAGC

SEQ ID NO: 745842 - protein, 514 aa, Homo sapiens
MGLAGAAGRWWGLALGLTAFFLPGVHSQVVQVNDSMYGFIGTDVVLHCSFANPLPSVKITQVTWQKSTNGSKQNVAIYNPSMGVSVLAPYRERVEFLRPSFTDGTIRLSRLELEDEGVYICEFATFPTGNRESQLNLTVMAKPTNWIEGTQAVLRAKKGQDDKVLVATCTSANGKPPSVVSWETRLKGEAEYQEIRNPNGTVTVISRYRLVPSREAHQQSLACIVNYHMDRFKESLTLNVQYEPEVTIEGFDGNWYLQRMDVKLTCKADANPPATEYHWTTLNGSLPKGVEAQNRTLFFKGPINYSLAGTYICEATNPIGTRSGQVEVNITEFPYTPSPPEHGRRAGPVPTAIIGGVAGSILLVLIVVGGIVVALRRRRHTFKGDYSTKKHVYGNGYSKAGIPQHHPPMAQNLQYPDDSDDEKKAGPLGGSSYEEEEEEEEGGGGGERKVGGPHPKYDEDAKRPYFTVDEAEARQDGYGDRTLGYQYDPEQLDLAENMVSQNDGSFISKKEWYV

SEQ ID NO: 745843 - protein, 81 aa, Homo sapiens
  misc_feature (13)..(13): Xaa can be any naturally occurring amino acid
PPPSPLKYPFGPXLNGSLPKGVEAQNRTLFFKGPINYSLAGTYICEATNPIGTRSGQVEVNITAFCQLIYPGKGRTRARMF

SEQ ID NO: 745844 - protein, 349 aa, Homo sapiens
MGLAGAAGRWWGLALGLTAFFLPGVHSQVVQVNDSMYGFIGTDVVLHCSFANPLPSVKITQVTWQKSTNGSKQNVAIYNPSMGVSVLAPYRERVEFLRPSFTDGTIRLSRLELEDEGVYICEFATFPTGNRESQLNLTVMAKPTNWIEGTQAVLRAKKGQDDKVLVATCTSANGKPPSVVSWETRLKGEAEYQEIRNPNGTVTVISRYRLVPSREAHQQSLACIVNYHMDRFKESLTLNVQYEPEVTIEGFDGNWYLQRMDVKLTCKADANPPATEYHWTTLNGSLPKGVEAQNRTLFFKGPINYSLAGTYICEATNPIGTRSGQVEVNITAFCQLIYPGKGRTRARMF

SEQ ID NO: 745845 - protein, 286 aa, Homo sapiens
MAVTVSVSFAQEDPRQAHDGVSVLAPYRERVEFLRPSFTDGTIRLSRLELEDEGVYICEFATFPTGNRESQLNLTVMAKPTNWIEGTQAVLRAKKGQDDKVLVATCTSANGKPPSVVSWETRLKGEAEYQEIRNPNGTVTVISRYRLVPSREAHQQSLACIVNYHMDRFKESLTLNVQYEPEVTIEGFDGNWYLQRMDVKLTCKADANPPATEYHWTTLNGSLPKGVEAQNRTLFFKGPINYSLAGTYICEATNPIGTRSGQVEVNITAFCQLIYPGKGRTRARMF

SEQ ID NO: 745846 - protein, 298 aa, Homo sapiens
MGLAGAAGRWWGLALGLTAFFLPGVHSQVVQVNDSMYGFIGTDVVLHCSFANPLPSVKITQVTWQKSTNGSKQNVAIYNPSMGVSVLAPYRERVEFLRPSFTDGTIRLSRLELEDEGVYICEFATFPTGNRESQLNLTVMAKPTNWIEGTQAVLRAKKGQDDKVLVATCTSANGKPPSVVSWETRLKGEAEYQEIRNPNGTVTVISRYRLVPSREAHQQSLACIVNYHMDRFKESLTLNVQYEPEVTIEGFDGNWYLQRMDVKLTCKADANPPATEYHWTTWTGPPPPSVKRGQYDVP

SEQ ID NO: 745847 - protein, 284 aa, Homo sapiens
MSVPDMLIHVQYEPEVTIEGFDGNWYLQRMDVKLTCKADANPPATEYHWTTLNGSLPKGVEAQNRTLFFKGPINYSLAGTYICEATNPIGTRSGQVEVNITEFPYTPSPPEHGRRAGPVPTAIIGGVAGSILLVLIVVGGIVVALRRRRHTFKGDYSTKKHVYGNGYSKAGIPQHHPPMAQNLQYPDDSDDEKKAGPLGGSSYEEEEEEEEGGGGGERKVGGPHPKYDEDAKRPYFTVDEAEARQDGYGDRTLGYQYDPEQLDLAENMVSQNDGSFISKKEWYV

SEQ ID NO: 745848 - protein, 91 aa, Homo sapiens
QDDKVLVATCTSANGKPPSVVSWETRLKGEAEYQEIRNPNGTVTVISRYRLVPSREAHQQSLACIVNYHMDRFKESLTLNVQCEQGWLPGA

SEQ ID NO: 745849 - protein, 455 aa, Homo sapiens
MGLAGAAGRWWGLALGLTAFFLPGVHSQVVQVNDSMYGFIGTDVVLHCSFANPLPSVKITQVTWQKSTNGSKQNVAIYNPSMGVSVLAPYRERVEFLRPSFTDGTIRLSRLELEDEGVYICEFATFPTGNRESQLNLTVMAKPTNWIEGTQAVLRAKKGQDDKVLVATCTSANGKPPSVVSWETRLKGEAEYQEIRNPNGTVTVISRYRLVPSREAHQQSLACIVNYHMDRFKESLTLNVQYEPEVTIEGFDGNWYLQRMDVKLTCKADANPPATEYHWTTLNGSLPKGVEAQNRTLFFKGPINYSLAGTYICEATNPIGTRSGQVEVNITEKPRPQRGLGSAARLLAGTVAVFLILVAVLTVFFLYNRQQKSPPETDGAGTDQPLSQKPEPSPSRQSSLVPEDIQVVHLDPGRQQQQEEEDLQKLSLQPPYYDLGVSPSYHPSVRTTEPRGECP

SEQ ID NO: 745850 - protein, 159 aa, Homo sapiens
PGHFFKLGFRGRRTNQGYRFPCGLGERGHHYEGAHQEAPEIDLVHQCVACGATFTTPYRPAPDSDDEKKAGPLGGSSYEEEEEEEEGGGGGERKVGGPHPKYDEDAKRPYFTVDEAEARQDGYGDRTLGYQYDPEQLDLAENMVSQNDGSFISKKEWYV

SEQ ID NO: 745851 - protein, 347 aa, Homo sapiens
MGLAGAAGRWWGLALGLTAFFLPGVHSQVVQVNDSMYGFIGTDVVLHCSFANPLPSVKITQVTWQKSTNGSKQNVAIYNPSMGVSVLAPYRERVEFLRPSFTDGTIRLSRLELEDEGVYICEFATFPTGNRESQLNLTVMAKPTNWIEGTQAVLRAKKGQDDKVLVATCTSANGKPPSVVSWETRLKGEAEYQEIRNPNGTVTVISRYRLVPSREAHQQSLACIVNYHMDRFKESLTLNVQYEPEVTIEGFDGNWYLQRMDVKLTCKADANPPATEYHWTTLNGSLPKGVEAQNRTLFFKGPINYSLAGTYICEATNPIGTRSGQVEVNITGGSTVCPSVNGVSSDP

SEQ ID NO: 745852 - protein, 81 aa, Homo sapiens
LDIPYRIWVHWTTLNGSLPKGVEAQNRTLFFKGPINYSLAGTYICEATNPIGTRSGQVEVNITAFCQLIYPGKGRTRARMF

SEQ ID NO: 745853 - protein, 118 aa, Homo sapiens
KQNVAIYNPSMGVSVLAPYRERVEFLRPSFTDGTIRLSRLELEDEGVYICEFATFPTGNRESQLNLTVMGKLPWAPSLFIQRPVTSGRGHPQDASMTPDIPLGWACCHHSRHEASSPF

SEQ ID NO: 745854 - protein, 60 aa, Homo sapiens
GVLCQEGVLPGGPFSPGRELTRLVSGLPSTLRTVRKFSASSVLEAGLGICEAWNCSLRGL

SEQ ID NO: 745855 - protein, 530 aa, Homo sapiens
MEEAGGPMARAKAQVVSATLTWRQWPPTQEEIKHGFHKVSLVSGAQMEAPQKEMFEFSRREEVEVNGFATQEEETVNCQGPRDTAGSKNFQSHGPIFSKKYIPPPKEKRPEGRLKEAVDQSDGSRQAPRTEPPCVGAMARTELLVPLPGPREPSPHPGVGLTSGSSRSLEEYRVTRTVRTTTVVGGHVDRRMSSSVTVRPVSSGEALPRGRQVSRMVPPVVVGSPPGSPSRSQAVKVLSNLVPAGHSPPASHLPRPTAGGPRSTGLGSTVGAALRQLPETGTAELKDSSALASTGIPASAHLPKNQDAPAACPDRDQGRAPDARACELWQVLGAPSSTELPLQTSQGQASVPSSPRLETHVPSPGLTHPAKQPVVPTHPGARLTPLVLPPKKKDGPVDPPAATVLPMVRSEHVTVPGQPPAPSTTRRKDVPSPGGLSAPSSPRNKFVQNSENVPVLPFTQREVVKGPGVWAESRLPRQTWSISESGHICSQMFEGQILDVKGGRGYDRDHVVLWEPDEDRASQIWTIHVL

SEQ ID NO: 745856 - protein, 155 aa, Homo sapiens
FTDGEIKAQRSGHGFALQSWRRVYFRLWNAALGGFLAVPDHVEDMKAGRVVVADPQAGGSCIWYYEDGLLKNQMAPTMSLQVIGPPSPGSKVVLWAESRLPRQTWSISESGHICSQMFEGQILDVKGGRGYDRDHVVLWEPDEDRASQIWTIHVL

SEQ ID NO: 745857 - protein, 419 aa, Homo sapiens
GGYDELLTSLRVIRTDFGEPAVVLFEAMDFEGHGVEVSKALPDVELVQHVPSTQAIHVLSGVWVAYQEVGFSGEQYVLEKGVYRNCEDWGAGNSTLASLQPVLQVGEHDLHFVSKIQLFSRPDFLGDHFSFEDDQAALPASFRPQSCRVHGGSWILFDETNFEGDQHILSEGEFPTLTAMGCLASTVLGSLQKVSLHFSEPSIFLYGLECFEGKEIELSREVRSLQAEGFNNHVLSVRIKGGIWVLCEHSDFRGRQWLVGSCEITNWLTYSGTQRVGSLYPIKQRRVYFRLWNAALGGFLAVPDHVEDMKAGRVVVADPQAGGSCIWYYEDGLLKNQMAPTMSLQVIGPPSPGSKVVLWAESRLPRQTWSISESGHICSQMFEGQILDVKGGRGYDRDHVVLWEPDEDRASQIWTIHVL

SEQ ID NO: 745858 - protein, 111 aa, Homo sapiens
MKAGRVVVADPQAGGSCIWYYEDGLLKNQMAPTMSLQVIGPPSPGSKVVLWAESRLPRQTWSISESGHICSQMFEGQILDVKGGRGYDRDHVVLWEPDEDRASQIWTIHVL

SEQ ID NO: 745859 - protein, 1347 aa, Homo sapiens
MDLLSGTYIFAVLLACVVFHSGAQEKNYTIREEMPENVLIGDLLKDLNLSLIPNKSLTTAMQFKLVYKTGDVPLIRIEEDTGEIFTTGARIDREKLCAGIPRDEHCFYEVEVAILPDEIFRLVKIRFLIEDINDNAPLFPATVINISIPENSAINSKYTLPAAVDPDVGINGVQNYELIKSQNIFGLDVIETPEGDKMPQLIVQKELDREEKDTYVMKVKVEDGGFPQRSSTAILQVSVTDTNDNHPVFKETEIEVSIPENAPVGTSVTQLHATDADIGENAKIHFSFSNLVSNIARRLFHLNATTGLITIKEPLDREETPNHKLLVLASDGGLMPARAMVLVNVTDVNDNVPSIDIRYIVNPVNDTVVLSENIPLNTKIALITVTDKDADHNGRVTCFTDHEIPFRLRPVFSNQFLLETAAYLDYESTKEYAIKLLAADAGKPPLNQSAMLFIKVKDENDNAPVFTQSFVTVSIPENNSPGIQLTKVSAMDADSGPNAKINYLLGPDAPPEFSLDCRTGMLTVVKKLDREKEDKYLFTILAKDNGVPPLTSNVTVFVSIIDQNDNSPVFTHNEYNFYVPENLPRHGTVGLITVTDPDYGDNSAVTLSILDENDDFTIDSQTGVIRPNISFDREKQESYTFYVKAEDGGRVSRSSSAKVTINVVDVNDNKPVFIVPPSNCSYELVLPSTNPGTVVFQVIAVDNDTGMNAEVRYSIVGGNTRDLFAIDQETGNITLMEKCDVTDLGLHRVLVKANDLGQPDSLFSVVIVNLFVNESVTNATLINELVRKSTEAPVTPNTEIADVSSPTSDYVKILVAAVAGTITVVVVIFITAVVRCRQAPHLKAAQKNKQNSEWATPNPENRQMIMMKKKKKKKKHSPKNLLLNFVTIEETKADDVDSDGNRVTLDLPIDLEEQTMGKYNWVTTPTTFKPDSPDLARHYKSASPQPAFQIQPETPLNSKHHIIQELPLDNTFVACDSISKCSSSSSDPYSVSDCGYPVTTFEVPVSVHTRPPMKEVVRSCTPMKESTTMEIWIHPQPQRKSEGKVAGKSQRRVTFHLPEGSQESSSDGGLGDHDAGSLTSTSHGLPLGYPQEEYFDRATPSNRTEGDGNSDPESTFIPGLKKAAEITVQPTVEEASDNCTQECLIYGHSDACWMPASLDHSSSSQAQASALCHSPPLSQASTQHHSPRVTQTIALCHSPPVTQTIALCHSPPPIQVSALHHSPPLVQATALHHSPPSAQASALCYSPPLAQAAAISHSSPLPQVIALHRSQAQSSVSLQQGWVQGADGLCSVDQGVQGSATSQFYTMSERLHPSDDSIKVIPLTTFTPRQQARPSRGDSPIMEEHPL

SEQ ID NO: 745860 - protein, 1054 aa, Homo sapiens
MRTERQWVLIQIFQVLCGLIQQTVTSVPGMDLLSGTYIFAVLLACVVFHSGAQEKNYTIREEMPENVLIGDLLKDLNLSLIPNKSLTTAMQFKLVYKTGDVPLIRIEEDTGEIFTTGARIDREKLCAGIPRDEHCFYEVEVAILPDEIFRLVKIRFLIEDINDNAPLFPATVINISIPENSAINSKYTLPAAVDPDVGINGVQNYELIKSQNIFGLDVIETPEGDKMPQLIVQKELDREEKDTYVMKVKVEDGGFPQRSSTAILQVSVTDTNDNHPVFKETEIEVSIPENAPVGTSVTQLHATDADIGENAKIHFSFSNLVSNIARRLFHLNATTGLITIKEPLDREETPNHKLLVLASDGGLMPARAMVLVNVTDVNDNVPSIDIRYIVNPVNDTVVLSENIPLNTKIALITVTDKDADHNGRVTCFTDHEIPFRLRPVFSNQFLLETAAYLDYESTKEYAIKLLAADAGKPPLNQSAMLFIKVKDENDNAPVFTQSFVTVSIPENNSPGIQLTKVSAMDADSGPNAKINYLLGPDAPPEFSLDCRTGMLTVVKKLDREKEDKYLFTILAKDNGVPPLTSNVTVFVSIIDQNDNSPVFTHNEYNFYVPENLPRHGTVGLITVTDPDYGDNSAVTLSILDENDDFTIDSQTGVIRPNISFDREKQESYTFYVKAEDGGRVSRSSSAKVTINVVDVNDNKPVFIVPPSNCSYELVLPSTNPGTVVFQVIAVDNDTGMNAEVRYSIVGGNTRDLFAIDQETGNITLMEKCDVTDLGLHRVLVKANDLGQPDSLFSVVIVNLFVNESVTNATLINELVRKSTEAPVTPNTEIADVSSPTSDYVKILVAAVAGTITVVVVIFITAVVRCRQAPHLKAAQKNKQNSEWATPNPENRQMIMMKKKKKKKKHSPKNLLLNFVTIEETKADDVDSDGNRVTLDLPIDLEEQTMGKYNWVTTPTTFKPDSPDLARHYKSASPQPAFQIQPETPLNSKHHIIQELPLDNTFVACDSISKCSSSSSDPYSVSDCGYPVTTFEVPVSVHTRPTDSRTSTIEICSEI

SEQ ID NO: 745861 - protein, 1339 aa, Homo sapiens
MRTERQWVLIQIFQVLCGLIQQTVTSVPGMDLLSGTYIFAVLLACVVFHSGAQEKNYTIREEMPENVLIGDLLKDLNLSLIPNKSLTTAMQFKLVYKTGDVPLIRIEEDTGEIFTTGARIDREKLCAGIPRDEHCFYEVEVAILPDEIFRLVKIRFLIEDINDNAPLFPATVINISIPENSAINSKYTLPAAVDPDVGINGVQNYELIKSQNIFGLDVIETPEGDKMPQLIVQKELDREEKDTYVMKVKVEDGGFPQRSSTAILQVSVTDTNDNHPVFKETEIEVSIPENAPVGTSVTQLHATDADIGENAKIHFSFSNLVSNIARRLFHLNATTGLITIKEPLDREETPNHKLLVLASDGGLMPARAMVLVNVTDVNDNVPSIDIRYIVNPVNDTVVLSENIPLNTKIALITVTDKDADHNGRVTCFTDHEIPFRLRPVFSNQFLLETAAYLDYESTKEYAIKLLAADAGKPPLNQSAMLFIKVKDENDNAPVFTQSFVTVSIPENNSPGIQLTKVSAMDADSGPNAKINYLLGPDAPPEFSLDCRTGMLTVVKKLDREKEDKYLFTILAKDNGVPPLTSNVTVFVSIIDQNDNSPVFTHNEYNFYVPENLPRHGTVGLITVTDPDYGDNSAVTLSILDENDDFTIDSQTGVIRPNISFDREKQESYTFYVKAEDGGRVSRSSSAKVTINVVDVNDNKPVFIVPPSNCSYELVLPSTNPGTVVFQVIAVDNDTGMNAEVRYSIVGGNTRDLFAIDQETGNITLMEKCDVTDLGLHRVLVKANDLGQPDSLFSVVIVNLFVNESVTNATLINELVRKSTEAPVTPNTEIADVSSPTSDYVKILVAAVAGTITVVVVIFITAVVRCRQAPHLKAAQKNKQNSEWATPNPENRQMIMMKKKKKKKKHSPKNLLLNFVTIEETKADDVDSDGNRVTLDLPIDLEEQTMGKYNWVTTPTTFKPDSPDLARHYKSASPQPAFQIQPETPLNSKHHIIQELPLDNTFVACDSISKCSSSSSDPYSVSDCGYPVTTFEVPVSVHTRPSQRRVTFHLPEGSQESSSDGGLGDHDAGSLTSTSHGLPLGYPQEEYFDRATPSNRTEGDGNSDPESTFIPGLKKAAEITVQPTVEEASDNCTQECLIYGHSDACWMPASLDHSSSSQAQASALCHSPPLSQASTQHHSPRVTQTIALCHSPPVTQTIALCHSPPPIQVSALHHSPPLVQATALHHSPPSAQASALCYSPPLAQAAAISHSSPLPQVIALHRSQAQSSVSLQQGWVQGADGLCSVDQGVQGSATSQFYTMSERLHPSDDSIKVIPLTTFTPRQQARPSRGDSPIMEEHPL

SEQ ID NO: 745862 - protein, 1337 aa, Homo sapiens
MDLLSGTYIFAVLLACVVFHSGAQEKNYTIREEMPENVLIGDLLKDLNLSLIPNKSLTTAMQFKLVYKTGDVPLIRIEEDTGEIFTTGARIDREKLCAGIPRDEHCFYEVEVAILPDEIFRLVKIRFLIEDINDNAPLFPATVINISIPENSAINSKYTLPAAVDPDVGINGVQNYELIKSQNIFGLDVIETPEGDKMPQLIVQKELDREEKDTYVMKVKVEDGGFPQRSSTAILQVSVTDTNDNHPVFKETEIEVSIPENAPVGTSVTQLHATDADIGENAKIHFSFSNLVSNIARRLFHLNATTGLITIKEPLDREETPNHKLLVLASDGGLMPARAMVLVNVTDVNDNVPSIDIRYIVNPVNDTVVLSENIPLNTKIALITVTDKDADHNGRVTCFTDHEIPFRLRPVFSNQFLLETAAYLDYESTKEYAIKLLAADAGKPPLNQSAMLFIKVKDENDNAPVFTQSFVTVSIPENNSPGIQLTKVSAMDADSGPNAKINYLLGPDAPPEFSLDCRTGMLTVVKKLDREKEDKYLFTILAKDNGVPPLTSNVTVFVSIIDQNDNSPVFTHNEYNFYVPENLPRHGTVGLITVTDPDYGDNSAVTLSILDENDDFTIDSQTGVIRPNISFDREKQESYTFYVKAEDGGRVSRSSSAKVTINVVDVNDNKPVFIVPPSNCSYELVLPSTNPGTVVFQVIAVDNDTGMNAEVRYSIVGGNTRDLFAIDQETGNITLMEKCDVTDLGLHRVLVKANDLGQPDSLFSVVIVNLFVNESVTNATLINELVRKSTEAPVTPNTEIADVSSPTSDYVKILVAAVAGTITVVVVIFITAVVRCRQAPHLKAAQKNKQNSEWATPNPENRQMIMMKKKKKKKKHSPKNLLLNFVTIEETKADDVDSDGNRVTLDLPIDLEEQTMGKYNWVTTPTTFKPDSPDLARHYKSASPQPAFQIQPETPLNSKHHIIQELPLDNTFVACDSISKCSSSSSDPYSVSDCGYPVTTFEVPVSVHTRPPMKEVVRSCTPMKESTTMEIWIHPQPQSQRRVTFHLPEGSQESSSDGGLGDHDAGSLTSTSHGLPLGYPQEEYFDRATPSNRTEGDGNSDPESTFIPGLKKAAEITVQPTVEEASDNCTQECLIYGHSDACWMPASLDHSSSSQAQASALCHSPPLSQASTQHHSPRVTQTIALCHSPPVTQTIALCHSPPPIQVSALHHSPPLVQATALHHSPPSAQASALCYSPPLAQAAAISHSSPLPQVIALHRSQAQSSVSLQQGWVQGADGLCSVDQGVQGSATSQFYTMSERLHPSDDSIKVIPLTTFTPRQQARPSRGDSPIMEEHPL

SEQ ID NO: 745863 - protein, 1021 aa, Homo sapiens
MDLLSGTYIFAVLLACVVFHSGAQEKNYTIREEMPENVLIGDLLKDLNLSLIPNKSLTTAMQFKLVYKTGDVPLIRIEEDTGEIFTTGARIDREKLCAGIPRDEHCFYEVEVAILPDEIFRLVKIRFLIEDINDNAPLFPATVINISIPENSAINSKYTLPAAVDPDVGINGVQNYELIKSQNIFGLDVIETPEGDKMPQLIVQKELDREEKDTYVMKVKVEDGGFPQRSSTAILQVSVTDTNDNHPVFKETEIEVSIPENAPVGTSVTQLHATDADIGENAKIHFSFSNLVSNIARRLFHLNATTGLITIKEPLDREETPNHKLLVLASDGGLMPARAMVLVNVTDVNDNVPSIDIRYIVNPVNDTVVLSENIPLNTKIALITVTDKDADHNGRVTCFTDHEIPFRLRPVFSNQFLLETAAYLDYESTKEYAIKLLAADAGKPPLNQSAMLFIKVKDENDNAPVFTQSFVTVSIPENNSPGIQLTKVSAMDADSGPNAKINYLLGPDAPPEFSLDCRTGMLTVVKKLDREKEDKYLFTILAKDNGVPPLTSNVTVFVSIIDQNDNSPVFTHNEYNFYVPENLPRHGTVGLITVTDPDYGDNSAVTLSILDENDDFTIDSQTGVIRPNISFDREKQESYTFYVKAEDGGRVSRSSSAKVTINVVDVNDNKPVFIVPPSNCSYELVLPSTNPGTVVFQVIAVDNDTGMNAEVRYSIVGGNTRDLFAIDQETGNITLMEKCDVTDLGLHRVLVKANDLGQPDSLFSVVIVNLFVNESVTNATLINELVRKSTEAPVTPNTEIADVSSPTSDYVKILVAAVAGTITVVVVIFITAVVRCRQAPHLKAAQKNKQNSEWATPNPENRQMIMMKKKKKKKKHSPKNLLLNFVTIEETKADDVDSDGNRVTLDLPIDLEEQTMGKYNWVTTPTTFKPDSPDLARHYKSASPQPAFQIQPETPLNSKHHIIQELPLDNTFVACDSISKCSSSSSDPYSVSDCGYPVTTFEVPVSVHTRPVGIQVSNTTF

SEQ ID NO: 745864 - protein, 275 aa, Homo sapiens
MLAHMFKDKGVWGNKQDHRGAFLIDRSPEYFEPILNYLRHGQLIVNDGINLLGVLEEARFFGIDSLIEHLEVAIKNSQPPEDHSPISRKEFVRFLLATPTKSELRCQGLNFSGADLSRLDLRYINFKMANLSRCNLAHANLCCANLERADLSGSVLDCANLQGVKMLCSNAEGASLKLCNFEDPSGLKANLEGANLKGVDMEGSQMTGINLRVATLKNAKLKNCNLRGATLAGTDLENCDLSGCDLQEANLRGSNVKGAIFEEMLTPLHMSQSVR

SEQ ID NO: 745865 - protein, 275 aa, Homo sapiens; identical to SEQ ID NO: 745864

SEQ ID NO: 745866 - protein, 464 aa, Homo sapiens
PRQAEEPRGGVGRRTGRTLGVGQSACVWCVPKGRKVAKGGESEWVEGGEGREEKKVGGGPGGRVAAHSGPSGGSAMRRVTLFLNGSPKNGKVVAVYGTLSDLLSVASSKLGIKATSVYNGKGGLIDDIALIRDDDVLFVCEGEPFIDPQTDSKPPEGLLGFHTDWLTLNVGGRYFTTTRSTLVNKEPDSMLAHMFKDKGVWGNKQDHRGAFLIDRSPEYFEPILNYLRHGQLIVNDGINLLGVLEEARFFGIDSLIEHLEVAIKNSQPPEDHSPISRKEFVRFLLATPTKSELRCQGLNFSGADLSRLDLRYINFKMANLSRCNLAHANLCCANLERADLSGSVLDCANLQGVKMLCSNAEGASLKLCNFEDPSGLKANLEGANLKGVDMEGSQMTGINLRVATLKNAKLKNCNLRGATLAGTDLENCDLSGCDLQEANLRGSNVKGAIFEEMLTPLHMSQSVR

SEQ ID NO: 745867 - protein, 464 aa, Homo sapiens; identical to SEQ ID NO: 745866

SEQ ID NO: 745868 - protein, 464 aa, Homo sapiens; identical to SEQ ID NO: 745866

SEQ ID NO: 745869 - protein, 275 aa, Homo sapiens; identical to SEQ ID NO: 745864

SEQ ID NO: 745870 - protein, 275 aa, Homo sapiens; identical to SEQ ID NO: 745864

SEQ ID NO: 745871 - protein, 275 aa, Homo sapiens; identical to SEQ ID NO: 745864

SEQ ID NO: 745872 - protein, 275 aa, Homo sapiens; identical to SEQ ID NO: 745864

SEQ ID NO: 745873 - protein, 432 aa, Homo sapiens
PRQAEEPRGGVGRRTGRTLGVGQSACVWCVPKGRKVAKGGESEWVEGGEGREEKKVGGGPGGRVAAHSGPSGGSAMRRVTLFLNGSPKNGKVVAVYGTLSDLLSVASSKLGIKATSVYNGKGGLIDDIALIRDDDVLFVCEGEPFIDPQTDSKPPEGLLGFHTDWLTLNVGGRYFTTTRSTLVNKEPDSMLAHMFKDKGVWGNKQDHRGAFLIDRSPEYFEPILNYLRHGQLIVNDGINLLGVLEEARFFGIDSLIEHLEVAIKNSQPPEDHSPISRKEFVRFLLATPTKSELRCQGLNFSGADLSRLDLRYINFKMANLSRCNLAHANLCCANLERADLSGSVLDCANLQGVKMLCSNAEGASLKLCNFEDPSGLKANLEGANLKGVDMEGSQMTGINLRVATLKNAKLKNCNLRGATLAGTDLEVSSPTL

SEQ ID NO: 745874 - protein, 464 aa, Homo sapiens; identical to SEQ ID NO: 745866

SEQ ID NO: 745875 - protein, 361 aa, Homo sapiens
MTGKKSSREKRRKRSSQEAAAALAAPDIVPALASGSSGSTSGCGSAGGCGSVSCCGNANFSGSVTGGGSGGSCWGGSSVERSERRKRRSTDSSSVSGSLQQETKYILPTLEKELFLAEHSDLEEGGLDLTVSLKPVSFYISDKKEMLQQCFCIIGEKKLQKMLPDVLKNCSIEEIKKLCQEQLELLSEKKILKILEGDNGMDSDMEEEADDGSKMGSDLVSQQDICIDSASSVRENKQPEGLELKQGKGEDSDVLSINADAYDSDIEGPCNEEAAAPEAPENTVQSEAGQIDDLEKDIEKSVNEILGLAESSPNEPKAATLAVPPPEDVQPSAQQLELLELEMRARAIKALMKAGDIKKPA

SEQ ID NO: 745876 - protein, 361 aa, Homo sapiens; identical to SEQ ID NO: 745875

SEQ ID NO: 745877 - protein, 133 aa, Homo sapiens
MTGKKSSREKRRKRSSQEAAAALAAPDIVPALASGSSGSTSGCGSAGGCGSVSCCGNANFSGSVTGGGSGGSCWGGSSVERSERRKRRSTDSSSVSGSLQQVRARPSGRFLELLLFRKKSGFQRDGAQAGAHC

SEQ ID NO: 745878 - protein, 190 aa, Homo sapiens
MTGKKSSREKRRKRSSQEAAAALAAPDIVPALASGSSGSTSGCGSAGGCGSVSCCGNANFSGSVTGGGSGGSCWGGSSVERSERRKRRSTDSSSVSGSLQQETKYILPTLEKELFLAEHSDLEEGGLDLTVSLKPVSFYISDKKEMLQQCFCIIGEKKLQKMLPDVLKVTMEWTLIWKRKQMMVLRWDLI

SEQ ID NO: 745879 - protein, 133 aa, Homo sapiens; identical to SEQ ID NO: 745877

SEQ ID NO: 745880 - protein, 216 aa, Homo sapiens
MLQQCFCIIGEKKLQKMLPDVLKNCSIEEIKKLCQEQLELLSEKKILKILEGDNGMDSDMEEEADDGSKMGSDLVSQQDICIDSASSVRENKQPEGLELKQGKGEDSDVLSINADAYDSDIEGPCNEEAAAPEAPENTVQSEAGQIDDLEKDIEKSVNEILGLAESSPNEPKAATLAVPPPEDVQPSAQQLELLELEMRARAIKALMKAGDIKKPA

SEQ ID NO: 745881 - protein, 133 aa, Homo sapiens; identical to SEQ ID NO: 745877

SEQ ID NO: 745882 - protein, 120 aa, Homo sapiens
LKFLRDQQREPKPGMLLQPASDQRGRKTSRPSSLLAAPSALPGGDVLEPAIPSLQAQLQTQAPCPVCNGKGEELCIGEETGVLAGLVQVSITKCVRRNMDSDKKSFRDRKERFDERILKQ

SEQ ID NO: 745883 - protein, 1637 aa, Homo sapiens
DGISHCNRTCLEDCGHGVCSGPPDFTCVCDLGWTSDLPPPTPAPGPPAPRCSRDCGCSFHSHCRKRGPGFCDECQDWTWGEHCERCRPGSFGNATGSRGCRPCQCNGHGDPRRGHCDNLSGLCFCQDHTEGAHCQLCSPGYYGDPRAGGSCFRECGGRALLTNVSSVALGSRRVGGLLPPGGGAARAGPGLSYCVWVVSATEELQPCAPGTLCPPLTLTFSPDSSTPCTLSYVLAFDGFPRFLDTGVVQSDRSLIAAFCGQRRDRPLTVQALSGLLVLHWEANGSSSWGFNASVGSARCGSGGPGSCPVPQECVPQDGAAGAGLCRCPQGWAGPHCRMALCPENCNAHTGAGTCNQSLGVCICAEGFGGPDCATKLDGGQLVWETLMDSRLSADTASRFLHRLGHTMVDGPDATLWMFGGLGLPQGLLGNLYRYSVSERRWTQMLAGAEDGGPGPSPRSFHAAAYVPAGRGAMYLLGGLTAGGVTRDFWVLNLTTLQWRQEKAPQTVELPAVAGHTLTARRGLSLLLVGGYSPENGFNQQLLEYQLATGTWVSGAQSGTPPTGLYGHSAVYHEATDSLYVFGGFRFHVELAAPSPELYSLHCPDRTWSLLAPSQGAKPRPRLFHASALLGDTMVVLGGRSDPDEFSSDVLLYQVNCNAWLLPDLTRSASVGPPMEESVAHAVAAVGSRLYISGGFGGVALGRLLALTLPPDPCRLLSSPEACNQSGACTWCHGACLSGDQAHRLGCGGSPCSPMPRSPEECRRLRTCSECLARHPRTLQPGDGEASTPRCKWCTNCPEGACIGRNGSCTSENDCRINQREVFWAGNCSEAACGAADCEQCTREGKCMWTRQFKRTGETRRILSVQPTYDWTCFSHSLLNVSPMPVESSPPLPCPTPCHLLPNCTSCLDSKGADGGWQHCVWSSSLQQCLSPSYLPLRCMAGGCGRLLRGPESCSLGCAQATQCALCLRRPHCGWCAWGGQDGGGRCMEGGLSGPRDGLTCGRPGASWAFLSCPPEDECANGHHDCNETQNCHDQPHGYECSCKTGYTMDNMTGLCRPVCAQGCVNGSCVEPDHCRCHFGFVGRNCSTECRCNRHSECAGVGARDHCLLCRNHTKGSHCEQCLPLFVGSAVGGGTCRPCHAFCRGNSHICISRKELQMSKGEPKKYSLDPEEIENWVTEGPSEDEAVCVNCQNNSYGEKCESCLQGYFLLDGKCTNAAKCRESFHGSPLGGQQCYRLISVEQECCLDPTSQTNCFHEPKRRALGPGRTVLFGVQPKFTNVDIRLTLDVTFGAVDLYVSTSYDTFVVRVAPDTGVHTVHIQPPPAPPPPPPPADGGPRGAGDPGGAGASSGPGAPAEPRVREVWPRGLITYVTVTEPSAVLVVRGVRDRLVITYPHEHHALKSSRFYLLLLGVGDPSGPGANGSADSQGLLFFRQDQAHIDLFVFFSVFFSCFFLFLSLCVLLWKAKQALDQRQEQRRHLQEMTKMASRPFAKVTVCFPPDPTAPASAWKPAGLPPPAFRRSEPFLAPLLLTGAGGPWGPMGGGCCPPAIPATTAGLRAGPITLEPTEDGMAGVATLLLQLPGGPHAPNGACLGSALVTLRHRLHEYCGGGGGAGGSGHGTGAGRKGLLSQDNLTSMSL

SEQ ID NO: 745884 - protein, 1389 aa, Homo sapiens
DGISHCNRTCLEDCGHGVCSGPPDFTCVCDLGWTSDLPPPTPAPGPPAPRCSRDCGCSFHSHCRKRGPGFCDECQDWTWGEHCERCRPGSFGNATGSRGCRPCQCNGHGDPRRGHCDNLSGLCFCQDHTEGAHCQLCSPGYYGDPRAGGSCFRECGGRALLTNVSSVALGSRRVGGLLPPGGGAARAGPGLSYCVWVVSATEELQPCAPGTLCPPLTLTFSPDSSTPCTLSYVLAFDGFPRFLDTGVVQSDRSLIAAFCGQRRDRPLTVQALSGLLVLHWEANGSSSWGFNASVGSARCGSGGPGSCPVPQECVPQDGAAGAGLCRCPQGWAGPHCRMALCPENCNAHTGAGTCNQSLGVCICAEGFGGPDCATKLDGGQLVWETLMDSRLSADTASRFLHRLGHTMVDGPDATLWMFGGLGLPQGLLGNLYRYSVSERRWTQMLAGAEDGGPGPSPRSFHAAAYVPAGRGAMYLLGGLTAGGVTRDFWVLNLTTLQWRQEKAPQTVELPAVAGHTLTARRGLSLLLVGGYSPENGFNQQLLEYQLATGTWVSGAQSGTPPTGLYGHSAVYHEATDSLYVFGGFRFHVELAAPSPELYSLHCPDRTWSLLAPSQGAKPRPRLFHASALLGDTMVVLGGRSDPDEFSSDVLLYQVNCNAWLLPDLTRSASVGPPMEESVAHAVAAVGSRLYISGGFGGVALGRLLALTLPPDPCRLLSSPEACNQSGACTWCHGACLSGDQAHRLGCGGSPCSPMPRSPEECRRLRTCSECLARHPRTLQPGDGEASTPRCKWCTNCPEGACIGRNGSCTSENDCRINQREVFWAGNCSEAACGAADCEQCTREGKCMWTRQFKRTGETRRILSVQPTYDWTCFSHSLLNVSPMPVESSPPLPCPTPCHLLPNCTSCLDSKGADGGWQHCVWSSSLQQCLSPSYLPLRCMAGGCGRLLRGPESCSLGCAQATQCALCLRRPHCGWCAWGGQDGGGRCMEGGLSGPRDGLTCGRPGASWAFLSCPPEDECANGHHDCNETQNCHDQPHGYECSCKTGYTMDNMTGLCRPVCAQGCVNGSCVEPDHCRCHFGFVGRNCSTECRCNRHSECAGVGARDHCLLCRNHTKGSHCEQCLPLFVGSAVGGGTCRPCHAFCRGNSHICISRKELQMSKGEPKKYSLDPEEIENWVTEGPSEDEAVCVNCQNNSYGEKCESCLQGYFLLDGKLHQAKQALDQRQEQRRHLQEMTKMASRPFAKVTVCFPPDPTAPASAWKPAGLPPPAFRRSEPFLAPLLLTGAGGPWGPMGGGCCPPAIPATTAGLRAGPITLEPTEDGMAGVATLLLQLPGGPHAPNGACLGSALVTLRHRLHEYCGGGGGAGGSGHGTGAGRKGLLSQDNLTSMSL

SEQ ID NO: 745885 - protein, 1030 aa, Homo sapiens
DGISHCNRTCLEDCGHGVCSGPPDFTCVCDLGWTSDLPPPTPAPGPPAPRCSRDCGCSFHSHCRKRGPGFCDECQDWTWGEHCERCRPGSFGNATGSRGCRPCQCNGHGDPRRGHCDNLSGLCFCQDHTEGAHCQLCSPGYYGDPRAGGSCFRECGGRALLTNVSSVALGSRRVGGLLPPGGGAARAGPGLSYCVWVVSATEELQPCAPGTLCPPLTLTFSPDSSTPCTLSYVLAFDGFPRFLDTGVVQSDRSLIAAFCGQRRDRPLTVQALSGLLVLHWEANGSSSWGFNASVGSARCGSGGPGSCPVPQECVPQDGAAGAGLCRCPQGWAGPHCRMALCPENCNAHTGAGTCNQSLGVCICAEGFGGPDCATKLDGGQLVWETLMDSRLSADTASRFLHRLGHTMVDGPDATLWMFGGLGLPQGLLGNLYRYSVSERRWTQMLAGAEDGGPGPSPRSFHAAAYVPAGRGAMYLLGGLTAGGVTRDFWVLNLTTLQWRQEKAPQTVELPAVAGHTLTARRGLSLLLVGGYSPENGFNQQLLEYQLATGTWVSGAQSGTPPTGLYGHSAVYHEATDSLYVFGGFRFHVELAAPSPELYSLHCPDRTWSLLAPSQGAKPRPRLFHASALLGDTMVVLGGRSDPDEFSSDVLLYQVNCNAWLLPDLTRSASVGPPMEESVAHAVAAVGSRLYISGGFGGVALGRLLALTLPPDPCRLLSSPEACNQSGACTWCHGACLSGDQAHRLGCGGSPCSPMPRSPEECRRLRTCSECLARHPRTLQPGDGEASTPRCKWCTNCPEGACIGRNGSCTSENDCRINQREVFWAGNCSEAACGAADCEQCTREGKCMWTRQFKRTGETRRILSVQPTYDWTCFSHSLLNVSPMPVESSPPLPCPTPCHLLPNCTSCLDSKGADGGWQHCVWSSSLQQVLHLARTVPGKGPGRSPSSLRWQGPFFHHLLHPPPSISLALAAVVLPSRATISFLPRCLMRVPVVSSSHASVCATFPTPGLCLSNSCPWYHGLLILSMTLKKF

SEQ ID NO: 745886 - protein, 795 aa, Homo sapiens
DGISHCNRTCLEDCGHGVCSGPPDFTCVCDLGWTSDLPPPTPAPGPPAPRCSRDCGCSFHSHCRKRGPGFCDECQDWTWGEHCERCRPGSFGNATGSRGCRPCQCNGHGDPRRGHCDNLSGLCFCQDHTEGAHCQLCSPGYYGDPRAGGSCFRECGGRALLTNVSSVALGSRRVGGLLPPGGGAARAGPGLSYCVWVVSATEELQPCAPGTLCPPLTLTFSPDSSTPCTLSYVLAFDGFPRFLDTGVVQSDRSLIAAFCGQRRDRPLTVQALSGLLVLHWEANGSSSWGFNASVGSARCGSGGPGSCPVPQECVPQDGAAGAGLCRCPQGWAGPHCRMALCPENCNAHTGAGTCNQSLGVCICAEGFGGPDCATKLDGGQLVWETLMDSRLSADTASRFLHRLGHTMVDGPDATLWMFGGLGLPQGLLGNLYRYSVSERRWTQMLAGAEDGGPGPSPRSFHAAAYVPAGRGAMYLLGGLTAGGVTRDFWVLNLTTLQWRQEKAPQTVELPAVAGHTLTARRGLSLLLVGGYSPENGFNQQLLEYQLATGTWVSGAQSGTPPTGLYGHSAVYHEATDSLYVFGGFRFHVELAAPSPELYSLHCPDRTWSLLAPSQGAKPRPRLFHASALLGDTMVVLGGRSDPDEFSSDVLLYQVNCNAWLLPDLTRSASVGPPMEESVAHAVAAVGSRLYISGGFGGVALGRLLALTLPPDPCRLLSSPEACNQSGACTWCHGACLSGDQAHRLGCGGSPCSPMPRSPEECRRLRTCSECLARHPRTLQPGDGGGGGDHIRRRGG

SEQ ID NO: 745887 - protein, 113 aa, Homo sapiens
MGATEVGDENAGTVSAQPCSRQCCLEDFWALLRRHPAPEPPPWTPVLYPLRTSLPSTLAVFLNLGLSFPKTSITSSWRDWTLHLPFAWSLSVRGPSQCVHVRGGGDHIRRRGG

SEQ ID NO: 745888 - protein, 1737 aa, Homo sapiens
DGISHCNRTCLEDCGHGVCSGPPDFTCVCDLGWTSDLPPPTPAPGPPAPRCSRDCGCSFHSHCRKRGPGFCDECQDWTWGEHCERCRPGSFGNATGSRGCRPCQCNGHGDPRRGHCDNLSGLCFCQDHTEGAHCQLCSPGYYGDPRAGGSCFRECGGRALLTNVSSVALGSRRVGGLLPPGGGAARAGPGLSYCVWVVSATEELQPCAPGTLCPPLTLTFSPDSSTPCTLSYVLAFDGFPRFLDTGVVQSDRSLIAAFCGQRRDRPLTVQALSGLLVLHWEANGSSSWGFNASVGSARCGSGGPGSCPVPQECVPQDGAAGAGLCRCPQGWAGPHCRMALCPENCNAHTGAGTCNQSLGVCICAEGFGGPDCATKLDGGQLVWETLMDSRLSADTASRFLHRLGHTMVDGPDATLWMFGGLGLPQGLLGNLYRYSVSERRWTQMLAGAEDGGPGPSPRSFHAAAYVPAGRGAMYLLGGLTAGGVTRDFWVLNLTTLQWRQEKAPQTVELPAVAGHTLTARRGLSLLLVGGYSPENGFNQQLLEYQLATGTWVSGAQSGTPPTGLYGHSAVYHEATDSLYVFGGFRFHVELAAPSPELYSLHCPDRTWSLLAPSQGAKRDRMRNVRGSSRGLGQVPGEQPGSWGFREVRKKMALWAALAGTGGFLEEISPHLKEPRPRLFHASALLGDTMVVLGGRSDPDEFSSDVLLYQVNCNAWLLPDLTRSASVGPPMEESVAHAVAAVGSRLYISGGFGGVALGRLLALTLPPDPCRLLSSPEACNQSGACTWCHGACLSGDQAHRLGCGGSPCSPMPRSPEECRRLRTCSECLARHPRTLQPGDGEASTPRCKWCTNCPEGACIGRNGSCTSENDCRINQREVFWAGNCSEAACGAADCEQCTREGKCMWTRQFKRTGETRRILSVQPTYDWTCFSHSLLNVSPMPVESSPPLPCPTPCHLLPNCTSCLDSKGADGGWQHCVWSSSLQQCLSPSYLPLRCMAGGCGRLLRGPESCSLGCAQATQCALCLRRPHCGWCAWGGQDGGGRCMEGGLSGPRDGLTCGRPGASWAFLSCPPEDECANGHHDCNETQNCHDQPHGYECSCKTGYTMDNMTGLCRPVCAQGCVNGSCVEPDHCRCHFGFVGRNCSTECRCNRHSECAGVGARDHCLLCRNHTKGSHCEQCLPLFVGSAVGGGTCRPCHAFCRGNSHICISRKELQMSKGEPKKYSLDPEEIENWVTEGPSEDEAVCVNCQNNSYGEKCESCLQGYFLLDGKCTKCQCNGHADTCNEQDGTGCPCQNNTETGTCQGSSPSDRRDCYKYQCAKCRESFHGSPLGGQQCYRLISVEQECCLDPTSQTNCFHEPKRRALGPGRTVLFGVQPKFTNVDIRLTLDVTFGAVDLYVSTSYDTFVVRVAPDTGVHTVHIQPPPAPPPPPPPADGGPRGAGDPGGAGASSGPGAPAEPRVREVWPRGLITYVTVTEPSAVLVVRGVRDRLVITYPHEHHALKSSRFYLLLLGVGDPSGPGANGSADSQGLLFFRQDQAHIDLFVFFSVFFSCFFLFLSLCVLLWKAKQALDQRQEQRRHLQEMTKMASRPFAKVTVCFPPDPTAPASAWKPAGLPPPAFRRSEPFLAPLLLTGAGGPWGPMGGGCCPPAIPATTAGLRAGPITLEPTEDGMAGVATLLLQLPGGPHAPNGACLGSALVTLRHRLHEYCGGGGGAGGSGHGTGAGRKGLLSQDNLTSMSL

SEQ ID NO: 745889 - protein, 1637 aa, Homo sapiens; identical to SEQ ID NO: 745883

SEQ ID NO: 745890 - protein, 579 aa, Homo sapiens
DGISHCNRTCLEDCGHGVCSGPPDFTCVCDLGWTSDLPPPTPAPGPPAPRCSRDCGCSFHSHCRKRGPGFCDECQDWTWGEHCERCRPGSFGNATGSRGCRPCQCNGHGDPRRGHCDNLSGLCFCQDHTEGAHCQLCSPGYYGDPRAGGSCFRECGGRALLTNVSSVALGSRRVGGLLPPGGGAARAGPGLSYCVWVVSATEELQPCAPGTLCPPLTLTFSPDSSTPCTLSYVLAFDGFPRFLDTGVVQSDRSLIAAFCGQRRDRPLTVQALSGLLVLHWEANGSSSWGFNASVGSARCGSGGPGSCPVPQECVPQDGAAGAGLCRCPQGWAGPHCRMALCPENCNAHTGAGTCNQSLGVCICAEGFGGPDCATKLDGGQLVWETLMDSRLSADTASRFLHRLGHTMVDGPDATLWMFGGLGLPQGLLGNLYRYSVSERRWTQMLAGAEDGGPGPSPRSFHAAAYVPAGRGAMYLLGGLTAGGVTRDFWVLNLTTLQWRQEKAPQTVELPAVAGHTLTARRGLSLLLVGGYSPENGFNQQLLEYQLATGTWVSGAQSGTPPTVSMVTLLSTTPPLLVRA

SEQ ID NO: 745891 - protein, 117 aa, Homo sapiens
MVWNQKTFLYILLCHLTNFGAGLDVLPQEVAAGEMLETKVLGDPLAHGALARAGRPEDDRAQEFGSHCLREEGGGQTRSPDRGPGGSPRNFVSRPPTSGTLRSHWDSPAAPTGGRRS

SEQ ID NO: 745892 - protein, 117 aa, Homo sapiens
MVQRLTYQCRLSYNTASNKTRLPRTPGNRIVYLYTKKVGKAPRSASGMCPGRLRGVRAVRPKVLMKLSKRKKHVSRAYGGSMCAKCVRGRIKRAFLIGEQKIVVKVLKAQVQSHKAK

SEQ ID NO: 745893 - protein, 92 aa, Homo sapiens
MAYLGPYPTSRQSPQMRPTASQQPPQAQLHRYNGLFRPSSCLPAFSPGPELPQVDLTRPSSCFLAASPGPAPASWQPLQAQPLPPVSLYSPN

SEQ ID NO: 745894 - protein, 119 aa, Homo sapiens
VTFSHHAQVGPSSCRKTSLTRPLILHYGELYNYFIIYYSVIMEIKCLINVMCLNLLAQLLPPGSLSRPRTFSSQPRQTKLMTHNGLFRPIPYLTAVSADEAYCLTTASTGTAPSLQWPL

SEQ ID NO: 745895 - protein, 128 aa, Homo sapiens
MDAVAVYHGKISRETGEKLLLATGLDGSYLLRDSESVPGVYCLCVLYHGYIYTYRVSQTETGSWSAETAPGVHKRYFRKIKNLISAFQKPDQGIVIPLQYPVEKKSSARSTQGTTGIREDPDVCLKAP

SEQ ID NO: 745896 - protein, 128 aa, Homo sapiens; identical to SEQ ID NO: 745895

SEQ ID NO: 745897 - protein, 76 aa, Homo sapiens
MDAVAVYHGKISRETGEKLLLATGLDGSYLLRDSESVPGVYCLCVLYHGYIYTYRVSQTETGSWSAEHFRSQIKAL

SEQ ID NO: 745898 - protein, 76 aa, Homo sapiens
MDAVAVYHGKISRETGEKLLLATGLDGSYLLRDSESVPGITVTFIHTECPRQKQVLGVLSISEARSRHCNTSAVSS

SEQ ID NO: 745899 - protein, 62 aa, Homo sapiens
MDAVAVYHGKISRETGEKLLLATGLDGSYLLRDSESVPGVYCLCVLISEARSRHCNTSAVSS

SEQ ID NO: 745900 - protein, 136 aa, Homo sapiens
LTPVSESSKVVVVESVMGQLSSHHQLTSGLWGKRLQYSILGVWAANLACSGFPPCALGWAHPREGTPDTAPTSRLKADALPAPPVFCVAALTHVCLSRPVPRRLSDPKKGFPDTRTEAGGLGLREGGGPAGTFLLC

SEQ ID NO: 745901 - protein, 120 aa, Homo sapiens
MIHGRRNVLMRNHIQNIVSAVVILTKSTQSQAELTEDGFQAYMYFTHPPPSSPKQIPNILLRTQPAQPRGTERQEAPRCPHTVPLWTCRAGFQDMGDGRVEPRRPLHSVAHLSRMGAVKA

SEQ ID NO: 745902 - protein, 116 aa, Homo sapiens
PHCKPGCDYEGQLYEEGVTFLSSSNPCLQCTCLRSRVRCMALKCPPSPCPEPVLRPGHCCPTCQGCTEGGSHWEHGQEWTTPGDPCRICRCLGTEVLNQKASAWRGPFITLSSNKS

SEQ ID NO: 745903 - protein, 216 aa, Homo sapiens
MSFLFSSRSSKTFKPKKNIPEGSHQYELLKHAEATLGSGNLRQAVMLPEGEDLNEWIAVNTVDFFNQINMLYGTITEFCTEASCPVMSAGPRYEYHWADGTNIKKPIKCSAPKYIDYLMTWVQDQLDDETLFPSKIGVPFPKNFMSVAKTILKRLFRVYAHIYHQHFDSVMQLQEEAHLNTSFKHFIFFVQEFNLIDRRELAPLQELIEKLGSKDR

SEQ ID NO: 745904 - protein, 216 aa, Homo sapiens; identical to SEQ ID NO: 745903

SEQ ID NO: 745905 - protein, 216 aa, Homo sapiens; identical to SEQ ID NO: 745903

SEQ ID NO: 745906 - protein, 216 aa, Homo sapiens; identical to SEQ ID NO: 745903

SEQ ID NO: 745907 - protein, 216 aa, Homo sapiens; identical to SEQ ID NO: 745903

SEQ ID NO: 745908 - protein, 147 aa, Homo sapiens [sequence omitted]

SEQ ID NO: 745909 - protein, 198 aa, Homo sapiens
MSFLFSSRSSKTFKPKKNIPEGSHQYELLPEGEDLNEWIAVNTVDFFNQINMLYGTITEFCTEASCPVMSAGPRYEYHWADGTNIKKPIKCSAPKYIDYLMTWVQDQLDDETLFPSKIGVPFPKNFMSVAKTILKRLFRVYAHIYHQHFDSVMQLQEEAHLNTSFKHFIFFVQEFNLIDRRELAPLQELIEKLGSKDR

SEQ ID NO: 745910 - protein, 216 aa, Homo sapiens; identical to SEQ ID NO: 745903

SEQ ID NO: 745911 - protein, 863 aa, Homo sapiens
EKLSVLTVQDVGQVMPGANVCVVKLEGTPYLCKTDEVGEICVSSSATGTAYYGLLGITKNVFEAVPVTTGGAPIFDRPFTRTGLLGFIGPDNLVFIVGKLDGLMVTGVRRHNADDVVATALAVEPMKFVYRGRIAVFSVTVLHDDRIVLVAEQRPDASEEDSFQWMSRVLQAIDSIHQVGVYCLALVPANTLPKAPLGGIHISETKQRFLEGTLHPCNVLMCPHTCVTNLPKPRQKQPEVGPASMIVGNLVAGKRIAQASGRELAHLEDSDQARKFLFLADVLQWRAHTTPDHPLFLLLNAKGTVTSTATCVQLHKRAERVAAALMEKGRLSVGDHVALVYPPGVDLIAAFYGCLYCGCVPVTVRPPHPQNLGTTLPTVKMIVEVSKSACVLTTQAVTRLLRSKEAAAAVDIRTWPTILDTDDIPKKKIASVFRPPSPDVLAYLDFSVSTTGILAGVKMSHAATSALCRSIKLQCELYPSRQIAICLDPYCGLGFALWCLCSVYSGHQSVLVPPLELESNVSLWLSAVSQYKARVTFCSYSVMEMCTKGLGAQTGVLRMKGVNLSCVRTCMVVAEERPRIALTQSFSKLFKDLGLPARAVSTTFGCRVNVAICLQGTAGPDPTTVYVDMRALRHDRVRLVERGSPHSLPLMESGKILPGVKVIIAHTETKGPLGDSHLGEIWVSSPHNATGYYTVYGEEALHADHFSARLSFGDTQTIWARTGYLGFLRRTELTDASGGRHDALYVVGSLDETLELRGMRYHPIDIETSVIRAHRSIAECAVFTWTNLLVVVVELDGLEQDALDLVALVTNVVLEEHYLVVGVVVIVDPGVIPINSRGEKQRMHLRDGFLADQLDPIYVAYNM

SEQ ID NO: 745912 - protein, 148 aa, Homo sapiens
MSFLFSSRSSKTFKPKKNIPEGSHQYELLKHAEATLGSGNLRQAVMLPEGEDLNEWIAVNTVDFFNQINMLYGTITEFCTEASCPVMSAGPRYEYHWADGTNIKKPIKCSAPKYIDYLMTWVQDQLDDETLFPSKIGELTLSKYSFFF

SEQ ID NO: 745913 - protein, 216 aa, Homo sapiens; identical to SEQ ID NO: 745903

SEQ ID NO: 745914 - protein, 216 aa, Homo sapiens; identical to SEQ ID NO: 745903

SEQ ID NO: 745915 - protein, 216 aa, Homo sapiens; identical to SEQ ID NO: 745903

SEQ ID NO: 745916 - protein, 258 aa, Homo sapiens
MPPQENVRCRSLRSLKLRCWPWSRIVLSSSDSAHLLALILTNFSCPRSSRSSKTFKPKKNIPEGSHQYELLKHAEATLGSGNLRQAVMLPEGEDLNEWIAVNTVDFFNQINMLYGTITEFCTEASCPVMSAGPRYEYHWADGTNIKKPIKCSAPKYIDYLMTWVQDQLDDETLFPSKIGVPFPKNFMSVAKTILKRLFRVYAHIYHQHFDSVMQLQEEAHLNTSFKHFIFFVQEFNLIDRRELAPLQELIEKLGSKDR

SEQ ID NO: 745917 - protein, 171 aa, Homo sapiens
MLPEGEDLNEWIAVNTVDFFNQINMLYGTITEFCTEASCPVMSAGPRYEYHWADGTNIKKPIKCSAPKYIDYLMTWVQDQLDDETLFPSKIGVPFPKNFMSVAKTILKRLFRVYAHIYHQHFDSVMQLQEEAHLNTSFKHFIFFVQEFNLIDRRELAPLQELIEKLGSKDR

SEQ ID NO: 745918 - protein, 216 aa, Homo sapiens; identical to SEQ ID NO: 745903

SEQ ID NO: 745919 - protein, 216 aa, Homo sapiens; identical to SEQ ID NO: 745903

SEQ ID NO: 745920 - protein, 216 aa, Homo sapiens; identical to SEQ ID NO: 745903

SEQ ID NO: 745921 - protein, 60 aa, Homo sapiens
VIMPPWTFDKCLETLQLASGGCIEVRGAAKCLRMHGLDPTAKNSLAQNVNSAAVEKPCII

SEQ ID NO: 745922 - protein, 123 aa, Homo sapiens
MSTLSNFTQTLEDVFRRIFITYMDNWRQNTTAEQEALQAKVDAENFYYVILYLMVMIGMFSFIIVAILVSTVKSKRREHSNDPYHQYIVEDWQEKYKSQILNLEESKATIHENIGAAGFKMSP

SEQ ID NO: 745923 - protein, 123 aa, Homo sapiens; identical to SEQ ID NO: 745922

SEQ ID NO: 745924 - protein, 69 aa, Homo sapiens
GTLFNFAVVFTDVKRPGYRVKEVGSTKSGRKGTDDSMTLPSQKFQVDYLDIAITPPHRAPPPSGHMRPH

SEQ ID NO: 745925 - protein, 147 aa, Homo sapiens
GLRPRVPALPYPIAWSHHRRGTPLSWAPGASEAEPAGSAGGRTFLWTSCVLQTQRTLINRGGGHFRIHRWRVSAWRAPPGHTYCSLALARRQPDPVCARRAALCSCLQGVPAKTSTLGKSLRLNLNSQLPESDLCFFTSTEDVRAFP

SEQ ID NO: 745926 - protein, 107 aa, Homo sapiens
CEVWVSIEPRLRSESLISPPHREHILFSGAQLSSGVYVSFDCYCILNFLLCLRLAVLPPIPAIILFLSYHHAPPINKLIKMCHERALPATAGAVWVLGHAQASLDPG

SEQ ID NO: 745927 - protein, 119 aa, Homo sapiens
LPVPALVFVFGRVRRCCRGWRSPVFTNPHVSPLSTAPAHWAPGRPAAGSLGLRVSPEPPPERGSLPPGERSPAASKPPSSPSVSQKQRRGGGGSARAAAPRFALYSELATSAARGWSCG

SEQ ID NO: 745928 - protein, 408 aa, Homo sapiens
MKKNNSAKRGPQDGNQQPAPPEKVGWVRKFCGKGIFREIWKNRYVVLKGDQLYISEKEVKDEKNIQEVFDLSDYEKCEELRKSKSRSKKNHSKFTLAHSKQPGNTAPNLIFLAVSPEEKESWINALNSAITRAKNRILDEVTVEEDSYLAHPTRDRAKIQHSRRPPTRGHLMAVASTSTSDGMLTLDLIQEEDPSPEEPTSCAESFRVDLDKSVAQLAGSRRRADSDRIQPSADRASSLSRPWEKTDKGATYTPQAPKKLTPTEKGRCASLEEILSQRDAASARTLQLRAEEPPTPALPNPGQLSRIQDLVARKLEETQELLAEVQGLGDGKRKAKDPPRSPPDSESEQLLLETERLLGEASSNWSQAKRVLQEVRELRDLYRQMDLQTPDSHLRQTTPHSQYRKSLM

SEQ ID NO: 745929 - protein, 408 aa, Homo sapiens; identical to SEQ ID NO: 745928

SEQ ID NO: 745930 - protein, 351 aa, Homo sapiens
MVKDEKNIQEVFDLSDYEKCEELRKSKSRSKKNHSKFTLAHSKQPGNTAPNLIFLAVSPEEKESWINALNSAITRAKNRILDEVTVEEDSYLAHPTRDRAKIQHSRRPPTRGHLMAVASTSTSDGMLTLDLIQEEDPSPEEPTSCAESFRVDLDKSVAQLAGSRRRADSDRIQPSADRASSLSRPWEKTDKGATYTPQAPKKLTPTEKGRCASLEEILSQRDAASARTLQLRAEEPPTPALPNPGQLSRIQDLVARKLEETQELLAEVQGLGDGKRKAKDPPRSPPDSESEQLLLETERLLGEASSNWSQAKRVLQEVRELRDLYRQMDLQTPDSHLRQTTPHSQYRKSLM

SEQ ID NO: 745931 - protein, 532 aa, Homo sapiens
MKKNNSAKRGPQDGNQQPAPPEKVGWVRKFCGKGIFREIWKNRYVVLKGDQLYISEKEVKDEKNIQEVFDLSDYEKCEELRKSKSRSKKNHSKFTLAHSKQPGNTAPNLIFLAVSPEEKESWINALNSAITRAKNRILDESQGAHCGEREERWGRGNSCDPLKGEDCAGPVYSLLHQLYFFTALLKALISFYLLSKSHLTPPLPRFMMGEPALGQLKEPPSCPVNPLAHSEAVNGVGTCSGLGMLGWDSESCKEHSWIHSTSLQVTVEEDSYLAHPTRDRAKIQHSRRPPTRGHLMAVASTSTSDGMLTLDLIQEEDPSPEEPTSCAESFRVDLDKSVAQLAGSRRRADSDRIQPSADRASSLSRPWEKTDKGATYTPQAPKKLTPTEKGRCASLEEILSQRDAASARTLQLRAEEPPTPALPNPGQLSRIQDLVARKLEETQELLAEVQGLGDGKRKAKDPPRSPPDSESEQLLLETERLLGEASSNWSQAKRVLQEVRELRDLYRQMDLQTPDSHLRQTTPHSQYRKSLM

SEQ ID NO: 745932 - protein, 361 aa, Homo sapiens
MKKNNSAKRGPQDGNQQPAPPEKVGWVRKFCGKGIFREIWKNRYVVLKGDQLYISEKEAPNLIFLAVSPEEKESWINALNSAITRAKNRILDEVTVEEDSYLAHPTRDRAKIQHSRRPPTRGHLMAVASTSTSDGMLTLDLIQEEDPSPEEPTSCAESFRVDLDKSVAQLAGSRRRADSDRIQPSADRASSLSRPWEKTDKGATYTPQAPKKLTPTEKGRCASLEEILSQRDAASARTLQLRAEEPPTPALPNPGQLSRIQDLVARKLEETQELLAEVQGLGDGKRKAKDPPRSPPDSESEQLLLETERLLGEASSNWSQAKRVLQEVRELRDLYRQMDLQTPDSHLRQTTPHSQYRKSLM

SEQ ID NO: 745933 - protein, 417 aa, Homo sapiens
MKKNNSAKRGPQDGNQQPAPPEKVGWVRKFCGKGIFREIWKNRYVVLKGDQLYISEKEVKDEKNIQEVFDLSDYEKCEELRKSKSRSKKNHSKFTLAHSKQPGNTAPNLIFLAVSPEEKESWINALNSAITRAKNRILDEVTVEEDSYLAHPTRDRAKIQHSRRPPTRGHLMAVASTSTSDGMLTLDLIQEEDPSPEEPTSCAESFRVDLDKSVAQLAGSRRRADSDRIQPSADRASSLSRPWEKTDKGATYTPQAPKKLTPTEKGRCASLEEILSQRDAASARTLQLRAEEPPTPALPNPGQLSRIQDLVARKLEETQELLAEVQGLGDGKRKAKDPPRSPPDSESEQLLLETERLLGEASSNWSQAKRVLQEVRELRDLYRQMDLQTPDSHLRQTTPHNIKAMTANSPFLLRFLI

SEQ ID NO: 745934 - protein, 298 aa, Homo sapiens
MEWAHVQASGCWVGTASRERALMIHSTSLQVTVEEDSYLAHPTRDRAKIQHSRRPPTRGHLMAVASTSTSDGMLTLDLIQEEDPSPEEPTSCAESFRVDLDKSVAQLAGSRRRADSDRIQPSADRASSLSRPWEKTDKGATYTPQAPKKLTPTEKGRCASLEEILSQRDAASARTLQLRAEEPPTPALPNPGQLSRIQDLVARKLEETQELLAEVQGLGDGKRKAKDPPRSPPDSESEQLLLETERLLGEASSNWSQAKRVLQEVRELRDLYRQMDLQTPDSHLRQTTPHSQYRKSLM

SEQ ID NO: 745935 - protein, 447 aa, Homo sapiens
LPVPALVFVFGRVRRCCRGWRSPVFTNPHVSPLSTAPAHWAPGRPAAGSLGLRVSPEPPPERGSLPPGERSPAASKPPSSPSGPQDGNQQPAPPEKVGWVRKFCGKGIFREIWKNRYVVLKGDQLYISEKEVKDEKNIQEVFDLSDYEKCEELRKSKSRSKKNHSKFTLAHSKQPGNTAPNLIFLAVSPEEKESWINALNSAITRAKNRILDEASTSTSDGMLTLDLIQEEDPSPEEPTSCAESFRVDLDKSVAQLAGSRRRADSDRIQPSADRASSLSRPWEKTDKGATYTPQAPKKLTPTEKGRCASLEEILSQRDAASARTLQLRAEEPPTPALPNPGQLSRIQDLVARKLEETQELLAEVQGLGDGKRKAKDPPRSPPDSESEQLLLETERLLGEASSNWSQAKRVLQEVRELRDLYRQMDLQTPDSHLRQTTPHSQYRKSLM

SEQ ID NO: 745936 - protein, 408 aa, Homo sapiens; identical to SEQ ID NO: 745928

SEQ ID NO: 745937 - protein, 141 aa, Homo sapiens
VPARRGRGGGGAGPGGNLGASPRPAGAPATCSPGCLFGSGGGERGEFLGVKTFPKWERTWGGPPPPGRSLRRRLGRRGGRERRTERKRRLESPNRPLLILSWGRDLRMETSSLHRPRRSAGSGNSAGKGFSGRFGKTAMWC

SEQ ID NO: 745938 - protein, 408 aa, Homo sapiens; identical to SEQ ID NO: 745928

SEQ ID NO: 745939 - protein, 503 aa, Homo sapiens
VPARRGRGGGGAGPGGNLGASPRPAGAPATCSPGCLFGSGGGERGEFLGVKTFPKWERTWGGPPPPGRSLRRRLGRRGGRERRTERKRRLESPNRPLLIFVLGQGPQDGNQQPAPPEKVGWVRKFCGKGIFREIWKNRYVVLKGDQLYISEKEVKDEKNIQEVFDLSDYEKCEELRKSKSRSKKNHSKFTLAHSKQPGNTAPNLIFLAVSPEEKESWINALNSAITRAKNRILDEVTVEEDSYLAHPTRDRAKIQHSRRPPTRGHLMAVASTSTSDGMLTLDLIQEEDPSPEEPTSCAESFRVDLDKSVAQLAGSRRRADSDRIQPSADRASSLSRPWEKTDKGATYTPQAPKKLTPTEKGRCASLEEILSQRDAASARTLQLRAEEPPTPALPNPGQLSRIQDLVARKLEETQELLAEVQGLGDGKRKAKDPPRSPPDSESEQLLLETERLLGEASSNWSQAKRVLQEVRELRDLYRQMDLQTPDSHLRQTTPHSQYRKSLM

SEQ ID NO: 745940 - protein, 226 aa, Homo sapiens
MLTLDLIQEEDPSPEEPTSCAESFRVDLDKSVAQLAGSRRRADSDRIQPSADRASSLSRPWEKTDKGATYTPQAPKKLTPTEKGRCASLEEILSQRDAASARTLQLRAEEPPTPALPNPGQLSRIQDLVARKLEETQELLAEVQGLGDGKRKAKDPPRSPPDSESEQLLLETERLLGEASSNWSQAKRVLQEVRELRDLYRQMDLQTPDSHLRQTTPHSQYRKSLM

SEQ ID NO: 745941 - protein, 147 aa, Homo sapiens
SLLLLQQVLSQGEGDLGMPQPQATGLISCLSPDHCLSQQQQQREQQGKTCLSLLLLTQELLAEVQGLGDGKRKAKDPPRSPPDSESEQLLLETERLLGEASSNWSQAKRVLQEVRELRDLYRQMDLQTPDSHLRQTTPHSQYRKSLM

SEQ ID NO: 745942 - protein, 148 aa, Homo sapiens
ASQSVGITGMSHCTQPFLFSFPVHQASCGLKEPCLPCPPHTLQDAFPECPLLACALSFKILPTPSRSPLPTASHLTGPLCFGRTPRGQHSPVGSASWVGPPHSTYPGSATRVGAPMNGTPSWVPGGAPVAGRLEVQMWSEAAMSPPTG

SEQ ID NO: 745943 - protein, 84 aa, Homo sapiens
QLAHCAGVPRKTSLNNEEDLGVRWDRNQQGLQFPAGRAPTPSEGPVAGHARSCSVGRLYNLGCLEDLELLFLEDLFDRFKKSRN

SEQ ID NO: 745944 - protein, 462 aa, Homo sapiens
MPSKTKYNLVDDGHDLRIPLHNEDAFQHGICFEAKYVGSLDVPRPNSRVEIVAAMRRIRYEFKAKNIKKKKVSIMVSVDGVKVILKKKKKLLLLQKKEWTWDESKMLVMQDPIYRIFYVSHDSQDLKIFSYIARDGASNIFRCNVFKSKKKSQAMRIVRTVGQAFEVCHKLSLQHTQQNADGQEDGESERNSNSSGDPGRQLTGAERASTATAEETDIDAVEVPLPGNDVLEFSRGVTDLDAVGKEGGSHTGSKVSHPQEPMLTASPRMLLPSSSSKPPGLGTETPLSTHHQMQLLQQLLQQQQQQTQVAVAQVHLLKDQLAAEAAARLEAQARVHQLLLQNKDMLQHISLLVKQVQELELKLSGQNAMGSQDSLLEITFRSGALPVLCDPTTPKPEDLHSPPLGAGLADFAHPAGSPLVDHGMFENLNTALTPKLQASRSFPHLSKPVAPGSAPLGSGEPG

SEQ ID NO: 745945 - protein, 506 aa, Homo sapiens
MPSKTKYNLVDDGHDLRIPLHNEDAFQHGICFEAKYVGSLDVPRPNSRVEIVAAMRRIRYEFKAKNIKKKKVSIMVSVDGVKVILKKKKKLLLLQKKEWTWDESKMLVMQDPIYRIFYVSHDSQDLKIFSYIARDGASNIFRCNVFKSKKKSQAMRIVRTVGQAFEVCHKLSLQHTQQNADGQEDGESERNSNSSGDPGRQLTGAERASTATAEETDIDAVEVPLPGNDVLEFSRGVTDLDAVGKEGGSHTGSKVSHPQEPMLTASPRMLLPSSSSKPPGLGTETPLSTHHQMQLLQQLLQQQQQQTQVAVAQVHLLKDQLAAEAAARLEAQARVHQLLLQNKDMLQHISLLVKQVQELELKLSGQNAMGSQDSLLEITFRSGALPVLCDPTTPKPEDLHSPPLGAGLADFAHPAGSPLGRRDCLVKLECFRFLPPEDTPPPAQGEALLGGLELIKFRESGIASEYESNTDESEERDSWSQEELPRLLNVLQRQELGDGLDDEIAV

SEQ ID NO: 745946 - protein, 253 aa, Homo sapiens
MRARRRTDLIMGCIKSKENKSPAIKYRPENTPEPVSTSVSHYGAEPTTVSPCPSSSAKGTAVNFSSLSMTPFGGSSGVTPFGGASSSFSVVPSSYPAGLTGGVTIFVALYDYEARTTEDLSFKKGERFQIINNTEGDWWEARSIATGKNGYIPSNYVAPADSIQAEEWYFGKMGRKDAERLLLNPGNQRGIFLVRESETTKGAYSLSIRDWDEIRGDNVKHYKIRKLDNGGYYITTRAQFDTLQKLVKHYTGM

SEQ ID NO: 745947 - protein, 248 aa, Homo sapiens
MLDLIMGCIKSKENKSPAIKYRPENTPEPVSTSVSHYGAEPTTVSPCPSSSAKGTAVNFSSLSMTPFGGSSGVTPFGGASSSFSVVPSSYPAGLTGGVTIFVALYDYEARTTEDLSFKKGERFQIINNTEGDWWEARSIATGKNGYIPSNYVAPADSIQAEEWYFGKMGRKDAERLLLNPGNQRGIFLVRESETTKGAYSLSIRDWDEIRGDNVKHYKIRKLDNGGYYITTRAQFDTLQKLVKHYTGM

SEQ ID NO: 745948 - protein, 314 aa, Homo sapiens
MRARRRTDLIMGCIKSKENKSPAIKYRPENTPEPVSTSVSHYGAEPTTVSPCPSSSAKGTAVNFSSLSMTPFGGSSGVTPFGGASSSFSVVPSSYPAGLTGGVTIFVALYDYEARTTEDLSFKKGERFQIINNTEGDWWEARSIATGKNGYIPSNYVAPADSIQAEEWYFGKMGRKDAERLLLNPGNQRGIFLVRESETTKGAYSLSIRDWDEIRGDNVKHYKIRKLDNGGYYITTRAQFDTLQKLVKHYTEHADGLCHKLTTVCPTVKPQTQGLAKDAWEIPRESLRLEVKLGQGCFGEVWMGTWNGTTKVAI

SEQ ID NO: 745949 - protein, 88 aa, Homo sapiens
MATTVAQTARCPTQENNRPGSERPTDLTRNSPTHNQQNSAPRATPPHTRSRNTTSPQAPHTTDSLRGDPTQTDERPKRRRPVQTLGPR

SEQ ID NO: 745950 - protein, 145 aa, Homo sapiens
GKGALTELTPFPLLPEPARQDHRARPWKTREIRAVSRAGHVGRLRVRRFWSQNSRIAFARPAPRLLQKLPGTPGSATQPEPPGAPREAERPVGSWDGSSRSLRRLHPLKSLCPPCPVALGAAEELPLPSSDPVFRTGAPPGQGWW

SEQ ID NO: 745951 - protein, 167 aa, Homo sapiens
GKGALTELTPFPLLPEPARQDHRARPWKTREIRAVSRAGHVGRLRVRRFWSQNSRIAFARPAPRLLQKLPGTPGSATQPEPPGAPREAERPVGSWDGSSRSLRRLHPLKSLCPPCPVALGAAEELPLPSSDPVFRTGAPPGQGWCRMGKWRENLKEPQTRGPIAPQE

SEQ ID NO: 745952 - protein, 1050 aa, Homo sapiens
VLGASLPRVRRAGKLAEGVRQRLLPSATRPLSNSSYELKLPRDGDRSGAAEAAAAAAAAAAAAAAAAAALAGTEQTRRGATTPARLPPCRRSCRRLAKRRYSRETRHTKAAFSAPPAQGGCGQQGTPPESSSGCCVRFVSELCALHGTDPVPMALIMEPVSKWSPSQVVDWMKGLDDCLQQYIKNFEREKISGDQLLRITHQELEDLGVSRIGHQELILEAVDLLCALNYGLETENLKTLSHKLNASAKNLQNFITGRRRSGHYDGRTSRKLPNDFLTSVVDLIGAAKSLLAWLDRSPFAAVTDYSVTRNNVIQLCLELTTIVQQDCTVYETENKILHVCKTLSGVCDHIISLSSDPLVSQSAHLEVIQLANIKPSEGLGMYIKSTYDGLHVITGTTENSPADRCKKIHAGDEVIQVNHQTVVGWQLKNLVNALREDPSGVILTLKKRPQSMLTSAPALLKNMRWKPLALQPLIPRSPTSSVATPSSTISTPTKRDSSALQDLYIPPPPAEPYIPRDEKGNLPCEDLRGHMVGKPVHKGSESPNSFLDQEYRKRFNIVEEDTVLYCYEYEKGRSSSQGRRESTPTYGKLRPISMPVEYNWVGDYEDPNKMKRDSRRENSLLRYMSNEKIAQEEYMFQRNSKKDTGKKSKKKGDKSNSPTHYSLLPSLQMDALRQDIMGTPVPETTLYHTFQQSSLQHKSKKKNKGPIAGKSKRRISCKDLGRGDCEGWLWKKKDAKSYFSQKWKKYWFVLKDASLYWYINEEDEKAEGFISLPEFKIDRASECRKKYAFKACHPKIKSFYFAAEHLDDMNRWLNRINMLTAGYAERERIKQEQDYWSESDKEEADTPSTPKQDSPPPPYDTYPRPPSMSCASPYVEAKHSRLSSTETSQSQSSHEEFRQEVTGSSAVSPIRKTASQRRSWQDLIETPLTSSGLHYLQTLPLEDSVFSDSAAISPEHRRQSTLPTQKCHLQDHYGPYPLAESERMQVLNGNGGKPRSFTLPRDSGFNHCCLNAPVSACDPQDDVQPPEVEEEEEEEEEEGEAAGENIGEKS

SEQ ID NO: 745953 - protein, 174 aa, Homo sapiens
MAAFAVEPQGPALGSEPMMLGSPTSPKPGVNAQFLPGFLMGDLPAPVTPQPRSISGPSVGVMEMRSPLLAGGSPPQPVVPAHKDKSGAPPVRSIYDDISSPGLGSTPLTSRRQPNISVMQSPLVGVTSTPGTGQSMFSPASIGQPRKTTLSPAQLDPFYTQGDSLTFKKESPFE

SEQ ID NO: 745954 - protein, 136 aa, Homo sapiens [sequence omitted]

SEQ ID NO: 745955 - protein, 326 aa, Homo sapiens
MAAFAVEPQGPALGSEPMMLGSPTSPKPGVNAQFLPGFLMGDLPAPVTPQPRSISGPSVGVMEMRSPLLAGGSPPQPVVPAHKDKSGAPPVRSIYDDISSPGLGSTPLTSRRQPNISVMQSPLVGVTSTPGTGQSMFSPASIGQPRKTTLSPAQLDPFYTQGDSLTSEDHLDDSWVTVFGFPQASASYILLQFAQYGNILKHVMSNTGNWMHIRYQSKLQARKALSKDGRIFGESIMIGVKPCIDKSVMESSDRCALSSPSLAFTPPIKTLGTPTQPGSTPRISTMRPLATAYKASTSDYQVISDRQTPKKDESLVSKAMEYMFGW

SEQ ID NO: 745956 - protein, 326 aa, Homo sapiens; identical to SEQ ID NO: 745955

SEQ ID NO: 745957 - protein, 209 aa, Homo sapiens
MAAFAVEPQGPALGSEPMMLGSPTSPKPGVNAQFLPGFLMGDLPAPVTPQPRSISGPSVGVMEMRSPLLAGGSPPQPVVPAHKDKSGAPPVRSIYDDISSPGLGSTPLTSRRQPNISVMQSPLVGVTSTPGTGQSMFSPASIGQPRKTTLSPAQLDPFYTQGDSLTSEDHLDDSWVTVFGFPQASASYILLQFAQYGNILKHVCRLGKP

SEQ ID NO: 745958 - protein, 152 aa, Homo sapiens
MAAFAVEPQGPALGSEPMMLGSPTSPKPGVNAQFLPGFLMGDLPAPVTPQPRSISGPSVGVMEMRSPLLAGGSPPQPVVPAHKDKSGAPPVRSIYDDISSPGLGSTPLTSRRQPNISVMQSPLVGVTSTPGTGFLKHLLPTYYYNLHSMGIS

SEQ ID NO: 745959 - protein, 320 aa, Homo sapiens
MAAFAVEPQGPALGSEPMMLGSPTSPKPGVNAQFLPGFLMGDLPAPVTPQPRSISGPSVGVMEMRSPLLAGGSPPQPVVPAHKDKSGAPPVRSIYDDISSPGLGSTPLTSRRQGPQQGPAQLPRLECSGTVITLQPVNSWVQPILLPQLSYWDIAKHFSNAESSCWSYIYSWNRFPQASASYILLQFAQYGNILKHVMSNTGNWMHIRYQSKLQARKALSKDGRIFGESIMIGVKPCIDKSVMESSDRCALSSPSLAFTPPIKTLGTPTQPGSTPRISTMRPLATAYKASTSDYQVISDRQTPKKDESLVSKAMEYMFGW

SEQ ID NO: 745960 - protein, 236 aa, Homo sapiens
MAAFAVEPQGPALGSEPMMLGSPTSPKPGVNAQFLPGFLMGDLPAPVTPQPRSISGPSVGVMEMRSPLLAGGSPPQPVVPAHKDKSGAPPVRSIYDDISSPGLGSTPLTSRRQMSNTGNWMHIRYQSKLQARKALSKDGRIFGESIMIGVKPCIDKSVMESSDRCALSSPSLAFTPPIKTLGTPTQPGSTPRISTMRPLATAYKASTSDYQVISDRQTPKKDESLVSKAMEYMFGW

SEQ ID NO: 745961 - protein, 201 aa, Homo sapiens
MGNHLTEMAPTASSFLPHFQALHVVVIGLDSAGKTSLLYRLKFKEFVQSVPTKGFNTEKIRVPLGGSRGITFQVWDVGGQEKLRPLWRSYTRRTDGLVFVVDAAEAERLEEAKVELHRISRASDNQGVPVLVLANKQDQPGALSAAEVEKRLAVRELAAATLTHVQGCSAVDGLGLQQGLERLYEMILKRKKAARGGKKRR

SEQ ID NO: 745962 - protein, 201 aa, Homo sapiens; identical to SEQ ID NO: 745961

SEQ ID NO: 745963 - protein, 201 aa, Homo sapiens; identical to SEQ ID NO: 745961

SEQ ID NO: 745964 - protein, 201 aa, Homo sapiens; identical to SEQ ID NO: 745961

SEQ ID NO: 745965 - protein, 201 aa, Homo sapiens; identical to SEQ ID NO: 745961

SEQ ID NO: 745966 - protein, 1144 aa, Homo sapiens
MKLSRQFTVFGSAIFCVVIFSLYLMLDRGHLDYPRNPRREGSFPQGQLSMLQEKIDHLERLLAENNEIISNIRDSVINLSESVEDGPKSSQSNFSQGAGSHLLPSQLSLSVDTADCLFASQSGSHNSDVQMLDVYSLISFDNPDGGVWKQGFDITYESNEWDTEPLQVFVVPHSHNDPGWLKTFNDYFRDKTQYIFNNMVLKLKEDSRRKFIWSEISYLSKWWDIIDIQKKDAVKSLIENGQLEIVTGGWVMPDEATPHYFALIDQLIEGHQWLENNIGVKPRSGWAIDPFGHSPTMAYLLNRAGLSHMLIQRVHYAVKKHFALHKTLEFFWRQNWDLGSVTDILCHMMPFYSYDIPHTCGPDPKICCQFDFKRLPGGRFGCPWGVPPETIHPGNVQSRARMLLDQYRKKSKLFRTKVLLAPLGDDFRYCEYTEWDLQFKNYQQLFDYMNSQSKFKVKIQFGTLSDFFDALDKADETQRDKGQSMFPVLSGDFFTYADRDDHYWSGYFTSRPFYKRMDRIMESHLRAAEILYYFALRQAHKYKINKFLSSSLYTALTEARRNLGLFQHHDAITGTAKDWVVVDYGTRLFHSLMVLEKIIGNSAFLLILKDKLTYDSYSPDTFLEMDLKQKSQDSLPQKNIIRLSAEPRYLVVYNPLEQDRISLVSVYVSSPTVQVFSASGKPVEVQVSAVWDTANTISETAYEISFRAHIPPLGLKVYKILESASSNSHLADYVLYKNKVEDSGIFTIKNMINTEEGITLENSFVLLRFDQTGLMKQMMTKEDGKHHEVNVQFSWYGTTIKRDKSGAYLFLPDGNAKPYVYTTPPFVRVTHGRIYSEVTCFFDHVTHRVRLYHIQGIEGQSVEVSNIVDIRKVYNREIAMKISSDIKSQNRFYTDLNGYQIQPRMTLSKLPLQANVYPMTTMAYIQDAKHRLTLLSAQSLGVSSLNSGQIEVIMDRRLMQDDNRGLEQGIQDNKITANLFRILLEKRSAVNTEEEKKSVSYPSLLSHITSSLMNHPVIPMANKFSSPTLELQGEFSPLQSSLPCDIHLVNLRTIQSKVGNGHSNEAALILHRKGFDCRFSSKGTGLFCSTTQGKILVQKLLNKFIVESLTPSSLSLMHSPPGTQNISEINLSPMEISTFRIQLR

SEQ ID NO: 745967 - protein, 1144 aa, Homo sapiens; identical to SEQ ID NO: 745966

SEQ ID NO: 745968 - protein, 1144 aa, Homo sapiens; identical to SEQ ID NO: 745966

SEQ ID NO: 745969 - protein, 1144 aa, Homo sapiens; identical to SEQ ID NO: 745966

SEQ ID NO: 745970 - protein, 109 aa, Homo sapiens
LTKSHKSSRDKTKKKAPSGFQKVGNGHSNEAALILHRKGFDCRFSSKGTGLFCSTTQGKILVQKLLNKFIVESLTPSSLSLMHSPPGTQNISEINLSPMEISTFRIQLR

SEQ ID NO: 745971 - protein, 103 aa, Homo sapiens
AWLRPHPAIPWPWLTRHPRHCSACRPRGPALCLRSRRSPSVSPGPVSWIGSPCPRESLIPPQLRNTPRSRRPIFSIPTPYSGSLASKLRSLAFAPGAGTRGRI

SEQ ID NO: 745972 - protein, 114 aa, Homo sapiens
AAGIRHESCSRNRGAMQPRVLLVVALLALLASARASEAEDASLLSFMQGYMKHATKTAKDALSSVQESQVAQQARGWVTDGFSSLKDYWSTVKDKFSEFWDLDPEVRPTSAVAA

SEQ ID NO: 745973 - protein, 119 aa, Homo sapiens
PSCLSAQFIPRGSCSRNRGAMQPRVLLVVALLALLASARASEAEDASLLSFMQGYMKHATKTAKDALSSVQESQVAQQARGWVTDGFSSLKDYWSTVKDKFSEFWDLDPEVRPTSAVAA

SEQ ID NO: 745974 - protein, 102 aa, Homo sapiens
SPGKFRLNSEGKLEQTVSMATRASEAEDASLLSFMQGYMKHATKTAKDALSSVQESQVAQQARGWVTDGFSSLKDYWSTVKDKFSEFWDLDPEVRPTSAVAA

SEQ ID NO: 745975 - protein, 139 aa, Homo sapiens
LQDSARELLQGPRHLPREGSRGMGTWGAPHRTLPCRNRGAMQPRVLLVVALLALLASARASEAEDASLLSFMQGYMKHATKTAKDALSSVQESQVAQQARGWVTDGFSSLKDYWSTVKDKFSEFWDLDPEVRPTSAVAA

SEQ ID NO: 745976 - protein, 114 aa, Homo sapiens; identical to SEQ ID NO: 745972

SEQ ID NO: 745977 - protein, 102 aa, Homo sapiens; identical to SEQ ID NO: 745974

SEQ ID NO: 745978 - protein, 114 aa, Homo sapiens; identical to SEQ ID NO: 745972

SEQ ID NO: 745979 - protein, 133 aa, Homo sapiens
AAGLAGQQRGLSLLGISQLSRPLAASGHPASGPHLHWSAGDLCPAPWVLSACCPGDDISRNRGAMQPRVLLVVALLALLASARASEAEDASLLSFMQGYMKHATKTAKDALSSVQESQVAQQARAFVRLLRER

SEQ ID NO: 745980 - protein, 108 aa, Homo sapiens
MICSRNRGAMQPRVLLVVALLALLASARASEAEDASLLSFMQGYMKHATKTAKDALSSVQESQVAQQARGWVTDGFSSLKDYWSTVKDKFSEFWDLDPEVRPTSAVAA

SEQ ID NO: 745981 - protein, 182 aa, Homo sapiens
MKPDCACALTAPPGPAPRSGLAEGSEAPPQRVSPVNGRGLGGAAVGSGGLSPSHTYTCLPNVHGLGFAYLFKRRRPHPFVRRSADSSEFRDFSRLRRLRLSTLGGKPRGAELPSVVSRGWNLPLRSPKNPDGPAFPRTGDLGLLRLPSDSNKSRNWKDHPFDVFAVIDVLLSSTAHSLSLLS

SEQ ID NO: 745982 - protein, 165 aa, Homo sapiens
MGPLPVCLPIMLLLLLPSLLLLLLLPGPGSGEASRILRVHRRGILELAGTVGCVGPRTPIAYMKYGCFCGLGGHGQPRDAIDWCCHGHDCCYTRAEEAGCSPKTERYSWQCVNQSVLCGPAENKCQELLCKCDQEIANCLAQTEYNLKYLFYPQFLCEPDSPKCD

SEQ ID NO: 745983 - protein, 320 aa, Homo sapiens
AKVTGFSEGVVDSVKGGFSSFSQATHSAAGAVVSKPREIASLIRNKFGSADNIPNLKDSLEEGQVDDAGKALGVISNFQSSPKYGSEEDCSSATSGSVGANSTTGGIAVGASSSKTNTLDMQSSGFDALLHEIQEIRETQARLEESFETLKEHYQRDYSLIMQTLQEERYRCERLEEQLNDLTELHQNEILNLKQELASMEEKIAYQSYERARDIQEALEACQTRISKMELQQQQQQVVQLEGLENATARNLLGKLINILLAVMAVLLVFVSTVANCVVPLMKTRNRTFSTLFLVVFIAFLWKHWDALFSYVERFFSSPR

SEQ ID NO: 745984 - protein, 121 aa, Homo sapiens
MEEKIAYQSYERARDIQEALEACQTRISKMELQQQQQQVVQLEGLENATARNLLGKLINILLAVMAVLLVFVSTVANCVVPLMKTRNRTFSTLFLVVFIAFLWKHWDALFSYVERFFSSPR

SEQ ID NO: 745985 - protein, 320 aa, Homo sapiens; identical to SEQ ID NO: 745983

SEQ ID NO: 745986 - protein, 320 aa, Homo sapiens; identical to SEQ ID NO: 745983

SEQ ID NO: 745987 - protein, 76 aa, Homo sapiens
  misc_feature (8)..(8): Xaa can be any naturally occurring amino acid
TSESIGAXYYYAARRRQIGTRPRSCTHLMLFVTMHLFSFFAVPFAAHPVTFEFLSLWLFLGSFVLSELFYNLALMA

SEQ ID NO: 745988 - protein, 320 aa, Homo sapiens; identical to SEQ ID NO: 745983

SEQ ID NO: 745989 - protein, 513 aa, Homo sapiens
MARGSAVAWAALGPLLWGCALGLQGGMLYPQESPSRECKELDGLWSFRADFSDNRRRGFEEQWYRRPLWESGPTVDMPVPSSFNDISQDWRLRHFVGWVWYEREVILPERWTQDLRTRVVLRIGSAHSYAIVWVNGVDTLEHEGGYLPFEADISNLVQVGPLPSRLRITIAINNTLTPTTLPPGTIQYLTDTSKYPKGYFVQNTYFDFFNYAGLQRSVLLYTTPTTYIDDITVTTSVEQDSGLVNYQISVKGSNLFKLEVRLLDAENKVVANGTGTQGQLKVPGVSLWWPYLMHERPAYLYSLEIRGKGFDWPLLVKDFNLLRWLGANAFRTSHYPYAEEVMQMCDRYGIVVIDECPGVGLALPQFFNNVSLHHHMQVMEEVVRRDKNHPAVVMWSVANEPASHLESAGYYLKMVIAHTKSLDPSRPVTFVSNSNYAADKGAPYVDVICLNSYYSWYHDYGHLELIQAAAGHQFENWNKKYQEAHYSERVWKRKRLQGFTRDPTLMYTEGVPE

SEQ ID NO: 745990 - protein, 579 aa, Homo sapiens
LAPQTVAERGTGPGSMARGSAVAWAALGPLLWGCALGLQGGMLYPQESPSRECKELDGLWSFRADFSDNRRRGFEEQWYRRPLWESGPTVDMPVPSSFNDISQDWRLRHFVGWVWYEREVILPERWTQDLRTRVVLRIGSAHSYAIVWVNGVDTLEHEGGYLPFEADISNLVQVGPLPSRLRITIAINNTLTPTTLPPGTIQYLTDTSKYPKGYFVQNTYFDFFNYAGLQRSVLLYTTPTTYIDDITVTTSVEQDSGLVNYQISVKGSNLFKLEVRLLDAENKVVANGTGTQGQLKVPGVSLWWPYLMHERPAYLYSLEVQLTAQTSLGPVSDFYTLPVGIRTVAVTKSQFLINGKPFYFHGVNKHEDADIRGKGFDWPLLVKDFNLLRWLGANAFRTSHYPYAEEVMQMCDRYGIVVIDECPGVGLALPQFFNNVSLHHHMQVMEEVVRRDKNHPAVVMWSVANEPASHLESAGYYLKMVIAHTKSLDPSRPVTFVSNSNYAADKGAPYVDVICLNSYYSWYHDYGHLELIQAAAGHQFENWNKKYQEAHYSERVWKRKRLQGFTRDPTLMYTEGVPE

SEQ ID NO: 745991 - protein, 358 aa, Homo sapiens
EARVLISCDEGEGGPGSMARGSAVAWAALGPLLWGCALGLQGGMLYPQESPSRECKELDGLWSFRADFSDNRRRGFEEQWYRRPLWESGPTVDMPVPSSFNDISQDWRLRHFVGWVWYEREVILPERWTQDLRTRVVLRIGSAHSYAIVIRGKGFDWPLLVKDFNLLRWLGANAFRTSHYPYAEEVMQMCDRYGIVVIDECPGVGLALPQFFNNVSLHHHMQVMEEVVRRDKNHPAVVMWSVANEPASHLESAGYYLKMVIAHTKSLDPSRPVTFVSNSNYAADKGAPYVDVICLNSYYSWYHDYGHLELIQAAAGHQFENWNKKYQEAHYSERVWKRKRLQGFTRDPTLMYTEGVPE

SEQ ID NO: 745992 - protein, 564 aa, Homo sapiens
MARGSAVAWAALGPLLWGCALGLQGGMLYPQESPSRECKELDGLWSFRADFSDNRRRGFEEQWYRRPLWESGPTVDMPVPSSFNDISQDWRLRHFVGWVWYEREVILPERWTQDLRTRVVLRIGSAHSYAIVWVNGVDTLEHEGGYLPFEADISNLVQVGPLPSRLRITIAINNTLTPTTLPPGTIQYLTDTSKYPKGYFVQNTYFDFFNYAGLQRSVLLYTTPTTYIDDITVTTSVEQDSGLVNYQISVKGSNLFKLEVRLLDAENKVVANGTGTQGQLKVPGVSLWWPYLMHERPAYLYSLEVQLTAQTSLGPVSDFYTLPVGIRTVAVTKSQFLINGKPFYFHGVNKHEDADIRGKGFDWPLLVKDFNLLRWLGANAFRTSHYPYAEEVMQMCDRYGIVVIDECPGVGLALPQFFNNVSLHHHMQVMEEVVRRDKNHPAVVMWSVANEPASHLESAGYYLKMVIAHTKSLDPSRPVTFVSNSNYAADKGAPYVDVICLNSYYSWYHDYGHLELIQAAAGHQFENWNKKYQEAHYSERVWKRKRLQGFTRDPTLMYTEGVPE

SEQ ID NO: 745993 - protein, 581 aa, Homo sapiens
EARVLISCDEGEGGPGSMARGSAVAWAALGPLLWGCALGLQGGMLYPQESPSRECKELDGLWSFRADFSDNRRRGFEEQWYRRPLWESGPTVDMPVPSSFNDISQDWRLRHFVGWVWYEREVILPERWTQDLRTRVVLRIGSAHSYAIVWVNGVDTLEHEGGYLPFEADISNLVQVGPLPSRLRITIAINNTLTPTTLPPGTIQYLTDTSKYPKGYFVQNTYFDFFNYAGLQRSVLLYTTPTTYIDDITVTTSVEQDSGLVNYQISVKGSNLFKLEVRLLDAENKVVANGTGTQGQLKVPGVSLWWPYLMHERPAYLYSLEVQLTAQTSLGPVSDFYTLPVGIRTVAVTKSQFLINGKPFYFHGVNKHEDADIRGKGFDWPLLVKDFNLLRWLGANAFRTSHYPYAEEVMQMCDRYGIVVIDECPGVGLALPQFFNNVSLHHHMQVMEEVVRRDKNHPAVVMWSVANEPASHLESAGYYLKMVIAHTKSLDPSRPVTFVSNSNYAADKGAPYVDVICLNSYYSWYHDYGHLELIQAAAGHQFENCNKKYQEAHYSERVWKRKRLQGFTRDPTLMYTEGVPE

SEQ ID NO: 745994 - protein, 136 aa, Homo sapiens
MRMRTCVGAPGSLWGLLLVTLHFRLPCVLQLRAAQGNEANGSKWRGGSWGGSPGSWLSEEVQLRQGQGSLGSAISYIRGKGFDWPLLVKDFNLLRWLGANAFRTSHYPYAEEVMQMCDRYGIVVIDECPGVGLALP

SEQ ID NO: 745995 - protein, 138 aa, Homo sapiens
RQGLALLPRLEYSGTSTAHCSLDPQAQGILPPQPAQVAGTTGICHYTWVTFLFLAEIGSCYVAQAGLKFLGSRDPPTLASQCAGITGIHHCAQPINFLTAIQSFNSLVHWALHRSCSFFSYMDLSGMEVTYSSQHMAT

SEQ ID NO: 745996 - protein, 220 aa, Homo sapiens
MSGNGNAAATAEENSPKMRVIRVGTRKSQLARIQTDSVVATLKASYPGLQFEIIAMSTTGDKILDTALSKIGEKSLFTKELEHALEKNEVDLVVHSLKDLPTVLPPGFTIGAICKRENPHDAVVFHPKFVGKTLETLPEKSVVGTSSLRRAAQLQRKFPHLEFRSIRGNLNTRLRKLDEQQEFSAIILATAGLQRMGWHNRVGQVRACPISPKSFDLFLA

SEQ ID NO: 745997 - protein, 304 aa, Homo sapiens
MRVIRVGTRKSQLARIQTDSVVATLKASYPGLQFEIIAMSTTGDKILDTALSKIGEKSLFTKELEHALEKNEVDLVVHSLKDLPTVLPPGFTIGAICKRENPHDAVVFHPKFVGKTLETLPEKSVVGTSSLRRAAQLQRKFPHLEFRSIRGNLNTRLRKLDEQQEFSAIILATAGLQRMGWHNRVGQILHPEECMYAVGQEGGCSVPVAVHTAMKDGQLYLTGGVWSLDGSDSIQETMQATIHVPAQHEDGPEDDPQLVGITARNIPRGPQLAAQNLGISLANLLLSKGAKNILDVARQLNDAH

SEQ ID NO: 745998 - protein, 321 aa, Homo sapiens
MSGNGNAAATAEENSPKMRVIRVGTRKSQLARIQTDSVVATLKASYPGLQFEIIAMSTTGDKILDTALSKIGEKSLFTKELEHALEKNEVDLVVHSLKDLPTVLPPGFTIGAICKRENPHDAVVFHPKFVGKTLETLPEKSVVGTSSLRRAAQLQRKFPHLEFRSIRGNLNTRLRKLDEQQEFSAIILATAGLQRMGWHNRVGQILHPEECMYAVGQEGGCSVPVAVHTAMKDGQLYLTGGVWSLDGSDSIQETMQATIHVPAQHEDGPEDDPQLVGITARNIPRGPQLAAQNLGISLANLLLSKGAKNILDVARQLNDAH

SEQ ID NO: 745999 - protein, 267 aa, Homo sapiens
MSTTGDKILDTALSKIGEKSLFTKELEHALEKNEVDLVSSLLEGPGPHVLPPGFTIGAICKRENPHDAVVFHPKFVGKTLETLPEKSVVGTSSLRRAAQLQRKFPHLEFRSIRGNLNTRLRKLDEQQEFSAIILATAGLQRMGWHNRVGQILHPEECMYAVGQEGGCSVPVAVHTAMKDGQLYLTGGVWSLDGSDSIQETMQATIHVPAQHEDGPEDDPQLVGITARNIPRGPQLAAQNLGISLANLLLSKGAKNILDVARQLNDAH

SEQ ID NO: 746000 - protein, 218 aa, Homo sapiens
MSGNGNAAATALARIQTDSVVATLKASYPGLQFEIIAMSTTGDKILDTALSKIGEKSLFTKELEHALEKNEVDLVVHSLKDLPTVLPPGFTIGAICKRENPHDAVVFHPKFVGKTLETLPEKSVVGTSSLRRAAQLQRKFPHLEFRSIRGNLNTRLRKLDEQQEFSAIILATAGLQRMGWHNRVGQGGLGRGSASQGPGHLGSGGCAARSRDSASLHR

SEQ ID NO: 746001 - protein, 266 aa, Homo sapiens
MSTTGDKILDTALSKIGEKSLFTKELEHALEKNEVDLVVHSLKDLPTVLPPGFTIGAICKRENPHDAVVFHPKFVGKTLETLPEKSVVGTSSLRRAAQLQRKFPHLEFRSIRGNLNTRLRKLDEQQEFSAIILATAGLQRMGWHNRVGQILHPEECMYAVGQEGGCSVPVAVHTAMKDGQLYLTGGVWSLDGSDSIQETMQATIHVPAQHEDGPEDDPQLVGITARNIPRGPQLAAQNLGISLANLLLSKGAKNILDVARQLNDAH

SEQ ID NO: 746002 - protein, 304 aa, Homo sapiens; identical to SEQ ID NO: 745997

SEQ ID NO: 746003 - protein, 361 aa, Homo sapiens [sequence omitted]

SEQ ID NO: 746004 - protein, 226 aa, Homo sapiens
MRVIRVGTRKSQLARIQTDSVVATLKASYPGLQFEIIAMSTTGDKILDTALSKIGEKSLFTKELEHALEKNEVDLVVHSLKDLPTVLPPGFTIGAICKRENPHDAVVFHPKFVGKTLETLPEKSVVGTSSLRRAAQLQRKFPHLEFRSIRGNLNTRLRKLDEQQEFSAIILATAGLQRMGWHNRVGQILHPEECMYAVGQVHLDQGSHMVDICFPFVLNQKLVSQL

SEQ ID NO: 746005 - protein, 266 aa, Homo sapiens; identical to SEQ ID NO: 746001

SEQ ID NO: 746006 - protein, 126 aa, Homo sapiens
MGWHNRVGQILHPEECMYAVGQEGGCSVPVAVHTAMKDGQLYLTGGVWSLDGSDSIQETMQATIHVPAQHEDGPEDDPQLVGITARNIPRGPQLAAQNLGISLANLLLSKGAKNILDVARQLNDAH

SEQ ID NO: 746007 - protein, 343 aa, Homo sapiens
MSGNGNAAATALARIQTDSVVATLKASYPGLQFEIIAMSTTGDKILDTALSKIGEKSLFTKELEHALEKNEVDLVVHSLKDLPTVLPPGFTIGAICKRENPHDAVVFHPKFVGKTLETLPEKSVVGTSSLRRAAQLQRKFPHLEFRSIRGNLNTRLRKLDEQQEFSAIILATAGLQRMGWHNRVGQILHPEECMYAVGQGALGVEVRAKDQDILDLVGVLHDPETLLRCIAERAFLRHLEGGCSVPVAVHTAMKDGQLYLTGGVWSLDGSDSIQETMQATIHVPAQHEDGPEDDPQLVGITARNIPRGPQLAAQNLGISLANLLLSKGAKNILDVARQLNDAH

SEQ ID NO: 746008 - protein, 344 aa, Homo sapiens; identical to SEQ ID NO: 744022

SEQ ID NO: 746009 - protein, 298 aa, Homo sapiens
KAKSEQASEVSYAGVIGADVRGHGLICEGQPVTSRLAVICGTSSCHMGISKDPIFVPGVWGPYFSAMVPGFWLNEGGQSVTGKLIDHMVQGHAAFPELQVKATARCQSIYAYLNSHLDLIKKAQPVGFLTVDLHVWPDFHGNRSPLADLTLKGMVTGLKLSQDLDDLAILYLATVQAIALGTRFIIEAMEAAGHSISTLFLCGGLSKNPLFVQMHADITGMPVVLSQEVESVLVGAAVLGACASGDFASVQEAMAKMSKVGKVVFPRLQDKKYYDKKYQVFLKLVEHQKEYLAIMNDD

SEQ ID NO: 746010 - protein, 252 aa, Homo sapiens
MGISKDPIFVPGVWGPYFSAMVPGFWLNEGGQSVTGKLIDHMVQGHAAFPELQVKATARCQSIYAYLNSHLDLIKKAQPVGFLTVDLHVWPDFHGNRSPLADLTLKGMVTGLKLSQDLDDLAILYLATVQAIALGTRFIIEAMEAAGHSISTLFLCGGLSKNPLFVQMHADITGMPVVLSQEVESVLVGAAVLGACASGDFASVQEAMAKMSKVGKVVFPRLQDKKYYDKKYQVFLKLVEHQKEYLAIMNDD

SEQ ID NO: 746011 - protein, 252 aa, Homo sapiens; identical to SEQ ID NO: 746010

SEQ ID NO: 746012 - protein, 439 aa, Homo sapiens
MWLDHRAVSQVNRINETKHSVLQYVGGVMSVEMQAPKLLWLKENLREICWDKAGHFFDLPDFLSWKATGVTARSLCSLVCKWTYSAEKGWDDSFWKMIGLEDFVADNYSKIGNQVLPPGASLGNGLTPEAARDLGLLPGIAVAASLIDAHAGGLGVIGADVRGHGLICEGQPVTSRLAVICGTSSCHMGISKDPIFVPGVWGPYFSAMVPGFWLNEGGQSVTGKLIDHMVQGHAAFPELQVKATARCQSIYAYLNSHLDLIKKAQPVGFLTVDLHVWPDFHGNRSPLADLTLKGMVTGLKLSQDLDDLAILYLATVQAIALGTRFIIEAMEAAGHSISTLFLCGGLSKNPLFVQMHADITGMPVVLSQEVESVLVGAAVLGACASGDFASVQEAMAKMSKVGKVVFPRLQDKKYYDKKYQVFLKLVEHQKEYLAIMNDD

SEQ ID NO: 746013 - protein, 252 aa, Homo sapiens; identical to SEQ ID NO: 746010

SEQ ID NO: 746014 - protein, 252 aa, Homo sapiens; identical to SEQ ID NO: 746010

SEQ ID NO: 746015 - protein, 233 aa, Homo sapiens
MGISKDPIFVPGVWGPYFSAMVPGFWLNEGGQSVTGATARCQSIYAYLNSHLDLIKKAQPVGFLTVDLHVWPDFHGNRSPLADLTLKGMVTGLKLSQDLDDLAILYLATVQAIALGTRFIIEAMEAAGHSISTLFLCGGLSKNPLFVQMHADITGMPVVLSQEVESVLVGAAVLGACASGDFASVQEAMAKMSKVGKVVFPRLQDKKYYDKKYQVFLKLVEHQKEYLAIMNDD

SEQ ID NO: 746016 - protein, 322 aa, Homo sapiens
MSGGEQKPERYYVGVDVGTGSVRAALVDQSGVLLAFADQPIKNWEPQFNHHEQSSEDIWAACCVVTKKVVQGIDLNQIRGLGFDATCSLVVLDKQFHPLPVNQEGDSHRNVIMWLDHRAVSQVNRINETKHSVLQYVGGVMSVEMQAPKLLWLKENLREICWDKAGHFFDLPDFLSWKATGVTARELSAPWCCNVDIIQQSIGWDPQKLAELIRLGQTSLHINFRGKVGKPNVASLPGGQYHLAQWGSVRVTVGMQDLWPSSPVELRVRTFHLIWMPPFRAVLGAASGGPHLPTAPALLVSRVPSRFPSRLGLPLSPRPLCP

SEQ ID NO: 746017 - protein, 79 aa, Homo sapiens
GIHNCSLELEGRECVSICISLSFLLGDSHRNVIMWLDHRAVSQVNRINETKHSVLQYVGGVMSVEMQAPKLLWLKEVSA

SEQ ID NO: 746018 - protein, 551 aa, Homo sapiens
MSGGEQKPERYYVGVDVGTGSVRAALVDQSGVLLAFADQPIKNWEPQFNHHEQSSEDIWAACCVVTKKVVQGIDLNQIRGLGFDATCSLVVLDKQFHPLPVNQEGDSHRNVIMWLDHRAVSQVNRINETKHSVLQYVGGVMSVEMQAPKLLWLKENLREICWDKAGHFFDLPDFLSWKATGVTARSLCSLVCKWTYSAEKGWDDSFWKMIGLEDFVADNYSKIGNQVLPPGASLGNGLTPEAARDLGLLPGIAVAASLIDAHAGGLGVIGADVRGHGLICEGQPVTSRLAVICGTSSCHMGISKDPIFVPGVWGPYFSAMVPGFWLNEGGQSVTGKLIDHMVQGHAAFPELQVKATARCQSIYAYLNSHLDLIKKAQPVGFLTVDLHVWPDFHGNRSPLADLTLKGMVTGLKLSQDLDDLAILYLATVQAIALGTRFIIEAMEAAGHSISTLFLCGGLSKNPLFVQMHADITGMPVVLSQEVESVLVGAAVLGACASGDFASVQEAMAKMSKVGKVVFPRLQDKKYYDKKYQVFLKLVEHQKEYLAIMNDD

SEQ ID NO: 746019 - protein, 246 aa, Homo sapiens
MWLDHRAVSQVNRINETKHSVLQYVGGVMSVEMQAPKLLWLKENLREICWDKAGHFFDLPDFLSWKATGVTARSLCSLVCKWTYSAEKGWDDSFWKMIGLEDFVADNYSKIGNQVLPPGASLGNGLTPEAARDLGLLPGIAVAASLIDAHAGGLGVIGADVRGHGLICEGQPVTSRLAVICGTSSCHMGISKDPIFVPGVWGPYFSAMVPGFWLNEGGQSVTGKLIDHMVQGHAAFPELQVKATAR

SEQ ID NO: 746020 - protein, 551 aa, Homo sapiens; identical to SEQ ID NO: 746018

SEQ ID NO: 746021 - protein, 439 aa, Homo sapiens; identical to SEQ ID NO: 746012

SEQ ID NO: 746022 - protein, 439 aa, Homo sapiens; identical to SEQ ID NO: 746012

SEQ ID NO: 746023 - protein, 377 aa, Homo sapiens
ILLCCLHGKVRSLCSLVCKWTYSAEKGWDDSFWKMIGLEDFVADNYSKIGNQVLPPGASLGNGLTPEAARDLGLLPGIAVAASLIDAHAGGLGVIGADVRGHGLICEGQPVTSRLAVICGTSSCHMGISKDPIFVPGVWGPYFSAMVPGFWLNEGGQSVTGKLIDHMVQGHAAFPELQVKATARCQSIYAYLNSHLDLIKKAQPVGFLTVDLHVWPDFHGNRSPLADLTLKGMVTGLKLSQDLDDLAILYLATVQAIALGTRFIIEAMEAAGHSISTLFLCGGLSKNPLFVQMHADITGMPVVLSQEVESVLVGAAVLGACASGDFASVQEAMAKMSKVGKVVFPRLQDKKYYDKKYQVFLKLVEHQKEYLAIMNDD

SEQ ID NO: 746024 - protein, 491 aa, Homo sapiens
MSGGEQKPERYYVGVDVGTGSVRAALVDQSGVLLAFADQPIKNWEPQFNHHEQSSEDIWAACCVVTKKVVQGIDLNQIRGLGFDATCSLVVLDKQFHPLPVNQEGDSHRNVIMWLDHRAVSQVNRINETKHSVLQYVGGVMSVEMQAPKLLWLKENLREICWDKAGHFFDLPDFLSWKATGVTARSLCSLVCKWTYSAEKGWDDSFWKMIGLEDFVADNYSKIGNQVLPPGASLGNGLTPEAARDLGLLPGIAVAASLIDAHAGGLGVIGADVRGHGLICEGQPVTSRLAVICGTSSCHMGISKDPIFVPGVWGPYFSAMVPGFWLNEGGQSVTGKLIDHMVQGHAAFPELQVKATARCQSIYAYLNSHLDLIKKAQPVGFLTVDLHVWPDFHGNRSPLADLTLKGMVTGLKLSQDLDDLAILYLATVQAIALGTRFIIEAMEAAGHSISTLFLCGGLSKNPLFVQMHADITGSNGKNEQSWESCVPETTG

SEQ ID NO: 746025 - protein, 105 aa, Homo sapiens
MLRHSPLTQMGPAKDKLVIGRIFHIVENDLYIDFGGKFHCVCRRPEVDGEKYQKGTRVRLRLLDLELTSRFLGATTDTTVLEANAVLLGIQESKDSRSKEEHHEK

SEQ ID NO: 746026 - protein, 201 aa, Homo sapiens
ALAEGRSKVRGKEVMAALCRTRAVAAESHFLRVFLFFRPFRGVGTESGSESGSSNAKEPKTRAGGFASALERHSELLQKVEPLQKGSPKNVESFASMLRHSPLTQMGPAKDKLVIGRIFHIVENDLYIDFGGKFHCVCRRPEVDGEKYQKGTRVRLRLLDLELTSRFLGATTDTTVLEANAVLLGIQESKDSRSKEEHHEK

SEQ ID NO: 746027 - protein, 181 aa, Homo sapiens
ALAEGRSKVRGKEVMAALCRTRAVAAESHFLRVFLFFRPFRGVGTESGSESGSSNAKEPKTRAGGFASALERHSELLQKVEPLQKMGPAKDKLVIGRIFHIVENDLYIDFGGKFHCVCRRPEVDGEKYQKGTRVRLRLLDLELTSRFLGATTDTTVLEANAVLLGIQESKDSRSKEEHHEK

SEQ ID NO: 746028 - protein, 125 aa, Homo sapiens
MLPRLVLNSWVQVILLRWPPKVLGLQMTDMGPAKDKLVIGRIFHIVENDLYIDFGGKFHCVCRRPEVDGEKYQKGTRVRLRLLDLELTSRFLGATTDTTVLEANAVLLGIQESKDSRSKEEHHEK

SEQ ID NO: 746029 - protein, 178 aa, Homo sapiens
ALAEGRSKVRGKEVMAALCRTRAVAAESHFLRVFLFFRPFRGVGTESGSESGSSNAKEPKTRAGGFASALERHSELLQKVEPLQKGSPKNVESFASMLRHSPLTQMGPAKDKLVIGRIFHIVENDLYIDFGGKFHCVCRRPEVDGESPISWYAVWRRFSQVMITCFSSNSDFGKHRKR

SEQ ID NO: 746030 - protein, 212 aa, Homo sapiens
ALAEGRSKVRGKEVMAALCRTRAVAAESHFLRVFLFFRPFRGVGTESGSESGSSNAKEPKTRAGGFASALERHSELLQKVEPLQKRWGFAMLPRLVLNSWVQVILLRWPPKVLGLQMTDGSPKNVESFASMLRHSPLTQMGPAKDKLVIGRIFHIVENDLYIDFGGKFHCVCRRPEVDGESPISWYAVWRRFSQVMITCFSSNSDFGKHRKR

SEQ ID NO: 746031 - protein, 68 aa, Homo sapiens
WFPYATLAGPRTLRVHKDLRVRLRLLDLELTSRFLGATTDTTVLEANAVLLGIQESKDSRSKEEHHEK

SEQ ID NO: 746032 - protein, 178 aa, Homo sapiens; identical to SEQ ID NO: 746029

SEQ ID NO: 746033 - protein, 201 aa, Homo sapiens; identical to SEQ ID NO: 746026

SEQ ID NO: 746034 - protein, 201 aa, Homo sapiens; identical to SEQ ID NO: 746026

SEQ ID NO: 746035 - protein, 125 aa, Homo sapiens; identical to SEQ ID NO: 746028

SEQ ID NO: 746036 - protein, 100 aa, Homo sapiens
ALAEGRSKVRGKEVMAALCRTRAVAAESHFLRVFLFFRPFRGVGTESGSESGSSNAKEPKTRAGGFASALERHSELLQKVEPLQKEIPERNQGPVAAIRS

SEQ ID NO: 746037 - protein, 201 aa, Homo sapiens; identical to SEQ ID NO: 746026

SEQ ID NO: 746038 - protein, 119 aa, Homo sapiens
EADLRSFWARRGRRKGKTGPGKAVVRNEPHGPEEATGRRELGLPKRRRGRSFGLGRPQARASWAWRVRCEAEAGPVQAFGRQEARPAEADWRSSSGPAEAAESQKRGLGRPPGGMSWAG

SEQ ID NO: 746039 - protein, 144 aa, Homo sapiens
GSRETAFTYAVSAAGVVNAMSRACREGELSTCGCSRAARPKDLPRDWLWGGCGDNIDYGYRFAKEFVDARERERIHAKGSYESARILMNLHNNEAGRRTVYNLADVACKCHGVSGSCSLKTCWLQLADFRKVGDALKEKYDKLV

SEQ ID NO: 746040 - protein, 159 aa, Homo sapiens
GSRETAFTYAVSAAGVVNAMSRACREGELSTCGCSRAARPKDLPRDWLWGGCGDNIDYGYRFAKEFVDARERERIHAKGSYESARILMNLHNNEAGRRTVYNLADVACKCHGVSGSCSLKTCWLQLADFRKVGDALKEKYDSWFKKQTSKGLCQMEDRI

SEQ ID NO: 746041 - protein, 86 aa, Homo sapiens
PAGRLPARQGLEKARAPKATEMPRDESRLEMPWLNSLCTSRAHRAVLELVLHMKMSRSPLLKERVPDLSWAHQIQYLPGIGKRWGE

SEQ ID NO: 746042 - protein, 86 aa, Homo sapiens; identical to SEQ ID NO: 746041

SEQ ID NO: 746043 - protein, 424 aa, Homo sapiens
MHRKHLQEIPDLSSNVATSFTWGWDSSKTSELLSGMGVSALEKEEPDSENIPQELLSNLGHPESPPRKRLKSKGSDKDFVIVRRPKLNRENFPGVSWDSLPDELLLGIFSCLCLPELLKVSGVCKRWYRLASDESLWQTLDLTGKNLHPDVTGRLLSQGVIAFRCPRSFMDQPLAEHFSPFRVQHMDLSNSVIEVSTLHGILSQCSKLQNLSLEGLRLSDPIVNTLAKNSNLVRLNLSGCSGFSEFALQTLLSSCSRLDELNLSWCFDFTEKHVQVAVAHVSETITQLNLSGYRKNLQKSDLSTLVRRCPNLVHLDLSDSVMLKNDCFQEFFQLNYLQHLSLSRCYDIIPETLLELGEIPTLKTLQVFGIVPDGTLQLLKEALPHLQINCSHFTTIARPTIGNKKNQEIWGIKCRLTLQKPSCL

SEQ ID NO: 746044 - protein, 156 aa, Homo sapiens
MHRKHLQEIPDLSSNVATSFTWGWDSSKTSELLSGMGVSALGGKTGKGARAPPRGTPRDWGKGKTKFSPPGETWLLSNLGHPESPPRKRLKSKGSDKDFVIVRRPKLNRENFPGVSWDSLPDELLLGIFSCLCLPELLKVSGVCKRWYRLASLYFS

SEQ ID NO: 746045 - protein, 390 aa, Homo sapiens
MHRKHLQEIPDLSSNVATSFTWGWDSSKTSELLSGMGVSALEKEEPDSENIPQELLSNLGHPESPPRKRLKSKGSDKDFVIVRRPKLNRENFPGVSWDSLPDELLLGIFSCLCLPELLKVSGVCKRWYRLASDESLWQTLDLTGKNLHPDVTGRLLSQGVIAFRCPRSFMDQPLAEHFSPFRVQHMDLSNSVIEVSTLHGILSQCSKLQNLSLEGLRLSDPIVNTLAKNSNLVRLNLSGCSGFSEFALQTLLSSCSRLDELNLSWCFDFTEKHVQVAVAHVSETITQLNLSGYRKNLQKSDLSTLVRRCPNLVHLDLSDSVMLKNDCFQEFFQLNYLQHLSLSRCYDIIPETLLQELGLGSGWTLTSDALKHTELPNSSPAISYFANMSE

SEQ ID NO: 746046 - protein, 444 aa, Homo sapiens
MHRKHLQEIPDLSSNVATSFTWGWDSSKTSELLSGMGVSALGGKTGKGARAPPRGTPRDWGKGKTKFSPPGETWLLSNLGHPESPPRKRLKSKGSDKDFVIVRRPKLNRENFPGVSWDSLPDELLLGIFSCLCLPELLKVSGVCKRWYRLASDESLWQTLDLTGKNLHPDVTGRLLSQGVIAFRCPRSFMDQPLAEHFSPFRVQHMDLSNSVIEVSTLHGILSQCSKLQNLSLEGLRLSDPIVNTLAKNSNLVRLNLSGCSGFSEFALQTLLSSCSRLDELNLSWCFDFTEKHVQVAVAHVSETITQLNLSGYRKNLQKSDLSTLVRRCPNLVHLDLSDSVMLKNDCFQEFFQLNYLQHLSLSRCYDIIPETLLELGEIPTLKTLQVFGIVPDGTLQLLKEALPHLQINCSHFTTIARPTIGNKKNQEIWGIKCRLTLQKPSCL

SEQ ID NO: 746047 - protein, 155 aa, Homo sapiens
MRKVVLITGASSGIGLALCKRLLAEDDELHLCLACRNMSKAEAVCAALLASHPTAEVTIVQVDVSNLQSVFRASKELKQRFQRLDCIYLNAGIMPNPQLNIKALFFGLFSRKVIHMFSTAEGLLTQGDKITADGLQEVFETNVFGHFILVKKLWA

SEQ ID NO: 746048 - protein, 355 aa, Homo sapiens
MRKVVLITGASSGIGLALCKRLLAEDDELHLCLACRNMSKAEAVCAALLASHPTAEVTIVQVDVSNLQSVFRASKELKQRMIKKWLYVICVKTMFQRLDCIYLNAGIMPNPQLNIKALFFGLFSRKVIHMFSTAEGLLTQGDKITADGLQEVFETNVFGHFILIRELEPLLCHSDNPSQLIWTSSRSARKSNFSLEDFQHSKGKEPYSSSKYATDLLSVALNRNFNQQGLYSNVACPGTALTNLTYGILPPFIWTLLMPAILLLRFFANAFTLTPYNGTEALVWLFHQKPESLNPLIKYLSATTGFGRNYIMTQKMDLDEDTAEKFYQKLLELEKHIRVTIQKTDNQARLSGSCL

SEQ ID NO: 746049 - protein, 341 aa, Homo sapiens
MRKVVLITGASSGIGLALCKRLLAEDDELHLCLACRNMSKAEAVCAALLASHPTAEVTIVQVDVSNLQSVFRASKELKQRFQRLDCIYLNAGIMPNPQLNIKALFFGLFSRKVIHMFSTAEGLLTQGDKITADGLQEVFETNVFGHFILIRELEPLLCHSDNPSQLIWTSSRSARKSNFSLEDFQHSKGKEPYSSSKYATDLLSVALNRNFNQQGLYSNVACPGTALTNLTYGILPPFIWTLLMPAILLLRFFANAFTLTPYNGTEALVWLFHQKPESLNPLIKYLSATTGFGRNYIMTQKMDLDEDTAEKFYQKLLELEKHIRVTIQKTDNQARLSGSCL

SEQ ID NO: 746050 - protein, 111 aa, Homo sapiens
MRKVVLITGASSGIGLALCKRLLAEDDELHLCLACRNMSKAEAVCAALLASHPTAEVTIVQVDVSNLQSVFRASKELKQRFQRLDCIYLNAGIMPNPQLNIKALFFGLFSS

SEQ ID NO: 746051 - protein, 341 aa, Homo sapiens; identical to SEQ ID NO: 746049

SEQ ID NO: 746052 - protein, 667 aa, Homo sapiens
METLESELTCPICLELFEDPLLLPCAHSLCFNCAHRILVSHCATNESVESITAFQCPTCRHVITLSQRGLDGLKRNVTLQNIIDRFQKASVSGPNSPSETRRERAFDANTMTSAEKVLCQFCDQDPAQDAVKTCVTCEVSYCDECLKATHPNKKPFTGHRLIEPIPDSHIRGLMCLEHEDEKVNMYCVTDDQLICALCKLVGRHRDHQVAALSERYDKLKQNLESNLTNLIKRNTELETLLAKLIQTCQHVEVNASRQEAKLTEECDLLIEIIQQRRQIIGTKIKEGKVMRLRKLAQQIANCKQCIERSASLISQAEHSLKENDHARFLQTAKNITERVSMATASSQVLIPEINLNDTFDTFALDFSREKKLLECLDYLTAPNPPTIREELCTASYDTITVHWTSDDEFSVVSYELQYTIFTGQANVVSLCNSADSWMIVPNIKQNHYTVHGLQSGTKYIFMVKAINQAGSRSSEPGKLKTNSQPFKLDPKSAHRKLKVSHDNLTVERDESSSKKSHTPERFTSQGSYGVAGNVFIDSGRHYWEVVISGSTWYAIGLAYKSAPKHEWIGKNSASWALCRCNNNWVVRHNSKEIPIEPAPHLRRVGILLDYDNGSIAFYDALNSIHLYTFDVAFAQPVCPTFTVWNKCLTIITGLPIPDHLDCTEQLP

SEQ ID NO: 746053 - protein, 667 aa, Homo sapiens; identical to SEQ ID NO: 746052

SEQ ID NO: 746054 - protein, 667 aa, Homo sapiens; identical to SEQ ID NO: 746052

SEQ ID NO: 746055 - protein, 667 aa, Homo sapiens; identical to SEQ ID NO: 746052

SEQ ID NO: 746056 - protein, 667 aa, Homo sapiens; identical to SEQ ID NO: 746052

SEQ ID NO: 746057 - protein, 667 aa, Homo sapiens; identical to SEQ ID NO: 746052

SEQ ID NO: 746058 - protein, 667 aa, Homo sapiens; identical to SEQ ID NO: 746052

SEQ ID NO: 746059 - protein, 629 aa, Homo sapiens
METLESELTCPICLELFEDPLLLPCAHSLCFNCAHRILVSHCATNESVESITAFQCPTCRHVITLSQRGLDGLKRNVTLQNIIDRFQKASVSGPNSPSETRRERAFDANTMTSAEKVLCQFCDQDPAQDAVKTCVTCEVSYCDECLKATHPNKKPFTGHRLIEPIPDSHIRGLMCLEHEDEKQNLESNLTNLIKRNTELETLLAKLIQTCQHVEVNASRQEAKLTEECDLLIEIIQQRRQIIGTKIKEGKVMRLRKLAQQIANCKQCIERSASLISQAEHSLKENDHARFLQTAKNITERVSMATASSQVLIPEINLNDTFDTFALDFSREKKLLECLDYLTAPNPPTIREELCTASYDTITVHWTSDDEFSVVSYELQYTIFTGQANVVSLCNSADSWMIVPNIKQNHYTVHGLQSGTKYIFMVKAINQAGSRSSEPGKLKTNSQPFKLDPKSAHRKLKVSHDNLTVERDESSSKKSHTPERFTSQGSYGVAGNVFIDSGRHYWEVVISGSTWYAIGLAYKSAPKHEWIGKNSASWALCRCNNNWVVRHNSKEIPIEPAPHLRRVGILLDYDNGSIAFYDALNSIHLYTFDVAFAQPVCPTFTVWNKCLTIITGLPIPDHLDCTEQLP

SEQ ID NO: 746060 - protein, 667 aa, Homo sapiens; identical to SEQ ID NO: 746052

SEQ ID NO: 746061 - protein, 667 aa, Homo sapiens; identical to SEQ ID NO: 746052

SEQ ID NO: 746062 - protein, 667 aa, Homo sapiens; identical to SEQ ID NO: 746052

SEQ ID NO: 746063 - protein, 552 aa, Homo sapiens
METLESELTCPICLELFEDPLLLPCAHSLCFNCAHRILVSHCATNESVESITAFQCPTCRHVITLSQRGLDGLKRNVTLQNIIDRFQKASVSGPNSPSETRRERAFDANTMTSAEKVLCQFCDQDPAQDAVKTCVTCEVSYCDECLKATHPNKKPFTGHRLIEPIPDSHIRGLMCLEHEDEKVNMYCVTDDQLICALCKLVGRHRDHQVAALSERYDKLKQNLESNLTNLIKRNTELETLLAKLIQTCQHVEVNASRQEAKLTEECDLLIEIIQQRRQIIGTKIKEGKVMRLRKLAQQIANCKQCIERSASLISQAEHSLKENDHARFLQTAKNITERVSMATASSQVLIPEINLNDTFDTFALDFSREKKLLECLDYLTAPNPPTIREELCTASYDTITVHWTSDDEFSVVSYELQYTIFTGQANVVSLCNSADSWMIVPNIKQNHYTVHGLQSGTKYIFMVKAINQAGSRSSEPGKLKTNSQPFKLDPKSAHRKLKVSHDNLTVERDESSSKKSHTPERFTSQGSYGVAGNVFIDSGRHYWEVVISGSTW

SEQ ID NO: 746064 - protein, 667 aa, Homo sapiens; identical to SEQ ID NO: 746052

SEQ ID NO: 746065 - protein, 79 aa, Homo sapiens
SAQGKLKTNSQPFKLDPKSAHRKLKVSHDNLTVERDESSSKKSHTPERFTSQGSYGVAGNVFIDSGRHYWEVVISGSTW

SEQ ID NO: 746066 - protein, 30 aa, Homo sapiens
  misc_feature (9)..(9): Xaa can be any naturally occurring amino acid
  misc_feature (23)..(23): Xaa can be any naturally occurring amino acid
  misc_feature (28)..(28): Xaa can be any naturally occurring amino acid
MTFHFTGGXVFSVQFPNPKAEPXAPFEXGQ

SEQ ID NO: 746067 - protein, 206 aa, Homo sapiens
MFPEPPTPGPPSPDTPPDSSRISHGPVPPWALATIVLVSGLLIFSCCFCLYRKSCRRRTGKKSQAQAQVHLQEVKGLGQSYIDKVQPEVEELEPAPSGPGQQVADKHELGRLQYSLDYDFQSGQLLVGILQAMGLAALDLGGSSDPYVRVYLLPDKRRRYETKVHRQTLNPHFGETFAFKVPYGGAWGAGLPALAACPTSRRSLPP

SEQ ID NO: 746068 - protein, 386 aa, Homo sapiens
MFPEPPTPGPPSPDTPPDSSRISHGPVPPWALATIVLVSGLLIFSCCFCLYRKSCRRRTGKKSQAQAQVHLQEVKGLGQSYIDKVQPEVEELEPAPSGPGQQVADKHELGRLQYSLDYDFQSGQLLVGILQAMGLAALDLGGSSDPYVRVYLLPDKRRRYETKVHRQTLNPHFGETFAFKVPYVELGGRVLVMAVYDFDRFSRNDAIGEVRVPMSSVDLGRPVQAWRELQAAPREEQEKLGDICFSLRYVPTAGKLTVIVLEAKNLKKMDVGGLSDPYVKVHLLQGGKKVRKKKTTIKKNTLNPYYNEAFSFEVPCDQVQKVQVELTVLDYDKLGKNEAIGRVAVGAAAGGAGLRHWADMLANPRRPIAQWHSLRPPDRVRLLPAP

SEQ ID NO: 746069 - protein, 350 aa, Homo sapiens
MFPEPPTPGPPSPDTPPDSSRISHGPVPPWALATIVLVSGLLIFSCCFCLYRKSCRRRTGKKSQAQAQVHLQEVKGLGQSYIDKVQPEVEELEPAPSGPGQQVADKHELGRLQYSLDYDFQSGQLLVGILQAMGLAALDLGGSSDPYVRVYLLPDKRRRYDFDRFSRNDAIGEVRVPMSSVDLGRPVQAWRELQAAPREEQEKLGDICFSLRYVPTAGKLTVIVLEAKNLKKMDVGGLSDPYVKVHLLQGGKKVRKKKTTIKKNTLNPYYNEAFSFEVPCDQVQKVQVELTVLDYDKLGKNEAIGRVAVGAAAGGAGLRHWADMLANPRRPIAQWHSLRPPDRVRLLPAP

SEQ ID NO: 746070 - protein, 144 aa, Homo sapiens
EEFISLETWLRRKKGARASSSPQAPSLSSPTPSPVPSSGAPSPRVAARGTLSRENGHRPFRGLLPSRSSLLFLPRPPQKVQVELTVLDYDKLGKNEAIGRVAVGAAAGGAGLRHWADMLANPRRPIAQWHSLRPPDRVRLLPAP

SEQ ID NO: 746071 - protein, 386 aa, Homo sapiens; identical to SEQ ID NO: 746068

SEQ ID NO: 746072 - protein, 383 aa, Homo sapiens
MTRGGCPVSARLFAQRPHGSWSSLLCVGLKGRLGWEWGTRVLECLCRKDSRTPPPCSRSPQPRGLHRPTRLPTPVASATAQVQPEVEELEPAPSGPGQQVADKHELGRLQYSLDYDFQSGQLLVGILQAMGLAALDLGGSSDPYVRVYLLPDKRRRYETKVHRQTLNPHFGETFAFKVPYVELGGRVLVMAVYDFDRFSRNDAIGEVRVPMSSVDLGRPVQAWRELQAAPREEQEKLGDICFSLRYVPTAGKLTVIVLEAKNLKKMDVGGLSDPYVKVHLLQGGKKVRKKKTTIKKNTLNPYYNEAFSFEVPCDQVQKVQVELTVLDYDKLGKNEAIGRVAVGAAAGGAGLRHWADMLANPRRPIAQWHSLRPPDRVRLLPAP

SEQ ID NO: 746073 - protein, 160 aa, Homo sapiens
GSGDGPLSFQQEKLGDICFSLRYVPTAGKLTVIVLEAKNLKKMDVGGLSDPYVKVHLLQGGKKVRKKKTTIKKNTLNPYYNEAFSFEVPCDQVQKVQVELTVLDYDKLGKNEAIGRVAVGAAAGGAGLRHWADMLANPRRPIAQWHSLRPPDRVRLLPAP

SEQ ID NO: 746074 - protein, 506 aa, Homo sapiens
MRDPLTDCPYNKVYKNLKEFSQNGENFCKQVTSVLQQRANLEISYAKGLQKLASKLSKALQNTRKSCVSSAWAWASEGMKSTADLHQKLGKAIELEAIKPTYQVLNVQEKKRKSLDNEVEKTANLVISNWNQQIKAKKKLMVSTKKHEALFQLVESSKQSMTEKEKRKLLNKLTKSTEKLEKEDENYYQKNMAGYSTRLKWENTLENCYQSILELEKERIQLLCNNLNQYSQHISLFGQTLTTCHTQIHCAISKIDIEKDIQAVMEETAILSTENKSEFLLTDYFEEDPNSAMDKERRKSLLKPKLLRLQRDIEKASKDKEGLERMLKTYSSTSSFSDAKSQKDTAALMDENNLKLDLLEANSYKLSSMLAELEQRPQPSHPCSNSIFRWREKEHTHSYVKISRPFLMKRLENIVSKASSGGQSNPGSSTPAPGAAQLSSRLCKALYSFQARQDDELNLEKGDIVIIHEKKEEGWWFGSLNGKKGHFPAAYVEELPSNAGNTATKA

SEQ ID NO: 746075 - protein, 506 aa, Homo sapiens; identical to SEQ ID NO: 746074

SEQ ID NO: 746076 - protein, 428 aa, Homo sapiens
MKSTADLHQKLGKAIELEAIKPTYQVLNVQEKKRKSLDNEVEKTANLVISNWNQQIKAKKKLMVSTKKHEALFQLVESSKQSMTEKEKRKLLNKLTKSTEKLEKEDENYYQKNMAGYSTRLKWENTLENCYQSILELEKERIQLLCNNLNQYSQHISLFGQTLTTCHTQIHCAISKIDIEKDIQAVMEETAILSTENKSEFLLTDYFEEDPNSAMDKERRKSLLKPKLLRLQRDIEKASKDKEGLERMLKTYSSTSSFSDAKSQKDTAALMDENNLKLDLLEANSYKLSSMLAELEQRPQPSHPCSNSIFRWREKEHTHSYVKISRPFLMKRLENIVSKASSGGQSNPGSSTPAPGAAQLSSRLCKALYSFQARQDDELNLEKGDIVIIHEKKEEGWWFGSLNGKKGHFPAAYVEELPSNAGNTATKA

SEQ ID NO: 746077 - protein, 120 aa, Homo sapiens
VKTRRRQLSPIQTEMPGTALLSQPSEGTNPADTLALYFWPPEPQESTFLLLRPLSLWHFVTASHPVQALLIDCWAFAVVFASNIFISQFISGGCHPRGRTSIVSLMGNLAGIMWSTAQGC

SEQ ID NO: 746078 - protein, 135 aa, Homo sapiens
PGPGPGGRTGRDHEQLHRNPSPGLQGPGGTPTSGRRPQCPSRSGVRWVERFGGESWGLRRRGCGWDPIPLWLQQAVKLHQGLHPADHSPGAPSGGRRHQQVLLVTWPHLPCPPEPPRLGMSCEGSDGRRRTHDTE

SEQ ID NO: 746079 - protein, 137 aa, Homo sapiens
KRAARGRWCDSMEKLKALLPRLEQELKDTAKFKDFYQFTFTFAKNPGQKGLDLEMAVAYWKLVLSGRFKFLDLWNTFLMEHHKRSIPRDTWNLLLDFGNMIADDMSNYDEEGAWPVLIDDFVEYARPVVTGGKRSLF

SEQ ID NO: 746080 - protein, 193 aa, Homo sapiens
EAGGAGEMHKLKSSQKDKVRQFMACTQAGERTAIYCLTQNEWRLDEATDSFFQNPDSLHRESMRNAVDKKKLERLYGRYKDPQDENKIGVDGIQQFCDDLSLDPASISVLVIAWKFRAATQCEFSRKEFLDGMTELGCDSMEKLKALLPRLEQELKDTAKFKDFYQFTFTFAKNPGQKGLGSPPFLNVKALHH

SEQ ID NO: 746081 - protein, 246 aa, Homo sapiens
EAGGAGEMHKLKSSQKDKVRQFMACTQAGERTAIYCLTQNEWRLDEATDSFFQNPDSLHRESMRNAVDKKKLERLYGRYKDPQDENKIGVDGIQQFCDDLSLDPASISVLVIAWKFRAATQCEFSRKEFLDGMTELGCDSMEKLKALLPRLEQELKDTAKFKDFYQFTFTFAKNPGQKGLDLEMAVAYWKLVLSGRFKFLDLWNTFLMMIADDMSNYDEEGAWPVLIDDFVEYARPVVTGGKRSLF

SEQ ID NO: 746082 - protein, 193 aa, Homo sapiens; identical to SEQ ID NO: 746080

SEQ ID NO: 746083 - protein, 110 aa, Homo sapiens [sequence omitted]

SEQ ID NO: 746084 - protein, 103 aa, Homo sapiens [sequence omitted]

SEQ ID NO: 746085 - protein, 646 aa, Homo sapiens
RNRFTEIPSDVWLFAPLETLNLYHNCIKTIPEAIKNLQMLTYLNISRNLLSTLPKYLFDLPLKVLVVSNNKLVSIPEEIGKLKDLMELDISCNEIQVLPQQMGKLHSLRELNIRRNNLHVLPDELGDLPLVKLDFSCNKVTEIPVCYRKLHHLQVIILDNNPLQVPPAQICLKGKVHIFKYLNIQACCRMDKKPDSLDLPSLSKRMPSQPLTDSMEDFYPNKNHGPDSGIGSDNGEKRLSTTEPSDDDTVSLHSQVSESNREQTSRNDSHIIGSKTDSQKDQEVYDFVDPNTEDVAVPEQGNAHIGSFVSFFKGKEKCSEKSRKNEELGDEKRLEKEQLLAEEEDDDLKEVTDLRKIAAQLLQQEQKNRILNHSTSVMRNKPKQTVECEKSVSADEVNSPLSPLTWQPLENQKDQIDEQPWPESHPIIWQSEERRRSKQIRKEYFKYKSMRKSSSGNENDEQDSDNANMSTQSPVSSEEYDRTDGFSHSPFGLKPRSAFSRSSRQEYGAADPGFTMRRKMEHLREEREQIRQLRNNLESRLKVILPDDIGAALMDGVVLCHLANHIRPRSVASIHVPSPAVPKLSMAKCRRNVENFLDACKKLGVSQERLCLPHHILEERGLVKVGVTVQALLELPTTKASQLSVA

SEQ ID NO: 746086 - protein, 123 aa, Homo sapiens
  misc_feature (1)..(1): Xaa can be any naturally occurring amino acid
  misc_feature (63)..(63): Xaa can be any naturally occurring amino acid
XSAQPRIMPLNSQELTPSCFAAYSPVLSCSFLIVNIPQYQLSETWDLAFHYHIQIKGVYLFIXLFIFFLRRILALSPRLECNGAISAHCNLRLQGSSDSLASASQVAGIIDTRHHAWLISVFL

SEQ ID NO: 746087 - protein, 131 aa, Homo sapiens
MTLGAAAQLRLRMEDPGRLLTLPTAARLWLCTKDPPRQAFLPCGQRHSWGCAPQDPAGHSYPADCGTSVARSFYGVDSSTAAAAHYGPRRAFLPCRLWQGGGGAPTMQASVLPCDWQHRLRSQDSGGSPYS

SEQ ID NO: 746088 - protein, 129 aa, Homo sapiens
DQLSGSHSLLQLFLHFQQIISDVLLIPFIPQTAVITMSLIILFCYNNLCYHLFSPDHTILTTFSWSPFCLSLIHTDARMIFRKHKYDPETPSLLKIQKISRAQWHTSVISGAQEAETGESLEPGSRRLQ

SEQ ID NO: 746089 - protein, 486 aa, Homo sapiens
MSSSSPPAGAASAAISASEKVDGFTRKSVRKAQRQKRSQGSSQFRSQGSQAELHPLPQLKDATSNEQQELFCQKLQQCCILFDFMDSVSDLKSKEIKRATLNELVEYVSTNRGVIVESAYSDIVKMISANIFRTLPPSDNPDFDPEEDEPTLEASWPHIQLVYEFFLRFLESPDFQPSIAKRYIDQKFVQQLLELFDSEDPRERDFLKTVLHRIYGKFLGLRAFIRKQINNIFLRFIYETEHFNGVAELLEILGSIINGFALPLKAEHKQFLMKVLIPMHTAKGLALFHAQLAYCVVQFLEKDTTLTEPVIRGLLKFWPKTCSQKEVMFLGEIEEILDVIEPTQFKKIEEPLFKQISKCVSSSHFQVAERALYFWNNEYILSLIEENIDKILPIMFASLYKISKEHWNPTIVALVYNVLKTLMEMNGKLFDDLTSSYKAERQREKKKELEREELWKKLEELKLKKALEKQNSAYNMHSILSNTSAE

SEQ ID NO: 746090 - protein, 260 aa, Homo sapiens
ADRSRSYLRFIYETEHFNGVAELLEILGSIINGFALPLKAEHKQFLMKVLIPMHTAKGLALFHAQLAYCVVQFLEKDTTLTEPVIRGLLKFWPKTCSQKEVMFLGEIEEILDVIEPTQFKKIEEPLFKQISKCVSSSHFQVAERALYFWNNEYILSLIEENIDKILPIMFASLYKISKEHWNPTIVALVYNVLKTLMEMNGKLFDDLTSSYKAERQREKKKELEREELWKKLEELKLKKALEKQNSAYNMHSILSNTSAE

SEQ ID NO: 746091 - protein, 486 aa, Homo sapiens; identical to SEQ ID NO: 746089

SEQ ID NO: 746092 - protein, 486 aa, Homo sapiens; identical to SEQ ID NO: 746089

SEQ ID NO: 746093 - protein, 402 aa, Homo sapiens
MDSVSDLKSKEIKRATLNELVEYVSTNRGVIVESAYSDIVKMISANIFRTLPPSDNPDFDPEEDEPTLEASWPHIQLVYEFFLRFLESPDFQPSIAKRYIDQKFVQQLLELFDSEDPRERDFLKTVLHRIYGKFLGLRAFIRKQINNIFLRFIYETEHFNGVAELLEILGSIINGFALPLKAEHKQFLMKVLIPMHTAKGLALFHAQLAYCVVQFLEKDTTLTEPVIRGLLKFWPKTCSQKEVMFLGEIEEILDVIEPTQFKKIEEPLFKQISKCVSSSHFQVAERALYFWNNEYILSLIEENIDKILPIMFASLYKISKEHWNPTIVALVYNVLKTLMEMNGKLFDDLTSSYKAERQREKKKELEREELWKKLEELKLKKALEKQNSAYNMHSILSNTSAE

SEQ ID NO: 746094 - protein, 169 aa, Homo sapiens
FLQLTLNTCDGCWQEALRPLSLEMPYYSQWHWEGLEELFRGPSGPAPVFRGPSRPAPVFSGPSGSFPVFSRHSGSAPGFSGPSGSGPVLTLKGSECAFQKLVSENILAKALSDRHYCSAPQMVHQELFVQVAERQGCITFTPAFVFVSWIALRSLQRPCVMEGRKSARF

SEQ ID NO: 746095 - protein, 322 aa, Homo sapiens
MGQNQTSISDFLLLGLPIQPEQQNLCYALFLAMYLTTLLGNLLIIVLIRLDSHLHTPVYLFLSNLSFSDLCFSSVTMPKLLQNMQNQDPSIPYADCLTQMYFFLYFSDLESFLLVAMAYDRYVAICFPMHYTAICFLLHYTAIMSPMLCLSVVALSWVLTTFHAMLHTLLMARLCFCADNVIPHFFCDMSALLKLACSDTRVNEWVIFIMGGLILVIPFLLILGSYARIVSSILKVPSSKGICKAFSTCGSHLSVVSLFYGTVIGLYLCPSANSSTLKDTVMAMMYTVVTPMLTPFIYSLRNRDMKGALERVICKRKNPFLL

SEQ ID NO: 746096 - protein, 377 aa, Homo sapiens
MAADLGPWNDTINGTWDGDELGYRCRFNEDFKYVLLPVSYGVVCVLGLCLNAVALYIFLCRLKTWNASTTYMFHLAVSDALYAASLPLLVYYYARGDHWPFSTVLCKLVRFLFYTNLYCSILFLTCISVHRCLGVLRPLRSLRWGRARYARRVAGAVWVLVLACQAPVLYFVTTSARGGRVTCHDTSAPELFSRFVAYSSVMLGLLFAVPFAVILVCYVLMARRLLKPAYGTSGGLPRAKRKSVRTIAVVLAVFALCFLPFHVTRTLYYSFRSLDLSCHTLNAINMAYKVTRPLASANSCLDPVLYFLAGQRLVRFARDAKPPTGPSPATPARRRLGLRRSDRTDMQRIEDVLGSSEDSRRTESTPAGSENTKDIRL

SEQ ID NO: 746097 - protein, 377 aa, Homo sapiens; identical to SEQ ID NO: 746096

SEQ ID NO: 746098 - protein, 377 aa, Homo sapiens; identical to SEQ ID NO: 746096

SEQ ID NO: 746099 - protein, 377 aa, Homo sapiens; identical to SEQ ID NO: 746096

SEQ ID NO: 746100 - protein, 74 aa, Homo sapiens
GEDATCKGHRGRGEPNLGLQTGRQEVSVDKLLSDVLLWPHSNRGGERLLTGTGRLLRMMNVFRSEMSGDGCTTS

SEQ ID NO: 746101 - protein, 124 aa, Homo sapiens
MPTPTFLAKLSEAFVTWRHCSCQLRSWKTWPLLSCPGPGPSCQLDVGISAPSRTPQPGKMPGRLEKRRDGGTPCVATEQHTQLFSATMWERNDASVELPMAGAAPYSILTFTPNYSVAMAKGIF

SEQ ID NO: 746102 - protein, 124 aa, Homo sapiens; identical to SEQ ID NO: 746101

SEQ ID NO: 746103 - protein, 74 aa, Homo sapiens; identical to SEQ ID NO: 746100

SEQ ID NO: 746104 - protein, 124 aa, Homo sapiens; identical to SEQ ID NO: 746101

SEQ ID NO: 746105 - protein, 162 aa, Homo sapiens
MTTQAPTFTQPLQSVVVLEGSTATFEAHISGFPVPEVSWFRDGQVISTSTLPGVQISFSDGRAKLTIPAVTKANSGRYSLKATNGSGQATSTAELLVKAETAPPNFVQRLQSMTVRQGSQVRLQVRVTGIPTPVVEVLPGMEPKSRAPLISKFHKKATSTAY

SEQ ID NO: 746106 - protein, 1211 aa, Homo sapiens
MDPPAGAARRLLCPALLLLLLLLPPPLLPPPPPPANARLAAAADPPGGPLGHGAERILAVPVRTDAQGRLVSHVVSAATSRAGVRARRAAPVRTPSFPGGNEEEPGSHLFYNVTVFGRDLHLRLRPNARLVAPGATMEWQGEKGTTRVEPLLGSCLYVGDVAGLAEASSVALSNCDGLAGLIRMEEEEFFIEPLEKGLAAQEAEQGRVHVVYRRPPTSPPLGGPQALDTGASLDSLDSLSRALGVLEEHANSSRRRARRHAADDDYNIEVLLGVDDSVVQFHGKEHVQKYLLTLMNIVNEIYHDESLGAHINVVLVRIILLSYGKSMSLIEIGNPSQSLENVCRWAYLQQKPDTGHDEYHDHAIFLTRQDFGPSGMQGYAPVTGMCHPVRSCTLNHEDGFSSAFVVAHETGHVLGMEHDGQGNRCGDEVRLGSIMAPLVQAAFHRFHWSRCSQQELSRYLHSYDCLLDDPFAHDWPALPQLPGLHYSMNEQCRFDFGLGYMMCTAFRTFDPCKQLWCSHPDNPYFCKTKKGPPLDGTMCAPGKHCFKGHCIWLTPDILKRDGSWGAWSPFGSCSRTCGTGVKFRTRQCDNPHPANGGRTCSGLAYDFQLCSRQDCPDSLADFREEQCRQWDLYFEHGDAQHHWLPHEHRDAKERCHLYCESRETGEVVSMKRMVHDGTRCSYKDAFSLCVRGDCRKVGCDGVIGSSKQEDKCGVCGGDNSHCKVVKGTFTRSPKKHGYIKMFEIPAGARHLLIQEVDATSHHLAVKNLETGKFILNEENDVDASSKTFIAMGVEWEYRDEDGRETLQTMGPLHGTITVLVIPVGDTRVSLTYKYMIHEDSLNVDDNNVLEEDSVVYEWALKKWSPCSKPCGGGSQFTKYGCRRRLDHKMVHRGFCAALSKPKAIRRACNPQECSQPVWVTGEWEPCSQTCGRTGMQVRSVRCIQPLHDNTTRSVHAKHCNDARPESRRACSRELCPGRWRAGPWSQCSVTCGNGTQERPVPCRTADDSFGICQEERPETARTCRLGPCPRNISDPSKKSYVVQWLSRPDPDSPIRKISSKGHCQGDKSIFCRMEVLSRYCSIPGYNKLSCKSCNLYNNLTNVEGRIEPPPGKHNDIDVFMPTLPVPTVAMEVRPSPSTPLEVPLNASSTNATEDHPETNAVDEPYKIHGLEDEVQPPNLIPRRPSPYEKTRNQRIQELIDEMRKKEMLGKF

SEQ ID NO: 746107 - protein, 566 aa, Homo sapiens
MDPPAGAARRLLCPALLLLLLLLPPPLLPPPPPPANARLAAAADPPGGPLGHGAERILAVPVRTDAQGRLVSHVVSAATSRAGVRARRAAPVRTPSFPGGNEEEPGSHLFYNVTVFGRDLHLRLRPNARLVAPGATMEWQGEKGTTRVEPLLGSCLYVGDVAGLAEASSVALSNCDGLAGLIRMEEEEFFIEPLEKGLAAQEAEQGRVHVVYRRPPTSPPLGGPQALDTGASLDSLDSLSRALGVLEEHANSSRRRARRHAADDDYNIEVLLGVDDSVVQFHGKEHVQKYLLTLMNIVNEIYHDESLGAHINVVLVRIILLSYGKSMSLIEIGNPSQSLENVCRWAYLQQKPDTGHDEYHDHAIFLTRQDFGPSGMQGYAPVTGMCHPVRSCTLNHEDGFSSAFVVAHETGHVLGMEHDGQGNRCGDEVRLGSIMAPLVQAAFHRFHWSRCSQQELSRYLHSYDCLLDDPFAHDWPALPQLPGLHYSMNEQCRFDFGLGYMMCTAFRTFDPCKQLWCSHPDNPYFCKTKKGPPLDGTMCAPGKFRPGAVAHACYPSTLGGQGRWIA

SEQ ID NO: 746108 - protein, 113 aa, Homo sapiens
SEKMTICVSVSEASTTHHCVETGSQEASAIYFTSGTSGLPKMAEHSYSSLGLKAKMDAGWTGLQASDIMWTISDTGWILNILGSLMEPWALGACTFVHLLPKFDPLVILKVFR

SEQ ID NO: 746109 - protein, 389 aa, Homo sapiens
SEKMTICVSVSEASTTHHCVETGSQEASAIYFTSGTSGLPKMAEHSYSSLGLKAKMDAGWTGLQASDIMWTISDTGWILNILGSLMEPWALGACTFVHLLPKFDPLVILKTLSSYPIKSMMGAPIVYRMLLQQDLSSYKFPHLQNCVTVGESLLPETLENWRAQTGLDIRESYGQTETGLTCMVSKTMKIKPGYMGTAASCYDVQVIDDKGNVLPPGTEGDIGIRVKPIRPIGIFSGYVENPDKTAANIRGDFWLLGDRGIKDEDGYFQFMGRADDIINSSGYRIGPSEVENALMKHPAVVETAVISSPDPVRGEVVKAFVVLASQFLSHDPEQLTKELQQHVKSVTAPYKYPRKIEFVLNLPKTVTGKIQRTKLRDKEWKMSGKARAQ

SEQ ID NO: 746110 - protein, 389 aa, Homo sapiens; identical to SEQ ID NO: 746109

SEQ ID NO: 746111 - protein, 389 aa, Homo sapiens; identical to SEQ ID NO: 746109

SEQ ID NO: 746112 - protein, 243 aa, Homo sapiens
SEKMTICVSVSEASTTHHCVETGSQEASAIYFTSGTSGLPKMAEHSYSSLGLKAKMDAGWTGLQASDIMWTISDTGWILNILGSLMEPWALGACTFVHLLPKFDPLVILKTLSSYPIKSMMGAPIVYRMLLQQDLSSYKFPHLQNCVTVGESLLPETLENWRAQTGLDIRESYGQTETGLTCMVSKTMKIKPGYMGTAASCYDVQVIDDKGNVLPPGTEGDIGIRVKPIRPIGIFSGYVVSSP

SEQ ID NO: 746113 - protein, 203 aa, Homo sapiens
SEKMTICVSVSEASTTHHCVETGSQEASAIYFTSGTSGLPKMAEHSYSSLGLKAKMDAGWTGLQASDIMWTISDTGWILNILGSLMEPWALGACTFVHLLPKFDPLVILKTLSSYPIKSMMGAPIVYRMLLQQDLSSYKFPHLQNCVTVGESLLPETLENWRAQTGLDIRESYGQTETVPVPRGTMGWVHFLGFKILFDNKNC

SEQ ID NO: 746114 - protein, 389 aa, Homo sapiens; identical to SEQ ID NO: 746109

SEQ ID NO: 746115 - protein, 389 aa, Homo sapiens; identical to SEQ ID NO: 746109

SEQ ID NO: 746116 - protein, 265 aa, Homo sapiens
SEKMTICVSVSEASTTHHCVETGSQEASAIYFTSGTSGLPKMAEHSYSSLGLKAKMDAGWTGLQASDIMWTISDTGWILNILGSLMEPWALGACTFVHLLPKFDPLVILKTLSSYPIKSMMGAPIVYRMLLQQDLSSYKFPHLQNCVTVGESLLPETLENWRAQTGLDIRESYGQTETGLTCMVSKTMKIKPGYMGTAASCYDVQVIDDKGNVLPPGTEGDIGIRVKPIRPIGIFSGYVVRNCAPPPLFPSEDGSTKRDEGGQMF

SEQ ID NO: 746117 - protein, 234 aa, Homo sapiens
MARGSAVAWAALGPLLWGCALGLQGGMLYPQESPSRECKELDGLWSFRADFSDNRRRGFEEQWYRRPLWESGPTVDMPVPSSFNDISQDWRLRHFVGWVWYEREVILPERWTQDLRTRVVLRIGSAHSYAIVLQYVDVICLNSYYSWYHDYGHLELIQLQLATQFENWYKKYQKPIIQSEYGAETIAGFHQDPPLMFTEGVPEKSARAGTIWVWIKNRRKICGWGAHLEFADFM

SEQ ID NO: 746118 - protein, 175 aa, Homo sapiens
MRGATSPSRPTSATWSRYPKGYFVQNTYFDFFNYAGLQRSVLLYTTPTTYIDDITVTTSVEQDSGLVNYQISVKGSNLFKLEVRLLDAENKVVANGTGTQGQLKVPGVSLWWPYLMHERPAYLYSSEVQLTAKTSLGPVSDFYTPPCEIRTCAVTKKQFLINWETFYFSRVPKHE

SEQ ID NO: 746119 - protein, 80 aa, Homo sapiens
AISGQGREAPESPAVGVGEPGPPADFFPWASPSWGPQEVKGQRAWGRRLGGRGNRSTLEGRGGLGRRRKGSCRALSRGKG

SEQ ID NO: 746120 - protein, 188 aa, Homo sapiens
MARGSAVAWAALGPLLWGCALGLQGGMLYPQESPSRECKELDGLWSFRADFSDNRRRGFEEQWYRRPLWESGPTVDMPVPSSFNDISQDWRLRHFVGWVWYEREVILPERWTQDLRTRVVLRIGSAHSYAIVWVNGVDTLEHEGGYLPFEADISNLVQVGPLPPGSESLSPSTTHSPPPPCHQGPSNT

SEQ ID NO: 746121 - protein, 162 aa, Homo sapiens
MPSWYPKGYFVQNTYFDFFNYAGLQRSVLLYTTPTTYIDDITVTTSVEQDSGLVNYQISVKGSNLFKLEVRLLDAENKVVANGTGTQGQLKVPGVSLWWPYLMHERPAYLYSSEVQLTAKTSLGPVSDFYTLPGEIRTCAVTKKQFLINWETFYFSRVPKHE

SEQ ID NO: 746122 - protein, 316 aa, Homo sapiens
MARGSAVAWAALGPLLWGCALGLQGGMLYPQESPSRECKELDGLWSFRADFSDNRRRGFEEQWYRRPLWESGPTVDMPVPSSFNDISQDWRLRHFVGWVWYEREVILPERWTQDLRTRVVLRIGSAHSYAIVWVNGVDTLEHEGGYLPFEATSATWSRYPKGYFVQNTYFDFFNYAGLQRSVLLYTTPTTYIDDITVTTSVEQDSGLVNYQISVKGSNLFKLEVRLLDAENKVVANGTGTQGQLKVPGVSLWWPYLMHERPAYLYSSEVQLTAKTSLGPVSDFYTPPCEIRTCAVTKKQFLINWETFYFSRVPKHE

SEQ ID NO: 746123 - protein, 90 aa, Homo sapiens
YPKGYFVQNTYFDFFNYAGLQRSVLLYTTPTTYIDDITVTTSVEQDSGEGFWEDPLSGAQGGSVCSLFGKLSQEKGAPSISTPSQIPFHL

SEQ ID NO: 746124 - protein, 109 aa, Homo sapiens
MSITDVLSADDIAAALQECQDPDTFEPQKFFQTSGLSKMSASQVKDVFRFIDNDQSGYLDEEELKFFLQKFESGARELTESETKSLMAAADNDGDGKIGAEEFQEMVHS

SEQ ID NO: 746125 - protein, 109 aa, Homo sapiens
SVPNSDVFIRNTRGPSEVIPAPGKLTWHGAPFCPGLFHPICPGPRACPVWSSLSCLVCHHVMLGWLVFAASLPKLTDVSARDHQLPSRMTVLSFKVQRLPFQSGPSPTS

SEQ ID NO: 746126 - protein, 309 aa, Homo sapiens
MRENNQSSTLEFILLGVTGQQEQEDFFYILFLFIYPITLIGNLLIVLAICSDVRLHNPMYFLLANLSLVDIFFSSVTIPKMLANHLLGSKSISFGGCLTQMYFMIALGNTDSYILAAMAYDRAVAISRPLHYTTIMSPRSCIWLIAGSWVIGNANALPHTLLTASLSFCGNQEVANFYCDITPLLKLSCSDIHFHVKMMYLGVGIFSVPLLCIIVSYIRVFSTVFQVPSTKGVLKAFSTCGSHLTVVSLYYGTVMGTYFRPLTNYSLKDAVITVMYTAVTPMLNPFIYSLRNRDMKAALRKLFNKRISS

SEQ ID NO: 746127 - protein, 176 aa, Homo sapiens
RSGARPSSASAAQPVIALRPSPAPSAPHGGWSRRGKEKVRLGVITNPSPEGEETGIQQRRAAAGRSHLEMESRPPPPPPTSSSSSSSSSHPGSLPKPLGLQPLPRPEVSFLTEYLRKLKACEGGGVEIAAASFPRIYLMGMCSRQDRIQKDIDVADPERSRAEDCLSAGVKAILKA

SEQ ID NO: 746128 - protein, 98 aa, Homo sapiens
MSVRGKAGKGLGKGGAKCHRKVLSDNIQGITKCTIRRLARHGGVKRILGLIYEETRRVFKVFLENVIWYAVTNTEHAKRKTVTAMAVVYVLKRQGRTL

SEQ ID NO: 746129 - protein, 99 aa, Homo sapiens [sequence omitted]

SEQ ID NO: 746130 - protein, 91 aa, Homo sapiens
LQREQDLRLINEGDVPHLPVNRAYSVNGALRSPNMDISSSPNIRLRRHSSQIEGVRQMHNNAPRSQMATERDLMAWSRRVVVNELNNGVSR

SEQ ID NO: 746131 - protein, 659 aa, Homo sapiens
QWKSHLRPTAEVPGVPSTRVHTAAGMAHYNFKKITVVPSAKDFIDLTLSKTQRKTPTVIHKHYQIHRIRHFYMRKVKFTQQNYHDRLSQILTDFPKLDDIHPFYADLMNILYDKDHYKLALGQINIAKNLVDNVAKDYVRLMKYGDSLYRCKQLKRAALGRMCTVIKRQKQSLEYLEQVRQHLSRLPTIDPNTRTLLLCGYPNVGKSSFINKVTRADVDVQPYAFTTKSLFVGHMDYKYLRWQVVDTPGILDHPLEDRNTIEMQAITALAHLRAAVLYVMDLSEQCGHGLREQLELFQNIRPLFINKPLIVVANKCDVKRIAELSEDDQKIFTDLQSEGFPVIETSTLTEEGVIKVKTEACDRLLAHRVETKMKGNKVNEVLNRLHLAIPTRRDDKERPPFIPEGVVARRKRMETEESRKKRERDLELEMGDDYILDLQKYWDLMNLSEKHDKIPEIWEGHNIADYIDPAIMKKLEELEKEEELRTAAGEYDSVSESEDEEMLEIRQLAKQIREKKKLKILESKEKNTQGPRMPRTAKKVQRTVLEKEMRSLGVDMDDKDDAHYAVQARRSRSITRKRKREDSAPPSSVARSGSCSRTPRDVSGLRDVKMVKKAKTMMKNAQKKMNRLGKKGEADRHVFDMKPKHLLSGKRKAGKKDRR

SEQ ID NO: 746132 - protein, 659 aa, Homo sapiens; identical to SEQ ID NO: 746131

SEQ ID NO: 746133 - protein, 659 aa, Homo sapiens; identical to SEQ ID NO: 746131

SEQ ID NO: 746134 - protein, 645 aa, Homo sapiens
QWKSHLRPTAEVPGVPSTRVHTAAGMAHYNFKKITVVPSAKDFIDLTLSKTQRKTPTVIHKHYQIHRIRHFYMRKVKFTQQNYHDRLSQILTDFPKLDDIHPFYADLMNILYDKDHYKLALGQINIAKNLVDNVAKDYVRLMKYGDSLYRCKQLKRAALGRMCTVIKRQKQSLEYLEQVRQHLSRLPTIDPNTRTLLLCGYPNVGKSSFINKVTRADVDVQPYAFTTKSLFVGHMDYKYLRWQVVDTPGILDHPLEDRNTIEMQAITALAHLRAAVLYVMDLSEQCGHGLREQLELFQNIRPLFINKPLIVVANKCDVKRIAELSEDDQKIFTDLQSEGFPVIETSTLTEEGVIKVKTEACDRLLAHRVETKMKGNKVNEVLNRLHLAIPTRRDDKERPPFIPEGVVARRKRMETEESRKKRERDLELEMGDDYILDLQKYWDLMNLSEKHDKIPEIWEGHNIADYIDPAIMKKLEELEKEEELRTAAGEYDSVSESEDEEMLEIRQLAKQIREKKKLKILESKEKNTQGPRMPRTAKKVQRTVLEKEMRSLGVDMDDKDDAHYAVQARRSPSSVARSGSCSRTPRDVSGLRDVKMVKKAKTMMKNAQKKMNRLGKKGEADRHVFDMKPKHLLSGKRKAGKKDRR

SEQ ID NO: 746135 - protein, 587 aa, Homo sapiens
MRKVKFTQQNYHDRLSQILTDFPKLDDIHPFYADLMNILYDKDHYKLALGQINIAKNLVDNVAKDYVRLMKYGDSLYRCKQLKRAALGRMCTVIKRQKQSLEYLEQVRQHLSRLPTIDPNTRTLLLCGYPNVGKSSFINKVTRADVDVQPYAFTTKSLFVGHMDYKYLRWQVVDTPGILDHPLEDRNTIEMQAITALAHLRAAVLYVMDLSEQCGHGLREQLELFQNIRPLFINKPLIVVANKCDVKRIAELSEDDQKIFTDLQSEGFPVIETSTLTEEGVIKVKTEACDRLLAHRVETKMKGNKVNEVLNRLHLAIPTRRDDKERPPFIPEGVVARRKRMETEESRKKRERDLELEMGDDYILDLQKYWDLMNLSEKHDKIPEIWEGHNIADYIDPAIMKKLEELEKEEELRTAAGEYDSVSESEDEEMLEIRQLAKQIREKKKLKILESKEKNTQGPRMPRTAKKVQRTVLEKEMRSLGVDMDDKDDAHYAVQARRSRSITRKRKREDSAPPSSVARSGSCSRTPRDVSGLRDVKMVKKAKTMMKNAQKKMNRLGKKGEADRHVFDMKPKHLLSGKRKAGKKDRR

SEQ ID NO: 746136 - protein, 659 aa, Homo sapiens; identical to SEQ ID NO: 746131

SEQ ID NO: 746137 - protein, 390 aa, Homo sapiens
RPAYYYKNFRPRRPEQCGHGLREQLELFQNIRPLFINKPLIVVANKCDVKRIAELSEDDQKIFTDLQSEGFPVIETSTLTEEGVIKVKTEACDRLLAHRVETKMKGNKVNEVLNRLHLAIPTRRDDKERPPFIPEGVVARRKRMETEESRKKRERDLELEMGDDYILDLQKYWDLMNLSEKHDKIPEIWEGHNIADYIDPAIMKKLEELEKEEELRTAAGEYDSVSESEDEEMLEIRQLAKQIREKKKLKILESKEKNTQGPRMPRTAKKVQRTVLEKEMRSLGVDMDDKDDAHYAVQARRSRSITRKRKREDSAPPSSVARSGSCSRTPRDVSGLRDVKMVKKAKTMMKNAQKKMNRLGKKGEADRHVFDMKPKHLLSGKRKAGKKDRR

SEQ ID NO: 746138 - protein, 323 aa, Homo sapiens
GCWSLLQESFRLTEEGVIKVKTEACDRLLAHRVETKMKGNKVNEVLNRLHLAIPTRRDDKERPPFIPEGVVARRKRMETEESRKKRERDLELEMGDDYILDLQKYWDLMNLSEKHDKIPEIWEGHNIADYIDPAIMKKLEELEKEEELRTAAGEYDSVSESEDEEMLEIRQLAKQIREKKKLKILESKEKNTQGPRMPRTAKKVQRTVLEKEMRSLGVDMDDKDDAHYAVQARRSRSITRKRKREDSAPPSSVARSGSCSRTPRDVSGLRDVKMVKKAKTMMKNAQKKMNRLGKKGEADRHVFDMKPKHLLSGKRKAGKKDRR

SEQ ID NO: 746139 - protein, 556 aa, Homo sapiens
  misc_feature (552)..(552): Xaa can be any naturally occurring amino acid
QWKSHLRPTAEVPGVPSTRVHTAAGMAHYNFKKITVVPSAKDFIDLTLSKTQRKTPTVIHKHYQIHRIRHFYMRKVKFTQQNYHDRLSQILTDFPKLDDIHPFYADLMNILYDKDHYKLALGQINIAKNLVDNVAKDYVRLMKYGDSLYRCKQLKRAALGRMCTVIKRQKQSLEYLEQVRQHLSRLPTIDPNTRTLLLCGYPNVGKSSFINKVTRADVDVQPYAFTTKSLFVGHMDYKYLRWQVVDTPGILDHPLEDRNTIEMQAITALAHLRAAVLYVMDLSEQCGHGLREQLELFQNIRPLFINKPLIVVANKCDVKRIAELSEDDQKIFTDLQSEGFPVIETSTLTEEGVIKVKTEACDRLLAHRVETKMKGNKVNEVLNRLHLAIPTRRDDKERPPFIPEGVVARRKRMETEESRKKRERDLELEMGDDYILDLQKYWDLMNLSEKHDKIPEIWEGHNIADYIDPAIMKKLEELEKEEELRTAAGEYDSVSESEDEEMLEIRQLAKQIREKKKLKILESKEKNTQGPRMPRTAKKKGTGFEPGDTMTXTTGK

SEQ ID NO: 746140 - protein, 158 aa, Homo sapiens [sequence omitted]

SEQ ID NO: 746141 - protein, 452 aa, Homo sapiens
QWKSHLRPTAEVPGVPSTRVHTAAGMAHYNFKKITVVPSAKDFIDLTLSKTQRKTPTVIHKHYQIHRIRHFYMRKVKFTQQNYHDRLSQILTDFPKLDDIHPFYADLMNILYDKDHYKLALGQINIAKNLVDNVAKDYVRLMKYGDSLYRCKQLKRAALGRMCTVIKRQKQSLEYLEQVRQHLSRLPTIDPNTRTLLLCGYPNVGKSSFINKVTRADVDVQPYAFTTKSLFVGHMDYKYLRWQVVDTPGILDHPLEDRNTIEMQAITALAHLRAAVLYVMDLSEQCGHGLREQLELFQNIRPLFINKPLIVVANKCDVKRIAELSEDDQKIFTDLQSEGFPVIETSTLTEEGVIKVKTEACDRLLAHRVETKMKGNKVNEVLNRLHLAIPTRRDDKERPPFIPEGVVARRKRMETEESRKKRERDLELEMGDDYILDLQKYWDYRRELLRPA

SEQ ID NO: 746142 - protein, 460 aa, Homo sapiens
QWKSHLRPTAEVPGVPSTRVHTAAGMAHYNFKKITVVPSAKDFIDLTLSKTQRKTPTVIHKHYQIHRIRHFYMRKVKFTQQNYHDRLSQILTDFPKLDDIHPFYADLMNILYDKDHYKLALGQINIAKNLVDNVAKDYVRLMKYGDSLYRCKQLKRAALGRMCTVIKRQKQSLEYLEQVRQHLSRLPTIDPNTRTLLLCGYPNVGKSSFINKVTRADVDVQPYAFTTKSLFVGHMDYKYLRWQVVDTPGILDHPLEDRNTIEMQAITALAHLRAAVLYVMDLSEQCGHGLREQLELFQNIRPLFINKPLIVVANKCDVKRIAELSEDDQKIFTDLQSEGFPVIETSTLTEEGVIKVKTEACDRLLAHRVETKMKGNKVNEVLNRLHLAIPTRRDDKVRRPLGQPWAHSTVSRCCLRAFSRSLPSSFTHSQVDIVGGPQFHLLAYIKDREGEESAERHMAP

SEQ ID NO: 746143 - protein, 278 aa, Homo sapiens
MLLEIYGFPTRRDDKERPPFIPEGVVARRKRMETEESRKKRERDLELEMGDDYILDLQKYWDLMNLSEKHDKIPEIWEGHNIADYIDPAIMKKLEELEKEEELRTAAGEYDSVSESEDEEMLEIRQLAKQIREKKKLKILESKEKNTQGPRMPRTAKKVQRTVLEKEMRSLGVDMDDKDDAHYAVQARRSRSITRKRKREDSAPPSSVARSGSCSRTPRDVSGLRDVKMVKKAKTMMKNAQKKMNRLGKKGEADRHVFDMKPKHLLSGKRKAGKKDRR

SEQ ID NO: 746144 - protein, 548 aa, Homo sapiens
QWKSHLRPTAEVPGVPSTRVHTAAGMAHYNFKKITVVPSAKDFIDLTLSKTQRKTPTVIHKHYQIHRIRHFYMRKVKFTQQNYHDRLSQILTDFPKLDDIHPFYADLMNILYDKDHYKLALGQINIAKNLVDNVAKDYVRLMKYGDSLYRCKQLKRAALGRMCTVIKRQKQSLEYLEQVRQHLSRLPTIDPNTRTLLLCGYPNVGKSSFINKVTRADVDVQPYAFTTKSLFVGHMDYKYLRWQVVDTPGILDHPLEDRNTIEMQAITALAHLRAAVLYVMDLSEQCGHGLREQLELFQNIRPLFINKPLIVVANKCDVKRIAELSEDDQKIFTDLQSEGFPVIETSTLTEEGVIKVKTEACDRLLAHRVETKMKGNKVNEVLNRLHLAIPTRRDDKERPPFIPEGVVARRKRMETEESRKKRERDLELEMGDDYILDLQKYWDLMNLSEKHDKIPEIWEGHNIADYIDPAIMKKLEELEKEEELRTAAGEYDSVSESEDEEMLEIRQLAKQIREKKKLKILESKEKNTQGPRMPRTAKKSLKRHGGAG

SEQ ID NO: 746145 - protein, 478 aa, Homo sapiens
QWKSHLRPTAEVPGVPSTRVHTAAGMAHYNFKKITVVPSAKDFIDLTLSKTQRKTPTVIHKHYQIHRIRHFYMRKVKFTQQNYHDRLSQILTDFPKLDDIHPFYADLMNILYDKDHYKLALGQINIAKNLVDNVAKDYVRLMKYGDSLYRCKQLKRAALGRMCTVIKRQKQSLEYLEQVRQHLSRLPTIDPNTRTLLLCGYPNVGKSSFINKVTRADVDVQPYAFTTKSLFVGHMDYKYLRWQVVDTPGILDHPLEDRNTIEMQAITALAHLRAAVLYVMDLSEQCGHGLREQLELFQNIRPLFINKPLIVVANKCDVKRIAELSEDDQKIFTDLQSEGFPVIETSTLTEEGVIKVKTEACDRLLAHRVETKMKGNKVNEVLNRLHLAIPTRRDDKERPPFIPEGVVARRKRMETEESRKKRERDLELEMGDDYILDLQKYWDLMNLSEKHDKIPEIWEGHNIADYIDPAIMKVCVTF

SEQ ID NO: 746146 - protein, 74 aa, Homo sapiens
LAGALLQICVVFMMAGVPPWSRVCYRRGGRVAVTHVVAQTAWPAGFKVHWFPNVILLMRIVWTLPDMLLAPPVT

SEQ ID NO: 746147 - protein, 312 aa, Homo sapiens
MALRPEDPSSGFRHGNVVAFIIEKMARHTKGPEFYFENISLSWEEVEDKLRAILEDSEVPSEVKEACTWGSLALGVRFAHRQGQLQNRRVQWLQGFAKLHRSAALVLASNLTELKEQQEMECNEATFQLQLTETSLAEVQRERDMLRWKLFHAELAPPQGQGQATVFPGLATAGGDWTEGAGEQEKEAVAAAGAAGGKGEERYAEAGPAPAEVLQGLGGGFRQPLGAIVAGKLHLCGAEGERSQVSTNSHVCLLWAWVHSLTGASSCPAPYLIHILIPMPFVRLLSHTQYTPFTSKGHRTGSNSDAFQLGGL

SEQ ID NO: 746148 - protein, 229 aa, Homo sapiens
MPCAQRSWLANLSVVAQLLNFGALCYGRQPQPGPVRFPDRRQEHFIKGLPEYHVVGPVRVDASGHFLSYGLHYPITSSRRKRDLDGSEDWVYYRISHEEKDLFFNLTVNQGFLSNSYIMEKRYGNLSHVKMMASSAPLCHLSGTVLQQGTRVGTAALSACHGLTGFFQLPHGDFFIEPVKKHPLVEGGYHPHIVYRRQKVPETKEPTCGLKGIVTHMSSWVEESVLFFW

SEQ ID NO: 746149 - protein, 229 aa, Homo sapiens; identical to SEQ ID NO: 746148

SEQ ID NO: 746150 - protein, 170 aa, Homo sapiens
PQQVFGDLDQVRMTSEGSDCRCKCIMRPLSKDACSRVRSGRARVEDFYTVETVSSGTDCRCSCTAPPSSLNPCENEWKMEKLKKQAPELLKLQSMVDLLEGTLYSMDLMKVHAYVHKVASQMNTLEESIKANLSRENEVVKDSVRHLSEQLRHYENHSAIMLGIKKELSR

SEQ ID NO: 746151 - protein, 106 aa, Homo sapiens
PQQVFGDLDQVRMTSEGSDCRCKCIMRPLSKDACSRVRSGRARVEDFYTVETVSSGTDCRCSCTAPPSSLNPCENEWKMEKLKKQAPELLKLHSSLGNRVRLRLKK

SEQ ID NO: 746152 - protein, 97 aa, Homo sapiens
PQQVFGDLDQVRMTSEGSDCRCKCIMRPLSKDACSRVRSGRARVEDFYTVETVSSGTDCRCSCTAPPSSLNPCENEWKMEKLKKQAPELLKGCSLYS

SEQ ID NO: 746153 - protein, 85 aa, Homo sapiens
QGPRTRAPKRPALGELTVCVPPATDLTVGKIYAAMMIMEYYRQSKAKKLQAMREEQVRCSPLWGHLGWGQWLACHHGNQLEYEGG

SEQ ID NO: 746154 - protein, 87 aa, Homo sapiens
MDLPVADDNTVHFNSTLMALIRTALDIKIAKGGADKQQMDAELRKEMMAIWPNLSQKTLDLLVTPHKCEELSPALGSNPPGQMEGEG

SEQ ID NO: 746155 - protein, 110 aa, Homo sapiens
MVTPLPPSPQNNFINLSFLRLFRAARLIKLLRQGYTIRILLWTFVQSFKALPYVCLLIAMLFFIYAIIGMQVFGNIGIDVEDEDSDEDEFQITEHNNFRTFFQALMLLFR

SEQ ID NO: 746156 - protein, 432 aa, Homo sapiens
MARFGDEMPARYGGGGSGAAAGVVVGSGGGRGAGGSRQGGQPGAQRMYKQSMAQRARTMALYNPIPVRQNCLTVNRSLFLFSEDNVVRKYAKKITEWPPFEYMILATIIANCIVLALEQHLPDDDKTPMSERLDDTEPYFIGIFCFEAGIKIIALGFAFHKGSYLRNGWNVMDFVVVLTGILATVGTEFDLRTLRAVRVLRPLKLVSGIPSLQVVLKSIMKAMIPLLQIGLLLFFAILIFAIIGLEFYMGKFHTTCFEEGTDDIQGESPAPCGTEEPARTCPNGTKCQPYWEGPNNGITQFDNILFAVLTVFQCITMEGWTDLLYNSNDASGNTWNWLYFIPLIIIGSFFMLNLVLGVLSGEFAKERERVENRRAFLKLRRQQQIERELNGYMEWISKAGEALSSWGPGMEIPGHGVQRESCSLEKAKLGGL

SEQ ID NO: 746157 - protein, 77 aa, Homo sapiens
RASIKSAKLENSTFFHKKERRMRFYIRRMVKTQAFYWTVLSLVALNTLCVAIVHYNQPEWLSDFLCEYHPAPPLPTP

SEQ ID NO: 746158 - protein, 217 aa, Homo sapiens
EAEGCRYQFRVALLGDAAVGKTSLLRSYVAGAPGAPEPEPEPEPTVGAECYRRALQLRAGPRVKLQLWDTAGHERFRCITRSFYRNVVGVLLVFDVTNRKSFEHIQDWHQEVMATQGPDKVIFLLVGHKSDLQSTRCVSAQEAEELAASLGMAFVETSVKNNCNVDLAFDTLADAIQQALQQGDIKLEEGWGGVRLIHKTQIPRSPSRKQHSGPCQC

SEQ ID NO: 746159 - protein, 105 aa, Homo sapiens
MATQGPDKVIFLLVGHKSDLQSTRCVSAQEAEELAASLGMAFVETSVKNNCNVDLAFDTLADAIQQALQQGDIKLEEGWGGVRLIHKTQIPRSPSRKQHSGPCQC

SEQ ID NO: 746160 - protein, 217 aa, Homo sapiens; identical to SEQ ID NO: 746158

SEQ ID NO: 746161 - protein, 784 aa, Homo sapiens
MASLDDPGEVREGFLCPLCLKDLQSFYQLHSHYEEEHSGEDRDVKGQIKSLVQKAKKAKDRLLKREGDDRAESGTQGYESFSYGGVDPYMWEPQELGAVRSHLSDFKKHRAARIDHYVVEVNKLIIRLEKLTAFDRTNTESAKIRAIEKSVVPWVNDQDVPFCPDCGNKFSIRNRRHHCRLCGSIMCKKCMELISLPLANKLTSASKESLSTHTSPSQSPNSVHGSRRGSISSMSSVSSVLDEKDDDRIRCCTHCKDTLLKREQQIDEKEHTPDIVKLYEKLRLCMEKVDQKAPEYIRMAASLNAGETTYSLEHASDLRVEVQKVYELIDALSKKILTLGLNQDPPPHPSNLRLQRMIRYSATLFVQEKLLGLMSLPTKEQFEELKKKRKEEMERKRAVERQAALESQRRLEERQSGLASRAANGEVASLRRGPAPLRKAEGWLPLSGGQGQSEDSDPLLQQIHNITSFIRQAKAAGRMDEVRTLQENLRQLQDEYDQQQTEKAIELSRRQAEEEDLQREQLQMLRERELEREREQFRVASLHTRTRSLDFREIGPFQLEPSREPRTHLAYALDLGSSPVPSSTAPKTPSLSSTQPTRVWSGPPAVGQERLPQSSMPQQHEGPSLNPFDEEDLSSPMEEATTGPPAAGVSLDPSARILKEYNPFEEEDEEEEAVAGNPFIQPDSPAPNPFSEEDEHPQQRLSSPLVPGNPFEEPTCINPFEMDSDSGPEAEEPIEEELLLQQIDNIKAYIFDAKQCGRLDEVEVLTENLRELKHTLAKQKGGTD

SEQ ID NO: 746162 - protein, 733 aa, Homo sapiens
FFGERRGLAMLTNLLLKFTGIRGKVETRLPQRNYKSFVSLPSFPLGAVRSHLSDFKKHRAARIDHYVVEVNKLIIRLEKLTAFDRTNTESAKIRAIEKSVVPWVNDQDVPFCPDCGNKFSIRNRRHHCRLCGSIMCKKCMELISLPLANKLTSASKESLSTHTSPSQSPNSVHGSRRGSISSMSSVSSVLDEKDDDRIRCCTHCKDTLLKREQQIDEKEHTPDIVKLYEKLRLCMEKVDQKAPEYIRMAASLNAGETTYSLEHASDLRVEVQKVYELIDALSKKILTLGLNQDPPPHPSNLRLQRMIRYSATLFVQEKLLGLMSLPTKEQFEELKKKRKEEMERKRAVERQAALESQRRLEERQSGLASRAANGEVASLRRGPAPLRKAEGWLPLSGGQGQSEDSDPLLQQIHNITSFIRQAKAAGRMDEVRTLQENLRQLQDEYDQQQTEKAIELSRRQAEEEDLQREQLQMLRERELEREREQFRVASLHTRTRSLDFREIGPFQLEPSREPRTHLAYALDLGSSPVPSSTAPKTPSLSSTQPTRVWSGPPAVGQERLPQSSMPQQHEGPSLNPFDEEDLSSPMEEATTGPPAAGVSLDPSARILKEYNPFEEEDEEEEAVAGNPFIQPDSPAPNPFSEEDEHPQQRLSSPLVPGNPFEEPTCINPFEMDSDSGPEAEEPIEEELLLQQIDNIKAYIFDAKQCGRLDEVEVLTENLRELKHTLAKQKGGTD

SEQ ID NO: 746163 - protein, 784 aa, Homo sapiens; identical to SEQ ID NO: 746161

SEQ ID NO: 746164 - protein, 599 aa, Homo sapiens
MCKKCMELISLPLANKLTSASKESLSTHTSPSQSPNSVHGSRRGSISSMSSVSSVLDEKDDDRIRCCTHCKDTLLKREQQIDEKEHTPDIVKLYEKLRLCMEKVDQKAPEYIRMAASLNAGETTYSLEHASDLRVEVQKVYELIDALSKKILTLGLNQDPPPHPSNLRLQRMIRYSATLFVQEKLLGLMSLPTKEQFEELKKKRKEEMERKRAVERQAALESQRRLEERQSGLASRAANGEVASLRRGPAPLRKAEGWLPLSGGQGQSEDSDPLLQQIHNITSFIRQAKAAGRMDEVRTLQENLRQLQDEYDQQQTEKAIELSRRQAEEEDLQREQLQMLRERELEREREQFRVASLHTRTRSLDFREIGPFQLEPSREPRTHLAYALDLGSSPVPSSTAPKTPSLSSTQPTRVWSGPPAVGQERLPQSSMPQQHEGPSLNPFDEEDLSSPMEEATTGPPAAGVSLDPSARILKEYNPFEEEDEEEEAVAGNPFIQPDSPAPNPFSEEDEHPQQRLSSPLVPGNPFEEPTCINPFEMDSDSGPEAEEPIEEELLLQQIDNIKAYIFDAKQCGRLDEVEVLTENLRELKHTLAKQKGGTD

SEQ ID NO: 746165 - protein, 180 aa, Homo sapiens
MQAEGRGTGGSTGDADGPGGPGIPDGPGGNAGGPGEAGATGGRGPRGAGAARASGPGGGAPRGPHGGAASGLNGCCRCGARGPESRLLEFYLAMPFATPMEAELARRSLAQDAPPLPVPGVLLKEFTVSGNILTIRLTAADHRQLQLSISSCLQQLSLLMWITQCFLPVFLAQPPSGQRR

SEQ ID NO: 746166 - protein, 168 aa, Homo sapiens
MQAEGRGTGGSTGDADGPGGPGIPDGPGGNAGGPGEAGATGGRGPRGAGAARASGPGGGAPRGPHGGAASGLNGCCRCGARGPESRLLEFYLAMPFATPMEAELARRSLAQDAPPLPVPGVLLKEFTVSGNILTMSVQDQDRDGAWVGGGHSVAGWGLGSAYTPRSGC

SEQ ID NO: 746167 - protein, 108 aa, Homo sapiens
SPVSTVLESKGGPSSGAEGKGGACRVSREPLLVREGARSGLRTPAGTASPSSGGSRLIWAHEQEERRHPGLTSRPCSRLGAFWQTHLDLGDSLISCSHDLQGWQLSQA

SEQ ID NO: 746168 - protein, 128 aa, Homo sapiens
DNWNADPPLMMTNGGFIFSHRFLLEPQLLAALDSYCHNLRRKRNDSLFKSSFLQPFINRKIPGRERSESNMCQSLLSCTNSQDWARSCKPLYQLLSQGGPGYDDSSQQNSGNRKGKVLPKEQKIHFLK

SEQ ID NO: 746169 - protein, 651 aa, Homo sapiens
MARGSAVAWAALGPLLWGCALGLQGGMLYPQESPSRECKELDGLWSFRADFSDNRRRGFEEQWYRRPLWESGPTVDMPVPSSFNDISQDWRLRHFVGWVWYEREVILPERWTQDLRTRVVLRIGSAHSYAIVWVNGVDTLEHEGGYLPFEADISNLVQVGPLPSRLRITIAINNTLTPTTLPPGTIQYLTDTSKYPKGYFVQNTYFDFFNYAGLQRSVLLYTTPTTYIDDITVTTSVEQDSGLVNYQISVKGSNLFKLEVRLLDAENKVVANGTGTQGQLKVPGVSLWWPYLMHERPAYLYSLEVQLTAQTSLGPVSDFYTLPVGIRTVAVTKSQFLINGKPFYFHGVNKHEDADIRGKGFDWPLLVKDFNLLRWLGANAFRTSHYPYAEEVMQMCDRYGIVVIDECPGVGLALPQFFNNVSLHHHMQVMEEVVRRDKNHPAVVMWSVANEPASHLESAGYYLKMVIAHTKSLDPSRPVTFVSNSNYAADKGAPYVDVICLNSYYSWYHDYGHLELIQLQLATQFENWYKKYQKPIIQSEYGAETIAGFHQDPPLMFTEEYQKSLLEQYHLGLDQKRRKYVVGELIWNFADFMTEQSPTRVLGNKKGIFTRQRQPKSAAFLLRERYWKIANETRYPHSVAKSQCLENSPFT

SEQ ID NO: 746170 - protein, 437 aa, Homo sapiens
GFPRKREAIVRNRARSGKHSKLREETQWLVNYQISVKGSNLFKLEVRLLDAENKVVANGTGTQGQLKVPGVSLWWPYLMHERPAYLYSLEVQLTAQTSLGPVSDFYTLPVGIRTVAVTKSQFLINGKPFYFHGVNKHEDADIRGKGFDWPLLVKDFNLLRWLGANAFRTSHYPYAEEVMQMCDRYGIVVIDECPGVGLALPQFFNNVSLHHHMQVMEEVVRRDKNHPAVVMWSVANEPASHLESAGYYLKMVIAHTKSLDPSRPVTFVSNSNYAADKGAPYVDVICLNSYYSWYHDYGHLELIQLQLATQFENWYKKYQKPIIQSEYGAETIAGFHQDPPLMFTEEYQKSLLEQYHLGLDQKRRKYVVGELIWNFADFMTEQSPTRVLGNKKGIFTRQRQPKSAAFLLRERYWKIANETRYPHSVAKSQCLENSPFT

SEQ ID NO: 746171 - protein, 723 aa, Homo sapiens
MARGSAVAWAALGPLLWGCALGLQGGMLYPQESPSRECKELDGLWSFRADFSDNRRRGFEEQWYRRPLWESGPTVDMPVPSSFNDISQDWRLRHFVGWVWYEREVILPERWTQDLRTRVVLRIGSAHSYAIVWVNGVDTLEHEGGYLPFEADISNLVQVGPLPSRLRITIAINNTLTPTTLPPGTIQYLTDTSKYPKGYFVQNTYFDFFNYAGLQRSVLLYTTPTTYIDDITVTTSVEQDSGLVNYQISVKGSNLFKLEVRLLDAENKVVANGTGTQGQLKVPGVSLWWPYLMHERPAYLYSLEVQLTAQTSLGPVSDFYTLPVGIRTVAVTKSQFLINGKPFYFHGVNKHEDADVCWGSWVLVGAASGHPPLSPSLCPAVEGSSGQMRQMAPNGEGAHGVALQGPGSQRKCSFDRDRGHLALLSPEIRGKGFDWPLLVKDFNLLRWLGANAFRTSHYPYAEEVMQMCDRYGIVVIDECPGVGLALPQFFNNVSLHHHMQVMEEVVRRDKNHPAVVMWSVANEPASHLESAGYYLKMVIAHTKSLDPSRPVTFVSNSNYAADKGAPYVDVICLNSYYSWYHDYGHLELIQLQLATQFENWYKKYQKPIIQSEYGAETIAGFHQDPPLMFTEEYQKSLLEQYHLGLDQKRRKYVVGELIWNFADFMTEQSPTRVLGNKKGIFTRQRQPKSAAFLLRERYWKIANETRYPHSVAKSQCLENSPFT

SEQ ID NO: 746172 - protein, 301 aa, Homo sapiens
TKHKQKTTNKQKPKQKTHAYDLLRWLGANAFRTSHYPYAEEVMQMCDRYGIVVIDECPGVGLALPQFFNNVSLHHHMQVMEEVVRRDKNHPAVVMWSVANEPASHLESAGYYLKMVIAHTKSLDPSRPVTFVSNSNYAADKGAPYVDVICLNSYYSWYHDYGHLELIQLQLATQFENWYKKYQKPIIQSEYGAETIAGFHQDPPLMFTEEYQKSLLEQYHLGLDQKRRKYVVGELIWNFADFMTEQSPTRVLGNKKGIFTRQRQPKSAAFLLRERYWKIANETRYPHSVAKSQCLENSPFT

SEQ ID NO: 746173 - protein, 750 aa, Homo sapiens
MARGSAVAWAALGPLLWGCALGLQGGMLYPQESPSRECKELDGLWSFRADFSDNRRRGFEEQWYRRPLWESGPTVDMPVPSSFNDISQDWRLRHFVGWVWYEREVILPERWTQDLRTRVVLRIGSAHSYAIVWVNGVDTLEHEGGYLPFEADISNLVQVGPLPSRLRITIAINNTLTPTTLPPGTIQYLTDTSKYPKGYFVQNTYFDFFNYAGLQRSVLLYTTPTTYIDDITVTTSVEQDSGLVNYQISVKGSNLFKLEVRLLDAENKVVANGTGTQGQLKVPGVSLWWPYLMHERPAYLYSLEVQLTAQTSLGPVSDFYTLPVGIRTVAVTKSQFLINGKPFYFHGVNKHEDADVCWGSWVLWGLLLVTLHFRLPCVLQLRAAQGNEANGSKWRGGSWGGSPGSWLSEEVQLRQGQGSLGSAISKIRGKGFDWPLLVKDFNLLRWLGANAFRTSHYPYAEEVMQMCDRYGIVVIDECPGVGLALPVSLCCAPAPPAQPGGVTVTLCPFPPGPQQFFNNVSLHHHMQVMEEVVRRDKNHPAVVMWSVANEPASHLESAGYYLKMVIAHTKSLDPSRPVTFVSNSNYAADKGAPYVDVICLNSYYSWYHDYGHLELIQLQLATQFENWYKKYQKPIIQSEYGAETIAGFHQDPPLMFTEEYQKSLLEQYHLGLDQKRRKYVVGELIWNFADFMTEQSPTRVLGNKKGIFTRQRQPKSAAFLLRERYWKIANETRYPHSVAKSQCLENSPFT

SEQ ID NO: 746174 - protein, 201 aa, Homo sapiens
VTKQIVLGSHLTSIVLSGYPKSLDPSRPVTFVSNSNYAADKGAPYVDVICLNSYYSWYHDYGHLELIQLQLATQFENWYKKYQKPIIQSEYGAETIAGFHQDPPLMFTEEYQKSLLEQYHLGLDQKRRKYVVGELIWNFADFMTEQSPTRVLGNKKGIFTRQRQPKSAAFLLRERYWKIANETRYPHSVAKSQCLENSPFT

SEQ ID NO: 746175 - protein, 415 aa, Homo sapiens
MARGSAVAWAALGPLLWGCALGLQGGMLYPQESPSRECKELDGLWSFRADFSDNRRRGFEEQWYRRPLWESGPTVDMPVPSSFNDISQDWRLRHFVGWVWYEREVILPERWTQDLRTRVVLRIGSAHSYAIVWVNGVDTLEHEGGYLPFEADISNLVQVGPLPSRLRITIAINNTLTPTTLPPGTIQYLTDTSKYPKGYFVQNTYFDFFNYAGLQRSVLLYTTPTTYIDDITVTTSVEQDSGLVNYQISVKGSNLFKLEVRLLDAENKVVANGTGTQGQLKVPGVSLWWPYLMHERPAYLYSLEVQLTAQTSLGPVSDFYTLPVGIRTVAVTKSQFLINGKPFYFHGVNKHEDADIRGKGFDWPLLVKDFNLLRWLGANAFRTSHYPYAEEVMQMCDRYGIVVIDECPGVGLALP

SEQ ID NO: 746176 - protein, 651 aa, Homo sapiens; identical to SEQ ID NO: 746169

SEQ ID NO: 746177 - protein, 651 aa, Homo sapiens; identical to SEQ ID NO: 746169

SEQ ID NO: 746178 - protein, 651 aa, Homo sapiens; identical to SEQ ID NO: 746169

SEQ ID NO: 746179 - protein, 609 aa, Homo sapiens
MARGSAVAWAALGPLLWGCALGLQGGMLYPQESPSRECKELDGLWSFRADFSDNRRRGFEEQWYRRPLWESGPTVDMPVPSSFNDISQDWRLRHFVGWVWYEREVILPERWTQDLRTRVVLRIGSAHSYAIVWVNGVDTLEHEGGYLPFEADISNLVQVGPLPSRLRITIAINNTLTPTTLPPGTIQYLTDTSKYPKGYFVQNTYFDFFNYAGLQRSVLLYTTPTTYIDDITVTTSVEQDSGLVNYQISVKGSNLFKLEVRLLDAENKVVANGTGTQGQLKVPGVSLWWPYLMHERPAYLYSLEVQLTAQTSLGPVSDFYTLPVGIRTVAVTKSQFLINGKPFYFHGVNKHEDADIRGKGFDWPLLVKDFNLLRWLGANAFRTSHYPYAEEVMQMCDRYGIVVIDECPGVGLALPQFFNNVSLHHHMQVMEEVVRRDKNHPAVVMWSVANEPASHLESAGYYLKMVIAHTKSLDPSRPVTFVSNSNYAADKGAPYVDVICLNSYYSWYHDYGHLELIQLQLATQFENWYKKYQKPIIQSEYGAETIAGFHQDPPLMFTEEYQKSLLEQYHLGLDQKRLQGFTRIHLLMFTEEYQKSLLEQYHLQFMIQT

SEQ ID NO: 746180 - protein, 415 aa, Homo sapiens; identical to SEQ ID NO: 746175

SEQ ID NO: 746181 - protein, 317 aa, Homo sapiens
MARGSAVAWAALGPLLWGCALGLQGGMLYPQESPSRECKELDGLWSFRADFSDNRRRGFEEQWYRRPLWESGPTVDMPVPSSFNDISQDWRLRHFVGWVWYEREVILPERWTQDLRTRVVLRIGSAHSYAIVWVNGVDTLEHEGGYLPFEADISNLVQVGPLPSRLRITIAINNTLTPTTLPPGTIQYLTDTSKYPKGYFVQNTYFDFFNYAGLQRSVLLYTTPTTYIDDITVTTSVEQDSGLVNYQISVKGSNLFKLEVRLLDAENKVVANGTGTQGQLKVPGVSLWWPYLMHERPAYLYSLEIRGKGFDCRAEST

SEQ ID NO: 746182 - protein, 381 aa, Homo sapiens
MRSHTITMTTTSVSSWPYSSHRMRFITNHSDQPPQNFSATPNVTTCPMDEKLLSTVLTTSYSVIFIVGLVGNIIALYVFLGIHRKRNSIQIYLLNVAIADLLLIFCLPFRIMYHINQNKWTLGVILCKVVGTLFYMNMYISIILLGFISLDRYIKINRSIQQRKAITTKQSIYVCCIVWMLALGGFLTMIILTLKKGGHNSTMCFHYRDKHNAKGEAIFNFILVVMFWLIFLLIILSYIKIGKNLLRISKRRSKFPNSGKYATTARNSFIVLIIFTICFVPYHAFRFIYISSQLNVSSCYWKEIVHKTNEIMLVLSSFNSCLDPVMYFLMSSNIRKIMCQLLFRRFQGEPSRSESTSEFKPGYSLHDTSVAVKIQSSSKST

SEQ ID NO: 746183 - protein, 381 aa, Homo sapiens; identical to SEQ ID NO: 746182

SEQ ID NO: 746184 - protein, 374 aa, Homo sapiens [sequence omitted]

SEQ ID NO: 746185 - protein, 343 aa, Homo sapiens
MRDPLTDCPYNKVYKNLKEFSQNGENFCKQVTSVLQQRANLEISYAKGLQKLASKLSKALQNTRKSCVSSAWAWASEGMKSTADLHQKLGKAIELEAIKPTYQVLNVQEKKRKSLDNEVEKTANLVISNWNQQIKAKKKLMVSTKKHEALFQLVESSKQSMTEKEKRKLLNKLTKSTEKLEKEDENYYQKNMAGYSTRLKWENTLENCYQSILELEKERIQLLCNNLNQYSQHISLFGQTLTTCHTQIHCAISKIDIEKDIQAVMEETAILSTENKSEFLLTDYFEEDPNSAMDKERRKSLLKPKLLRLQRDIEKASKDKEGLERMLKTYSSTSSFSDAKSQK

SEQ ID NO: 746186 - protein, 226 aa, Homo sapiens
MLMCLLCFISRKLGKAIELEAIKPTYQVLNVQEKKRKSLDNEVEKTANLVISNWNQQIKAKKKLMVSTKKHEALFQLVESSKQSMTEKEKRKLLNKLTKSTEKLEKEDENYYQKNMAGYSTRLKWENTLENCYQSILELEKERIQLLCNNLNQYSQHISLFGQTLTTCHTQIHCAISKIDIEKDIQAVMEETAILSTENKSEFLLTDYFVSMKWKKKVTLMENLRY

SEQ ID NO: 746187 - protein, 107 aa, Homo sapiens
MRDPLTDCPYNKVYKNLKEFSQNGENFCKQVTSVLQQRANLEISYAKGLQKLASKLSKALQNTRKSCVSSAWAWASEGMKSTADLHQKLGKAIEMVANPGLATISIR

SEQ ID NO: 746188 - protein, 323 aa, Homo sapiens [sequence omitted]

SEQ ID NO: 746189 - protein, 302 aa, Homo sapiens
MRDPLTDCPYNKVYKNLKEFSQNGENFCKQVTSVLQQRANLEISYAKGLQKLASKLSKALQNTRKSCVSSAWAWASEGMKSTADLHQKLGKAIELEAIKPTYQVLNVQEKKRKSLDNEVEKTANLVISNWNQQIKAKKKLMVSTKKHEALFQLVESSKQSMTEKEKRKLLNKLTKSTEKLEKEDENYYQKNMAGYSTRLKWENTLENCYQSILELEKERIQLLCNNLNQYSQHISLFGQTLTTCHTQIHCAISKIDIEKDIQAVMEETAILSTENKSEFLLTDYFVSMKWKKKVTLMENLRY

SEQ ID NO: 746190 - protein, 215 aa, Homo sapiens
MRDPLTDCPYNKVYKNLKEFSQNGENFCKQVTSVLQQRANLEISYAKGLQKLASKLSKALQNTRKSCVSSAWAWASEGMKSTADLHQKLGKAIELEAIKPTYQVLNVQEKKRKSLDNEVEKTANLVISNWNQQIKAKKKLMVSTKKHEALFQLVESSKQSMTEKEKRKLLNKLTKSTEKLEKEDENYYQKNMAGYSTRLKWENTLENCYQYQPKG

SEQ ID NO: 746191 - protein, 302 aa, Homo sapiens
MRDPLTDCPYNKVYKNLKEFSQNGENFCKQVTSVLQQRANLEISYAKGLQKLASKLSKALQNTRKSCVSSAWAWASEGMKSTADLHQKLGKAIELEAIKPTYQVLNVQEKKRKSAKKKLMVSTKKHEALFQLVESSKQSMTEKEKRKLLNKLTKSTEKLEKEDENYYQKNMAGYSTRLKWENTLENCYQSILELEKERIQLLCNNLNQYSQHISLFGQTLTTCHTQIHCAISKIDIEKDIQAVMEETAILSTENKSEFLLTDYFEEDPNSAMDKERRKSLLKPKLLRLQRDIEKASKDKEGV

SEQ ID NO: 746192 - protein, 327 aa, Homo sapiens
RVSGMRDPLTDCPYNKVYKNLKEFSQNGENFCKQVTSVLQQRANLEISYAKGLQKLASKLSKALQNTRKSCVSSAWAWASEGMKSTADLHQKLGKAIELEAIKPTYQVLNVQEKKRKSLDNEVEKTANLVISNWNQQIKAKKKLMVSTKKHEALFQLVESSKQSMTEKEKRKLLNKLTKSTEKLEKEDENYYQKNMAGYSTRLKWENTLENCYQSILELEKERIQLLCNNLNQYSQHISLFGQTLTTCHTQIHCAISKIDIEKDIQAVMEETAILSTENKSEFLLTDYFEEDPNSAMDKERRKSLLKPKLLRLQRDIEKASKDKEGV

SEQ ID NO: 746193 - protein, 245 aa, Homo sapiens
MKSTADLHQKLGKAIELEAIKPTYQVLNVQEKKRKSLDNEVEKTANLVISNWNQQIKAKKKLMVSTKKHEALFQLVESSKQSMTEKEKRKLLNKLTKSTEKLEKEDENYYQKNMAGYSTRLKWENTLENCYQSILELEKERIQLLCNNLNQYSQHISLFGQTLTTCHTQIHCAISKIDIEKDIQAVMEETAILSTENKSEFLLTDYFEEDPNSAMDKERRKSLLKPKLLRLQRDIEKASKDKEGV

SEQ ID NO: 746194 - protein, 245 aa, Homo sapiens; identical to SEQ ID NO: 746193

SEQ ID NO: 746195 - protein, 488 aa, Homo sapiens
MKRSLQALYCQLLSFLLILALTEALAFAIQEPSPRESLQVLPSGTPPGTMVTAPHSSTRHTSVVMLTPNPDGPPSQAAAPMATPTPRAEGHPPTHTISTIAATVTAPHSESSLSTGPAPAAMATTSSKPEGRPRGQAAPTILLTKPPGATSRPTTAPPRTTTRRPPRPPGSSRKGAGNSSRPVPPAPGGHSRSKEGQRGRNPSSTPLGQKRPLGKIFQIYKGNFTGSVEPEPSTLTPRTPLWGYSSSPQPQTVAATTVPSNTSWAPTTTSLGPAKDKPGLRRAAQGGGSTFTSQGGTPDATAASGAPVSPQAAPVPSQRPHHGDPQDGPSHSDSWLTVTPGTSRPLSTSSGVFTAATGPTPAAFDTSVSAPSQGIPQGASTTPQAPTHPSRVSESTISGAKEETVATLTMTDRVPSPLSTVVSTATGNFLNRLVPAGTWKPGTAGNISHVAEGDKPQHRATICLSKMDIAWVILAISVPISSCSDPIT

SEQ ID NO: 746196 - protein, 575 aa, Homo sapiens
MKRSLQALYCQLLSFLLILALTEALAFAIQEPSPRESLQVLPSGTPPGTMVTAPHSSTRHTSVVMLTPNPDGPPSQAAAPMATPTPRAEGHPPTHTISTIAATVTAPHSESSLSTGPAPAAMATTSSKPEGRPRGQAAPTILLTKPPGATSRPTTAPPRTTTRRPPRPPGSSRKGAGNSSRPVPPAPGGHSRSKEGQRGRNPSSTPLGQKRPLGKIFQIYKGNFTGSVEPEPSTLTPRTPLWGYSSSPQPQTVAATTVPSNTSWAPTTTSLGPAKDKPGLRRAAQGGGSTFTSQGGTPDATAASGAPVSPQAAPVPSQRPHHGDPQDGPSHSDSWLTVTPGTSRPLSTSSGVFTAATGPTPAAFDTSVSAPSQGIPQGASTTPQAPTHPSRVSESTISGAKEETVATLTMTDRVPSPLSTVVSTATGNFLNRLVPAGTWKPGTAGNISHVAEGDKPQHRATICLSKMDIAWVILAISVPISSCSVLLTVCCMKRKKKTANPENNLSYWNNTITMDYFNRHAVELPREIQSLETSEDQLSEPRSPANGDYRDTGMVLVNPFCQETLFVGNDQVSEI

SEQ ID NO: 746197 - protein, 575 aa, Homo sapiens; identical to SEQ ID NO: 746196

SEQ ID NO: 746198 - protein, 569 aa, Homo sapiens
MNKEVLTGFLLILALTEALAFAIQEPSPRESLQVLPSGTPPGTMVTAPHSSTRHTSVVMLTPNPDGPPSQAAAPMATPTPRAEGHPPTHTISTIAATVTAPHSESSLSTGPAPAAMATTSSKPEGRPRGQAAPTILLTKPPGATSRPTTAPPRTTTRRPPRPPGSSRKGAGNSSRPVPPAPGGHSRSKEGQRGRNPSSTPLGQKRPLGKIFQIYKGNFTGSVEPEPSTLTPRTPLWGYSSSPQPQTVAATTVPSNTSWAPTTTSLGPAKDKPGLRRAAQGGGSTFTSQGGTPDATAASGAPVSPQAAPVPSQRPHHGDPQDGPSHSDSWLTVTPGTSRPLSTSSGVFTAATGPTPAAFDTSVSAPSQGIPQGASTTPQAPTHPSRVSESTISGAKEETVATLTMTDRVPSPLSTVVSTATGNFLNRLVPAGTWKPGTAGNISHVAEGDKPQHRATICLSKMDIAWVILAISVPISSCSVLLTVCCMKRKKKTANPENNLSYWNNTITMDYFNRHAVELPREIQSLETSEDQLSEPRSPANGDYRDTGMVLVNPFCQETLFVGNDQVSEI

SEQ ID NO: 746199 - protein, 575 aa, Homo sapiens; identical to SEQ ID NO: 746196

SEQ ID NO: 746200 - protein, 575 aa, Homo sapiens; identical to SEQ ID NO: 746196

SEQ ID NO: 746201 - protein, 575 aa, Homo sapiens; identical to SEQ ID NO: 746196

SEQ ID NO: 746202 - protein, 575 aa, Homo sapiens; identical to SEQ ID NO: 746196

SEQ ID NO: 746203 - protein, 575 aa, Homo sapiens; identical to SEQ ID NO: 746196

SEQ ID NO: 746204 - protein, 137 aa, Homo sapiens
MSTHHQNPANGPPLPPSPDAEMVMGSWRVGSEMKGTPQWAAGPIFPKPCHYLCEGGQVAEGSGCRLLYPLCLKHPPHRALVFTRFVLDSLNGNQIPWLRAKTTTYQCPCPFQLTLSSLRSSLSLWKGHPSQGRNAWS

SEQ ID NO: 746205 - protein, 137 aa, Homo sapiens; identical to SEQ ID NO: 746204

SEQ ID NO: 746206 - protein, 111 aa, Homo sapiens
FLRQSFAHVAQAGVQLRNRDSLQPPPPGFKRFSCLSLPSSWGYRYAPLRLANFLVFLIETGFRHVGQAGLERLTSGDPPASASQNARITGVSHHSWPHYLYFYLAFRLLYI

SEQ ID NO: 746207 - protein, 213 aa, Homo sapiens
SESPHFANLLGAQNALRERRLLIPTLLRYRAACWPPGPPCHAPGRLSTDTACAELYETEWVFLVCVCNTTICQLLFTMRSAGGGNLAAVTHSRLEGTTRKEGRGEEGKAATLGPLASRFQHQFSTEPAAAAQGWGLPELRASRGFGQSRGGCPVVGATLHLSGERRPTTQPTRSAAVGPAGPPRGHKNRRQFASSLFPNLNRQAEGSSKVAVP

SEQ ID NO: 746208 - protein, 122 aa, Homo sapiens
ASVSNASLNISAQIFVQISFNSMGSMSRSGIAGSNGNLLFNFLRNSTPIFTVAITFPIPISNALELQFFHLLENTCCFVLLSLLLFIKAILKCVRWCNIVVLICTSLSIHDAEELCMGLLDI

SEQ ID NO: 746209 - protein, 83 aa, Homo sapiens
MEGELGCGGAAGLWGRGQSPQIPGALTHEAVCGATPGVWGRGQAVGVSDAVEEEPTSVGAAGVCYRRQAVEETDSVGMPGPWG

SEQ ID NO: 746210 - protein, 281 aa, Homo sapiens
HGWIQLICSLVLIFNAAKTCPTMPALFSDHTFRHYAYLRDSLSHLVPALRLPGRKLVSSAVSPSIIPQEDPSQQFLQQSLERVYSLQHLDPQGAQELLEFTIRDLQRLGELQSELAGVADFSATYLRCQLLLIKALQEKLWNVAAPLYLKQSDLASAAAKQIMEETYKMEFMYSGVENKQVVIIHHMRLQAKALQLIVTARTTRGLDPLFGMCDNILQEVDFFQRYFIADLAHLQEALWTNFLTYAPSHEIQTCRSGPNFLNMCGEGVGIPRREITRSPTL

SEQ ID NO: 746211 - protein, 202 aa, Homo sapiens
GLSFHIYGGLSRLAVTSGWHIPLPGFTGVVLVPLPGDPTNQHILSSSHCSGHSGSGKTEAAKKIMQFLSSLEQDQTGNRECQPGEGWSPGLWRLLGSAAGTALSDGTDASLDLPLAGMPAGGGYCCPGMLEHPSLYQVEDMLPILSSFGHAKTILNANASRFGQVFCLYLQQGVIVGASVSHYLLETSRVVFQLLAGLDSIE

SEQ ID NO: 746212 - protein, 167 aa, Homo sapiens
MRACFPPQTFGGPVLLVLNPHRSLPLFSPEVQASYHPRKALSTTPHIFAIVASAYDLAQNTGQDPCILLCGHSGSGKTEAAKKIMQFLSSLEQDQTGNRECQVEDMLPILSSFGHAKTILNANASRFGQVFCLYLQQGVIVGASVSHYLLETSRVVFQLLAGLDSIE

SEQ ID NO: 746213 - protein, 143 aa, Homo sapiens
PLAGMPAGGGYCCPGMLEHPSLYRWRICCLYSAALAMPRPSSMPMPAASARSSASTYSSEWQGCRGHLQSLTLPGSLGCFPGVQTLVGLLLHGAPGCSASWALTPIFCAHRGVIVGASVSHYLLETSRVVFQVKAALLSTPAQ

SEQ ID NO: 746214 - protein, 122 aa, Homo sapiens
FQGRLSLIKGDQAGGVWEKPEKGLICSIMMGLSLASAVLLASLLSLHLGTATRGSDISKTCCFQYSHKPLPWTWVRSYEFTSNSCSQRAVIFTTKRGKKVCTHPRKKWVQKYISLLKTPKQL

SEQ ID NO: 746215 - protein, 105 aa, Homo sapiens
FQGRLSLIKGDQAGGVWEKPEKGLICSIMMGLSLASAVLLASLLSFQYSHKPLPWTWVRSYEFTSNSCSQRAVIFTTKRGKKVCTHPRKKWVQKYISLLKTPKQL

SEQ ID NO: 746216 - protein, 140 aa, Homo sapiens
SPKAVYRRGSSTWLTAFVLKVLSLAQEQVGGSPEKLQETSNWLLSQQQADGSFQDLSPVIHRSMQGGLVGNDETVALTAFVTIALHHGLAVFQDEGAEPLKQRVEASISKANSFLGEKASAGLLGAHAVAITAYALTLTK

SEQ ID NO: 746217 - protein, 310 aa, Homo sapiens
MKTLFEEIKASIKNNYNQDRSFCRPVLPWGGVFTIKAGRKAVSCTPLYVEIRLKNTCTIDGFLMLLYVILNENENFPRELSLHFGREFVDCFLYLMDTYSFTTVKLLWIWDKMEKQQYKSEVHKASLIIDLFGNEHDNFTKNLENLMSTIQESYCSNWRCPTRVQEDQQRTININPPQEIPHGNLIRLAVNELFCSKIELCEEHGCGGLREFSQRIFCHGAPPFVVLNMQHWKSEDLAYVPYYLDLSDHKYLLEGATLFNKEEHHYSAAFQIGGHWMHYDGLRNVNLILLNKPPEFLLLSSLVYIRATEK

SEQ ID NO: 746218 - protein, 105 aa, Homo sapiens
MSSLSEYAFRMSRLSARLFGEVTRPTNSKSMKVVKLFSELPLAKKKETYDWYPNHHTYAELMQTLRFLGLYRDEAFRDFWDEAKRLKEAFVGKGRKPKKREKGKR

SEQ ID NO: 746219 - protein, 74 aa, Homo sapiens
SGSDRVVIGLAELSPEEIGRSPSPTGSWECWPLSASSPALFLLQLLKDSAPRPVFPDVCVAMCTAPDRHIVGAQ

SEQ ID NO: 746220 - protein, 136 aa, Homo sapiens; identical to SEQ ID NO: 741065

SEQ ID NO: 746221 - protein, 316 aa, Homo sapiens
MENVTTMNEFLLLGLTGVQELQPFFFGIFLIIYLINLIGNGSILVMVVLEPQLHSPMYFFLGNLSCLDISYSSVTLPKLLVNLVCSRRAISFLGCITQLHFFHFLGSTEAILLAIMAFDRFVAICNPLRYTVIMNPQVCILLAAAAWLISFFYALMHSVMTAHLSFCGSQKLNHFFYDVKPLLELACSDTLLNQWLLSIVTGSISMGAFFLTLLSCFYVIGFLLFKNRSCRILHKALSTCASHFMVVCLFYGPVGFTYIRPASATSMIQDRIMAIMYSAVTPVLNPLIYTLRNKEVMMALKKIFGRKLFKDWQQHH

SEQ ID NO: 746222 - protein, 299 aa, Homo sapiens
AGRQVPEQRSPPPPGLGSARPGSPAVSCGAAAMAPRRARGCRTLGLPALLLLLLLRPPATRGITCPPPMSVEHADIWVKSYSLYSRERYICNSGFKRKAGTSSLTECVLNKATNVAHWTTPSLKCIRDPALVHQRPAPPSTVTTAGVTPQPESLSPSGKEPAASSPSSNNTAATTAAIVPGSQLMPSKSPSTGTTEISSHESSHGTPSQTTAKNWELTASASHQPPGVYPQGHSDTTVAISTSTVLLCGLSAVSLLACYLKSRQTPPLASVEMEAMEALPVTWGTSSRDEDLENCSHHL

SEQ ID NO: 746223 - protein, 429 aa, Homo sapiens
SCSRNSAKWRSWGPSGRRGPREPAGGGGCAPPGPERTRQVPAPPHRGDTSAGTHPGRPLTTERRAAEGDQESRRRSSWRRPAPGEVKWIRAAERAGESLLSDDFAHSLRSGDTGPSAHWRSQSTTSAEDREAPGLAWMQETGWLSWREGAEYLKASTMRSRHTRPACDSGQWKTAPSATTIGQAGSKQAGREGQKISVEQNMEKKPLTLQHQIAPEASKPGGSAGITCPPPMSVEHADIWVKSYSLYSRERYICNSGFKRKAGTSSLTECVLNKATNVAHWTTPSLKCIKPAASSPSSNNTAATTAAIVPGSQLMPSKSPSTGTTEISSHESSHGTPSQTTAKNWELTASASHQPPGVYPQGHSDTTVAISTSTVLLCGLSAVSLLACYLKSRQTPPLASVEMEAMEALPVTWGTSSRDEDLENCSHHL

SEQ ID NO: 746224 - protein, 359 aa, Homo sapiens
AAAGIRRSGGAGAPAGAGGRGSQQVAGAALRPGQSAPGRCPRLRTAATPPRALTQAGRSQPSAGPRRETRKAEGGAAGGDQRRARSSGSEPQRGLERVCSPMTLPTLFAVGTPDRVHTGGPRARRARRTGRLPACVGITCPPPMSVEHADIWVKSYSLYSRERYICNSGFKRKAGTSSLTECVLNKATNVAHWTTPSLKCIRDPALVHQRPAPPSTVTTAGVTPQPESLSPSGKEPAASSPSSNNTAATTAAIVPGSQLMPSKSPSTGTTEISSHESSHGTPSQTTAKNWELTASASHQPPGVYPQGHSDTTVAISTSTVLLCGLSAVSLLACYLKSRASVCSCHPRSAGHTCSVGSVC

SEQ ID NO: 746225 - protein, 363 aa, Homo sapiens
AAAGIRRSGGAGAPAGAGGRGSQQVAGAALRPGQSAPGRCPRLRTAATPPRALTQAGRSQPSAGPRRETRKAEGGAAGGDQRRARSSGSEPQRGLERVCSPMTLPTLFAVGTPDRVHTGGPRARRARRTGRLPACVGITCPPPMSVEHADIWVKSYSLYSRERYICNSGFKRKAGTSSLTECVLNKATNVAHWTTPSLKCIRDPALVHQRPAPPSTVTTAGVTPQPESLSPSGKEPAASSPSSNNTAATTAAIVPGSQLMPSKSPSTGTTEISSHESSHGTPSQTTAKNWELTASASHQPPVAISTSTVLLCGLSAVSLLACYLKSRQTPPLASVEMEAMEALPVTWGTSSRDEDLENCSHHL

SEQ ID NO: 746226 - protein, 374 aa, Homo sapiens
AAAGIRRSGGAGAPAGAGGRGSQQVAGAALRPGQSAPGRCPRLRTAATPPRALTQAGRSQPSAGPRRETRKAEGGAAGGDQRRARSSGSEPQRGLERVCSPMTLPTLFAVGTPDRVHTGGPRARRARRTGRLPACVGITCPPPMSVEHADIWVKSYSLYSRERYICNSGFKRKAGTSSLTECVLNKATNVAHWTTPSLKCIRDPALVHQRPAPPSTVTTAGVTPQPESLSPSGKEPAASSPSSNNTAATTAAIVPGSQLMPSKSPSTGTTEISSHESSHGTPSQTTAKNWELTASASHQPPGVYPQGHSDTTVAISTSTVLLCGLSAVSLLACYLKSRQTPPLASVEMEAMEALPVTWGTSSRDEDLENCSHHL

SEQ ID NO: 746227 - protein, 171 aa, Homo sapiens
GAGYVAGVASVFSEVGVSNLTRPEMTSPLREKPAASSPSSNNTAATTAAIVPGSQLMPSKSPSTGTTEISSHESSHGTPSQTTAKNWELTASASHQPPGVYPQGHSDTTVAISTSTVLLCGLSAVSLLACYLKSRQTPPLASVEMEAMEALPVTWGTSSRDEDLENCSHHL

SEQ ID NO: 746228 - protein, 308 aa, Homo sapiens
AAAGIRRSGGAGAPAGAGGRGSQQVAGAALRPGQSAPGRCPRLRTAATPPRALTQAGRSQPSAGPRRETRKAEGGAAGGDQRRARSSGSEPQRGLERVCSPMTLPTLFAVGTPDRVHTGGPRARRARRTGRLPACVGITCPPPMSVEHADIWVKSYSLYSRERYICNSGFKRKAGTSSLTECVLNKATNVAHWTTPSLKCIRTTEISSHESSHGTPSQTTAKNWELTASASHQPPGVYPQGHSDTTVAISTSTVLLCGLSAVSLLACYLKSRQTPPLASVEMEAMEALPVTWGTSSRDEDLENCSHHL

SEQ ID NO: 746229 - protein, 94 aa, Homo sapiens
ADKALTNRGLRRVPGVQGSRAASEPLSSHCSQSCVPLLDSASMREAARSWDFTGERTCQRQSLVLSPRLECSGAISVHYNLRLPGSSDSPVSAS

SEQ ID NO: 746230 - protein, 33 aa, Homo sapiens
MRKGGKAESTEGFYFVQRNLLVGMLAGLGFLHQ

SEQ ID NO: 746231 - protein, 158 aa, Homo sapiens
ETPYLRAWVELRRGRLGRPSGRKGQTATAASGGTVCPGSEVKKRAGGERATCLSAMALNAGLAEPHLCCLQNGENCACPASSLGTPGAQRTKSCKCPGGLGSLWMVQIWGGGHGQDREGCQREGLWVCGVWGSVADSLDEPGACMLQPTCQILPPPAF

SEQ ID NO: 746232 - protein, 667 aa, Homo sapiens
MHRGLIHPQSRAVGGDAMTPILTVLICLGLSLGPRTHVQAGHLPKPTLWAEPGSVITQGSPVTLRCQGGQETQEYRLYREKKTALWITRIPQELVKKGQFPIPSITWEHAGRYRCYYGSDTAGRSESSDPLELVVTGAYIKPTLSAQPSPVVNSGGNVTLQCDSQVAFDGFSLCKEGEDEHPQCLNSQPHARGSSRAIFSVGPVSPSRRWWYRCYAYDSNSPYEWSLPSDLLELLVLGVSKKPSLSVQPGPIVAPEETLTLQCGSDAGYNRFVLYKDGERDFLQLAGAQPQAGLSQANFTLGPVSRSYGGQYRCYGAHNLSSEWSAPSDPLDILIAGQFYDRVSLSVQPGPTVASGENVTLLCQSQGWMQTFLLTKEGAADDPWRLRSTYQSQKYQAEFPMGPVTSAHAGTYRCYGSQSSKPYLLTHPSDPLELVVSGPSGGPSSPTTGPTSTSGPEDQPLTPTGSDPQSGLGRHLGVVIGILVAVILLLLLLLLLFLILRHRRQGKHWTSTQRKADFQHPAGAVGPEPTDRGLQWRSSPAADAQEENLYAAVKHTQPEDGVEMDTRSPHDEDPQAVTYAEVKHSRPRREMASPPSPLSGEFLDTKDRQAEEDRQMDTEAAASEAPQDVTYAQLHSLTLRRKATEPPPSQEGPSPAVPSIYATLAIH

SEQ ID NO: 746233 - protein, 527 aa, Homo sapiens
MHRGLIHPQSRAVGGDAMTPILTVLICLGLSLGPRTHVQAGHLPKPTLWAEPGSVITQGSPVTLRCQGGQETQEYRLYREKKTALWITRIPQELVKKGQFPIPSITWEHAGRYRCYYGSDTAGRSESSDPLELVVTGAYIKPTLSAQPSPVVNSGGNVTLQCDSQVAFDGFSLCKEGEDEHPQCLNSQPHARGSSRAIFSVGPVSPSRRWWYRCYAYDSNSPYEWSLPSDLLELLVLGVSKKPSLSVQPGPIVAPEETLTLQCGSDAGYNRFVLYKDGERDFLQLAGAQPQAGLSQANFTLGPVSRSYGGQYRCYGAHNLSSEWSAPSDPLDILIAGQFYDRVSLSVQPGPTVASGENVTLLCQSQGWMQTFLLTKEGAADDPWRLRSTYQSQKYQAEFPMGPVTSAHAGTYRCYGSQSSKPYLLTHPSDPLELVVSGPSGGPSSPTTGPTSTSGPEDQPLTPTGSDPQSGLGRHLGVVIGILVAVILLLLLLLLLFLILRHRRQGKHWTSSPAQLPMPRKKTSMLP

SEQ ID NO: 746234 - protein, 434 aa, Homo sapiens
MHRGLIHPQSRAVGGDAMTPILTVLICLGLSLGPRTHVQAGHLPKPTLWAEPGSVITQGSPVTLRCQGGQETQEYRLYREKKTALWITRIPQELVKKGQFPIPSITWEHAGRYRCYYGSDTAGRSESSDPLELVVTGAYIKPTLSAQPSPVVNSGGNVTLQCDSQVAFDGFSLCKEGEDEHPQCLNSQPHARGSSRAIFSVGPVSPSRRWWYRCYAYDSNSPYEWSLPSDLLELLVLGVSKKPSLSVQPGPIVAPEETLTLQCGSDAGYNRFVLYKDGERDFLQLAGAQPQAGLSQANFTLGPVSRSYGGQYRCYGAHNLSSEWSAPSDPLDILIAGQFYDRVSLSVQPGPTVASGENVTLLCQSQGRALSSCAQHLRHSGHPLAQGGTQTPHSMESGMHGSCPPSGHHWTPPSLDLPQETLGTFRGHSILQYK

SEQ ID NO: 746235 - protein, 472 aa, Homo sapiens
MHRGLIHPQSRAVGGDAMTPILTVLICLGLSLGPRTHVQAGHLPKPTLWAEPGSVITQGSPVTLRCQGGQETQEYRLYREKKTALWITRIPQELVKKGQFPIPSITWEHAGRYRCYYGSDTAGRSESSDPLELVVTGAYIKPTLSAQPSPVVNSGGNVTLQCDSQVAFDGFSLCKEGEDEHPQCLNSQPHARGSSRAIFSVGPVSPSRRWWYRCYAYDSNSPYEWSLPSDLLELLVLGVSKKPSLSVQPGPIVAPEETLTLQCGSDAGYNRFVLYKDGERDFLQLAGAQPQAGLSQANFTLGPVSRSYGGQYRCYGAHNLSSEWSAPSDPLDILIAGQFYDRVSLSVQPGPTVASGENVTLLCQSQGWMQTFLLTKEGAADDPWRLRSTYQSQKYQAEFPMGPVTSAHAGTYRCYGSQSSKPYLLTHPSDPLELVVSGPSGGPSSPTTGPTSTSGPEDQPLTPTGSDPQSGE

SEQ ID NO: 746236 - protein, 667 aa, Homo sapiens; identical to SEQ ID NO: 746232

SEQ ID NO: 746237 - protein, 650 aa, Homo sapiens
MHRGLIHPQSRAVGGDAMTPILTVLICLGLSLGPRTHVQAGHLPKPTLWAEPGSVITQGSPVTLRCQGGQETQEYRLYREKKTALWITRIPQELVKKGQFPIPSITWEHAGRYRCYYGSDTAGRSESSDPLELVVTGAYIKPTLSAQPSPVVNSGGNVTLQCDSQVAFDGFSLCKEGEDEHPQCLNSQPHARGSSRAIFSVGPVSPSRRWWYRCYAYDSNSPYEWSLPSDLLELLVLGVSKKPSLSVQPGPIVAPEETLTLQCGSDAGYNRFVLYKDGERDFLQLAGAQPQAGLSQANFTLGPVSRSYGGQYRCYGAHNLSSEWSAPSDPLDILIAGQFYDRVSLSVQPGPTVASGENVTLLCQSQGWMQTFLLTKEGAADDPWRLRSTYQSQKYQAEFPMGPVTSAHAGTYRCYGSQSSKPYLLTHPSDPLELVVSGPEDQPLTPTGSDPQSGLGRHLGVVIGILVAVILLLLLLLLLFLILRHRRQGKHWTSTQRKADFQHPAGAVGPEPTDRGLQWRSSPAADAQEENLYAAVKHTQPEDGVEMDTRSPHDEDPQAVTYAEVKHSRPRREMASPPSPLSGEFLDTKDRQAEEDRQMDTEAAASEAPQDVTYAQLHSLTLRRKATEPPPSQEGPSPAVPSIYATLAIH

SEQ ID NO: 746238 - protein, 103 aa, Homo sapiens
ETQEYRLYREKKTALWITRIPQELVKKGQFPIPSITWEHAGRYRCYYGSDTAGRSESSDPLELVVTGELTLRGPSPRLCPQEGGRLSGASPSHSPALGMTRVV

SEQ ID NO: 746239 - protein, 348 aa, Homo sapiens
MGPRARPALLLLMLLQTAVLQGRLLRSHSLHYLFMGASEQDLGLSLFEALGYVDDQLFVFYDHESRRVEPRTPWVSSRISSQMWLQLSQSLKGWDHMFTVDFWTIMENHNHSKESHTLQVILGCEMQEDNSTEGYWKYGYDGQDHLEFCPDTLDWRAAEPRAWPTKLEWERHKIRARQNRAYLERDCPAQLQQLLELGRGVLDQQVPPLVKVTHHVTSSVTTLRCRALNYYPQNITMKWLKDKQPMDAKEFEPKDVLPNGDGTYQGWITLAVPPGEEQRYTCQVEHPGLDQPLIVIWEPSPSGTLVIGVISGIAVFVVILFIGILFIILRKRQGSRGAMGHYVLAERE

SEQ ID NO: 746240 - protein, 73 aa, Homo sapiens
MGPRARPALLLLMLLQTAVLQGRLLRSHSLHYLFMGASEQDLGLSLFEALGYVDDQLLVIRLPRPPKVLRLQV

SEQ ID NO: 746241 - protein, 256 aa, Homo sapiens
MGPRARPALLLLMLLQTAVLQGRLLRSHSLHYLFMGASEQDLGLSLFEALGYVDDQLFVFYDHESRRVEPRTPWVSSRISSQMWLQLSQSLKGWDHMFTVDFWTIMENHNHSKVPPLVKVTHHVTSSVTTLRCRALNYYPQNITMKWLKDKQPMDAKEFEPKDVLPNGDGTYQGWITLAVPPGEEQRYTCQVEHPGLDQPLIVIWEPSPSGTLVIGVISGIAVFVVILFIGILFIILRKRQGSRGAMGHYVLAERE

SEQ ID NO: 746242 - protein, 260 aa, Homo sapiens
MGPRARPALLLLMLLQTAVLQGRLLQSHTLQVILGCEMQEDNSTEGYWKYGYDGQDHLEFCPDTLDWRAAEPRAWPTKLEWERHKIRARQNRAYLERDCPAQLQQLLELGRGVLDQQVPPLVKVTHHVTSSVTTLRCRALNYYPQNITMKWLKDKQPMDAKEFEPKDVLPNGDGTYQGWITLAVPPGEEQRYTCQVEHPGLDQPLIVIWEPSPSGTLVIGVISGIAVFVVILFIGILFIILRKRQGSRGAMGHYVLAERE

SEQ ID NO: 746243 - protein, 325 aa, Homo sapiens
MGPRARPALLLLMLLQTAVLQGRLLPLGYVDDQLFVFYDHESRRVEPRTPWVSSRISSQMWLQLSQSLKGWDHMFTVDFWTIMENHNHSKESHTLQVILGCEMQEDNSTEGYWKYGYDGQDHLEFCPDTLDWRAAEPRAWPTKLEWERHKIRARQNRAYLERDCPAQLQQLLELGRGVLDQQVPPLVKVTHHVTSSVTTLRCRALNYYPQNITMKWLKDKQPMDAKEFEPKDVLPNGDGTYQGWITLAVPPGEEQRYTCQVEHPGLDQPLIVIWEPSPSGTLVIGVISGIAVFVVILFIGILFIILRKRQGSRGAMGHYVLAERE

SEQ ID NO: 746244 - protein, 175 aa, Homo sapiens
MGPRARPALLLLMLLQTAVLQGRLLRSHSLHYLFMGASEQDLGLSLFEALGYVDDQLFVFYDHESRRVEPRTPWVSSRISSQMWLQLSQSLKGWDHMFTVDFWTIMENHNHSKEGSESSSLPGKGKQIPSPHPSSFLSSASFGEGDTSCDLFSDHSTVSGLELLPPEHHHEVAEG

SEQ ID NO: 746245 - protein, 246 aa, Homo sapiens
MGPRARPALLLLMLLQTAVLQGRLLQSHTLQVILGCEMQEDNSTEGYWKYGYDGQDHLEFCPDTLDWRAAEPRAWPTKLEWERHKIRARQNRAYLERDCPAQLQQLLELGRGVLDQQVTTLRCRALNYYPQNITMKWLKDKQPMDAKEFEPKDVLPNGDGTYQGWITLAVPPGEEQRYTCQVEHPGLDQPLIVIWEPSPSGTLVIGVISGIAVFVVILFIGILFIILRKRQGSRGAMGHYVLAERE

SEQ ID NO: 746246 - protein, 211 aa, Homo sapiens
MGPRARPALLLLMLLQTAVLQGRLLQSHTLQVILGCEMQEDNSTEGYWKYGYDGQDHLEFCPDTLDWRAAEPRAWPTKLEWERHKIRARQNRAYLERDCPAQLQQLLELGRGVLDQQVPPLVKVTHHVTSSVTTLRCRALNYYPQNITMKWLKDKQPMDAKEFEPKDVLPNGDGTYQGWITLAVPPGEEQRYTCQVEHPGLDQPLIVIWGM

SEQ ID NO: 746247 - protein, 211 aa, Homo sapiens
MGPRARPALLLLMLLQTAVLQGRLLRSHSLHYLFMGASEQDLGLSLFEALGYVDDQLFVFYDHESRRVEPRTPWVSSRISSQMWLQLSQSLKGWDHMFTVDFWTIMENHNHSKESHTLQVILGCEMQEDNSTEGYWKYGYDGQDHLEFCPDTLDWRAAEPRAWPTKLEWERHKIRARQNRAYLERDCPAQLQQLLELGRGVLDQQVLRLQV

SEQ ID NO: 746248 - protein, 159 aa, Homo sapiens
MGPRARPALLLLMLLQTAVLQGRLLRSHSLHYLFMGASEQDLGLSLFEALGYVDDQLFVFYDHESRRVEPRTPWVSSRISSQMWLQLSQSLKGWDHMFTVDFWTIMENHNHSKESHTLQVILGCEMQEDNSTEGYWKYGYDGAGASGYHIQLRSFFFRH

SEQ ID NO: 746249 - protein, 256 aa, Homo sapiens; identical to SEQ ID NO: 746241

SEQ ID NO: 746250 - protein, 334 aa, Homo sapiens
MGPRARPALLLLMLLQTAVLQGRLLRSHSLHYLFMGASEQDLGLSLFEALGYVDDQLFVFYDHESRRVEPRTPWVSSRISSQMWLQLSQSLKGWDHMFTVDFWTIMENHNHSKESHTLQVILGCEMQEDNSTEGYWKYGYDGQDHLEFCPDTLDWRAAEPRAWPTKLEWERHKIRARQNRAYLERDCPAQLQQLLELGRGVLDQQVTTLRCRALNYYPQNITMKWLKDKQPMDAKEFEPKDVLPNGDGTYQGWITLAVPPGEEQRYTCQVEHPGLDQPLIVIWEPSPSGTLVIGVISGIAVFVVILFIGILFIILRKRQGSRGAMGHYVLAERF

SEQ ID NO: 746251 - protein, 242 aa, Homo sapiens
MGPRARPALLLLMLLQTAVLQGRLLRSHSLHYLFMGASEQDLGLSLFEALGYVDDQLFVFYDHESRRVEPRTPWVSSRISSQMWLQLSQSLKGWDHMFTVDFWTIMENHNHSKVTTLRCRALNYYPQNITMKWLKDKQPMDAKEFEPKDVLPNGDGTYQGWITLAVPPGEEQRYTCQVEHPGLDQPLIVIWEPSPSGTLVIGVISGIAVFVVILFIGILFIILRKRQGSRGAMGHYVLAERE

SEQ ID NO: 746252 - protein, 159 aa, Homo sapiens
MGPRARPALLLLMLLQTAVLQGRLLRSHSLHYLFMGASEQDLGLSLFEALGYVDDQLFVFYDHESRRVEPRTPWVSSRISSQMWLQLSQSLKGWDHMFTVDFWTIMENHNHSKESHTLQVILGCEMQEDNSTEGFLHFLRHLRDIHLCHFISYFWKRTP

SEQ ID NO: 746253 - protein, 279 aa, Homo sapiens
MGPRARPALLLLMLLQTAVLQGRLLRSHSLHYLFMGASEQDLGLSLFEALGYVDDQLFVFYDHESRRVEPRTPWVSSRISSQMWLQLSQSLKGWDHMFTVDFWTIMENHNHSKESHTLQVILGCEMQEDNSTEGYWKYGYDGQDHLEFCPDTLDWRAAEPRAWPTKLEWERHKIRARQNRAYLERDCPAQLQQLLELGRGVLDQQVPPLVKVTHHVTSSVTTLRCRALNYYPQNITMKWLKDKQPMDAKEFEPKDVLPNGDGTYQGWITLAVPLLRLQV

SEQ ID NO: 746254 - protein, 76 aa, Homo sapiens
MGPRARPALLLLMLLQTAVLQGRLLQPSPSGTLVIGVISGIAVFVVILFIGILFIILRKRQGSRGAMGHYVLAERE

SEQ ID NO: 746255 - protein, 428 aa, Homo sapiens
MDSLWGPGAGSHPFGVHNTRLSPDLCPGKIVLRALKESGAGMPEQDKDPRVQENPGDQRRVPEVTGDAPSAFRPLRDNGGLSPFVPGPGPLQTDLHAQRSEIRYNQTSQTSWTSSCTNRNAISSSYSSTGGLPGLKRRRGPASSHCQLTLSSSKTVSEDRPQAVSSGHTQCEKAADIAPGQTLTLRNDSSTSEASRPSTHKFPLLPCRRGEPLMLPPPLELGYRVTVEDLDREKEAAFQRINSALQVEDKAISDCRPSRPSHTLSSLATGASGLPAVSKAPSMDAQQETHKSQDCLGLLAPLASAAEVPSTAPMSGKKHRPPGPLFSSSDPLPATSSHSQDSAQVTSLIPAPFPAASMDAGMRRTRRGTSAPAAAAAAPPPSALNPTLGSLLEWMEALHISGPQPQLQQVPRGQNQRSQTSRTSSCPK

SEQ ID NO: 746256 - protein, 124 aa, Homo sapiens
MLNNILYRFSDGWDIITLGQVTPTLYMLSEDRQLWKKLCQYHFAEKQFCRHLILSEKGHIEWKLMYFALQKHYPAKEQYGDTLHFCRHCSILFWKDSGHPCTAADPDSCFTPVSPQHFIDLFKF

SEQ ID NO: 746257 - protein, 358 aa, Homo sapiens
MPFLGQDWRSPGWSWIKTEDGWKRCESCSQKLERENNRCNISHSIILNSEDGEIFNNEEHEYASKKRKKDHFRNDTNTQSFYREKWIYVHKESTKERHGYCTLGEAFNRLDFSSAIQDIRRFNYVVKLLQLIAKSQLTSLSGVAQKNYFNILDKIVQKVLDDHHNPRLIKDLLQDLSSTLCILIRGVGKSVLVGNINIWICRLETILAWQQQLQDLQMTKQVNNGLTLSDLPLHMLNNILYRFSDGWDIITLGQVTPTLYMLSEDRQLWKKLCQYHFAEKQFCRHLILSEKGHIEWKLMYFALQKHYPAKEQYGDTLHFCRHCSILFWKDSGHPCTAADPDSCFTPVSPQHFIDLFKF

SEQ ID NO: 746258 - protein, 358 aa, Homo sapiens; identical to SEQ ID NO: 746257

SEQ ID NO: 746259 - protein, 141 aa, Homo sapiens
MTKQVNNGLTLSDLPLHMLNNILYRFSDGWDIITLGQVTPTLYMLSEDRQLWKKLCQYHFAEKQFCRHLILSEKGHIEWKLMYFALQKHYPAKEQYGDTLHFCRHCSILFWKDSGHPCTAADPDSCFTPVSPQHFIDLFKF

SEQ ID NO: 746260 - protein, 367 aa, Homo sapiens
MPFLGQDWRSPGWSWIKTEDGWKRCESCSQKLERENNRCNISHSIILNSEDGEIFNNEEHEYASKKRKKDHFRNDTNTQSFYREKWIYVHKESTKERHGYCTLGEAFNRLDFSSAIQDIRRFNYVVKLLQLIAKSQLTSLSGVAQKNYFNILDKIVQKVLDDHHNPRLIKDLLQDLSSTLCILIRGVGKSVLVGNINIWICRLETILAWQQQLQDLQMTKQVNNGLTLSDLPLHMLNNILYRFSDGWDIITLGQVTPTLYMLSEDRQLWKKLCQYHFAEKQFCRHLILSEKGHIEWKLMYFALQKHYPAKEQYGDTLHFCRHCSILFWKDYHLALLFKDSGHPCTAADPDSCFTPVSPQHFIDLFKF

SEQ ID NO: 746261 - protein, 321 aa, Homo sapiens
MPFLGQDWRSPGWSWIKTEDGWKRCESCSQKLERENNRCNISHSIILNSEDGEIFNNEEHEYASKKRKKDHFRNDTNTQSFYREKWIYVHKESTKERHGYCTLGEAFNRLDFSSAIQDIRRFNYVVKLLQLIAKSQLTSLSGVAQKNYFNILDKIVQKVLDDHHNPRLIKDLLQDLSSTLCILIRGVGKSVLVGNINIWICRLETILAWQQQLQDLQMTKQVNNGLTLSDLPLHMLNNILYRFSDGWDIITLGQVTPTLYMLSEDRQLWKKLCQYHFAEKQFCRHLILSEKGHIEWKLMYFATSSTSSSFKGCPCHPYWRL

SEQ ID NO: 746262 - protein, 124 aa, Homo sapiens
MIQQEEIRNLEEEKKQLDWINHSSSLARTRSLSSLREKGMYDVQSTTEPTNLMATIFWIAASLLESDYEYEYVLALRLLNKLLIHLPLHKSESREKIENVQSKSKWTSLPGVQQLFLKGISGYR

SEQ ID NO: 746263 - protein, 291 aa, Homo sapiens
MEKYSIMKSMNMHRKKGKRTILEMTQILKRHGYCTLGEAFNRLDFSSAIQDIRRFNYVVKLLQLIAKSQLTSLSGVAQKNYFNILDKIVQKVLDDHHNPRLIKDLLQDLSSTLCILIRGVGKSVLVGNINIWICRLETILAWQQQLQDLQMTKQVNNGLTLSDLPLHMLNNILYRFSDGWDIITLGQVTPTLYMLSEDRQLWKKLCQYHFAEKQFCRHLILSEKGHIEWKLMYFALQKHYPAKEQYGDTLHFCRHCSILFWKDSGHPCTAADPDSCFTPVSPQHFIDLFKF

SEQ ID NO: 746264 - protein, 141 aa, Homo sapiens; identical to SEQ ID NO: 746259

SEQ ID NO: 746265 - protein, 291 aa, Homo sapiens; identical to SEQ ID NO: 746263

SEQ ID NO: 746266 - protein, 367 aa, Homo sapiens; identical to SEQ ID NO: 746260

SEQ ID NO: 746267 - protein, 340 aa, Homo sapiens
MPFLGQDWRSPGWSWIKTEDGWKRCESCSQKLERENNRCNISHSIILNSEDGEIFNNEEHEYASKKRKKDHFRNDTNTQSFYREKWIYVHKESTKERHGYCTLGEAFNRLDFSSAIQDIRRFNYVVKLLQLIAKSQLTSLSGVAQKNYFNILDKIVQKVLDDHHNPRLIKDLLQDLSSTLCILIRGVGKSVLVGNINIWICRLETILAWQQQLQDLQMTKQVNNGLTLSDLPLHMLNNILYRFSDGWDIITLGQVTPTLYMLSEDRQLWKKLCQYHFAEKQFCRHLILSETKEQYGDTLHFCRHCSILFWKDSGHPCTAADPDSCFTPVSPQHFIDLFKF

SEQ ID NO: 746268 - protein, 376 aa, Homo sapiens
MPFLGQDWRSPGWSWIKTEDGWKRCESCSQKLERENNRCNISHSIILNSEDGEIFNNEEHEYASKKRKKDHFRNDTNTQSFYREKWIYVHKESTKERHGYCTLGEAFNRLDFSSAIQDIRRFNYVVKLLQLIAKSQLTSLSGVAQKNYFNILDKIVQKVLDDHHNPRLIKDLLQDLSSTLCILIRGVGKSVLVGNINIWICRLETILAWQQQLQDLQMTKQVNNGLTLSDLPLHMLNNILYRFSDGWDIITLGQVTPTLYMLSEDRQLWKKLCQYHFAEKQFCRHLILSEKGHIEWKLMYFALQKHYPAKEQYGDTLHFCRHCSILFWKDYHLALLFKVLPCLATHPVFGMKTLHRAASHARHLGHCPARFQLSLT

SEQ ID NO: 746269 - protein, 163 aa, Homo sapiens
MAEDRPQQPQLDMPLVLDQGLTRQMRLRVESLKQRGEKRQDGEKLLQPAESVYRLNFTQQQRLQFERWNVVLDKPGKVTITGTSQNWTPDLTNLMTRQLLDPTAIFWRKEDSDAIDWNEADALEFGERLSDLAKIRKVMYFLVTFGEGVEPANLKASVVFNQL

SEQ ID NO: 746270 - protein, 138 aa, Homo sapiens
WDPEPHFSRVGGVRAPGRAATGLRAPGHPVSLQVTGMKQAGWWACEDSPRLAGGTGPWCLGEGLGLQGSCWAEPHVCLPTFLLSPSCLLYLVNLFPSVSFLLFSVSAIPCLAVPPLSPLLLWCICDLCSAIVSPACLS

SEQ ID NO: 746271 - protein, 127 aa, Homo sapiens
MLTSQNSIKRKTPTFHAQVTKGLDAIPFASLSYLLCVADGKLKVFLIGCFVQPFLLLAPGGCERVLGLGASWQRSTPGCSPKSHCPPHSLVLTAVCRECWHLTPLKACLCSSTVLSYAVSTPLPEGQ

SEQ ID NO: 746272 - protein, 224 aa, Homo sapiens
MRLWKARVLKLVLKTAKDSRLGLNSKWLSLKLGDAGNPRSLAIRFILTNYNKLSIQSWFSLRRVEIISNNSIQAVFNPTGVYAPSGYSYRCQRVGSLQQDQALLLPSDTDDGSSLWEVTFIDFQIQGFAIKGGRFTKAQDCASSFSPAFLIGLAMSLILLLVLAYALHMLIYLRYLDQQYDLIASPAHFSQLKARDTAEEKELLRSQGAECYKLRSQQISKIYV

SEQ ID NO: 746273 - protein, 224 aa, Homo sapiens; identical to SEQ ID NO: 746272

SEQ ID NO: 746274 - protein, 224 aa, Homo sapiens; identical to SEQ ID NO: 746272

SEQ ID NO: 746275 - protein, 208 aa, Homo sapiens
MRLWKARVLKLVLKTAKDSRLGLNSKWLSLKLGDAGNPRSLAIRFILTNYNKLSIQSWFSLRRVEIISNNSIQAVFNPTGVYAPSGYSYRCQRVGSLQQDQALLLPSDTDDGSSLWEVTFIDFQALGLVPCMKVHFKANRTIFLEWEEKASSLNRHYAEHRIECVGTAISWQVCLQPALWIYKHTKEEAHTGVMGQMTILCLPTLSST

SEQ ID NO: 746276 - protein, 126 aa, Homo sapiens
QNCQPNWEEILGEKGCITSAPSFLLQIQGFAIKGGRFTKAQDCASSFSPAFLIGLAMSLILLLVLAYALHMLIYLRYLDQQYDLIASPAHFSQLKARDTAEEKELLRSQGAECYKLRSQQISKIYV

SEQ ID NO: 746277 - protein, 172 aa, Homo sapiens
MRLWKARVLKLVLKTAKDSRLGLNSKWLSLKLGDAGNPRSLAIRFILTNYNKLSIQSWFSLRRVEIISNNSIQAVFNPTGVYAPSGYSYRCQRVGSLQQDQALLLPSDTDDGSSLWEVTFIDFQALGLVPCMKVHFKANRTIFLEWEEKASSLNRAGVSQSCQCWSPTPGFR

SEQ ID NO: 746278 - protein, 52 aa, Homo sapiens
AGGVGAGRRQVGTLAWRGHQQTPGRPHQWEPLQRKEMSGRLWVWGLEPGPDL

SEQ ID NO: 746279 - protein, 472 aa, Homo sapiens
SGHTGGLGCGARVGARGGRPGRYGPRAAGRAPKPRYLRDLMTFEDVAVYFSQEEWGLLDTAQRALYRHVMLENFTLVTSLGLSTSRPRVVIQLERGEEPWVPSGKDMTLARNTYGRLNSGSWSLTEDRDVSGEWPRAFPDTPPGMTTSVFPVADACHSVKSLQRQPGASPSQERKPTGVSVIYWERLLLGSRSDQASISLRLTSPLRPPKSSRPREKTFTEYRVPGRQPRTPERQKPCAQEVPGRAFGNASDLKAASGGRDRRMGAAWQEPHRLLGGQEPSTWDELGEALHAGEKSFECRACSKVFVKSSDLLKHLRTHTGERPYECTQCGKAFSQTSHLTQHQRIHSGETPYACPVCGKAFRHSSSLVRHQRIHTAEKSFRCSECGKAFSHGSNLSQHRKIHAGGRPYACAQCGRRFCRNSHLIQHERTHTGEKPFVCALCGAAFSQGSSLFLHQRVHTGEKPFACAQCGR

SEQ ID NO: 746280 - protein, 306 aa, Homo sapiens
MYSFMAGSIFITIFGNLAMIISISYFKQLHTPTNFLILSMAITDFLLGFTIMPYSMIRSVENCWYFGLTFCKIYYSFDLMLSITSIFHLCSVAIDRFYAICYPLLYSTKITIPVIKRLLLLCWSVPGAFAFGVVFSEAYADGIEGYDILVACSSSCPVMFNKLWGTTLFMAGFFTPGSMMVGIYGKIFAVSRKHAHAINNLRENQNNQVKKDKKAAKTLGIVIGVFLLCWFPCFFTILLDPFLNFSTPVVLFDALTWFGYFNSTCNPLIYGFFYPWFRRALKYILLGKIFSSCFHNTILCMQKESE

SEQ ID NO: 746281 - protein, 82 aa, Homo sapiens
MHYGRKQVSWIIFLKIGAGCQVHVGHDCSTLRRQQGAPWSFASSFRPAASPLAPPSPGVSGWTHGSSLWPFLIKDRTNGLSG

SEQ ID NO: 746282 - protein, 111 aa, Homo sapiens
MPRQNHSTLGLRTQAVFQCGSDVCYFSSAPPGRVWSADRGYAGSWGMWSMTFESGMVVAGRSGSCLSSQHFGGPRRVDHLRSAVRDQPDQHGETPSLLKIQKIAGHCGRHL

SEQ ID NO: 746283 - protein, 104 aa, Homo sapiens
FFLRQGLVLSPRRECSGMITAHCSLDLPRLKQSSQLSLPISWDYRHAPPRLANCCIFHRDGVLPHCPGWSQTPGLKRATYLRLPKCWDDRHEPPNPALRFYLRE

SEQ ID NO: 746284 - protein, 155 aa, Homo sapiens
MVLSGALCFRMKDSALKVLYLHNNQLLAGGLHAGKVIKGEEISVVPNRWLDASLSPVILGVQGGSQCLSCGVGQEPTLTLEPVNIMELYLGAKESKSFTFYRRDMGLTSSFESAAYPGWFLCTVPEADQPVRLTQLPENGGWNAPITDFYFQQCD

SEQ ID NO: 746285 - protein, 199 aa, Homo sapiens
ESPTSNISCRPGNGRQERQRKEGGRREGVKEGVKKGSLHPVELKMVLSGALCFRMKDSALKVLYLHNNQLLAGGLHAGKVIKGEEISVVPNRWLDASLSPVILGVQGGSQCLSCGVGQEPTLTLEPVNIMELYLGAKESKSFTFYRRDMGLTSSFESAAYPGWFLCTVPEADQPVRLTQLPENGGWNAPITDFYFQQCD

SEQ ID NO: 746286 - protein, 199 aa, Homo sapiens; identical to SEQ ID NO: 746285

SEQ ID NO: 746287 - protein, 312 aa, Homo sapiens
MDGDNQSENSQFLLLGISESPEQQRILFWMFLSMYLVTVLGNVLIILAISSDSHLHTPMYFFLANLSFTDLFFVTNTIPKMLVNFQSQNKAISYAGCLTQLYFLVSLVTLDNLILAVMAYDRYVATCCPLHYVTAMSPGLCVLLLSLCWGLSVLYGLLLTFLLTRVTFCGPREIHYLFCDMYILLWLACSNTHIIHTALIATGCFIFLTPLGFMTTSYVRIVRTILQMPSASKKYKTFSTCASHLGVVSLFYGTLAMVYLQPLHTYSMKDSVATVMYAVLTPMMNPFIYRLRNKDMHGAPGRVLWRPFQRPK

SEQ ID NO: 746288 - protein, 1095 aa, Homo sapiens
HLLQMGANVHARDDGGLIPLHNACSFGHAEVVSLLLCQGADPNARDNWNYTPLHEAAIKGKIDVCIVLLQHGADPNIRNTDGKSALDLADPSAKAVLTGEYKKDELLEAARSGNEEKLMALLTPLNVNCHASDGRKSTPLHLAAGYNRVRIVQLLLQHGADVHAKDKGGLVPLHNACSYGHYEVTELLLKHGACVNAMDLWQFTPLHEAASKNRVEVCSLLLSHGADPTLVNCHGKSAVDMAPTPELRERLTYEFKGHSLLQAAREADLAKVKKTLALEIINFKQPQSHETALHCAVASLHPKRKQVTELLLRKGANVNEKNKDFMTPLHVAAERAHNDVMEVLHKHGAKMNALDTLGQTALHRAALAGHLQTCRLLLSYGSDPSIISLQGFTAAQMGNEAVQQILSESTPIRTSDVDYRLLEASKAGDLETVKQLCSSQNVNCRDLEGRHSTPLHFAAGYNRVSVVEYLLHHGADVHAKDKGGLVPLHNACSYGHYEVAELLVRHGASVNVADLWKFTPLHEAAAKGKYEICKLLLKHGADPTKKNRDGNTPLDLVKEGDTDIQDLLKGDAALLDAAKKGCLARVQKLCTPENINCRDTQGRNSTPLHLAAGYNNLEVAEYLLEHGADVNAQDKGGLIPLHNAASYGHVDIAALLIKYNTCVNATDKWAFTPLHEAAQKGRTQLCALLLAHGADPTMKNQEGQTPLDLATADDIRALLIDAMPPEALPTCFKPQATVVSASLISPASTPSCLSAASSIDNLTGPLAELAVGGASNAGDGAAGTERKEGEVAGLDMNISQFLKSLGLEHLRDIFETEQITLDVLADMGHEELKEIGINAYGHRHKLIKGVERLLGGQQGTNPYLTFHCVNQGTDFAGSAPEDKEYQSVEEGDAKYYFENTEMVVMLAGIFNRYNVIRIQKVVNKKLRERFCHRQKEVSEENHNHHNERMLFHGSPFINAIIHKGFDERHAYIGGMFGAGIYFAENSSKSNQYVYGIGGGTGCPTHKDRSCYICHRQMLFCRVTLGKSFLQFSTMKMAHAPPGHHSVIGRPSVNGLAYAEYVIYRGEQAYPEYLITYQIMKPEAPSQTATAAEQKT

SEQ ID NO: 746289 - protein, 1095 aa, Homo sapiens; identical to SEQ ID NO: 746288

SEQ ID NO: 746290 - protein, 1095 aa, Homo sapiens; identical to SEQ ID NO: 746288

SEQ ID NO: 746291 - protein, 1095 aa, Homo sapiens; identical to SEQ ID NO: 746288

SEQ ID NO: 746292 - protein, 1450 aa, Homo sapiens
RTASSSSPPDEAEVRHVEAPRRSFGARALGGGSKLTSWIFSCFSLVFDFFWTLVSTISEMPSSLLGAAMPASTSAAALQEALENAGRLIDRQLQEDRMYPDLSELLMVSAPNNPTVSGMSDMDYPLQGPGLLSVPNLPEISSIRRVPLPPELVEQFGHMQCNCMMGVFPPISRAWLTIDSDIFMWNYEDGGDLAYFDGLSETILAVGLVKPKAGIFQPHVRHLLVLATPVDIVILGLSYANLQTGSGVLNDSLSGGMQLLPDPLYSLPTDNTYLLTITSTDNGRIFLAGKDGCLYEVAYQAEAGWFSQRCRKINHSKSSLSFLVPSLLQFTFSEDDPILQIAIDNSRNILYTRSEKGVIQVYDLGQDGQGMSRVASVSQNAIVSAAGNIARTIDRSVFKPIVQIAVIENSESLDCQLLAVTHAGVRLYFSTCPFRQPLARPNTLTLVHVRLPPGFSASSTVEKPSKVHRALYSKGILLMAASENEDNDILWCVNHDTFPFQKPMMETQMTAGVDGHSWALSAIDELKVDKIITPLNKDHIPITDSPVVVQQHMLPPKKFVLLSAQGSLMFHKLRPVDQLRHLLVSNVGGDGEEIERFFKLHQEDQACATCLILACSTAACDREVSAWATRAFFRYGGEAQMRFPTTLPPPSNVGPILGSPVYSSSPVPSGSPYPNPSFLGTPSHGIQPPAMSTPVCALGNPATQATNMSCVTGPEIVYSGKHNGICIYFSRIMGNIWDASLVVERIFKSGNREITAIESSVPCQLLESVLQELKGLQEFLDRNSQFAGGPLGNPNTTAKVQQRLIGFMRPENGNPQQMQQELQRKFHEAQLSEKISLQAIQQLVRKSYQALALWKLLCEHQFTIIVAELQKELQEQLKITTFKDLVIRDKELTGALIASLINCYIRDNAAVDGISLHLQDICPLLYSTDDAICSKANELLQRSRQVQNKTEKERMLRESLKEYQKISNQVDLSNVCAQYRQVRFYEGVVELSLTAAEKKDPQGLGLHFYKHGEPEEDIVGLQAFQERLNSYKCITDTLQELVNQSKAAPQSPSVPKKPGPPVLSSDPNMLSNEEAGHHFEQMLKLSQRSKDELFSIALYNWLIQVDLADKLLQVASPFLEPHLVRMAKVDQNRVRYMDLLWRYYEKNRSFSNAARVLSRLADMHSTEISLQQRLEYIARAILSAKSSTAISSIAADGEFLHELEEKMEVARIQLQIQETLQRQYSHHSSVQDAVSQLDSELMDITKLYGEFADPFKLAECKLAIIHCAGYSDPILVQTLWQDIIEKELSDSVTLSSSDRMHALSLKIVLLGKIYAGTPRFFPLDFIVQFLEQQVCTLNWDVGFVIQTMNEIGVPLPRLLEVYDQLFKSRDPFWNRMKKPLHLLDCIHVLLIRYVENPSQVLNCERRRFTNLCLDAVCGYLVELQSMSSSVAVQAITGNFKSLQAKLERLH

SEQ ID NO: 746293 - protein, 1450 aa, Homo sapiens; identical to SEQ ID NO: 746292

SEQ ID NO: 746294 - protein, 1450 aa, Homo sapiens; identical to SEQ ID NO: 746292

SEQ ID NO: 746295 - protein, 1021 aa, Homo sapiens
RTASSSSPPDEAEVRHVEAPRRSFGARALGGGSKLTSWIFSCFSLVFDFFWTLVSTISEMPSSLLGAAMPASTSAAALQEALENAGRLIDRQLQEDRMYPDLSELLMVSAPNNPTVSGMSDMDYPLQGPGLLSVPNLPEISSIRRVPLPPELVEQFGHMQCNCMMGVFPPISRAWLTIDSDIFMWNYEDGGDLAYFDGLSETILAVGLVKPKAGIFQPHVRHLLVLATPVDIVILGLSYANLQTGSGVLNDSLSGGMQLLPDPLYSLPTDNTYLLTITSTDNGRIFLAGKDGCLYEVAYQAEAGWFSQRCRKINHSKSSLSFLVPSLLQFTFSEDDPILQIAIDNSRNILYTRSEKGVIQVYDLGQDGQGMSRVASVSQNAIVSAAGNIARTIDRSVFKPIVQIAVIENSESLDCQLLAVTHAGVRLYFSTCPFRQPLARPNTLTLVHVRLPPGFSASSTVEKPSKVHRALYSKGILLMAASENEDNDILWCVNHDTFPFQKPMMETQMTAGVDGHSWALSAIDELKVDKIITPLNKDHIPITDSPVVVQQHMLPPKKFVLLSAQGSLMFHKLRPVDQLRHLLVSNVGGDGEEIERFFKLHQEDQACATCLILACSTAACDREVSAWATRAFFRYGGEAQMRFPTTLPPPSNVGPILGSPVYSSSPVPSGSPYPNPSFLGTPSHGIQPPAMSTPVCALGNPATQATNMSCVTGPEIVYSGKHNGICIYFSRIMGNIWDASLVVERIFKSGNREITAIESSVPCQLLESVLQELKGLQEFLDRNSQFAGGPLGNPNTTAKVQQRLIGFMRPENGNPQQMQQELQRKFHEAQLSEKISLQAIQQLVRKSYQALALWKLLCEHQFTIIVAELQKELQEQLKITTFKDLVIRDKELTGALIASLINCYIRDNAAVDGISLHLQDICPLLYSTDDAICSKANELLQRSRQVQNKTEKERMLRESLKEYQKISNQVDLPWSGPETSEIIRVGDLPNGGKKNPGRAQLKRDQHGDTLNRHNRSTPHGA

SEQ ID NO: 746296 - protein, 1332 aa, Homo sapiens
MSDMDYPLQGPGLLSVPNLPEISSIRRVPLPPELVEQFGHMQCNCMMGVFPPISRAWLTIDSDIFMWNYEDGGDLAYFDGLSETILAVGLVKPKAGIFQPHVRHLLVLATPVDIVILGLSYANLQTGSGVLNDSLSGGMQLLPDPLYSLPTDNTYLLTITSTDNGRIFLAGKDGCLYEVAYQAEAGWFSQRCRKINHSKSSLSFLVPSLLQFTFSEDDPILQIAIDNSRNILYTRSEKGVIQVYDLGQDGQGMSRVASVSQNAIVSAAGNIARTIDRSVFKPIVQIAVIENSESLDCQLLAVTHAGVRLYFSTCPFRQPLARPNTLTLVHVRLPPGFSASSTVEKPSKVHRALYSKGILLMAASENEDNDILWCVNHDTFPFQKPMMETQMTAGVDGHSWALSAIDELKVDKIITPLNKDHIPITDSPVVVQQHMLPPKKFVLLSAQGSLMFHKLRPVDQLRHLLVSNVGGDGEEIERFFKLHQEDQACATCLILACSTAACDREVSAWATRAFFRYGGEAQMRFPTTLPPPSNVGPILGSPVYSSSPVPSGSPYPNPSFLGTPSHGIQPPAMSTPVCALGNPATQATNMSCVTGPEIVYSGKHNGICIYFSRIMGNIWDASLVVERIFKSGNREITAIESSVPCQLLESVLQELKGLQEFLDRNSQFAGGPLGNPNTTAKVQQRLIGFMRPENGNPQQMQQELQRKFHEAQLSEKISLQAIQQLVRKSYQALALWKLLCEHQFTIIVAELQKELQEQLKITTFKDLVIRDKELTGALIASLINCYIRDNAAVDGISLHLQDICPLLYSTDDAICSKANELLQRSRQVQNKTEKERMLRESLKEYQKISNQVDLSNVCAQYRQVRFYEGVVELSLTAAEKKDPQGLGLHFYKHGEPEEDIVGLQAFQERLNSYKCITDTLQELVNQSKAAPQSPSVPKKPGPPVLSSDPNMLSNEEAGHHFEQMLKLSQRSKDELFSIALYNWLIQVDLADKLLQVASPFLEPHLVRMAKVDQNRVRYMDLLWRYYEKNRSFSNAARVLSRLADMHSTEISLQQRLEYIARAILSAKSSTAISSIAADGEFLHELEEKMEVARIQLQIQETLQRQYSHHSSVQDAVSQLDSELMDITKLYGEFADPFKLAECKLAIIHCAGYSDPILVQTLWQDIIEKELSDSVTLSSSDRMHALSLKIVLLGKIYAGTPRFFPLDFIVQFLEQQVCTLNWDVGFVIQTMNEIGVPLPRLLEVYDQLFKSRDPFWNRMKKPLHLLDCIHVLLIRYVENPSQVLNCERRRFTNLCLDAVCGYLVELQSMSSSVAVQAITGNFKSLQAKLERLH

SEQ ID NO: 746297 - protein, 1450 aa, Homo sapiens; identical to SEQ ID NO: 746292

SEQ ID NO: 746298 - protein, 1255 aa, Homo sapiens
RTASSSSPPDEAEVRHVEAPRRSFGARALGGGSKLTSWIFSCFSLVFDFFWTLVSTISEMPSSLLGAAMPASTSAAALQEALENAGRLIDRQLQEDRMYPDLSELLMVSAPNNPTVSGMSDMDYPLQGPGLLSVPNLPEISSIRRVPLPPELVEQFGHMQCNCMMGVFPPISRAWLTIDSDIFMWNYEDGGDLAYFDGLSETILAVGLVKPKAGIFQPHVRHLLVLATPVDIVILGLSYANLQTGSGVLNDSLSGGMQLLPDPLYSLPTDNTYLLTITSTDNGRIFLAGKDGCLYEVAYQAEAGWFSQRCRKINHSKSSLSFLVPSLLQFTFSEDDPILQIAIDNSRNILYTRSEKGVIQVYDLGQDGQGMSRVASVSQNAIVSAAGNIARTIDRSVFKPIVQIAVIENSESLDCQLLAVTHAGVRLYFSTCPFRQPLARPNTLTLVHVRLPPGFSASSTVEKPSKVHRALYSKGILLMAASENEDNDILWCVNHDTFPFQKPMMETQMTAGVDGHSWALSAIDELKVDKIITPLNKDHIPITDSPVVVQQHMLPPKKFVLLSAQGSLMFHKLRPVDQLRHLLVSNVGGDGEEIERFFKLHQEDQACATCLILACSTAACDREVSAWATRAFFRYGGEAQMRFPTTLPPPSNVGPILGSPVYSSSPVPSGSPYPNPSFLGTPSHGIQPPAMSTPVCALGNPATQATNMSCVTGPEIVYSGKHNGICIYFSRIMGNIWDASLVVERIFKSGNREITAIESSVPCQLLESVLQELKGLQEFLDRNSQFAGGPLGNPNTTAKVQQRLIGFMRPENGNPQQMQQELQRKFHEAQLSEKISLQAIQQLVRKSYQALALWKLLCEHQFTIIVAELQKELQEQLKITTFKDLVIRDKELTGALIASLINCYIRDNAAVDGISLHLQDICPLLYSTDDAICSKANELLQRSRQVQNKTEKERMLRESLKEYQKISNQVDLSNVCAQYRQVRFYEGVVELSLTAAEKKDPQGLGLHFYKHGEPEEDIVGLQAFQERLNSYKCITDTLQELVNQSKAAPQSPSVPKKPGPPVLSSDPNMLSNEEAGHHFEQMLKLSQRSKDELFSIALYNWLIQVDLADKLLQVASPFLEPHLVRMAKVDQNRVRYMDLLWRYYEKNRSFSNAARVLSRLADMHSTEISLQQRLEYIARAILSAKSSTAISSIAADGEFLHELEEKMEVARIQLQIQETLQRQYSHHSSVQDAVSQLDSELMDITKVIKKQVKFL

SEQ ID NO: 746299 - protein, 134 aa, Homo sapiens
MGMYNRNQSSPPPGDLHFRSLRLPVTPERQTADWPSCLKTQPDSDACQPASPTRAAALPTRMGGTTPPRCPRAERSRGSTGIARASALAAGGAGVLRGRDQSAIRAATPDLGRQLSSHCDGHWGAPSILVKFSL

SEQ ID NO: 746300 - protein, 140 aa, Homo sapiens [sequence omitted]

SEQ ID NO: 746301 - protein, 140 aa, Homo sapiens [sequence omitted]

SEQ ID NO: 746302 - protein, 140 aa, Homo sapiens [sequence omitted]

SEQ ID NO: 746303 - protein, 158 aa, Homo sapiens
FTIKIFSPQVSNIEESLTRRHRSFMGMYNRNQSSPPPGDLHFRSLRLPVTPERQTADWPSCLKTQPDSDACQPASPTRAAALPTRMGGTTPPRCPRAERSRGSTGIARASALAAGGAGVLRGRDQSAIRAATPDLGRQLSSHCDGHWGAPSILVKFSL

SEQ ID NO: 746304 - protein, 134 aa, Homo sapiens; identical to SEQ ID NO: 746299

SEQ ID NO: 746305 - protein, 140 aa, Homo sapiens [sequence omitted]

SEQ ID NO: 746306 - protein, 140 aa, Homo sapiens [sequence omitted]

SEQ ID NO: 746307 - protein, 101 aa, Homo sapiens
CPSFPAVRPGFQQTMDQRWSMAWELGTPALKNTQIQGKLKVTENKTPPFHSAFTCFFLISSLLQSCVMCIMIIPILENLNPKQFFNNEQEKQVINIYSAFY

SEQ ID NO: 746308 - protein, 548 aa, Homo sapiens
MALHVPKAPGFAQMLKEGAKHFSGLEEAVYRNIQACKELAQTTRTAYGPKGMNKMVINHLEKLFVTNDAATILRELEVQHPAAKMIVMASHMQEQEVGDGTNFVLVFAGALLELAEELLRIGLSVSEVIEGYEIACRKAHEILPNLVCCSAKNLRDIDEVSSLLRTSIMSKQYGNEVFLAKLIAQACVSIFPDSGHFNVDNIRVCKILGSGISSSSVLHGMVFKKETEGDVTSVKDAKIAVYSCPFDGMITETKGTVLIKTAEELMNFSKGEENLMDAQVKAIADTGANVVVTGGKVADMALHYANKYNIMLVRLNSKWDLRRLCKTVGATALPRLTPPVLEEMGHCDSVYLSEVGDTQVVVFKHEKEDGAISTIVLRGSTDNLMDDIERVVDDGVNTFKVLTRDKRLVPGGGATEIELAKQITSYGETCPGLEQYAIKKFAEAFEAIPRALAENSGVKANEVISKLYAVHQEGNKNVGLDIEAEVPAVKDMLEAGILDTYLGKYWAIKLATNAAVTVLRVDQIIMAKPAGGPKPPSGKKDWDDDQND

SEQ ID NO: 746309 - protein, 250 aa, Homo sapiens
MFVELNNLLNTTPDRAEQGKLTLLCDAKTDGSFLVHHFLSFYLKANCKVCFVALIQSFSHYSIVGQKLGVSLTMARERGQLVFLEGLKSAVDVVFQAQKEPHPLQFLREANAGNLKPLFEFVREALKPVDSGEARWTYPVLLVDDLSVLLSLGMGAVAVLDFIHYCRATVCWELKGNMVVLVHDSGDAEDEENDILLNGLSHQSHLILRAEGLATGFCRDVHGQVCRGLLGNGLLARVPVILDYIGESQA

SEQ ID NO: 746310 - protein, 266 aa, Homo sapiens
MFVELNNLLNTTPDRAEQGKLTLLCDAKTDGSFLVHHFLSFYLKANCKVCFVALIQSFSHYSIVGQKLGVSLTMARERGQLVFLEGLKSAVDVVFQAQKEPHPLQFLREANAGNLKPLFEFVREALKPVDSGEARWTYPVLLVDDLSVLLSLGMGAVAVLDFIHYCRATVCWELKGNMVVLVHDSGDAEDEENDILLNGLSHQSHLILRAEGLATGFCRDVHGQLRILWRRPSQPAVHRDQSFTYQYKIQDKSVSFFAKGMSPAVL

SEQ ID NO: 746311 - protein, 193 aa, Homo sapiens
MARERGQLVFLEGLKSAVDVVFQAQKEPHPLQFLREANAGNLKPLFEFVREALKPVDSGEARWTYPVLLVDDLSVLLSLGMGAVAVLDFIHYCRATVCWELKGNMVVLVHDSGDAEDEENDILLNGLSHQSHLILRAEGLATGFCRDVHGQLRILWRRPSQPAVHRDQSFTYQYKIQDKSVSFFAKGMSPAVL

SEQ ID NO: 746312 - protein, 274 aa, Homo sapiens
IDPGIGLEAWARRKWASGPSRIFSTAGKLTLLCDAKTDGSFLVHHFLSFYLKANCKVCFVALIQSFSHYSIVGQKLGVSLTMARERGQLVFLEGLKSAVDVVFQAQKEPHPLQFLREANAGNLKPLFEFVREALKPVDSGEARWTYPVLLVDDLSVLLSLGMGAVAVLDFIHYCRATVCWELKGNMVVLVHDSGDAEDEENDILLNGLSHQSHLILRAEGLATGFCRDVHGQLRILWRRPSQPAVHRDQSFTYQYKIQDKSVSFFAKGMSPAVL

SEQ ID NO: 746313 - protein, 193 aa, Homo sapiens; identical to SEQ ID NO: 746311

SEQ ID NO: 746314 - protein, 266 aa, Homo sapiens; identical to SEQ ID NO: 746310

SEQ ID NO: 746315 - protein, 217 aa, Homo sapiens
MPRQMGVSLYTTFSPSISKGVSLTMARERGQLVFLEGLKSAVDVVFQAQKEPHPLQFLREANAGNLKPLFEFVREALKPVDSGEARWTYPVLLVDDLSVLLSLGMGAVAVLDFIHYCRATVCWELKGNMVVLVHDSGDAEDEENDILLNGLSHQSHLILRAEGLATGFCRDVHGQLRILWRRPSQPAVHRDQSFTYQYKIQDKSVSFFAKGMSPAVL

SEQ ID NO: 746316 - protein, 217 aa, Homo sapiens; identical to SEQ ID NO: 746315

SEQ ID NO: 746317 - protein, 274 aa, Homo sapiens
MFVELNNLLNTTPDRAEQGKLTLLCDAKTDGSFLVHHFLSFYLKANCKVCFVALIQSFSHYSIVGQKLGVSLTMARERGQLVFLEGLKSAVDVVFQAQKEPHPLQFLREANAGNLKPLFEFVREALKPVDSGEARWTYPVLLVDDLSVLLSLGMGAVAVLDFIHYCRATVCWELKASILYLMQGNMVVLVHDSGDAEDEENDILLNGLSHQSHLILRAEGLATGFCRDVHGQLRILWRRPSQPAVHRDQSFTYQYKIQDKSVSFFAKGMSPAVL

SEQ ID NO: 746318 - protein, 129 aa, Homo sapiens
MFVELNNLLNTTPDRAEQGKLTLLCDAKTDGSFLVHHFLSFYLKANCKVCFVALIQSFSHYSIVGQKLGVSLTMARERGQLVFLEGLKSAVDVVFQAQKEPHPLQFLRETWWSLCTTVEMRRMRRMTSC

SEQ ID NO: 746319 - protein, 108 aa, Homo sapiens
MFVELNNLLNTTPDRAEQGKLTLLCDAKTDGSFLVHHFLSFYLKANCKVCFVALIQSFSHYSIVGQKLGVSLTMARERGQLVFLEGLKSAVDVVFQAQKEPHPLQFLS

SEQ ID NO: 746320 - protein, 293 aa, Homo sapiens
PVASRGCRAVFGVSSSLRRSRSQHSRVLRSRRASSPGSLGNVSGEAQVTRVLTYQHTGTERRSRGREREPANVHAGCAKRTRSGEVSRATRLICTFSFFLDLKTCIKWCTYRPAVRGMSICMPCQPFTDNVAHSKLDVTPDHGGWSVGCVCSLRESSTCPMERTIYAQAHRRGSHQPRACRFLREANAGNLKPLFEFVREALKPVDSGEARWTYPVLLVDDLSVLLSLGMGAVAVLDFIHYCRATVCWELKLRILWRRPSQPAVHRDQSFTYQYKIQDKSVSFFAKGMSPAVL

SEQ ID NO: 746321 - protein, 181 aa, Homo sapiens
MFVELNNLLNTTPDRAEQGKLTLLCDAKTDGSFLVHHFLSFYLKANCKVCFVALIQSFSHYSIVGQKLGVSLTMARERGQLVFLEGLKSAVDVVFQAEPGHGGGGCARLHSLLQSHRVLGTKGTHGTAFSAPTCDLQELRQVQTSLACCDLFICLGFWLYSGRPRKLLQPPCFPLPAIAEK

SEQ ID NO: 746322 - protein, 114 aa, Homo sapiens
MISTHCSLHPQGSSDPPISASQVAWTTDTCYHTQLIFIFLVETGFHHVGQAGLDLLSSSNLPTSASQSAGITGVSHCTRPTLCPPLELGLGTVARPDSLNVQFKDGRQWGISSI

SEQ ID NO: 746323 - protein, 136 aa, Homo sapiens; identical to SEQ ID NO: 741065

SEQ ID NO: 746324 - protein, 349 aa, Homo sapiens [sequence omitted]

SEQ ID NO: 746325 - protein, 334 aa, Homo sapiens
MNILYSSDTTLGILPVFQSGIGLMGNLLLFITYMYIFLFWPHQKNPLDVILMHLTLANVITVIIRGVPYIMSSFRLRSTFVDTGCKTGLYIYKMTWGICVCTSSLLSTFQAVIICPCHSKWAWLKLKSPHKFSLIDLFLNNRLINMWVIISTVATSKSTNVGLVYSLIYCKTRLFIYYHAMIFQSAMFTQGFLFLFLMIWTSFYMVTIFLRHQKTVFHIHSISLSPQSFPETEASHVFFLLVSRFVFFYGTNVCLSTYISSMYENSLILENITSFVSSSYPIICTLILINYDNKVSRLTCAILNMIISPCLPHSFLLHQRNPDKNYFNHKRMCF

SEQ ID NO: 746326 - protein, 280 aa, Homo sapiens
MDLQGRGVPSIDRLRVLLMLFHTMAQIMAEQEVENLSGLSTNPEKDIFVVRENGTTCLMAEFAAKFIVPYDVWASNYVDLITEQADIALTRGAEVKGRCGHSQSELQVFWVDRAYALKMLFVKESHNMSKGPEATWRLSKVQFVYDSSEKTHFKDAVSAGKHTANSHHLSALVTPAGKSYECQAQQTISLASSDPQKTVTMILSAVHIQPFDIISDFVFSEEHKCPVDEREQLEETLPLILGLILGLVIMVTLAIYHVHHKMTANQVQIPRDRSQYKHMG

SEQ ID NO: 746327 - protein, 414 aa, Homo sapiens
RTVTVRTRIAVLSLRPQCGGILFRHVVVLTLGNGLGQNLDLASVQAHAAVQGRRVLIPGVNIRQENLGRGRFHDHVQDAAVGGVGQALRCHQHKAVGLTQHLEPFPDLRAECRVAEHQPGFVQDDERPPVWWNSNPEKDIFVVRENGTTCLMAEFAAKFIVPYDVWASNYVDLITEQADIALTRGAEVKGRCGHSQSELQVFWVDRAYALKMLFVKVTPSPAGRGAAGSAWVWEVAAPRFKNPELRGRLKRTSPAQQESHNMSKGPEATWRLSKVQFVYDSSEKTHFKDAVSAGKHTANSHHLSALVTPAGKSYECQAQQTISLASSDPQKTVTMILSAVHIQPFDIISDFVFSEEHKCPVDEREQLEETLPLILGLILGLVIMVTLAIYHVHHKMTANQVQIPRDRSQYKHMG

SEQ ID NO: 746328 - protein, 153 aa, Homo sapiens [sequence omitted]

SEQ ID NO: 746329 - protein, 302 aa, Homo sapiens
RTVTVRTRIAVLSLRPPVWWNSNPEKDIFVVRENGTTCLMAEFAAKFIVPYDVWASNYVDLITEQADIALTRGAEVKGRCGHSQSELQVFWVDRAYALKMLFVKVTPSPAGRGAAGSAWVWEVAAPRFKNPELRGRLKRTSPAQQESHNMSKGPEATWRLSKVQFVYDSSEKTHFKDAVSAGKHTANSHHLSALVTPAGKSYECQAQQTISLASSDPQKTVTMILSAVHIQPFDIISDFVFSEEHKCPVDEREQLEETLPLILGLILGLVIMVTLAIYHVHHKMTANQVQIPRDRSQYKHMG

SEQ ID NO: 746330 - protein, 186 aa, Homo sapiens
MGRRCGHSQSELQVFWVDRAYALKMLFVKESHNMSKGPEATWRLSKVQFVYDSSEKTHFKDAVSAGKHTANSHHLSALVTPAGKSYECQAQQTISLASSDPQKTVTMILSAVHIQPFDIISDFVFSEEHKCPVDEREQLEETLPLILGLILGLVIMVTLAIYHVHHKMTANQVQIPRDRSQYKHMG

SEQ ID NO: 746331 - protein, 162 aa, Homo sapiens
MLFVKESHNMSKGPEATWRLSKVQFVYDSSEKTHFKDAVSAGKHTANSHHLSALVTPAGKSYECQAQQTISLASSDPQKTVTMILSAVHIQPFDIISDFVFSEEHKCPVDEREQLEETLPLILGLILGLVIMVTLAIYHVHHKMTANQVQIPRDRSQYKHMG

SEQ ID NO: 746332 - protein, 280 aa, Homo sapiens; identical to SEQ ID NO: 746326

SEQ ID NO: 746333 - protein, 321 aa, Homo sapiens
MDLQGRGVPSIDRLRVLLMLFHTMAQIMAEQEVENLSGLSTNPEKDIFVVRENGTTCLMAEFAAKFIVPYDVWASNYVDLITEQADIALTRGAEVKGRCGHSQSELQVFWVDRAYALKMLFVKVTPSPAGRGAAGSAWVWEVAAPRFKNPELRGRLKRTSPAQQESHNMSKGPEATWRLSKVQFVYDSSEKTHFKDAVSAGKHTANSHHLSALVTPAGKSYECQAQQTISLASSDPQKTVTMILSAVHIQPFDIISDFVFSEEHKCPVDEREQLEETLPLILGLILGLVIMVTLAIYHVHHKMTANQVQIPRDRSQYKHMG

SEQ ID NO: 746334 - protein, 135 aa, Homo sapiens
VPDLPQSLDLGPLALWVAGSLDDAGEKACVHCLSSNFSFSKGSSQNAQLSPLQKALPERAQVEDVCIYLETVHGETQRGVLTRQQVHSSRHHECSPYARVHLLKSLTKQPNCGWDYSLFIGEKTEAESHWVVCQS

SEQ ID NO: 746335 - protein, 447 aa, Homo sapiens
GHQDNGRRRRRVTSGCGLARGSSAMVFSNNDEGLINKKLPKELLLRIFSFLDIVTLCRCAQISKAWNILALDGSNWQRIDLFNFQTDVEGRVVENISKRCGGFLRKLSLRGCIGVGDSSLKTFAQNCRNIEHLNLNGCTKITDSTCYSLSRFCSKLKHLDLTSCVSITNSSLKGISEGCRNLEYLNLSWCDQITKDGIEALVRGCRGLKALLLRGCTQLEDEALKHIQNYCHELVSLNLQSCSRITDEGVVQICRGCHRLQALCLSGCSNLTDASLTALGLNCPRLQILEAARCSHLTDAGFTLLARNCHELEKMDLEECILITDSTLIQLSIHCPKLQALSLSHCELITDDGILHLSNSTCGHERLRVLELDNCLLITDVALEHLENCRGLERLELYDCQQVTRAGIKRMRAQLPHVKVHAYFAPVTPPTAVAGSGQRLCRCCVIL

SEQ ID NO: 746336 - protein, 447 aa, Homo sapiens; identical to SEQ ID NO: 746335

SEQ ID NO: 746337 - protein, 447 aa, Homo sapiens; identical to SEQ ID NO: 746335

SEQ ID NO: 746338 - protein, 447 aa, Homo sapiens; identical to SEQ ID NO: 746335

SEQ ID NO: 746339 - protein, 447 aa, Homo sapiens; identical to SEQ ID NO: 746335

SEQ ID NO: 746340 - protein, 478 aa, Homo sapiens
GHQDNGRRRRRVTSGCGLARGSSAMVFSNNDEGLINKKLPKELLLRMLFSLMLNFTWSNPECTKYVHSIGLDSFCNGIFSFLDIVTLCRCAQISKAWNILALDGSNWQRIDLFNFQTDVEGRVVENISKRCGGFLRKLSLRGCIGVGDSSLKTFAQNCRNIEHLNLNGCTKITDSTCYSLSRFCSKLKHLDLTSCVSITNSSLKGISEGCRNLEYLNLSWCDQITKDGIEALVRGCRGLKALLLRGCTQLEDEALKHIQNYCHELVSLNLQSCSRITDEGVVQICRGCHRLQALCLSGCSNLTDASLTALGLNCPRLQILEAARCSHLTDAGFTLLARNCHELEKMDLEECILITDSTLIQLSIHCPKLQALSLSHCELITDDGILHLSNSTCGHERLRVLELDNCLLITDVALEHLENCRGLERLELYDCQQVTRAGIKRMRAQLPHVKVHAYFAPVTPPTAVAGSGQRLCRCCVIL

SEQ ID NO: 746341 - protein, 432 aa, Homo sapiens
MLFSLMLNFTWSNPECTKYVHSIGLDSFCNGIFSFLDIVTLCRCAQISKAWNILALDGSNWQRIDLFNFQTDVEGRVVENISKRCGGFLRKLSLRGCIGVGDSSLKTFAQNCRNIEHLNLNGCTKITDSTCYSLSRFCSKLKHLDLTSCVSITNSSLKGISEGCRNLEYLNLSWCDQITKDGIEALVRGCRGLKALLLRGCTQLEDEALKHIQNYCHELVSLNLQSCSRITDEGVVQICRGCHRLQALCLSGCSNLTDASLTALGLNCPRLQILEAARCSHLTDAGFTLLARNCHELEKMDLEECILITDSTLIQLSIHCPKLQALSLSHCELITDDGILHLSNSTCGHERLRVLELDNCLLITDVALEHLENCRGLERLELYDCQQVTRAGIKRMRAQLPHVKVHAYFAPVTPPTAVAGSGQRLCRCCVIL

SEQ ID NO: 746342 - protein, 453 aa, Homo sapiens
GHQDNGRRRRRVTSGCGLARGSSAMVFSNNDEGLINKKLPKELLLRIFSFLDIVTLCRCAQISKAWNILALDGSNWQRIDLFNFQTDVEGRVVENISKRCGGFLRKLSLRGCIGVGDSSLKTFAQNCRNIEHLNLNGCTKITDSALLFFSTCYSLSRFCSKLKHLDLTSCVSITNSSLKGISEGCRNLEYLNLSWCDQITKDGIEALVRGCRGLKALLLRGCTQLEDEALKHIQNYCHELVSLNLQSCSRITDEGVVQICRGCHRLQALCLSGCSNLTDASLTALGLNCPRLQILEAARCSHLTDAGFTLLARNCHELEKMDLEECILITDSTLIQLSIHCPKLQALSLSHCELITDDGILHLSNSTCGHERLRVLELDNCLLITDVALEHLENCRGLERLELYDCQQVTRAGIKRMRAQLPHVKVHAYFAPVTPPTAVAGSGQRLCRCCVIL

SEQ ID NO: 746343 - protein, 112 aa, Homo sapiens
MVFLFQSLSHCELITDDGILHLSNSTCGHERLRVLELDNCLLITDVALEHLENCRGLERLELYDCQQVTRAGIKRMRAQLPHVKVHAYFAPVTPPTAVAGSGQRLCRCCVIL

SEQ ID NO: 746344 - protein, 134 aa, Homo sapiens
SFSDIIHLLKMKEPSHHNKKLFGFSFCKSLSHCELITDDGILHLSNSTCGHERLRVLELDNCLLITDVALEHLENCRGLERLELYDCQQVTRAGIKRMRAQLPHVKVHAYFAPVTPPTAVAGSGQRLCRCCVIL

SEQ ID NO: 746345 - protein, 244 aa, Homo sapiens
GHQDNGRRRRRVTSGCGLARGSSAMVFSNNDEGLINKKLPKELLLRIFSFLDIVTLCRCAQISKAWNILALDGSNWQRIDLFNFQTDVEGRVVENISKRCGGFLRKLSLRGCIGVGDSSLKTFAQNCRNIEHLNLNGCTKITDSTCYSLSRFCSKLKHLDLTSCVSITNSSLKGISEGCRNLEYLNLSWCDQITKDGIEALVRGCRGLKALLLRGCTQEVRSRCFGLEQNLLRLSHVLSVIFGR

SEQ ID NO: 746346 - protein, 1844 aa, Homo sapiens
SALPCVHRVETWDVKDVVNCVGGMGALLPLLERVAAQPKEAEAGPAETHDLVGPELTSGHNTQGLVLPLGKSSEERMERNAVAAFLLMLRNFLQGHMVNQESLVQCQGPAIIGALLRKVPSWAMDMNVLMSAQLLMEQVAAEGSGPLLYLLYQHLLFNFHLWTLSDFAVRLGHIQYMSSIVREHRQKLRKKYGVQFILDALRTHYSPQRERPLAADDLRTVQTSLLGLAREFLVRSLSADDVQVTQTMLSFLAATGDDGQAVGALDLLLALLHGSLVQESLAVFLLEPGNLEVLLALLVRPGSLPLLPDRVCKILRRLQQNERLPERSRQRLRLRECGLQGLVACLPEGTVSPQLCQGLYKLFLGADCLNLSDLLAVVQLSLQADLSVRLDICRQLFHLIYGQPDVVRLLARQAGWQDVLTRLYVLEAATAGSPPPSSPESPTSPKPAPPKPPTESPAEPSDVFLPSEAPCPDPDGFYHALSPFCTPFDLGLERSSVGSGNTAGGGGSSGTLTPASQPGTPSPLDGPRPFPAAPGRHSSSLSNVLEDGSLPEPTISGDDTSNTSNPQQTSEEELCNLLTNVLFSVTWRGVEGSDEAAWRERGQVFSVLTQLGASATLVRPPDCIKRSLLEMMLESALTDIKEAPVGVLASLTQQALWLLRLLQDFLCAEGHGNQELWSEKLFEGVCSLLDRLGAWPHLANGTADLREMAQIGLRLVLGYILLEDPQLHAQAYVRLHMLLQTAVPARREEACYVLSKLEAALGRVLNTSSLESATDEAGSPLAAAAAAAAAERCSWLVPLVRTLLDRAYEPLGLQWGLPSLPPTNGSPTFFEDFQAFCATPEWRHFIDKQVQPTMSQFEMDTYAKSHDLMSGFWNACYDMLMSSGQRRQWERAQSRRAFQELVLEPAQRRARLEGLRYTAVLKQQATQHSMALLHWGALWRQLASPCGAWALRDTPIPRWKLSSAETYSRMRLKLVPNHHFDPHLEASALRDNLGEVPLTPTEEASLPLAVTKEAKVSTPPELLQEDQLGEDELAELETPMEAAELDEQREKLVLSAECQLVTVVAVVPGLLEVTTQNVYFYDGSTERVETEEGIGYDFRRPLAQLREVHLRRFNLRRSALELFFIDQANYFLNFPCKVGTTPVSSPSQTPRPQPGPIPPHTQVRNQVYSWLLRLRPPSQGYLSSRSPQEMLRASGLTQKWVQREISNFEYLMQLNTIAGRTYNDLSQYPVYESFEDPAGTIDKFHYGTHYSNAAGVMHYLIRVEPFTSLHVQLQSGRFDCSDRQFHSVAAAWQARLESPADVKELIPEFFYFPDFLENQNGFDLGCLQLTNEKVGDVVLPPWASSPEDFIQQHRQALESEYVSAHLHEWIDLIFGYKQRGPAAEEALNVFYYCTYEGAVDLDHVTDERERKALEGIISNFGQTPCQLLKEPHPTRLSAEEAAHRLARLDTNSPSIFQHLDELKAFFAEVVSDGVPLVLALVPHRQPHSFITQGSPDLLVTVSASGLLGTHSWLPYDRNISNYFSFSKDPTMGSHKTQRLLSGPWVPGSGVSGQALAVAPDGKLLFSGGHWDGSLRVTALPRGKLLSQLSCHLDVVTCLALDTCGIYLISGSRDTTCMVWRLLHQGGLSVGLAPKPVQVLYGHGAAVSCVAISTELDMAVSGSEDGTVIIHTVRRGQFVAALRPLGATFPGPIFHLALGSEGQIVVQSSAWERPGAQVTYSLHLYSVNGKLRASLPLAEQPTALTVTEDFVLLGTAQCALHILQLNTLLPAAPPLPMKVAIRSVAVTKERSHVLVGLEDGKLIVVVAGQPSEVRSSQFARKLWRSSRRISQVSSGETEYNPTEAR

SEQ ID NO: 746347 - protein, 1961 aa, Homo sapiens
LEDPQTRHRSLPSLSEPFSSCCIGSAGYRIDSTLAGTQDTRWGSPTSLEGELGAVAIFHEALQATALRTLCTLGPNETAPFKPEGELHELSTRLLLHYSPQACKNNICLDLSPSHGLDGRLTGHRVETWDVKDVVNCVGGMGALLPLLERVAAQPKEAEAGPAETHDLVGPELTSGHNTQGLVLPLGKSSEERMERNAVAAFLLMLRNFLQGHMVNQESLVQCQGPAIIGALLRKVPSWAMDMNVLMSAQLLMEQVAAEGSGPLLYLLYQHLLFNFHLWTLSDFAVRLGHIQYMSSIVREHRQKLRKKYGVQFILDALRTHYSPQRERPLAADDLRTVQTSLLGLAREFLVRSLSADDVQVTQTMLSFLAATGDDGQAVGALDLLLALLHGSLVQESLAVFLLEPGNLEVLLALLVRPGSLPLLPDRVCKILRRLQQNERLPERSRQRLRLRECGLQGLVACLPEGTVSPQLCQGLYKLFLGADCLNLSDLLAVVQLSLQADLSVRLDICRQLFHLIYGQPDVVRLLARQAGWQDVLTRLYVLEAATAGSPPPSSPESPTSPKPAPPKPPTESPAEPSDVFLPSEAPCPDPDGFYHALSPFCTPFDLGLERSSVGSGNTAGGGGSSGTLTPASQPGTPSPLDGPRPFPAAPGRHSSSLSNVLEDGSLPEPTISGDDTSNTSNPQQTSEEELCNLLTNVLFSVTWRGVEGSDEAAWRERGQVFSVLTQLGASATLVRPPDCIKRSLLEMMLESALTDIKEAPVGVLASLTQQALWLLRLLQDFLCAEGHGNQELWSEKLFEGVCSLLDRLGAWPHLANGTADLREMAQIGLRLVLGYILLEDPQLHAQAYVRLHMLLQTAVPARREEACYVLSKLEAALGRVLNTSSLESATDEAGSPLAAAAAAAAAERCSWLVPLVRTLLDRAYEPLGLQWGLPSLPPTNGSPTFFEDFQAFCATPEWRHFIDKQVQPTMSQFEMDTYAKSHDLMSGFWNACYDMLMSSGQRRQWERAQSRRAFQELVLEPAQRRARLEGLRYTAVLKQQATQHSMALLHWGALWRQLASPCGAWALRDTPIPRWKLSSAETYSRMRLKLVPNHHFDPHLEASALRDNLGEVPLTPTEEASLPLAVTKEAKVSTPPELLQEDQLGEDELAELETPMEAAELDEQREKLVLSAECQLVTVVAVVPGLLEVTTQNVYFYDGSTERVETEEGIGYDFRRPLAQLREVHLRRFNLRRSALELFFIDQANYFLNFPCKVGTTPVSSPSQTPRPQPGPIPPHTQVRNQVYSWLLRLRPPSQGYLSSRSPQEMLRASGLTQKWVQREISNFEYLMQLNTIAGRTYNDLSQYPVYESFEDPAGTIDKFHYGTHYSNAAGVMHYLIRVEPFTSLHVQLQSGRFDCSDRQFHSVAAAWQARLESPADVKELIPEFFYFPDFLENQNGFDLGCLQLTNEKVGDVVLPPWASSPEDFIQQHRQALESEYVSAHLHEWIDLIFGYKQRGPAAEEALNVFYYCTYEGAVDLDHVTDERERKALEGIISNFGQTPCQLLKEPHPTRLSAEEAAHRLARLDTNSPSIFQHLDELKAFFAEVVSDGVPLVLALVPHRQPHSFITQGSPDLLVTVSASGLLGTHSWLPYDRNISNYFSFSKDPTMGSHKTQRLLSGPWVPGSGVSGQALAVAPDGKLLFSGGHWDGSLRVTALPRGKLLSQLSCHLDVVTCLALDTCGIYLISGSRDTTCMVWRLLHQGGLSVGLAPKPVQVLYGHGAAVSCVAISTELDMAVSGSEDGTVIIHTVRRGQFVAALRPLGATFPGPIFHLALGSEGQIVVQSSAWERPGAQVTYSLHLYSVNGKLRASLPLAEQPTALTVTEDFVLLGTAQCALHILQLNTLLPAAPPLPMKVAIRSVAVTKERSHVLVGLEDGKLIVVVAGQPSEVRSSQFARKLWRSSRRISQVSSGETEYNPTEAR

SEQ ID NO: 746348 - protein, 1886 aa, Homo sapiens
SALPCVHRVETWDVKDVVNCVGGMGALLPLLERVAAQPKEAEAGPAETHDLVGPELTSGHNTQGLVLPLGKSSEERMERNAVAAFLLMLRNFLQGHMVNQESLVQCQGPAIIGALLRKVPSWAMDMNVLMSAQLLMEQVAAEGSGPLLYLLYQHLLFNFHLWTLSDFAVRLGHIQYMSSIVREHRQKLRKKYGVQFILDALRTHYSPQRERPLAADDLRTVQTSLLGLAREFLVRSLSADDVQVTQTMLSFLAATGDDGQAVGALDLLLALLHGSLVQESLAVFLLEPGNLEVLLALLVRPGSLPLLPDRVCKILRRLQQNERLPERSRQRLRLRECGLQGLVACLPEGTVSPQLCQGLYKLFLGADCLNLSDLLAVVQLSLQADLSVRLDICRQLFHLIYGQPDVVRLLARQAGWQDVLTRLYVLEAATAGSPPPSSPESPTSPKPAPPKPPTESPAEPSDVFLPSEAPCPDPDGFYHALSPFCTPFDLGLERSSVGSGNTAGGGGSSGTLTPASQPGTPSPLDGPRPFPAAPGRHSSSLSNVLEDGSLPEPTISGDDTSNTSNPQQTSEEELCNLLTNVLFSVTWRGVEGSDEAAWRERGQVFSVLTQLGASATLVRPPDCIKRSLLEMMLESALTDIKEAPVGVLASLTQQALWLLRLLQDFLCAEGHGNQELWSEKLFEGVCSLLDRLGAWPHLANGTADLREMAQIGLRLVLGYILLEDPQLHAQAYVRLHMLLQTAVPARREEACYVLSKLEAALGRVLNTSSLESATDEAGSPLAAAAAAAAAERCSWLVPLVRTLLDRAYEPLGLQWGLPSLPPTNGSPTFFEDFQAFCATPEWRHFIDKQVQPTMSQFEMDTYAKSHDLMSGFWNACYDMLMSSGQRRQWERAQSRRAFQELVLEPAQRRARLEGLRYTAVLKQQATQHSMALLHWGALWRQLASPCGAWALRDTPIPRWKLSSAETYSRMRLKLVPNHHFDPHLEASALRDNLGEVPLTPTEEASLPLAVTKEAKVSTPPELLQEDQLGEDELAELETPMEAAELDEQREKLVLSAECQLVTVVAVVPGLLEVTTQNVYFYDGSTERVETEEGIGYDFRRPLAQLREVHLRRFNLRRSALELFFIDQANYFLNFPCKVGTTPVSSPSQTPRPQPGPIPPHTQVRNQVYSWLLRLRPPSQGYLSSRSPQEMLRASGLTQKWVQREISNFEYLMQLNTIAGRTYNDLSQYPVFPWVLQDYVSPTLDLSNPAVFRDLSKPIGVVNPKHAQLVREKYESFEDPAGTIDKFHYGTHYSNAAGVMHYLIRVEPFTSLHVQLQSGRFDCSDRQFHSVAAAWQARLESPADVKELIPEFFYFPDFLENQNGFDLGCLQLTNEKVGDVVLPPWASSPEDFIQQHRQALESEYVSAHLHEWIDLIFGYKQRGPAAEEALNVFYYCTYEGAVDLDHVTDERERKALEGIISNFGQTPCQLLKEPHPTRLSAEEAAHRLARLDTNSPSIFQHLDELKAFFAEVVSDGVPLVLALVPHRQPHSFITQGSPDLLVTVSASGLLGTHSWLPYDRNISNYFSFSKDPTMGSHKTQRLLSGPWVPGSGVSGQALAVAPDGKLLFSGGHWDGSLRVTALPRGKLLSQLSCHLDVVTCLALDTCGIYLISGSRDTTCMVWRLLHQGGLSVGLAPKPVQVLYGHGAAVSCVAISTELDMAVSGSEDGTVIIHTVRRGQFVAALRPLGATFPGPIFHLALGSEGQIVVQSSAWERPGAQVTYSLHLYSVNGKLRASLPLAEQPTALTVTEDFVLLGTAQCALHILQLNTLLPAAPPLPMKVAIRSVAVTKERSHVLVGLEDGKLIVVVAGQPSEVRSSQFARKLWRSSRRISQVSSGETEYNPTEAR

SEQ ID NO: 746349 - protein, 1856 aa, Homo sapiens
SALPCVHRVETWDVKDVVNCVGGMGALLPLLERVAAQPKEAEAGPAETHDLVGPELTSGHNTQGLVLPLGKSSEERMERNAVAAFLLMLRNFLQGHMVNQESLVQCQGPAIIGALLRKVPSWAMDMNVLMSAQLLMEQVAAEGSGPLLYLLYQHLLFNFHLWTLSDFAVRLGHIQYMSSIVREHRQKLRKKYGVQFILDALRTHYSPQRERPLAADDLRTVQTSLLGLAREFLVRSLSADDVQVTQTMLSFLAATGDDGQAVGALDLLLALLHGSLVQESLAVFLLEPGNLEVLLALLVRPGSLPLLPDRVCKILRRLQQNERLPERSRQRLRLRECGLQGLVACLPEGTVSPQLCQGLYKLFLGADCLNLSDLLAVVQLSLQADLSVRLDICRQLFHLIYGQPDVVRLLARQAGWQDVLTRLYVLEAATAGSPPPSSPESPTSPKPAPPKPPTESPAEPSDVFLPSEAPCPDPDGFYHALSPFCTPFDLGLERSSVGSGNTAGGGGSSGTLTPASQPGTPSPLDGPRPFPAAPGRHSSSLSNVLEDGSLPEPTISGDDTSNTSNPQQTSEEELCNLLTNVLFSVTWRGVEGSDEAAWRERGQVFSVLTQLGASATLVRPPDCIKRSLLEMMLESALTDIKEAPVGVLASLTQQALWLLRLLQDFLCAEGHGNQELWSEKLFEGVCSLLDRLGAWPHLANGTADLREMAQIGLRLVLGYILLEDPQLHAQAYVRLHMLLQTAVPARREEACYVLSKLEAALGRVLNTSSLESATDEAGSPLAAAAAAAAAERCSWLVPLVRTLLDRAYEPLGLQWGLPSLPPTNGSPTFFEDFQAFCATPEWRHFIDKQVQPTMSQFEMDTYAKSHDLMSGFWNACYDMLMSSGQRRQWERAQSRRAFQELVLEPAQRRARLEGLRYTAVLKQQATQHSMALLHWGALWRQLASPCGAWALRDTPIPRWKLSSAETYSRMRLKLVPNHHFDPHLEASALRDNLGEVPLTPTEEASLPLAVTKEAKVSTPPELLQEDQLGEDELAELETPMEAAELDEQREKLVLSAECQLVTVVAVVPGLLEVTTQNVYFYDGSTERVETEEGIGYDFRRPLAQLREVHLRRFNLRRSALELFFIDQANYFLNFPCKVGTTPVSSPSQTPRPQPGPIPPHTQVRNQVYSWLLRLRPPSQGYLSSRSPQEMLRASGLTQKWVQREISNFEYLMQLNTIAGRTYNDLSQYPVFPWVLQDYVSPTLDLSNPAVFRDLSKPIGVVNPKHAQLVREKYESFEDPAGTIDKFHYGTHYSNAAGVMHYLIRVEPFTSLHVQLQSGRFDCSDRQFHSVAAAWQARLESPADVKELIPEFFYFPDFLENQNGFDLGCLQLTNEKVGDVVLPPWASSPEDFIQQHRQALESEYVSAHLHEWIDLIFGYKQRGPAAEEALNVFYYCTYEGAVDLDHVTDERERKALEGIISNFGQTPCQLLKEPHPTRLSAEEAAHRLARLDTNSPSIFQHLDELKAFFAEVTVSASGLLGTHSWLPYDRNISNYFSFSKDPTMGSHKTQRLLSGPWVPGSGVSGQALAVAPDGKLLFSGGHWDGSLRVTALPRGKLLSQLSCHLDVVTCLALDTCGIYLISGSRDTTCMVWRLLHQGGLSVGLAPKPVQVLYGHGAAVSCVAISTELDMAVSGSEDGTVIIHTVRRGQFVAALRPLGATFPGPIFHLALGSEGQIVVQSSAWERPGAQVTYSLHLYSVNGKLRASLPLAEQPTALTVTEDFVLLGTAQCALHILQLNTLLPAAPPLPMKVAIRSVAVTKERSHVLVGLEDGKLIVVVAGQPSEVRSSQFARKLWRSSRRISQVSSGETEYNPTEAR

SEQ ID NO: 746350 - protein, 1914 aa, Homo sapiens
SALPCVHRVETWDVKDVVNCVGGMGALLPLLERVAAQPKEAEAGPAETHDLVGPELTSGHNTQGLVLPLGKSSEERMERNAVAAFLLMLRNFLQGHMVNQESLVQCQGPAIIGALLRKVPSWAMDMNVLMSAQLLMEQVAAEGSGPLLYLLYQHLLFNFHLWTLSDFAVRLGHIQYMSSIVREHRQKLRKKYGVQFILDALRTHYSPQRERPLAADDLRTVQTSLLGLAREFLVRSLSADDVQVTQTMLSFLAATGDDGQAVGALDLLLALLHGSLVQESLAVFLLEPGNLEVLLALLVRPGSLPLLPDRVCKILRRLQQNERLPERSRQRLRLRECGLQGLVACLPEGTVSPQLCQGLYKLFLGADCLNLSDLLAVVQLSLQADLSVRLDICRQLFHLIYGQPDVVRLLARQAGWQDVLTRLYVLEAATAGSPPPSSPESPTSPKPAPPKPPTESPAEPSDVFLPSEAPCPDPDGFYHALSPFCTPFDLGLERSSVGSGNTAGGGGSSGTLTPASQPGTPSPLDGPRPFPAAPGRHSSSLSNVLEDGSLPEPTISGDDTSNTSNPQQTSEEELCNLLTNVLFSVTWRGVEGSDEAAWRERGQVFSVLTQLGASATLVRPPDCIKRSLLEMMLESALTDIKEAPVGVLASLTQQALWLLRLLQDFLCAEGHGNQELWSEKLFEGVCSLLDRLGAWPHLANGTADLREMAQIGLRLVLGYILLEDPQLHAQAYVRLHMLLQTAVPARREEACYVLSKLEAALGRVLNTSSLESATDEAGSPLAAAAAAAAAERCSWLVPLVRTLLDRAYEPLGLQWGLPSLPPTNGSPTFFEDFQAFCATPEWRHFIDKQVQPTMSQFEMDTYAKSHDLMSGFWNACYDMLMSSGQRRQWERAQSRRAFQELVLEPAQRRARLEGLRYTAVLKQQATQHSMALLHWGALWRQLASPCGAWALRDTPIPRWKLSSAETYSRMRLKLVPNHHFDPHLEASALRDNLGEVPLTPTEEASLPLAVTKEAKVSTPPELLQEDQLGEDELAELETPMEAAELDEQREKLVLSAECQLVTVVAVVPGLLEVTTQNVYFYDGSTERVETEEGIGYDFRRPLAQLREVHLRRFNLRRSALELFFIDQANYFLNFPCKVGTTPVSSPSQTPRPQPGPIPPHTQVRNQVYSWLLRLRPPSQGYLSSRSPQEMLRASGLTQKWVQREISNFEYLMQLNTIAGRTYNDLSQYPVFPWVLQDYVSPTLDLSNPAVFRDLSKPIGVVNPKHAQLVREKYESFEDPAGTIDKFHYGTHYSNAAGVMHYLIRVEPFTSLHVQLQSGRFDCSDRQFHSVAAAWQARLESPADVKELIPEFFYFPDFLENQNGFDLGCLQLTNEKVGDVVLPPWASSPEDFIQQHRQALESEYVSAHLHEWIDLIFGYKQRGPAAEEALNVFYYCTYEGAVDLDHVTDERERKALEGIISNFGQTPCQLLKEPHPTRLSAEEAAHRLARLDTNSPSIFQHLDELKAFFAEVVSDGVPLVLALVPHRQPHSFITQGSPDLLVSALCRAPAQLHSPLLCQKPTSAPSCLQVTVSASGLLGTHSWLPYDRNISNYFSFSKDPTMGSHKTQRLLSGPWVPGSGVSGQALAVAPDGKLLFSGGHWDGSLRVTALPRGKLLSQLSCHLDVVTCLALDTCGIYLISGSRDTTCMVWRLLHQGGLSVGLAPKPVQVLYGHGAAVSCVAISTELDMAVSGSEDGTVIIHTVRRGQFVAALRPLGATFPGPIFHLALGSEGQIVVQSSAWERPGAQVTYSLHLYSVNGKLRASLPLAEQPTALTVTEDFVLLGTAQCALHILQLNTLLPAAPPLPMKVAIRSVAVTKERSHVLVGLEDGKLIVVVAGQPSEVRSSQFARKLWRSSRRISQVSSGETEYNPTEAR

SEQ ID NO: 746351 - protein, 1972 aa, Homo sapiens
SALPCVHRVETWDVKDVVNCVGGMGALLPLLERVAAQPKEAEAGPAETHDLVGPELTSGHNTQGLVLPLGKSSEERMERNAVAAFLLMLRNFLQGHMVNQESLVQCQGPAIIGALLRKVPSWAMDMNVLMSAQLLMEQVAAEGSGPLLYLLYQHLLFNFHLWTLSDFAVRLGHIQYMSSIVREHRQKLRKKYGVQFILDALRTHYSPQRERPLAADDLRTVQTSLLGLAREFLVRSLSADDVQVTQTMLSFLAATGDDGQAVGALDLLLALLHGSLVQESLAVFLLEPGNLEVLLALLVRPGSLPLLPDRVCKILRRLQQNERLPERSRQRLRLRECGLQGLVACLPEGTVSPQLCQGLYKLFLGADCLNLSDLLAVVQLSLQADLSVRLDICRQLFHLIYGQPDVVRLLARQAGWQDVLTRLYVLEAATAGSPPPSSPESPTSPKPAPPKPPTESPAEPSDVFLPSEAPCPDPDGFYHALSPFCTPFDLGLERSSVGSGNTAGGGGSSGTLTPASQPGTPSPLDGPRPFPAAPGRHSSSLSNVLEDGSLPEPTISGDDTSNTSNPQQTSEEELCNLLTNVLFSVTWRGVEGSDEAAWRERGQVFSVLTQLGASATLVRPPDCIKRSLLEMMLESALTDIKEAPVGVLASLTQQALWLLRLLQDFLCAEGHGNQELWSEKLFEGVCSLLDRLGAWPHLANGTADLREMAQIGLRLVLGYILLEDPQLHAQAYVRLHMLLQTAVPARREEACYVLSKLEAALGRVLNTSSLESATDEAGSPLAAAAAAAAAERCSWLVPLVRTLLDRAYEPLGLQWGLPSLPPTNGSPTFFEDFQAFCATPEWRHFIDKQVQPTMSQFEMDTYAKSHDLMSGFWNACYDMLMSSGQRRQWERAQSRRAFQELVLEPAQRRARLEGLRYTAVLKQQATQHSMALLHWGALWRQLASPCGAWALRDTPIPRWKLSSAETYSRMRLKLVPNHHFDPHLEASALRDNLGEVPLTPTEEASLPLAVTKEAKVSTPPELLQEDQLGEDELAELETPMEAAELDEQREKLVLSAECQLVTVVAVVPGLLEVTTQNVYFYDGSTERVETEEGIGYDFRRPLAQLREVHLRRFNLRRSALELFFIDQANYFLNFPCKVGTTPVSSPSQTPRPQPGPIPPHTQVRNQVYSWLLRLRPPSQGYLSSRSPQEMLRASGLTQKWVQREISNFEYLMQLNTIAGRTYNDLSQYPVFPWVLQDYVSPTLDLSNPAVFRDLSKPIGVVNPKHAQLVREKYESFEDPAGTIDKFHYGTHYSNAAGVMHYLIRVEPFTSLHVQLQSGRFDCSDRQFHSVAAAWQARLESPADVKELIPEFFYFPDFLENQNGFDLGCLQLTNEKVGDVVLPPWASSPEDFIQQHRQALESEYVSAHLHEWIDLIFGYKQRGPAAEEALNVFYYCTYEGAVDLDHVTDERERKALEGIISNFGQTPCQLLKEPHPTRLSAEEAAHRLARLDTNSPSIFQHLDELKAFFAEVVSDGVPLVLALVPHRQPHSFITQGSPDLLVSALCRAPAQLHSPLLCQKPTSAPSCLQVTVSASGLLGTHSWLPYDRNISNYFSFSKDPTMGSHKYGQRAVGGVGYKCPAPGIIPLPNQNVGQLQGKGLARLPEGLGLFHVAWLTCYPPHWVRTQRLLSGPWVPGSGVSGQALAVAPDGKLLFSGGHWDGSLRVTALPRGKLLSQLSCHLDVVTCLALDTCGIYLISGSRDTTCMVWRLLHQGGLSVGLAPKPVQVLYGHGAAVSCVAISTELDMAVSGSEDGTVIIHTVRRGQFVAALRPLGATFPGPIFHLALGSEGQIVVQSSAWERPGAQVTYSLHLYSVNGKLRASLPLAEQPTALTVTEDFVLLGTAQCALHILQLNTLLPAAPPLPMKVAIRSVAVTKERSHVLVGLEDGKLIVVVAGQPSEVRSSQFARKLWRSSRRISQVSSGETEYNPTEAR

SEQ ID NO: 746352 - protein, 1939 aa, Homo sapiens
SALPCVHRVETWDVKDVVNCVGGMGALLPLLERVAAQPKEAEAGPAETHDLVGPELTSGHNTQGLVLPLGKSSEERMERNAVAAFLLMLRNFLQGHMVNQESLVQCQGPAIIGALLRKVPSWAMDMNVLMSAQLLMEQVAAEGSGPLLYLLYQHLLFNFHLWTLSDFAVRLGHIQYMSSIVREHRQKLRKKYGVQFILDALRTHYSPQRERPLAADDLRTVQTSLLGLAREFLVRSLSADDVQVTQTMLSFLAATGDDGQAVGALDLLLALLHGSLVQESLAVFLLEPGNLEVLLALLVRPGSLPLLPDRVCKILRRLQQNERLPERSRQRLRLRECGLQGLVACLPEGTVSPQLCQGLYKLFLGADCLNLSDLLAVVQLSLQADLSVRLDICRQLFHLIYGQPDVVRLLARQAGWQDVLTRLYVLEAATAGSPPPSSPESPTSPKPAPPKPPTESPAEPSDVFLPSEAPCPDPDGFYHALSPFCTPFDLGLERSSVGSGNTAGGGGSSGTLTPASQPGTPSPLDGPRPFPAAPGRHSSSLSNVLEDGSLPEPTISGDDTSNTSNPQQTSEEELCNLLTNVLFSVTWRGVEGSDEAAWRERGQVFSVLTQLGASATLVRPPDCIKRSLLEMMLESALTDIKEAPVGVLASLTQQALWLLRLLQDFLCAEGHGNQELWSEKLFEGVCSLLDRLGAWPHLANGTADLREMAQIGLRLVLGYILLEDPQLHAQAYVRLHMLLQTAVPARREEACYVLSKLEAALGRVLNTSSLESATDEAGSPLAAAAAAAAAERCSWLVPLVRTLLDRAYEPLGLQWGLPSLPPTNGSPTFFEDFQAFCATPEWRHFIDKQVQPTMSQFEMDTYAKSHDLMSGFWNACYDMLMSSGQRRQWERAQSRRAFQELVLEPAQRRARLEGLRYTAVLKQQATQHSMALLHWGALWRQLASPCGAWALRDTPIPRWKLSSAETYSRMRLKLVPNHHFDPHLEASALRDNLGEVPLTPTEEASLPLAVTKEAKVSTPPELLQEDQLGEDELAELETPMEAAELDEQREKLVLSAECQLVTVVAVVPGLLEVTTQNVYFYDGSTERVETEEGIGYDFRRPLAQLREVHLRRFNLRRSALELFFIDQANYFLNFPCKVGTTPVSSPSQTPRPQPGPIPPHTQVRNQVYSWLLRLRPPSQGYLSSRSPQEMLRASGLTQKWVQREISNFEYLMQLNTIAGRTYNDLSQYPVFPWVLQDYVSPTLDLSNPAVFRDLSKPIGVVNPKHAQLVREKYESFEDPAGTIDKFHYGTHYSNAAGVMHYLIRVEPFTSLHVQLQSGRFDCSDRQFHSVAAAWQARLESPADVKELIPEFFYFPDFLENQNGFDLGCLQLTNEKVGDVVLPPWASSPEDFIQQHRQALESEYVSAHLHEWIDLIFGYKQRGPAAEEALNVFYYCTYEGAVDLDHVTDERERKALEGIISNFGQTPCQLLKEPHPTRLSAEEAAHRLARLDTNSPSIFQHLDELKAFFAEVVSDGVPLVLALVPHRQPHSFITQGSPDLLVTVSASGLLGTHSWLPYDRNISNYFSFSKDPTMGSHKTQRLLSGPWVPGSGVSGQALAVAPDGKLLFSGGHWDGSLRVTALPRGKLLSQLSCHLDVVTCLALDTCGIYLISGSRDTTCMVWRLLHQVCLVGSSVGPPEPRPAAHPSLSGLPVLSSSSLGQGLHFLSLRGQSSANPGPPQGGLSVGLAPKPVQVLYGHGAAVSCVAISTELDMAVSGSEDGTVIIHTVRRGQFVAALRPLGATFPGPIFHLALGSEGQIVVQSSAWERPGAQVTYSLHLYSVNGKLRASLPLAEQPTALTVTEDFVLLGTAQCALHILQLNTLLPAAPPLPMKVAIRSVAVTKERSHVLVGLEDGKLIVVVAGQPSEVRSSQFARKLWRSSRRISQVSSGETEYNPTEAR

SEQ ID NO: 746353 - protein, 1918 aa, Homo sapiens
SALPCVHRVETWDVKDVVNCVGGMGALLPLLERVAAQPKEAEAGPAETHDLVGPELTSGHNTQGLVLPLGKSSEERMERNAVAAFLLMLRNFLQGHMVNQESLVQCQGPAIIGALLRKVPSWAMDMNVLMSAQLLMEQVAAEGSGPLLYLLYQHLLFNFHLWTLSDFAVRLGHIQYMSSIVREHRQKLRKKYGVQFILDALRTHYSPQRERPLAADDLRTVQTSLLGLAREFLVRSLSADDVQVTQTMLSFLAATGDDGQAVGALDLLLALLHGSLVQESLAVFLLEPGNLEVLLALLVRPGSLPLLPDRVCKILRRLQQNERLPERSRQRLRLRECGLQGLVACLPEGTVSPQLCQGLYKLFLGADCLNLSDLLAVVQLSLQADLSVRLDICRQLFHLIYGQPDVVRLLARQAGWQDVLTRLYVLEAATAGSPPPSSPESPTSPKPAPPKPPTESPAEPSDVFLPSEAPCPDPDGFYHALSPFCTPFDLGLERSSVGSGNTAGGGGSSGTLTPASQPGTPSPLDGPRPFPAAPGRHSSSLSNVLEDGSLPEPTISGDDTSNTSNPQQTSEEELCNLLTNVLFSVTWRGVEGSDEAAWRERGQVFSVLTQLGASATLVRPPDCIKRSLLEMMLESALTDIKEAPVGVLASLTQQALWLLRLLQDFLCAEGHGNQELWSEKLFEGVCSLLDRLGAWPHLANGTADLREMAQIGLRLVLGYILLEDPQLHAQAYVRLHMLLQTAVPARREEACYVLSKLEAALGRVLNTSSLESATDEAGSPLAAAAAAAAAERCSWLVPLVRTLLDRAYEPLGLQWGLPSLPPTNGSPTFFEDFQAFCATPEWRHFIDKQVQPTMSQFEMDTYAKSHDLMSGFWNACYDMLMSSGQRRQWERAQSRRAFQELVLEPAQRRARLEGLRYTAVLKQQATQHSMALLHWGALWRQLASPCGAWALRDTPIPRWKLSSAETYSRMRLKLVPNHHFDPHLEASALRDNLGEVPLTPTEEASLPLAVTKEAKVSTPPELLQEDQLGEDELAELETPMEAAELDEQREKLVLSAECQLVTVVAVVPGLLEVTTQNVYFYDGSTERVETEEGIGYDFRRPLAQLREVHLRRFNLRRSALELFFIDQANYFLNFPCKVGTTPVSSPSQTPRPQPGPIPPHTQVRNQVYSWLLRLRPPSQGYLSSRSPQEMLRASGLTQKWVQREISNFEYLMQLNTIAGRTYNDLSQYPVFPWVLQDYVSPTLDLSNPAVFRDLSKPIGVVNPKHAQLVREKYESFEDPAGTIDKFHYGTHYSNAAGVMHYLIRVEPFTSLHVQLQSGRFDCSDRQFHSVAAAWQARLESPADVKELIPEFFYFPDFLENQNGFDLGCLQLTNEKVGDVVLPPWASSPEDFIQQHRQALESEYVSAHLHEWIDLIFGYKQRGPAAEEALNVFYYCTYEGAVDLDHVTDERERKALEGIISNFGQTPCQLLKEPHPTRLSAEEAAHRLARLDTNSPSIFQHLDELKAFFAEVVSDGVPLVLALVPHRQPHSFITQGSPDLLVTVSASGLLGTHSWLPYDRNISNYFSFSKDPTMGSHKTQRLLSGPWVPGSGVSGQALAVAPDGKLLFSGGHWDGSLRVTALPRGKLLSQLSCHLDVVTCLALDTCGIYLISGSRDTTCMVWRLLHQGGLSVGLAPKPVQVLYGHGAAVSCVAISTELDMAVSGSEVCVCMCPGEGEFPGQSPWSPDSCPGPKVAFLQDGTVIIHTVRRGQFVAALRPLGATFPGPIFHLALGSEGQIVVQSSAWERPGAQVTYSLHLYSVNGKLRASLPLAEQPTALTVTEDFVLLGTAQCALHILQLNTLLPAAPPLPMKVAIRSVAVTKERSHVLVGLEDGKLIVVVAGQPSEVRSSQFARKLWRSSRRISQVSSGETEYNPTEAR

SEQ ID NO: 746354 - protein, 1847 aa, Homo sapiens
SALPCVHRVETWDVKDVVNCVGGMGALLPLLERVAAQPKEAEAGPAETHDLVGPELTSGHNTQGLVLPLGKSSEERMERNAVAAFLLMLRNFLQGHMVNQESLVQCQGPAIIGALLRKVPSWAMDMNVLMSAQLLMEQVAAEGSGPLLYLLYQHLLFNFHLWTLSDFAVRLGHIQYMSSIVREHRQKLRKKYGVQFILDALRTHYSPQRERPLAADDLRTVQTSLLGLAREFLVRSLSADDVQVTQTMLSFLAATGDDGQAVGALDLLLALLHGSLVQESLAVFLLEPGNLEVLLALLVRPGSLPLLPDRVCKILRRLQQNERLPERSRQRLRLRECGLQGLVACLPEGTVSPQLCQGLYKLFLGADCLNLSDLLAVVQLSLQADLSVRLDICRQLFHLIYGQPDVVRLLARQAGWQDVLTRLYVLEAATAGSPPPSSPESPTSPKPAPPKPPTESPAEPSDVFLPSEAPCPDPDGFYHALSPFCTPFDLGLERSSVGSGNTAGGGGSSGTLTPASQPGTPSPLDGPRPFPAAPGRHSSSLSNVLEDGSLPEPTISGDDTSNTSNPQQTSEEELCNLLTNVLFSVTWRGVEGSDEAAWRERGQVFSVLTQLGASATLVRPPDCIKRSLLEMMLESALTDIKEAPVGVLASLTQQALWLLRLLQDFLCAEGHGNQELWSEKLFEGVCSLLDRLGAWPHLANGTADLREMAQIGLRLVLGYILLEDPQLHAQAYVRLHMLLQTAVPARREEACYVLSKLEAALGRVLNTSSLESATDEAGSPLAAAAAAAAAERCSWLVPLVRTLLDRAYEPLGLQWGLPSLPPTNGSPTFFEDFQAFCATPEWRHFIDKQVQPTMSQFEMDTYAKSHDLMSGFWNACYDMLMSSGQRRQWERAQSRRAFQELVLEPAQRRARLEGLRYTAVLKQQATQHSMALLHWGALWRQLASPCGAWALRDTPIPRWKLSSAETYSRMRLKLVPNHHFDPHLEASALRDNLGEVPLTPTEEASLPLAVTKEAKVSTPPELLQEDQLGEDELAELETPMEAAELDEQREKLVLSAECQLVTVVAVVPGLLEVTTQNVYFYDGSTERVETEEGIGYDFRRPLAQLREVHLRRFNLRRSALELFFIDQANYFLNFPCKVGTTPVSSPSQTPRPQPGPIPPHTQVRNQVYSWLLRLRPPSQGYLSSRSPQEMLRASGLTQKWVQREISNFEYLMQLNTIAGRTYNDLSQYPVFPWVLQDYVSPTLDLSNPAVFRDLSKPIGVVNPKHAQLVREKYESFEDPAGTIDKFHYGTHYSNAAGVMHYLIRVEPFTSLHVQLQSGRFDCSDRQFHSVAAAWQARLESPADVKELIPEFFYFPDFLENQNGFDLGCLQLTNEKVGDVVLPPWASSPEDFIQQHRQALESEYVSAHLHEWIDLIFGYKQRGPAAEEALNVFYYCTYEGAVDLDHVTDERERKALEGIISNFGQTPCQLLKEPHPTRLSAEEAAHRLARLDTNSPSIFQHLDELKAFFAEVVSDGVPLVLALVPHRQPHSFITQGSPDLLVTVSASGLLGTHSWLPYDRNISNYFSFSKDPTMGSHKTQRLLSGPWVPGSGVSGQALAVAPDGKLLFSGGHWDGSLRVTALPRGKLLSQLSCHLDVVTCLALDTCGIYLISGSRDTTCMVWRLLHQDGTVIIHTVRRGQFVAALRPLGATFPGPIFHLALGSEGQIVVQSSAWERPGAQVTYSLHLYSVNGKLRASLPLAEQPTALTVTEDFVLLGTAQCALHILQLNTLLPAAPPLPMKVAIRSVAVTKERSHVLVGLEDGKLIVVVAGQPSEVRSSQFARKLWRSSRRISQVSSGETEYNPTEAR

SEQ ID NO: 746355 - protein, 1944 aa, Homo sapiens
SALPCVHRVETWDVKDVVNCVGGMGALLPLLERVAAQPKEAEAGPAETHDLVGPELTSGHNTQGLVLPLGKSSEERMERNAVAAFLLMLRNFLQGHMVNQESLVQCQGPAIIGALLRKVPSWAMDMNVLMSAQLLMEQVAAEGSGPLLYLLYQHLLFNFHLWTLSDFAVRLGHIQYMSSIVREHRQKLRKKYGVQFILDALRTHYSPQRERPLAADDLRTVQTSLLGLAREFLVRSLSADDVQVTQTMLSFLAATGDDGQAVGALDLLLALLHGSLVQESLAVFLLEPGNLEVLLALLVRPGSLPLLPDRVCKILRRLQQNERLPERSRQRLRLRECGLQGLVACLPEGTVSPQLCQGLYKLFLGADCLNLSDLLAVVQLSLQADLSVRLDICRQLFHLIYGQPDVVRLLARQAGWQDVLTRLYVLEAATAGSPPPSSPESPTSPKPAPPKPPTESPAEPSDVFLPSEAPCPDPDGFYHALSPFCTPFDLGLERSSVGSGNTAGGGGSSGTLTPASQPGTPSPLDGPRPFPAAPGRHSSSLSNVLEDGSLPEPTISGDDTSNTSNPQQTSEEELCNLLTNVLFSVTWRGVEGSDEAAWRERGQVFSVLTQLGASATLVRPPDCIKRSLLEMMLESALTDIKEAPVGVLASLTQQALWLLRLLQDFLCAEGHGNQELWSEKLFEGVCSLLDRLGAWPHLANGTADLREMAQIGLRLVLGYILLEDPQLHAQAYVRLHMLLQTAVPARREEACYVLSKLEAALGRVLNTSSLESATDEAGSPLAAAAAAAAAERCSWLVPLVRTLLDRAYEPLGLQWGLPSLPPTNGSPTFFEDFQAFCATPEWRHFIDKQVQPTMSQFEMDTYAKSHDLMSGFWNACYDMLMSSGQRRQWERAQSRRAFQELVLEPAQRRARLEGLRYTAVLKQQATQHSMALLHWGALWRQLASPCGAWALRDTPIPRWKLSSAETYSRMRLKLVPNHHFDPHLEASALRDNLGEVPLTPTEEASLPLAVTKEAKVSTPPELLQEDQLGEDELAELETPMEAAELDEQREKLVLSAECQLVTVVAVVPGLLEVTTQNVYFYDGSTERVETEEGIGYDFRRPLAQLREVHLRRFNLRRSALELFFIDQANYFLNFPCKVGTTPVSSPSQTPRPQPGPIPPHTQVRNQVYSWLLRLRPPSQGYLSSRSPQEMLRASGLTQKWVQREISNFEYLMQLNTIAGRTYNDLSQYPVFPWVLQDYVSPTLDLSNPAVFRDLSKPIGVVNPKHAQLVREKYESFEDPAGTIDKFHYGTHYSNAAGVMHYLIRVEPFTSLHVQLQSGRFDCSDRQFHSVAAAWQARLESPADVKELIPEFFYFPDFLENQNGFDLGCLQLTNEKVGDVVLPPWASSPEDFIQQHRQALESEYVSAHLHEWIDLIFGYKQRGPAAEEALNVFYYCTYEGAVDLDHVTDERERKALEGIISNFGQTPCQLLKEPHPTRLSAEEAAHRLARLDTNSPSIFQHLDELKAFFAEVVSDGVPLVLALVPHRQPHSFITQGSPDLLVTVSASGLLGTHSWLPYDRNISNYFSFSKDPTMGSHKTQRLLSGPWVPGSGVSGQALAVAPDGKLLFSGGHWDGSLRVTALPRGKLLSQLSCHLDVVTCLALDTCGIYLISGSRDTTCMVWRLLHQGGLSVGLAPKPVQVLYGHGAAVSCVAISTELDMAVSGSEVCVCMCPGEGEFPGQSPWSPDSCPGPKVAFLQDGTVIIHTVRRGQFVAALRPLGATFPGPIFHLALGSEGQIVVQSSAWERPGAQVWGRGAQQRWRGSWDPVLADTPCFLQVTYSLHLYSVNGKLRASLPLAEQPTALTVTEDFVLLGTAQCALHILQLNTLLPAAPPLPMKVAIRSVAVTKERSHVLVGLEDGKLIVVVAGQPSEVRSSQFARKLWRSSRRISQVSSGETEYNPTEAR

SEQ ID NO: 746356 - protein, 759 aa, Homo sapiens
LGSPKCRYLPVGQALSLVKGRCANEDLASVPSLTPFPSLPSLYSSKGILFQDTLSFSPVTPLSGAPPDLWAGSVPAFLRVWAGQGGLVGHQGPHAAPARVGGQFPWVLQDYVSPTLDLSNPAVFRDLSKPIGVVNPKHAQLVREKYESFEDPAGTIDKFHYGTHYSNAAGVMHYLIRVEPFTSLHVQLQSGRFDCSDRQFHSVAAAWQARLESPADVKELIPEFFYFPDFLENQNGFDLGCLQLTNEKVGDVVLPPWASSPEDFIQQHRQALESEYVSAHLHEWIDLIFGYKQRGPAAEEALNVFYYCTYEGAVDLDHVTDERERKALEGIISNFGQTPCQLLKEPHPTRLSAEEAAHRLARLDTNSPSIFQHLDELKAFFAEVVSDGVPLVLALVPHRQPHSFITQGSPDLLVTVSASGLLGTHSWLPYDRNISNYFSFSKDPTMGSHKTQRLLSGPWVPGSGVSGQALAVAPDGKLLFSGGHWDGSLRVTALPRGKLLSQLSCHLDVVTCLALDTCGIYLISGSRDTTCMVWRLLHQGGLSVGLAPKPVQVLYGHGAAVSCVAISTELDMAVSGSEDGTVIIHTVRRGQFVAALRPLGATFPGPIFHLALGSEGQIVVQSSAWERPGAQVTYSLHLYSVNGKLRASLPLAEQPTALTVTEDFVLLGTAQCALHILQLNTLLPAAPPLPMKVAIRSVAVTKERSHVLVGLEDGKLIVVVAGQPSEVRSSQFARKLWRSSRRISQVSSGETEYNPTEAR

SEQ ID NO: 746357 - protein, 424 aa, Homo sapiens
GADQATYPQEPHPTRLSAEEAAHRLARLDTNSPSIFQHLDELKAFFAEVVSDGVPLVLALVPHRQPHSFITQGSPDLLVTVSASGLLGTHSWLPYDRNISNYFSFSKDPTMGSHKTQRLLSGPWVPGSGVSGQALAVAPDGKLLFSGGHWDGSLRVTALPRGKLLSQLSCHLDVVTCLALDTCGIYLISGSRDTTCMVWRLLHQGGLSVGLAPKPVQVLYGHGAAVSCVAISTELDMAVSGSEDGTVIIHTVRRGQFVAALRPLGATFPGPIFHLALGSEGQIVVQSSAWERPGAQVTYSLHLYSVNGKLRASLPLAEQPTALTVTEDFVLLGTAQCALHILQLNTLLPAAPPLPMKVAIRSVAVTKERSHVLVGLEDGKLIVVVAGQPSEVRSSQFARKLWRSSRRISQVSSGETEYNPTEAR

SEQ ID NO: 746358 - protein, 262 aa, Homo sapiens
DYNTNNKTTARYEAGFTLDTCGIYLISGSRDTTCMVWRLLHQGGLSVGLAPKPVQVLYGHGAAVSCVAISTELDMAVSGSEDGTVIIHTVRRGQFVAALRPLGATFPGPIFHLALGSEGQIVVQSSAWERPGAQVTYSLHLYSVNGKLRASLPLAEQPTALTVTEDFVLLGTAQCALHILQLNTLLPAAPPLPMKVAIRSVAVTKERSHVLVGLEDGKLIVVVAGQPSEVRSSQFARKLWRSSRRISQVSSGETEYNPTEAR

SEQ ID NO: 746359 - protein, 258 aa, Homo sapiens
MCNPVDDYDSTSYPSRLLLHVLVVVDSKPAYYYRRPCLGGLSVGLAPKPVQVLYGHGAAVSCVAISTELDMAVSGSEDGTVIIHTVRRGQFVAALRPLGATFPGPIFHLALGSEGQIVVQSSAWERPGAQVTYSLHLYSVNGKLRASLPLAEQPTALTVTEDFVLLGTAQCALHILQLNTLLPAAPPLPMKVAIRSVAVTKERSHVLVGLEDGKLIVVVAGQPSEVRSSQFARKLWRSSRRISQVSSGETEYNPTEAR

SEQ ID NO: 746360 - protein, 1475 aa, Homo sapiens
SALPCVHRVETWDVKDVVNCVGGMGALLPLLERVAAQPKEAEAGPAETHDLVGPELTSGHNTQGLVLPLGKSSEERMERNAVAAFLLMLRNFLQGHMVNQESLVQCQGPAIIGALLRKVPSWAMDMNVLMSAQLLMEQVAAEGSGPLLYLLYQHLLFNFHLWTLSDFAVRLGHIQYMSSIVREHRQKLRKKYGVQFILDALRTHYSPQRERPLAADDLRTVQTSLLGLAREFLVRSLSADDVQVTQTMLSFLAATGDDGQAVGALDLLLALLHGSLVQESLAVFLLEPGNLEVLLALLVRPGSLPLLPDRVCKILRRLQQNERLPERSRQRLRLRECGLQGLVACLPEGTVSPQLCQGLYKLFLGADCLNLSDLLAVVQLSLQADLSVRLDICRQLFHLIYGQPDVVRLLARQAGWQDVLTRLYVLEAATAGSPPPSSPESPTSPKPAPPKPPTESPAEPSDVFLPSEAPCPDPDGFYHALSPFCTPFDLGLERSSVGSGNTAGGGGSSGTLTPASQPGTPSPLDGPRPFPAAPGRHSSSLSNVLEDGSLPEPTISGDDTSNTSNPQQTSEEELCNLLTNVLFSVTWRGVEGSDEAAWRERGQVFSVLTQLGASATLVRPPDCIKRSLLEMMLESALTDIKEAPVGVLASLTQQALWLLRLLQDFLCAEGHGNQELWSEKLFEGVCSLLDRLGAWPHLANGTADLREMAQIGLRLVLGYILLEDPQLHAQAYVRLHMLLQTAVPARREEACYVLSKLEAALGRVLNTSSLESATDEAGSPLAAAAAAAAAERCSWLVPLVRTLLDRAYEPLGLQWGLPSLPPTNGSPTFFEDFQAFCATPEWRHFIDKQVQPTMSQFEMDTYAKSHDLMSGFWNACYDMLMSSGQRRQWERAQSRRAFQELVLEPAQRRARLEGLRYTAVLKQQATQHSMALLHWGALWRQLASPCGAWALRDTPIPRWKLSSAETYSRMRLKLVPNHHFDPHLEASALRDNLGEVPLTPTEEASLPLAVTKEAKVSTPPELLQEDQLGEDELAELETPMEAAELDEQREKLVLSAECQLVTVVAVVPGLLEVTTQNVYFYDGSTERVETEEGIGYDFRRPLAQLREVHLRRFNLRRSALELFFIDQANYFLNFPCKVGTTPVSSPSQTPRPQPGPIPPHTQVRNQVYSWLLRLRPPSQGYLSSRSPQEMLRASGLTQKWVQREISNFEYLMQLNTIAGRTYNDLSQYPVFPWVLQDYVSPTLDLSNPAVFRDLSKPIGVVNPKHAQLVREKYESFEDPAGTIDKFHYGTHYSNAAGVMHYLIRVEPFTSLHVQLQSGRFDCSDRQFHSVAAAWQARLESPADVKELIPEFFYFPDFLENQNGFDLGCLQLTNEKVGDVVLPPWASSPEDFIQQHRQALESEYVSAHLHEWIDLIFGYKQRGPAAEEALNVFYYCTYEALNLASPAARAPPPAGLAREAPPRSRREHPGVGSPGG

SEQ ID NO: 746361 - protein, 118 aa, Homo sapiens
IGYDFRRPLAQLREVHLRRFNLRRSALELFFIDQANYFLNFPCKVGTTPVSSPSQTPRPQPGPIPPHTQVRNQVYSWLLRLRPPSQGYLSSRSPQEMLRASGLTQVRALGVRDVKSGP

SEQ ID NO: 746362 - protein, 1978 aa, Homo sapiens
SALPCVHRVETWDVKDVVNCVGGMGALLPLLERVAAQPKEAEAGPAETHDLVGPELTSGHNTQGLVLPLGKSSEERMERNAVAAFLLMLRNFLQGHMVNQESLVQCQGPAIIGALLRKVPSWAMDMNVLMSAQLLMEQVAAEGSGPLLYLLYQHLLFNFHLWTLSDFAVRLGHIQYMSSIVREHRQKLRKKYGVQFILDALRTHYSPQRERPLAADDLRTVQTSLLGLAREFLVRSLSADDVQVTQTMLSFLAATGDDGQAVGALDLLLALLHGSLVQESLAVFLLEPGNLEVLLALLVRPGSLPLLPDRVCKILRRLQQNERLPERSRQRLRLRECGLQGLVACLPEGTVSPQLCQGLYKLFLGADCLNLSDLLAVVQLSLQADLSVRLDICRQLFHLIYGQPDVVRLLARQAGWQDVLTRLYVLEAATAGSPPPSSPESPTSPKPAPPKPPTESPAEPSDVFLPSEAPCPDPDGFYHALSPFCTPFDLGLERSSVGSGNTAGGGGSSGTLTPASQPGTPSPLDGPRPFPAAPGRHSSSLSNVLEDGSLPEPTISGDDTSNTSNPQQTSEEELCNLLTNVLFSVTWRGVEGSDEAAWRERGQVFSVLTQLGASATLVRPPDCIKRSLLEMMLESALTDIKEAPVGVLASLTQQALWLLRLLQDFLCAEGHGNQELWSEKLFEGVCSLLDRLGAWPHLANGTADLREMAQIGLRLVLGYILLEDPQLHAQAYVRLHMLLQTAVPARREEACYVLSKLEAALGRVLNTSSLESATDEAGSPLAAAAAAAAAERCSWLVPLVRTLLDRAYEPLGLQWGLPSLPPTNGSPTFFEDFQAFCATPEWRHFIDKQVQPTMSQFEMDTYAKSHDLMSGFWNACYDMLMSSGQRRQWERAQSRRAFQELVLEPAQRRARLEGLRYTAVLKQQATQHSMALLHWGALWRQLASPCGAWALRDTPIPRWKLSSAETYSRMRLKLVPNHHFDPHLEASALRDNLGEVPLTPTEEASLPLAVTKEAKVSTPPELLQEDQLGEDELAELETPMEAAELDEQREKLVLSAECQLVTVVAVVPGLLEVTTQNVYFYDGSTERVETEEGIGYDFRRPLAQLREVHLRRFNLRRSALELFFIDQANYFLNFPCKVGTTPVSSPSQTPRPQPGPIPPHTQVRNQVYSWLLRLRPPSQGYLSSRSPQEMLRASGLTQKWVQREISNFEYLMQLNTIAGRTYNDLSQYPVFPWVLQDYVSPTLDLSNPAVFRDLSKPIGVVNPKHAQLVREKYESFEDPAGTIDKFHYGTHYSNAAGVMHYLIRVEPFTSLHVQLQSGRFDCSDRQFHSVAAAWQARLESPADVKELIPEFFYFPDFLENQNGFDLGCLQLTNEKVGDVVLPPWASSPEDFIQQHRQALESEYVSAHLHEWIDLIFGYKQRGPAAEEALNVFYYCTYEGAVDLDHVTDERERKALEGIISNFGQTPCQLLKEPHPTRLSAEEAAHRLARLDTNSPSIFQHLDELKAFFAEVVSDGVPLVLALVPHRQPHSFITQGSPDLLVTVSASGLLGTHSWLPYDRNISNYFSFSKDPTMGSHKTQRLLSGPWVPGSGVSGQALAVAPDGKLLFSGGHWDGSLRVTALPRGKLLSQLSCHLGMNSLGAGENEAPGMGPGSEAGQGGCDSSVLPVPSPSHADVVTCLALDTCGIYLISGSRDTTCMVWRLLHQVCLVGSSVGPPEPRPAAHPSLSGLPVLSSSSLGQGLHFLSLRGQSSANPGPPQGGLSVGLAPKPVQVLYGHGAAVSCVAISTELDMAVSGSEDGTVIIHTVRRGQFVAALRPLGATFPGPIFHLALGSEGQIVVQSSAWERPGAQVTYSLHLYSVNGKLRASLPLAEQPTALTVTEDFVLLGTAQCALHILQLNTLLPAAPPLPMKVAIRSVAVTKERSHVLVGLEDGKLIVVVAGQPSEVRSSQFARKLWRSSRRISQVSSGETEYNPTEAR

SEQ ID NO: 746363 - protein, 674 aa, Homo sapiens
EFSPATRADYNDLSQYPVFPWVLQDYVSPTLDLSNPAVFRDLSKPIGVVNPKHAQLVREKYESFEDPAGTIDKFHYGTHYSNAAGVMHYLIRVEPFTSLHVQLQSGRFDCSDRQFHSVAAAWQARLESPADVKELIPEFFYFPDFLENQNGFDLGCLQLTNEKVGDVVLPPWASSPEDFIQQHRQALESEYVSAHLHEWIDLIFGYKQRGPAAEEALNVFYYCTYEGAVDLDHVTDERERKALEGIISNFGQTPCQLLKEPHPTRLSAEEAAHRLARLDTNSPSIFQHLDELKAFFAEVVSDGVPLVLALVPHRQPHSFITQGSPDLLVTVSASGLLGTHSWLPYDRNISNYFSFSKDPTMGSHKTQRLLSGPWVPGSGVSGQALAVAPDGKLLFSGGHWDGSLRVTALPRGKLLSQLSCHLDVVTCLALDTCGIYLISGSRDTTCMVWRLLHQGGLSVGLAPKPVQVLYGHGAAVSCVAISTELDMAVSGSEDGTVIIHTVRRGQFVAALRPLGATFPGPIFHLALGSEGQIVVQSSAWERPGAQVTYSLHLYSVNGKLRASLPLAEQPTALTVTEDFVLLGTAQCALHILQLNTLLPAAPPLPMKVAIRSVAVTKERSHVLVGLEDGKLIVVVAGQPSEVRSSQFARKLWRSSRRISQVSSGETEYNPTEAR

SEQ ID NO: 746364 - protein, 536 aa, Homo sapiens
DGPQLNDGPQLQRFDLGCLQLTNEKVGDVVLPPWASSPEDFIQQHRQALESEYVSAHLHEWIDLIFGYKQRGPAAEEALNVFYYCTYEGAVDLDHVTDERERKALEGIISNFGQTPCQLLKEPHPTRLSAEEAAHRLARLDTNSPSIFQHLDELKAFFAEVVSDGVPLVLALVPHRQPHSFITQGSPDLLVTVSASGLLGTHSWLPYDRNISNYFSFSKDPTMGSHKTQRLLSGPWVPGSGVSGQALAVAPDGKLLFSGGHWDGSLRVTALPRGKLLSQLSCHLDVVTCLALDTCGIYLISGSRDTTCMVWRLLHQGGLSVGLAPKPVQVLYGHGAAVSCVAISTELDMAVSGSEDGTVIIHTVRRGQFVAALRPLGATFPGPIFHLALGSEGQIVVQSSAWERPGAQVTYSLHLYSVNGKLRASLPLAEQPTALTVTEDFVLLGTAQCALHILQLNTLLPAAPPLPMKVAIRSVAVTKERSHVLVGLEDGKLIVVVAGQPSEVRSSQFARKLWRSSRRISQVSSGETEYNPTEAR

SEQ ID NO: 746365 - protein, 285 aa, Homo sapiens
TGLSYSVGGHWDGSLRVTALPRGKLLSQLSCHLDVVTCLALDTCGIYLISGSRDTTCMVWRLLHQGGLSVGLAPKPVQVLYGHGAAVSCVAISTELDMAVSGSEDGTVIIHTVRRGQFVAALRPLGATFPGPIFHLALGSEGQIVVQSSAWERPGAQVTYSLHLYSVNGKLRASLPLAEQPTALTVTEDFVLLGTAQCALHILQLNTLLPAAPPLPMKVAIRSVAVTKERSHVLVGLEDGKLIVVVAGQPSEVRSSQFARKLWRSSRRISQVSSGETEYNPTEAR

SEQ ID NO: 746366 - protein, 188 aa, Homo sapiens
MAVSGSEDGTVIIHTVRRGQFVAALRPLGATFPGPIFHLALGSEGQIVVQSSAWERPGAQVTYSLHLYSVNGKLRASLPLAEQPTALTVTEDFVLLGTAQCALHILQLNTLLPAAPPLPMKVAIRSVAVTKERSHVLVGLEDGKLIVVVAGQPSEVRSSQFARKLWRSSRRISQVSSGETEYNPTEAR

SEQ ID NO: 746367 - protein, 1896 aa, Homo sapiens
SALPCVHRVETWDVKDVVNCVGGMGALLPLLERVAAQPKEAEAGPAETHDLVGPELTSGHNTQGLVLPLGKSSEERMERNAVAAFLLMLRNFLQGHMVNQESLVQCQGPAIIGALLRKVPSWAMDMNVLMSAQLLMEQVAAEGSGPLLYLLYQHLLFNFHLWTLSDFAVRLGHIQYMSSIVREHRQKLRKKYGVQFILDALRTHYSPQRERPLAADDLRTVQTSLLGLAREFLVRSLSADDVQVTQTMLSFLAATGDDGQAVGALDLLLALLHGSLVQESLAVFLLEPGNLEVLLALLVRPGSLPLLPDRVCKILRRLQQNERLPERSRQRLRLRECGLQGLVACLPEGTVSPQLCQGLYKLFLGADCLNLSDLLAVVQLSLQADLSVRLDICRQLFHLIYGQPDVVRLLARQAGWQDVLTRLYVLEAATAGSPPPSSPESPTSPKPAPPKPPTESPAEPSDVFLPSEAPCPDPDGFYHALSPFCTPFDLGLERSSVGSGNTAGGGGSSGTLTPASQPGTPSPLDGPRPFPAAPGRHSSSLSNVLEDGSLPEPTISGDDTSNTSNPQQTSEEELCNLLTNVLFSVTWRGVEGSDEAAWRERGQVFSVLTQLGASATLVRPPDCIKRSLLEMMLESALTDIKEAPVGVLASLTQQALWLLRLLQDFLCAEGHGNQELWSEKLFEGVCSLLDRLGAWPHLANGTADLREMAQIGLRLVLGYILLEDPQLHAQAYVRLHMLLQTAVPARREEACYVLSKLEAALGRVLNTSSLESATDEAGSPLAAAAAAAAAERCSWLVPLVRTLLDRAYEPLGLQWGLPSLPPTNGSPTFFEDFQAFCATPEWRHFIDKQVQPTMSQFEMDTYAKSHDLMSGFWNACYDMLMSSGQRRQWERAQSRRAFQELVLEPAQRRARLEGLRYTAVLKQQATQHSMALLHWGALWRQLASPCGAWALRDTPIPRWKLSSAETYSRMRLKLVPNHHFDPHLEASALRDNLGEVPLTPTEEASLPLAVTKEAKVSTPPELLQEDQLGEDELAELETPMEAAELDEQREKLVLSAECQLVTVVAVVPGLLEVTTQNVYFYDGSTERVETEEGIGYDFRRPLAQLREVHLRRFNLRRSALELFFIDQANYFLNFPCKVGTTPVSSPSQTPRPQPGPIPPHTQVRNQVYSWLLRLRPPSQGYLSSRSPQEMLRASGLTQKWVQREISNFEYLMQLNTIAGRTYNDLSQYPVFPWVLQDYVSPTLDLSNPAVFRDLSKPIGVVNPKHAQLVREKYESFEDPAGTIDKFHYGTHYSNAAGVMHYLIRVEPFTSLHVQLQSGRFDCSDRQFHSVAAAWQARLESPADVKELIPEFFYFPDFLENQNGFDLGCLQLTNEKVGDVVLPPWASSPEDFIQQHRQALESEYVSAHLHEWIDLIFGYKQRGPAAEEALNVFYYCTYEGAVDLDHVTDERERKALEGIISNFGQTPCQLLKEPHPTRLSAEEAAHRLARLDTNSPSIFQHLDELKAFFAEVVSDGVPLVLALVPHRQPHSFITQGSPDLLVTVSASGLLGTHSWLPYDRNISNYFSFSKDPTMGSHKTQRLLSGPWVPGSGVSGQALAVAPDGKLLFSGGHWDGSLRVTALPRGKLLSQLSCHLDVVTCLALDTCGIYLISGSRDTTCMVWRLLHQGGLSVGLAPKPVQVLYGHGAAVSCVAISTELDMAVSGSEDGTVIIHTVRRGQFVAALRPLGATFPGPIFHLALGSEGQIVVQSSAWERPGAQVWGRGAQQRWRGSWDPVLADTPCFLQVTYSLHLYSVNGKLRASLPLAEQPTALTVTEDFVLLGTAQCALHILQLNTLLPAAPPLPMKVAIRSVAVTKERSHVLVGLEDGKLIVVVAGQPSEVRMGRGWGGPSPAEGPP

SEQ ID NO: 746368 - protein, 287 aa, Homo sapiens
LEDPQTRHRSLPSLSEPFSSCCIGSAGYRIDSTLAGTQDTRWGSPTSLEGELGAVAIFHEALQATALRTLCTLGPNETAPFKPEGELHELSTRLLLHYSPQVFGGPRGVVGSTVLLPRLPHSACHPLLPLTLAACPFPYPQACKNNICLDLSPSHGLDGRLTGHRVETWDVKDVVNCVGGMGALLPLLERVAAQPKEAEAGPAETHDLVGPELTSGHNTQGLVLPLGKSSEERMERNAVAAFLLMLRNFLQGHMVNQESLVQCQGPAIIGALLRKVQAGHGLNVSCL

SEQ ID NO: 746369 - protein, 532 aa, Homo sapiens
MELDLSPPHLSSSPEDLCPAPGTPPGTPRPPDTPLPEEVKRSQPLLIPTTGRKLREEERRATSLPSIPNPFPELCSPPSQSPILGGPSSARGLLPRDASRPHVVKVYSEDGACRSVEVAAGATARHVCEMLVQRAHALSDETWGLVECHPHLALERGLEDHESVVEVQAAWPVGGDSRFVFRKNFAKYELFKSSPHSLFPEKMVSSCLDAHTGISHEDLIQNFLNAGSFPEIQGFLQLRGSGRKLWKRFFCFLRRSGLYYSTKGTSKDPRHLQYVADVNESNVYVVTQGRKLYGMPTDFGFCVKPNKLRNGHKGLRIFCSEDEQSRTCWLAAFRLFKYGVQLYKNYQQAQSRHLHPSCLGSPPLRSASDNTLVAMDFSGHAGRVIENPREALSVALEEAQAWRKKTNHRLSLPMPASGTSLSAAIHRTQLWFHGRISREESQRLIGQQGLVDGLFLVRESQRNPQGFVLSLCHLQKVKHYLILPSEEEGRLYFSMDDGQTRFTDLLQLVEFHQLNRGILPCLLRHCCTRVAL

SEQ ID NO: 746370 - protein, 248 aa, Homo sapiens
  misc_feature (229)..(229): Xaa can be any naturally occurring amino acid
  misc_feature (240)..(240): Xaa can be any naturally occurring amino acid
  misc_feature (248)..(248): Xaa can be any naturally occurring amino acid
MELDLSPPHLSSSPEDLCPAPGTPPGTPRPPDTPLPEEVKRSQPLLIPTTGRKLREEERRATSLPSIPNPFPELCSPPSQSPILGGPSSARGLLPRDASRPHVVKVYSEDGACRSVEVAAGATARHVCEMLVQRAHALSDETWGLVECHPHLALERGLEDHESVVEVQAAWPVGGDSRFVFRKNFAKYELFKSSPHSLFPEKMVSSCLDAHTGISHEDLIQNFLNAGKXFLKIQGLFCKXAGGLKDRX

SEQ ID NO: 746371 - protein, 447 aa, Homo sapiens
MELDLSPPHLSSSPEDLCPAPGTPPGTPRPPDTPLPEEVKRSQPLLIPTTGRKLREEERRATSLPSIPNPFPELCSPPSQSPILGGPSSARGLLPRDASRPHVVKVYSEDGACRSVEVAAGATARHVCEMLVQRAHALSDETWGLVECHPHLALERGLEDHESVVEVQAAWPVGGDSRFVFRKNFAKYELFKSSPHSLFPEKMVSSCLDAHTGISHEDLIQNFLNAGSFPEIQGFLQLRGSGRKLWKRFFCFLRRSGLYYSTKGTSKDPRHLQYVADVNESNVYVVTQGRKLYGMPTDFGFCVKPNKLRNGHKGLRIFCSEDEQSRTCWLAAFRLFKYGVQLYKNYQQAQSRHLHPSCLGSPPLRSASDNTLVAMDFSGHAGRVIENPREALSVALEEAQAWRKKTNHRLSLPMPASGTSLSAACSWSGRVSGTPRALSSLCATCRK

SEQ ID NO: 746372 - protein, 493 aa, Homo sapiens
MELDLSPPHLSSSPEDLCPAPGTPPGTPRPPDTPLPEEVKRSQPLLIPTTGRKLREEERRATSLPSIPNPFPELCSPPSQSPILGGPSSARGLLPRDASRPHVVKVYSEDGACRSVEVAAGATARHVCEMLVQRAHALSDETWGLVECHPHLALERGLEDHESVVEVQAAWPVGGDSRFVFRKNFAKYELFKSSPHSLFPEKMVSSCLDAHTGISHEDLIQNFLNAGSFPEIQGFLQLRGSGRKLWKRFFCFLRRSGLYYSTKGTSKDPRHLQYVADVNESNVYVVTQGRKLYGMPTDFGFCVKPNKLRNGHKGLRIFCSEDEQSRTCWLAAFRLFKYGVQLYKNYQQAQSRHLHPSCLGSPPLRSASDNTLVAMDFSGHAGRVIENPREALSVALEEAQAWRKKTNHRLSLPMPASGTSLSAAIHRTQLWFHGRISREESQRLIGQQGLVDGLFLVRESQRNPQGFVLSLCHLQKVKHYLILPMCRSPGVLQ

SEQ ID NO: 746373 - protein, 540 aa, Homo sapiens
MELDLSPPHLSSSPEDLCPAPGTPPGTPRPPDTPLPEEVKRSQPLLIPTTGRKLREEERRATSLPSIPNPFPELCSPPSQSPILGGPSSARGLLPRDASRPHSCAIPGAQVVKVYSEDGACRSVEVAAGATARHVCEMLVQRAHALSDETWGLVECHPHLALERGLEDHESVVEVQAAWPVGGDSRFVFRKNFAKYELFKSSPHSLFPEKMVSSCLDAHTGISHEDLIQNFLNAGSFPEIQGFLQLRGSGRKLWKRFFCFLRRSGLYYSTKGTSKDPRHLQYVADVNESNVYVVTQGRKLYGMPTDFGFCVKPNKLRNGHKGLRIFCSEDEQSRTCWLAAFRLFKYGVQLYKNYQQAQSRHLHPSCLGSPPLRSASDNTLVAMDFSGHAGRVIENPREALSVALEEAQAWRKKTNHRLSLPMPASGTSLSAAIHRTQLWFHGRISREESQRLIGQQGLVDGLFLVRESQRNPQGFVLSLCHLQKVKHYLILPSEEEGRLYFSMDDGQTRFTDLLQLVEFHQLNRGILPCLLRHCCTRVAL

SEQ ID NO: 746374 - protein, 330 aa, Homo sapiens [sequence omitted]

SEQ ID NO: 746375 - protein, 493 aa, Homo sapiens; identical to SEQ ID NO: 746372

SEQ ID NO: 746376 - protein, 68 aa, Homo sapiens
GSFLDLALMYDSTLRITHPCAAPNACAAPPESCNETQDSQQPVLLTRPLQRLPGPQCVSLFPAQEVGG

SEQ ID NO: 746377 - protein, 270 aa, Homo sapiens [sequence omitted]

SEQ ID NO: 746378 - protein, 198 aa, Homo sapiens
MELDLSPPHLSSSPEDLCPAPGTPPGTPRPPDTPLPEEVKRSQPLLIPTTGRKLREEERRATSLPSIPNPFPELCSPPSQSPILGGPSSARGLLPRDASRPHVVKVYSEDGACRSVEVAAGATARHVCEMLVQRAHALSDETWGLVECHPHLALERGLEDHESVVEVQAAWPVGGDSRFVFRKNFAKYELFKSSPVSA

SEQ ID NO: 746379 - protein, 138 aa, Homo sapiens
YVADVNESNVYVVTQGRKLYGMPTDFGFCVKVKTWPGLAPGLGKQELLRPLDPARGFSAPIQTPRLLSLHPGLLETPGFSSAMWSRGRHVVLKADMGPVNFLSLQPNKLRNGHKGLRIFCSEDEQSRTCWLAAFRLFK

SEQ ID NO: 746380 - protein, 503 aa, Homo sapiens
MELDLSPPHLSSSPEDLCPAPGTPPGTPRPPDTPLPEEVKRSQPLLIPTTGSPILGGPSSARGLLPRDASRPHVVKVYSEDGACRSVEVAAGATARHVCEMLVQRAHALSDETWGLVECHPHLALERGLEDHESVVEVQAAWPVGGDSRFVFRKNFAKYELFKSSPHSLFPEKMVSSCLDAHTGISHEDLIQNFLNAGSFPEIQGFLQLRGSGRKLWKRFFCFLRRSGLYYSTKGTSKDPRHLQYVADVNESNVYVVTQGRKLYGMPTDFGFCVKPNKLRNGHKGLRIFCSEDEQSRTCWLAAFRLFKYGVQLYKNYQQAQSRHLHPSCLGSPPLRSASDNTLVAMDFSGHAGRVIENPREALSVALEEAQAWRKKTNHRLSLPMPASGTSLSAAIHRTQLWFHGRISREESQRLIGQQGLVDGLFLVRESQRNPQGFVLSLCHLQKVKHYLILPSEEEGRLYFSMDDGQTRFTDLLQLVEFHQLNRGILPCLLRHCCTRVAL

SEQ ID NO: 746381 - protein, 68 aa, Homo sapiens; identical to SEQ ID NO: 746376

SEQ ID NO: 746382 - protein, 532 aa, Homo sapiens; identical to SEQ ID NO: 746369

SEQ ID NO: 746383 - protein, 600 aa, Homo sapiens
MELDLSPPHLSSSPEDLCPAPGTPPGTPRPPDTPLPEEVKRSQPLLIPTTGRKLREEERRATSLPSIPNPFPELCSPPSQSPILGGPSSARGLLPRDASRPHVVKVYSEDGACRSVEVAAGATARHVCEMLVQRAHALSDETWGLVECHPHLALERGLEDHESVVEVQAAWPVGGDSRFVFRKNFAKYELFKSSPHSLFPEKMVSSCLDAHTGISHEDLIQNFLNAGSFPEIQGFLQLRGSGRKLWKRFFCFLRRSGLYYSTKGTSKDPRHLQYVADVNESNVYVVTQGRKLYGMPTDFGFCVKPNKLRNGHKGLRIFCSEDEQSRTCWLAAFRLFKYGVQLYKNYQQAQSRHLHPSCLGSPPLRSASDNTLVAMDFSGHAGRVIENPREALSVALEEAQAWRKKTNHRLSLPMPASGTSLSAAIHRTQLWFHGRISREESQRLIGQQGLVDGLFLVRESQRNPQGFVLSLCHLQKVKHYLILPSEEEGRLYFSMDDGQTRFTDLLQLVDGLWGAATGDGMRSGRVPPLQFSPLLLCLPQIENSPHSSPLLTPLLKGRPWVAPSPSPSSGGAALGQGIMGEVGAAQAVSRPTLCTDREAS

SEQ ID NO: 746384 - protein, 505 aa, Homo sapiens
MELDLSPPHLSSSPEDLCPAPGTPPGTPRPPDTPLPEEVKRSQPLLIPTTGRKLREEERRATSLPSIPNPFPELCSPPSQSPILGGPSSARGLLPRDASRPHVVKVYSEDGACRSVEVAAGATARHVCEMLVQRAHALSDETWGLVECHPHLALERGLEDHESVVEVQAAWPVGGDSRFVFRKNFAKYELFKSSPHSLFPEKMVSSCLDAHTGISHEDLIQNFLNAGSFPEIQGFLQLRGSGRKLWKRFFCFLRRSGLYYSTKGTSKDPRHLQYVADVNESNVYVVTQGRKLYGMPTDFGFCVKPNKLRNGHKGLRIFCSEDEQSRTCWLAAFRLFKYGVQLYKNYQQAQSRHLHPSCLGSPPLRSASDNTLVAMDFSGHAGRVIENPREALSVALEEAQAWRKKTNHRLSLPMPASGTSLSAAIHRTQLWFHGRISPLLLCLPQIENSPHSSPLLTPLLKGRPWVAPSPSPSSGGAALGQGIMGEVGAAQAVSRPTLCTDREAS

SEQ ID NO: 746385 - protein, 426 aa, Homo sapiens
MELDLSPPHLSSSPEDLCPAPGTPPGTPRPPDTPLPEEVKRSQPLLIPTTGRKLREEERRATSLPSIPNPFPELCSPPSQSPILGGPSSARGLLPRDASRPHVVKVYSEDGACRSVEVAAGATARHVCEMLVQRAHALSDETWGLVECHPHLALERGLEDHESVVEVQAAWPVGGDSRFVFRKNFAKYELFKSSPHSLFPEKMVSSCLDAHTGISHEDLIQNFLNAGSFPEIQGFLQLRGSGRKLWKRFFCFLRRSGLYYSTKGTSKDPRHLQYVADVNESNVYVVTQGRKLYGMPTDFGFCVKPNKLRNGHKGLRIFCSEDEQSRTCWLAAFRLFKYGVQLYKNYQQAQSRHLHPSCLGSPPLPQIENSPHSSPLLTPLLKGRPWVAPSPSPSSGGAALGQGIMGEVGAAQAVSRPTLCTDREAS

SEQ ID NO: 746386 - protein, 277 aa, Homo sapiens [sequence omitted]

SEQ ID NO: 746387 - protein, 122 aa, Homo sapiens
DEQSRTCWLAAFRLFKVRPWEWHGGLAWPEGSPALPSGSLRNEEGITALLSDNPQSKPEVIGSAHRRQKHSPGLGKSWSEGGVTATPPGPLDLKLSFSPHPQYGVQLYKNYQQAQSRHLHPS

SEQ ID NO: 746388 - protein, 464 aa, Homo sapiens
MDGTEGSAGQPGPAERSHRSSVSSVGARAADVLVYLADDTVVPLAVENLPSLSAHELHRAVREVLQLPDIALDVFALWLVSPLLEVQLKPKHQPYKLGRQWPELLLRFTSAPDDDVAMDEPFLQFRRNVFFPKRRELQIHDEEVLRLLYEEAKGNVLAARYPCDVEDCEALGALVCRVQLGPYQPGRPAACDLREKLDSFLPAHLCKRGQSLFAALRGRGARAGPGEQGLLNAYRQVQEVSSDGGCEAALGTHYRAYLLKCHELPFYGCAFFHGEVDKPAQGFLHRGGRKPVSVAISLEGVHVIDSREKHVLLGLRFQELSWDHTSPEEEEPILWLEFDGDSEGTPVNKLLKIYSKQAELMSSLIEYCIELSQAAEPAGPQDSATGSPSDPSSSLAPVQRPKLRRQGSVVSSRIQHLSTIDYVEDGKGIRRVKPKRTTSFFSRQLSLGQGSYTVVQPGDSLEQG

SEQ ID NO: 746389 - protein, 31 aa, Homo sapiens
MRRPASDLEIDIWMRGTQRHPKTQRCQQRQS

SEQ ID NO: 746390 - protein, 285 aa, Homo sapiens
MTTLTHRARRTEISKNSEKKMESEEDSNWEKSPDNEDSGDSKDIRLTLMEEVLLLGLKDKEGYTSFWNDCISSGLRGGILIELAMRGRIYLEPPTMRKKRLLDRKVLLKSDSPTGDVLLDETLKHIKATEPTETVQTWIELLTGETWNPFKLQYQLRNVRERIAKNLVEKGILTTEKQNFLLFDMTTHPVTNTTEKQRLVKKLQDSVLERWVNDPQRMDKRTLALLVLAHSSDVLENVFSSLTDDKYDVAMNRAKDLVELDPEVEGTKPSATEMIWAVLAAFNKS

SEQ ID NO: 746391 - protein, 285 aa, Homo sapiens; identical to SEQ ID NO: 746390

SEQ ID NO: 746392 - protein, 313 aa, Homo sapiens
MTTLTHRARRTEISKNSEKKMESEEDSNWEKSPDNEDSGDSKDIRLTLMEEVLLLGLKDKEGYTSFWNDCISSGLRGGILIELAMRGRIYLEPPTMRKKRLLDRKVLLKSDSPTGDVLLDETLKHIKATEPTETVQTWIELLTGETWNPFKLQYQLRNVRERIAKNLVEKGILTTEKQNFLLFDMTTHPVTNTTEKQRLVKKLQDSVLERWVNDPQRMDKRTLALLVLAHSSDVLENVFSSLTDDKYDVAMNRAKDLVELDPEVEGTKPSATILSFFLFVLDKSLALLPRLVLNSWAQAILPPQPPKVLRLLA

SEQ ID NO: 746393 - protein, 228 aa, Homo sapiens
MHCSGYTSFWNDCISSGLRGGILIELAMRGRIYLEPPTMRKKRLLDRKVLLKSDSPTGDVLLDETLKHIKATEPTETVQTWIELLTGETWNPFKLQYQLRNVRERIAKNLVEKGILTTEKQNFLLFDMTTHPVTNTTEKQRLVKKLQDSVLERWVNDPQRMDKRTLALLVLAHSSDVLENVFSSLTDDKYDVAMNRAKDLVELDPEVEGTKPSATEMIWAVLAAFNKS

SEQ ID NO: 746394 - protein, 285 aa, Homo sapiens; identical to SEQ ID NO: 746390

SEQ ID NO: 746395 - protein, 235 aa, Homo sapiens
RTNFAFLPHTLLIFIKLPGSDIASGSDVLSDVIPSIPSSPCLLPKKKNKHRNLDELPWSAMTNDEQVEYIEYLSRKVSTEMGLREQLDIIKIIDPSAQISPTDSEFIIELNCLTDEKLKQVRNYIKEHSPRQRPAREAWKRSNFSCASTSGVSGASASASSSSASMVSSASSSGSSVGNSASNSSANMSRAHSDSNLSASAAERIRDSKVKRLINTKLYLSILTLVLLHINFLKS

SEQ ID NO: 746396 - protein, 265 aa, Homo sapiens
RTNFAFLPHTLLIFIKLPGSDIASGSDVLSDVIPSIPSSPCLLPKKKNKHRNLDELPWSAMTNDEQVEYIEYLSRKVSTEMGLREQLDIIKIIDPSAQISPTDSEFIIELNCLTDEKLKQVRNYIKEHSPRQRPAREAWKRSNFSCASTSGVSGASASASSSSASMVSSASSSGSSVGNSASNSSANMSRAHSDSNLSASAAERIRDSKKRSKQRKLQQKAFRKRQLKEQRQARKERLSGLFLNEEVLSLKVTEEDHEADVDVLM

SEQ ID NO: 746397 - protein, 406 aa, Homo sapiens
GRDAQPASELRRAHPGASATADRLEWGQGRAREQPRAREGARARPSPTMSDEASAITSYEKFLTPEEPFPLLGPPRGVGTCPSEEPGCLDISDFGCQLSSCHRTDPLHRFHTNRWNLTSCGTSVASSEGSEELFSSVSVGDQDDCYSLLDDQDFTSFDLFPEGSVCSDVSSSISTYWDWSDSEFEWQLPGSDIASGSDVLSDVIPSIPSSPCLLPKKKNKHRNLDELPWSAMTNDEQVEYIEYLSRKVSTEMGLREQLDIIKIIDPSAQISPTDSEFIIELNCLTDEKLKQVRNYIKEHSPRQRPAREAWKRSNFSCASTSGVSGASASASSSSASMVSSASSSGSSVGNSASNSSANMSRAHSDSNLSASAAERIRDSKVKRLINTKLYLSILTLVLLHINFLKS

SEQ ID NO: 746398 - protein, 436 aa, Homo sapiens
GRDAQPASELRRAHPGASATADRLEWGQGRAREQPRAREGARARPSPTMSDEASAITSYEKFLTPEEPFPLLGPPRGVGTCPSEEPGCLDISDFGCQLSSCHRTDPLHRFHTNRWNLTSCGTSVASSEGSEELFSSVSVGDQDDCYSLLDDQDFTSFDLFPEGSVCSDVSSSISTYWDWSDSEFEWQLPGSDIASGSDVLSDVIPSIPSSPCLLPKKKNKHRNLDELPWSAMTNDEQVEYIEYLSRKVSTEMGLREQLDIIKIIDPSAQISPTDSEFIIELNCLTDEKLKQVRNYIKEHSPRQRPAREAWKRSNFSCASTSGVSGASASASSSSASMVSSASSSGSSVGNSASNSSANMSRAHSDSNLSASAAERIRDSKKRSKQRKLQQKAFRKRQLKEQRQARKERLSGLFLNEEVLSLKVTEEDHEADVDVLM

SEQ ID NO: 746399 - protein, 138 aa, Homo sapiens
SELISISPSQGDCFRGNICNLTPTWHRVGPEHISARWLCCSEANASLPCSCPCDVDAQSRVRPCPLSLHCLFLSLCLGWSVPPLHDPHPINSSGQNTACQSRISLSYQAFKEPSRHCFLPRKFSRKLFQLDNLNGVIF

SEQ ID NO: 746400 - protein, 1230 aa, Homo sapiens [sequence omitted]

SEQ ID NO: 746401 - protein, 1997 aa, Homo sapiens
MALLIHLKTVSELRGRGDRIAKVTFRGQSFYSRVLENCEDVADFDETFRWPVASSIDRNEMLEIQVFNYSKVFSNKLIGTFRMVLQKVVEESHVEVTDTLIDDNNAIIKTSLCVEVRYQATDGTVGSWDDGDFLGDESLQEEEKDSQETDGLLPGSRPSSRPPGEKSFRRAGRSVFSAMKLGKNRSHKEEPQRPDEPAVLEMEDLDHLAIRLGDGLDPDSVSLASVTALTTNVSNKRSKPDIKMEPSAGRPMDYQVSITVIEARQLVGLNMDPVVCVEVGDDKKYTSMKESTNCPYYNEYFVFDFHVSPDVMFDKIIKISVIHSKNLLRSGTLVGSFKMDVGTVYSQPEHQFHHKWAILSDPDDISSGLKGYVKCDVAVVGKGDNIKTPHKANETDEDDIEGNLLLPEGVPPERQWARFYVKIYRAEGLPRMNTSLMANVKKAFIGENKDLVDPYVQVFFAGQKGKTSVQKSSYEPLWNEQVVFTDLFPPLCKRMKVQIRDSDKVNDVAIGTHFIDLRKISNDGDKGFLPTLGPAWVNMYGSTRNYTLLDEHQDLNEGLGEGVSFRARLLLGLAVEIVDTSNPELTSSTEVQVEQATPISESCAGKMEEFFLFGAFLEASMIDRRNGDKPITFEVTIGNYGNEVDGLSRPQRPRPRKEPGDEEEVDLIQNASDDEAGDAGDLASVSSTPPMRPQVTDRNYFHLPYLERKPCIYIKSWWPDQRRRLYNANIMDHIADKLEEGLNDIQEMIKTEKSYPERRLRGVLEELSCGCCRFLSLADKDQGHSSRTRLDRERLKSCMRELENMGQQARMLRAQVKRHTVRDKLRLCQNFLQKLRFLADEPQHSIPDIFIWMMSNNKRVAYARVPSKDLLFSIVEEETGKDCAKVKTLFLKLPGKRGFGSAGWTVQAKVELYLWLGLSKQRKEFLCGLPCGFQEVKAAQGLGLHAFPPVSLVYTKKQAFQLRAHMYQARSLFAADSSGLSDPFARVFFINQSQCTEVLNETLCPTWDQMLVFDNLELYGEAHELRDDPPIIVIEIYDQDSMGKADFMGRTFAKPLVKMADEAYCPPRFPPQLEYYQIYRGNATAGDPLAAFELLQIGPAGKADLPPINGPVDVDRGPIMPVPMGIRPVLSKYRVEVLFWGLRDLKRVNLAQVDRPRVDIECAGKGVQSSLIHNYKKNPNFNTLVKWFEVDLPENELLHPPLNIRVVDCRAFGRYTLVGSHAVSSLRRFIYRPPDRSAPSWNTTVRLLRRCRVLCNGGSSSHSTGEVVVTMEPEVPIKKLETMVKLDATSEAVVKVDVAEEEKEKKKKKKGTAEEPEEEEPDESMLDWWSKYFASIDTMKEQLRQQEPSGIDLEEKEEVDNTEGLKGSMKGKEKARAAKEEKKKKTQSSGSGQGSEAPEKKKPKIDELKVYPKELESEFDNFEDWLHTFNLLRGKTGDDEDGSTEEERIVGRFKGSLCVYKVPLPEDVSREAGYDSTYGMFQGIPSNDPINVLVRVYVVRATDLHPADINGKADPYIAIRLGKTDIRDKENYISKQLNPVFGKSFDIEASFPMESMLTVAVYDWDLVGTDDLIGETKIDLENRFYSKHRATCGIAQTYSTHGYNIWRDPMKPSQILTRLCKDGKVDGPHFGPPGRVKVANRVFTGPSEIEDENGQRKPTDEHVALLALRHWEDIPRAGCRLVPEHVETRPLLNPDKPGIEQGRLELWVDMFPMDMPAPGTPLDISPRKPKKYELRVIIWNTDEVVLEDDDFFTGEKSSDIFVRGWLKGQQEDKQDTDVHYHSLTGEGNFNWRYLFPFDYLAAEEKIVISKKESMFSWDETEYKIPARLTLQIWDADHFSADDFLGAIELDLNRFPRGAKTAKQCTMEMATGEVDVPLVSIFKQKRVKGWWPLLARNENDEFELTGKVEAELHLLTAEEAEKNPVGLARNEPDPLEKPNRPDTSFIWFLNPLKSARYFLWHTYRWLLLKLLLLLLLLLLLALFLYSVPGYLVKKILGA

SEQ ID NO: 746402 - protein, 1306 aa, Homo sapiens
MTDTQDGPSESSQIMRSLTPLINREEAFGEAGEAGLWPSITHTPDSQEEGLNDIQEMIKTEKSYPERRLRGVLEELSCGCCRFLSLADKDQGHSSRTRLDRERLKSCMRELENMGQQARMLRAQVKRHTVRDKLRLCQNFLQKLRFLADEPQHSIPDIFIWMMSNNKRVAYARVPSKDLLFSIVEEETGKDCAKVKTLFLKLPGKRGFGSAGWTVQAKVELYLWLGLSKQRKEFLCGLPCGFQEVKAAQGLGLHAFPPVSLVYTKKQAFQLRAHMYQARSLFAADSSGLSDPFARVFFINQSQCTEVLNETLCPTWDQMLVFDNLELYGEAHELRDDPPIIVIEIYDQDSMGKADFMGRTFAKPLVKMADEAYCPPRFPPQLEYYQIYRGNATAGDPLAAFELLQIGPAGKADLPPINGPVDVDRGPIMPVPMGIRPVLSKYRVEVLFWGLRDLKRVNLAQVDRPRVDIECAGKGVQSSLIHNYKKNPNFNTLVKWFEVDLPENELLHPPLNIRVVDCRAFGRYTLVGSHAVSSLRRFIYRPPDRSAPSWNTTVRLLRRCRVLCNGGSSSHSTGEVVVTMEPEVPIKKLETMVKLDATSEAVVKVDVAEEEKEKKKKKKGTAEEPEEEEPDESMLDWWSKYFASIDTMKEQLRQQEPSGIDLEEKEEVDNTEGLKGSMKGKEKARAAKEEKKKKTQSSGSGQGSEAPEKKKPKIDELKVYPKELESEFDNFEDWLHTFNLLRGKTGDDEDGSTEEERIVGRFKGSLCVYKVPLPEDVSREAGYDSTYGMFQGIPSNDPINVLVRVYVVRATDLHPADINGKADPYIAIRLGKTDIRDKENYISKQLNPVFGKSFDIEASFPMESMLTVAVYDWDLVGTDDLIGETKIDLENRFYSKHRATCGIAQTYSTHGYNIWRDPMKPSQILTRLCKDGKVDGPHFGPPGRVKVANRVFTGPSEIEDENGQRKPTDEHVALLALRHWEDIPRAGCRLVPEHVETRPLLNPDKPGIEQGRLELWVDMFPMDMPAPGTPLDISPRKPKKYELRVIIWNTDEVVLEDDDFFTGEKSSDIFVRGWLKGQQEDKQDTDVHYHSLTGEGNFNWRYLFPFDYLAAEEKIVISKKESMFSWDETEYKIPARLTLQIWDADHFSADDFLGAIELDLNRFPRGAKTAKQCTMEMATGEVDVPLVSIFKQKRVKGWWPLLARNENDEFELTGKVEAELHLLTAEEAEKNPVGLARNEPDPLEKPNRPDTSFIWFLNPLKSARYFLWHTYRWLLLKLLLLLLLLLLLALFLYSVPGYLVKKILGA

SEQ ID NO: 746403 - protein, 1230 aa, Homo sapiens [sequence omitted]

SEQ ID NO: 746404 - protein, 510 aa, Homo sapiens
MGALLRQPFSPFQATDLHPADINGKADPYIAIRLGKTDIRDKENYISKQLNPVFGKSFDIEASFPMESMLTVAVYDWDLVGTDDLIGETKIDLENRFYSKHRATCGIAQTYSTHGYNIWRDPMKPSQILTRLCKDGKVDGPHFGPPGRVKVANRVFTGPSEIEDENGQRKPTDEHVALLALRHWEDIPRAGCRLVPEHVETRPLLNPDKPGIEQGRLELWVDMFPMDMPAPGTPLDISPRKPKKYELRVIIWNTDEVVLEDDDFFTGEKSSDIFVRGWLKGQQEDKQDTDVHYHSLTGEGNFNWRYLFPFDYLAAEEKIVISKKESMFSWDETEYKIPARLTLQIWDADHFSADDFLGAIELDLNRFPRGAKTAKQCTMEMATGEVDVPLVSIFKQKRVKGWWPLLARNENDEFELTGKVEAELHLLTAEEAEKNPVGLARNEPDPLEKPNRPDTSFIWFLNPLKSARYFLWHTYRWLLLKLLLLLLLLLLLALFLYSVPGYLVKKILGA

SEQ ID NO: 746405 - protein, 464 aa, Homo sapiens
MDGTEGSVGQPGPTERSHRSSVSSVGARAADVLVYLADDTVVPLAVENLPSLRAHELHCAVREVLKLPDIALDVFALWLVSPLLEVQLKPKNQPYKLGRQWPELLLRFTSAPDDDVAMDEPFLQFRRNVFFPKGRELQIPDEEVLRLLYEEAKGNVLAARYLCDVEDCEALGALVCRVQLVTYQPDWPAACDLREKLDSFLPAHLCKRGQGLFAALRGRGARAGPGEQSLLNAYRKVQEVSSDGGCEAALGTHYRAYLLKCHKLPFYGCAFFHGEVDKPAQGFLHRGGRKSVSVAISLEGVHVVDSREKHVLLGLCFQELSWDHTSPEEEEPILWLEFDRDSGVTPVNKLLKIYSKQAELMSSLIEYCIELSQAAEPAGPQDSATGSPSDLSSSPAPVQRPKLRRQGSVVSSRIQHLSTIAYVEDGKGIRRVKTKSTTSFFSQQLSLGQGSYTVVQPSDSLEQG

SEQ ID NO: 746406 - protein, 176 aa, Homo sapiens
MERRLIKKEMKKLLGDYIGIRLRENEFDPKGRRQLTFLDDMAHYDLAISVALQWLDPSEDLTWLEWEELKIPLHGRPIYPNRREREAMILSSYAGILMNSIPIEEVFKIYGADSSADSGTIKVPRVSSLRLSLHPFAMLTAPKAAAYARKQGHLENWNCTMELHNRFSGSRREASS

SEQ ID NO: 746407 - protein, 214 aa, Homo sapiens
MERRLIKKEMKKLLGDYIGIRLRENEFDPKGRRQLTFLDDMAHYDLAISVALQWLDPSEDLTWLEWEELKIPLHGRPIYPNRREREAMILSSYAGILMNSIPIEEVFKIYGADSSADSGTIKVPRVSSLRLSLHPFAMLTAPKAAAYARKQVETGFHRGLDLLTSRSARLGLPKRWDYRLEPPRPAQLLGHLENWNCTMELHNRFSGSRREASS

SEQ ID NO: 746408 - protein, 193 aa, Homo sapiens
MERRLIKKEMKKLLGDYIGIRLRENEFDPKGRRQLTFLDDMAHYDLAISVALQWLDPSEDLTWLEWEELKIPLHGRPIYPNRREREAMILSSYAGILMNSIPIEEVFKIYGADSSADSGTIKVPRVSSLRLSLHPFAMLTAPKAAAYARKQGVKSRKVTTNKNATSISAKEANATEWKSSQRFSDTQPKHKVT

SEQ ID NO: 746409 - protein, 193 aa, Homo sapiens; identical to SEQ ID NO: 746408

SEQ ID NO: 746410 - protein, 342 aa, Homo sapiens
MDLTYIPEDLSSCPKFVNKSCPPTNRSFHVQVIMYSVMTGAMIITIRKLGYNGFHIAFQTASLSHKLSDPLHGNQDFLLGFVIMPYSIMRSVESCWYFGDGFCKFHTSFDMMLRLTSIFHLCSIAIDRFYAVCYPLHYTTKMTNSTIKQLLAFCWSVPALFSFGLVLSEADVSGMQSYKILVACFNFCALTFNKFWGTILFTTCFFTPGSIMVGIYGKIFIVSKQHARVISHVPENTKGAVKKHLSKKKDRKAAKTLGIVMGVFLACWLPCFLAVLIDPYLDYSTPILILDLLVWLRYFNSTCNPLIHGFFNPWFQKAFKYIVSGKIFSSHSETANLFPEAH

SEQ ID NO: 746411 - protein, 342 aa, Homo sapiens; identical to SEQ ID NO: 746410

SEQ ID NO: 746412 - protein, 104 aa, Homo sapiens
MTRTLLRNGRLALYRTALPHQQEAKDSPCLWSVPLTFLFYLLLIHKSRTFHSLVKPLSPTLELSDGLLLSQLLLEDATDEKTRPSLRVPSKGKSEKIQNNSKGL

SEQ ID NO: 746413 - protein, 123 aa, Homo sapiens
MSILIIEAFYGGSHKQLVDLLQEELGDCVVYTLPAKKWHWRARTSALYFSQTIPISEHYRTLFASSVLNLTELAALRPDLGKLKKILYFHENQLIYPVKKCQERDFQYGYNQILSCLGEHERW

SEQ ID NO: 746414 - protein, 193 aa, Homo sapiens
MSILIIEAFYGGSHKQLVDLLQEELGDCVVYTLPAKKWHWRARTSALYFSQTIPISEHYRTLFASSVLNLTELAALRPDLGKLKKILYFHENQLIYPVKKCQERDFQYGYNQILSCLVADVVVFNSVFNMESFLTSMGKFMKLIPDHRPKDLESIIRPKCQVIYFPIRFPDVSRFMPKHKTSHLKKMLGLKDM

SEQ ID NO: 746415 - protein, 193 aa, Homo sapiens; identical to SEQ ID NO: 746414

SEQ ID NO: 746416 - protein, 72 aa, Homo sapiens
AAAGEGHGVSASPAGPRRWPGGRDKEEEEEEGISALARLDICKGTSVYLDHQIVLQEDHREERIFILLQKLQ

SEQ ID NO: 746417 - protein, 109 aa, Homo sapiens
CAAVRTALGMGRHAVAFCAFCKLVVFELRFFGAYMSCVLVFCGPALRFFLAQAERTGGGTSPSRGRREAGRPGWPELAGVLRRPPGCPALGPLQCEPQAFLTESFASGS

SEQ ID NO: 746418 - protein, 83 aa, Homo sapiens
MGLHFYISINSVLWQYAGIFYHVLFTAVWVSKMIDISKEKEAAFFKFHQIISLLLKVRFLHFYLIIISCIHTSIVDNNSLLFF

SEQ ID NO: 746419 - protein, 73 aa, Homo sapiens
LNDNSDTTYQNLWDTEKAVLRGKFIALNVYTKKPERAQIGNLRSRLKELEKLEQSKHKPSIRKEITKIRAELN

SEQ ID NO: 746420 - protein, 101 aa, Homo sapiens
NFFFSFSETEFCSVAQARVQWYNHGSLQVLAGSSNPPTLASQVAVTTATHHYTQLIFLFFVEMESHHVDRLVSNSWAQEILLPWPLNCWDYRCEPPHLAKI

SEQ ID NO: 746421 - protein, 1454 aa, Homo sapiens
MPGPPALRRRLLLLLLVLLIAGSAGAAPLPQTGAGEAPPAAEVSSSFVILCVCSLIILIVLIANCVSCCKDPEIDFKEFEDNFDDEIDFTPPAEDTPSVQSPAEVFTLSVPNISLPAPSQFQPSVEGLKSQVARHSLNYIQEIGNGWFGKVLLGEIYTGTSVARVIVKELKASANPKEQDTFLKNGEPYYILQHPNILQCVGQCVEAIPYLLVFEFCDLGDLKAYLRSEQEHMRGDSQTMLLQRMACEVAAGLAAMHKLHFLHSDLALRNCFLTSDLNVKVGDYGIGFSRYKEDYIETDDKKVFPLRWTAPELVTSFQDRLLTADQTKYSNIWSLGVTLWELFDNAAQPYSNLSNLDVLNQVIRERDTKLPKPQLEQPYSDRWYEVLQFCWLSPEKRPAAEDVHRLLTYLRLQSQRDSEVDFEQQWNALKPNTNSRDSSNNAAFPILDHFARDRLGREMEEVLTVTETSQGLSFEYVWEAAKHDHFDERSRGHLDEGLSYTSIFYPVEVFESSLSDPGPGKQDDSGQDVPLRVPGVVPVFDAHNLSVGSDYYIQLEEKSGSNLELDYPPALLTTDMDNPERTGPELSQLTALRSVELEESSTDEDFFQSSTDPKDSSLPGDLHVTSGPESPFNNIFNDVDKSEDLPSHQKIFDLMELNGVQADFKPATLSSSLDNPKESVITGHFEKEKPRKIFDSEPLCLSDNLMHQDNFDPLNVQELSENFLFLQEKNLLKGSLSSKEHINDLQTELKNAGFTEAMLETSCRNSLDTELQFAENKPGMSLLQENVSTKGDDTDVMLTGDTLSTSLQSSPEVQVPPTSFETEETPRRVPPDSLPTQGETQPTCLDVIVPEDCLHQDISPDAVTVPVEILSTDARTHSLDNRSQDSPGESEETLRLTESDSVLADDILASRVSVGSSLPELGQELHNKPFSEDHHSHRRLEKNLEAVETLNQLNSKDAAKEAGLVSALSSDSTSQDSLLEDSLSAPFPASEPSLETPDSLESVDVHEALLDSLGSHTPQKLVPPDKPADSGYETENLESPEWTLHPAPEGTADSEPATTGDGGHSGLPPNPVIVISDAGDGHRGTEVTPETFTAGSQGSYRDSAYFSDNDSEPEKRSEEVPGTSPSALVLVQEQPLPEPVLPEQSPAAQDSCLEARKSQPDESCLSALHNSSDLELRATPEPAQTGVPQQVHPTEDEASSPWSVLNAELSSGDDFETQDDRPCTLASTGTNTNELLAYTNSALDKSLSSHSEGPKLKEPDIEGKYLGKLGVSGMLDLSEDGMDADEEDENSDDSDEDLRAFNLHSLSSESEDETEHPVPIILSNEDGRHLRSLLKPTAANAPDPLPEDWKKEKKAVTFFDDVTVYLFDQETPTKELGPCGGEACGPDLSGPAPASGSPYLSRCINSESSTDEEGGGFEWDDDFSPDPFMSKTTSNLLSSKPSLPPTLPAFPSHT

SEQ ID NO: 746422 - protein, 104 aa, Homo sapiens
MWESQAGAASEGKDRKGGSGGAGLKTPASVPVVQRTCHPRHACLIILKTQLCRLASSLLNRKQRRRRKGLGGCQRARSGPRLLPWSGAPAPSARAATSTRHLLT

SEQ ID NO: 746423 - protein, 1503 aa, Homo sapiens
MPGPPALRRRLLLLLLVLLIAGSAGAAPLPQTGAGEAPPAAEVSSSFVILCVCSLIILIVLIANCVSCCKDPEIDFKEFEDNFDDEIDFTPPAEDTPSVQSPAEVFTLSVPNISLPAPSQFQPSVEGLKSQVARHSLNYIQEIGNGWFGKVLLGEIYTGTSVARVIVKELKASANPKEQDTFLKNGEPYYILQHPNILQCVGQCVEAIPYLLVFEFCDLGDLKAYLRSEQEHMRGDSQTMLLQRMACEVAAGLAAMHKLHFLHSDLALRNCFLTSDLNVKVGDYGIGFSRYKEDYIETDDKKVFPLRWTAPELVTSFQDRLLTADQTKYSNIWSLGVTLWELFDNAAQPYSNLSNLDVLNQVIRERDTKLPKPQLEQPYSDRWYEVLQFCWLSPEKRPAAEDVHRLLTYLRLQSQRDSEVDFEQQWNALKPNTNSRDSSNNAAFPILDHFARDRLGREMEEVLTVTETSQGLSFEYVWEAAKHDHFDERSRGHLDEGLSYTSIFYPVEVFESSLSDPGPGKQDDSGQDVPLRVPGVVPVFDAHNLSVGSDYYIQLEEKSGSNLELDYPPALLTTDMDNPERTGPELSQLTALRSVELEESSTDEDFFQSSTDPKDSSLPGDLHVTSGPESPFNNIFNDVDKSEDLPSHQKIFDLMELNGVQADFKPATLSSSLDNPKESVITGHFEKEKPRKIFDSEPLCLSDNLMHQDNFDPLNVQELSENFLFLQEKNLLKGSLSSKEHINDLQTELKNAGFTEAMLETSCRNSLDTELQFAENKPGMSLLQENVSTKGDDTDVMLTGDTLSTSLQSSPEVQVPPTSFETEETPRRVPPDSLPTQGETQPTCLDVIVPEDCLHQDISPDAVTVPVEILSTDARTHSLDNRSQDSPGESEETLRLTESDSVLADDILASRVSVGSSLPELGQELHNKPFSEDHHSHRRLEKNLEAVETLNQLNSKDAAKEAGLVSALSSDSTSQDSLLEDSLSAPFPASEPSLETPDSLESVDVHEALLDSLGSHTPQKLVPPDKPADSGYETENLESPEWTLHPAPEGTADSEPATTGDGGHSGLPPNPVIVISDAGDGHRGTEVTPETFTAGSQGSYRDSAYFSDNDSEPEKRSEEVPGTSPSALVLVQEQPLPEPVLPEQSPAAQDSCLEARKSQPDESCLSALHNSSDLELRATPEPAQTGVPQQVHPTEDEASSPWSVLNAELSSGDDFETQDDRPCTLASTGTNTNELLAYTNSALDKSLSSHSEGPKLKEPDIEGKYLGKLGVSGMLDLSEDGMDADEEDENSDDSDEDLRAFNLHSLSSESEDETEHPVPIILSNEDGRHLRSLLKPTAANAPDPLPEDWKKEKKAVTFFDDVTVYLFDQETPTKELGPCGGEACGPDLSGPAPASGSPYLSRCINSESSTDEEGGGFEWDDDFSPDPFMSKTTSNLLSSKPSLQTSKYFSPPPPARSTEQSWPHSAPYSRFSISPANIASFSLTHLTDSDIEQGGSSEDGEKD

SEQ ID NO: 746424 - protein, 354 aa, Homo sapiens
MRYTTVPSVRPTALATKKLDLWRLPPFLIIHLKRFQFVNDQWIKSQKIVKFPRESFDPSAFLVPRDPALCQHQPLTPQGDELSKPRILAREVKKVDVQSLAGEEDMLLSKSPSSLSANISSSPKGSPSSSRKSGTSCPSSKNSSPNSCPRTLGRSKGRLRLPQIGSKNKLSSSKKNLDASKENGAGQICELADALSRGHMRGGSQPELVTPQDHEVALGNGFLYEHEAYGNGYSNGQLGNHSEEDSTDDQREDTHIKPIYNLYAISCHSGILSGGHYVTYAKNPNCKWYCYNGSICEEHHPDEIDTDSAYILFYEQQRIDYAQFLPKIDGKKMADTSSMDEDFESDYEKYCVLQ

SEQ ID NO: 746425 - protein, 415 aa, Homo sapiens
HYANEKLSFSSPHLLICTKVTVGPSVVDEHESVEQSWRVQVEPINLDSCLRAFTSEEELGEDEIYYCSKCKTHCLATKKLDLWRLPPFLIIHLKRFQFVNDQWIKSQKIVKFPRESFDPSAFLVPRDPALCQHQPLTPQGDELSKPRILAREVKKVDVQSLAGEEDMLLSKSPSSLSANISSSPKGSPSSSRKSGTSCPSSKNSSPNSCPRTLGRSKGRLRLPQIGSKNKLSSSKKNLDASKENGAGQICELADALSRGHMRGGSQPELVTPQDHEVALGNGFLYEHEAYGNGYSNGQLGNHSEEDSTDDQREDTHIKPIYNLYAISCHSGILSGGHYVTYAKNPNCKWYCYNGSICEEHHPDEIDTDSAYILFYEQQRIDYAQFLPKIDGKKMADTSSMDEDFESDYEKYCVLQ

SEQ ID NO: 746426 - protein, 415 aa, Homo sapiens; identical to SEQ ID NO: 746425

SEQ ID NO: 746427 - protein, 415 aa, Homo sapiens; identical to SEQ ID NO: 746425

SEQ ID NO: 746428 - protein, 415 aa, Homo sapiens; identical to SEQ ID NO: 746425

SEQ ID NO: 746429 - protein, 416 aa, Homo sapiens
HYANEKLSFSSPHLLICTKVTVGPSVVDEHESVEQSWRVQVEPINLDSCLRAFTSEEELGEDEIYYCSKCKTHCLATKKLDLWRLPPFLIIHLKRFQFVNDQWIKSQKIVKFPRESFDPSAFLVPRDPALCQHQPLTPQGDELSKPRILAREVKKVDVQSLAGEEDMLLSKSPSSLSANISSSPKGSPSSSRKSGTSCPSSKNSSPNSCPRTLGRSKGRLRLPQIGSKNKLSSSKKNLDASKENGAGQICELADALSRGHMRGGSQPELVTPQDHEVALGNGFLYEHEAYGNGYSNGQLGNHSEEDSTDDQREDTHIKPIYNLYAISCHSGILSGGHYVTYAKNPNCKWYCYNGSICEEHHPDEIDTDSAYILFYEQQRIDYAQFLPKIDGKKMADTSSMDEDFESDYEKEMTPCS

SEQ ID NO: 746430 - protein, 415 aa, Homo sapiens; identical to SEQ ID NO: 746425

SEQ ID NO: 746431 - protein, 392 aa, Homo sapiens
HYANEKLSFSSPHLLICTKVTVGPSVVDEHESVEQSWRVQVEPINLDSCLRAFTSEEELGEDEIYYCSKCKTHCLATKKLDLWRLPPFLIIHLKRFQFVNDQWIKSQKIVKFPRESFDPSAFLVPRDPALCQHQPLTPQGDELSKPRILAREVKKVDVQSLAGEEDMLLSKSPSSLSANISSSPKGSPSSSRKSGTSCPSSKNSSPNSCPRTLGRSKGRLRLPQIGSKNKLSSSKKNLDASKENGAGQICELADALSRGHMRGGSQPELVTPQDHEVALGNGFLYEHEAYGNGYSNGQLGNHSEEDSTDDQREDTHIKPIYNLYAISCHSGILSGGHYVTYAKNPNCKWYCYNGSICEYAQFLPKIDGKKMADTSSMDEDFESDYEKYCVLQ

SEQ ID NO: 746432 - protein, 415 aa, Homo sapiens; identical to SEQ ID NO: 746425

SEQ ID NO: 746433 - protein, 391 aa, Homo sapiens
MNASSRNVFDTLIRVLTESMFKHLRKWVVTRFFGHSRQRARLVSKDGRCNIEFGNVEAQSRFIFFVDIWTTVLDLKWRYKMTIFITAFLGSWFFFGLLWYAVAYIHKDLPEFHPSANHTPCVENINGLTSAFLFSLETQVTIGYGFRCVTEQCATAIFLLIFQSILGVIINSFMCGAILAKISRPKKRAKTITFSKNAVISKRGGKLCLLIRVANLRKSLLIGSHIYGKLLKTTVTPEGETIILDQININFVVDAGNENLFFISPLTIYHVIDHNSPFFHMAAETLLQQDFELVVFLDGTVESTSATCQVRTSYVPEEVLWGYRFAPIVSKTKEGKYRVDFHNFSKTVEVETPHCAMCLYNEKDVRARMKRGYDNPNFILSEVNETDDTKM

SEQ ID NO: 746434 - protein, 102 aa, Homo sapiens
MAKISSPTETERCIESLIAVFQKYAGKDGYNRNLSKTEFLSFMNTELAAFTKNQKDPGVLDHMKKLDVSSDGQLDFPKFLNLIGGLAVACHDSFLKAVPSQK

SEQ ID NO: 746435 - protein, 1059 aa, Homo sapiens
MKESSLQNSSCSLGKETKKENMFLQSSMLTCIFLLISGSCELCAEENFSRSYPCDEKKQNDSVIAECSNRRLQEVPQTVGKYVTELDLSDNFITHITNESFQGLQNLTKINLNHNPNVQHQNGNPGIQSNGLNITDGAFLNLKNLRELLLEDNQLPQIPSGLPESLTELSLIQNNIYNITKEGISRLINLKNLYLAWNCYFNKVCEKTNIEDGVFETLTNLELLSLSFNSLSHVPPKLPSSLRKLFLSNTQIKYISEEDFKGLINLTLLDLSGNCPRCFNAPFPCVPCDGGASINIDRFAFQNLTQLRYLNLSSTSLRKINAAWFKNMPHLKVLDLEFNYLVGEIASGAFLTMLPRLEILDLSFNYIKGSYPQHINISRNFSKLLSLRALHLRGYVFQELREDDFQPLMQLPNLSTINLGINFIKQIDFKLFQNFSNLEIIYLSENRISPLVKDTRQSYANSSSFQRHIRKRRSTDFEFDPHSNFYHFTRPLIKPQCAAYGKALDLSLNSIFFIGPNQFENLPDIACLNLSANSNAQVLSGTEFSAIPHVKYLDLTNNRLDFDNASALTELSDLEVLDLSYNSHYFRIAGVTHHLEFIQNFTNLKVLNLSHNNIYTLTDKYNLESKSLVELVFSGNRLDILWNDDDNRYISIFKGLKNLTRLDLSLNRLKHIPNEAFLNLPASLTELHINDNMLKFFNWTLLQQFPRLELLDLRGNKLLFLTDSLSDFTSSLRTLLLSHNRISHLPSGFLSEVSSLKHLDLSSNLLKTINKSALETKTTTKLSMLELHGNPFECTCDIGDFRRWMDEHLNVKIPRLVDVICASPGDQRGKSIVSLELTTCVSDVTAVILFFFTFFITTMVMLAALAHHLFYWDVWFIYNVCLAKVKGYRSLSTSQTFYDAYISYDTKDASVTDWVINELRYHLEESRDKNVLLCLEERDWDPGLAIIDNLMQSINQSKKTVFVLTKKYAKSWNFKTAFYLALQRLMDENMDVIIFILLEPVLQHSQYLRLRQRICKSSILQWPDNPKAEGLFWQTLRNVVLTENDSRYNNMYVDSIKQY

SEQ ID NO: 746436 - protein, 1041 aa, Homo sapiens
MENMFLQSSMLTCIFLLISGSCELCAEENFSRSYPCDEKKQNDSVIAECSNRRLQEVPQTVGKYVTELDLSDNFITHITNESFQGLQNLTKINLNHNPNVQHQNGNPGIQSNGLNITDGAFLNLKNLRELLLEDNQLPQIPSGLPESLTELSLIQNNIYNITKEGISRLINLKNLYLAWNCYFNKVCEKTNIEDGVFETLTNLELLSLSFNSLSHVPPKLPSSLRKLFLSNTQIKYISEEDFKGLINLTLLDLSGNCPRCFNAPFPCVPCDGGASINIDRFAFQNLTQLRYLNLSSTSLRKINAAWFKNMPHLKVLDLEFNYLVGEIASGAFLTMLPRLEILDLSFNYIKGSYPQHINISRNFSKLLSLRALHLRGYVFQELREDDFQPLMQLPNLSTINLGINFIKQIDFKLFQNFSNLEIIYLSENRISPLVKDTRQSYANSSSFQRHIRKRRSTDFEFDPHSNFYHFTRPLIKPQCAAYGKALDLSLNSIFFIGPNQFENLPDIACLNLSANSNAQVLSGTEFSAIPHVKYLDLTNNRLDFDNASALTELSDLEVLDLSYNSHYFRIAGVTHHLEFIQNFTNLKVLNLSHNNIYTLTDKYNLESKSLVELVFSGNRLDILWNDDDNRYISIFKGLKNLTRLDLSLNRLKHIPNEAFLNLPASLTELHINDNMLKFFNWTLLQQFPRLELLDLRGNKLLFLTDSLSDFTSSLRTLLLSHNRISHLPSGFLSEVSSLKHLDLSSNLLKTINKSALETKTTTKLSMLELHGNPFECTCDIGDFRRWMDEHLNVKIPRLVDVICASPGDQRGKSIVSLELTTCVSDVTAVILFFFTFFITTMVMLAALAHHLFYWDVWFIYNVCLAKVKGYRSLSTSQTFYDAYISYDTKDASVTDWVINELRYHLEESRDKNVLLCLEERDWDPGLAIIDNLMQSINQSKKTVFVLTKKYAKSWNFKTAFYLALQRLMDENMDVIIFILLEPVLQHSQYLRLRQRICKSSILQWPDNPKAEGLFWQTLRNVVLTENDSRYNNMYVDSIKQY

SEQ ID NO: 746437 - protein, 53 aa, Homo sapiens
  misc_feature (4)..(4): Xaa can be any naturally occurring amino acid
MKIXSQQAQLAAAEKFKVQGEAVSNIQENTQTPTVQEESEEEEVDETGVEVKD

SEQ ID NO: 746438 - protein, 104 aa, Homo sapiens
MPTIRAGVDATVHPHCISPPHGQRHTLAHIPSTFDCWGMQARVCLEPQGWDLSPKEPTPPLPGWALAGSTFFPHHIPDPCPAHMHMLFPVSRALACGSLPPMHS

SEQ ID NO: 746439 - protein, 126 aa, Homo sapiens
MKAVWAFILQTGTNSSMLFVLPVQPCWEGLGELPTRRDSCCFGKLRKNRGLTLSSHFTSGEMRRERRGVWVTPWVWGPGKGLYGGGSWEGTVSGSTPVGWGGGAPLYHRTSPLRGPSYVWVLWVGD

SEQ ID NO: 746440 - protein, 67 aa, Homo sapiens [sequence omitted]

SEQ ID NO: 746441 - protein, 166 aa, Homo sapiens
MSPNGSIPPIHVPPGYISQVIEDSTGVRRVVVTPQSPECYPPSYPSAMSPTHHLPPYLTHHPHFIHNSHTAYYPPVTGPGDMPPQFFPQHHLPHTIYGEQKLYHFMECQATSPEKTSTASLLHKKLKDRQIDRQNRLNRPPSSIYKSSCTTVYNGYGKGHSGGSGG

SEQ ID NO: 746442 - protein, 168 aa, Homo sapiens
AAAAGLGEPAAGSSGGGAGRGGKERATRCVGQRSSGQSVTPRGASAGDRAGGRNLRPEAARRGRADRLVPAAGLGPAGVGRACHSRQKVGPRAVPANFPRGPGPGVPWEPEDPGPPSRETGLRRPAAPLAGRLPGVRGRSWSFWNLSSHPAIPDEGKQWHFIQTVPFA

SEQ ID NO: 746443 - protein, 320 aa, Homo sapiens
  misc_feature (7)..(7): Xaa can be any naturally occurring amino acid
IRNPVSXSRSDPVTLNLLPKLPKPYITREDQYSKPPHKKLKDRQIDRQNRLNSPPSSIYKSSCTTVYNGYGKGHSGGSGGGGSGSGPGIKKTERRARSSPKSNDSDLQEYELEVKRVQDILSGIEKPQVSNIQARAVVLSWAPPVGLSCGPHSGLSFPYSYEVALSDKGRDGKYKIIYYSGEELECNLKDLRPATDYHVRVYAMYNSVKGSCSEPVSFTTHSCAPECPFPPKLAHRSKSSLTLQWKAPIDNGSKITNYLLEWDEGKRNSGFRQCFFGSQKHCKLTKLCPAMGYTFRLAARNDIGTRYDVSLSSCPSAFGW

SEQ ID NO: 746444 - protein, 363 aa, Homo sapiens
RLYLEYPLLRTRTCGLSCGPHSGLSFPYSYEVALSDKGRDGKYKIIYYSGEELECNLKDLRPATDYHVRVYAMYNSVKGSCSEPVSFTTHSCAPECPFPPKLAHRSKSSLTLQWKAPIDNGSKITNYLLEWDEGKRNSGFRQCFFGSQKHCKLTKLCPAMGYTFRLAARNDIGTSGYSQEVVCYTLGNIPQMPSAPRLVRAGITWVTLQWSKPEGCSPEEVITYTLEIQEDENDNLFHPKYTGEDLTCTVKNLKRSTQYKFRLTASNTEGKSCPSEVLVCTTSPDRPGPPTRPLVKGPVTSHGFSVKWDPPKDNGGSEILKYLLEITDGNSEASQWEVAYSGSATEYTFTHLKPGTLYNSEHA

SEQ ID NO: 746445 - protein, 255 aa, Homo sapiens
  misc_feature (7)..(7): Xaa can be any naturally occurring amino acid
IRNPVSXSRSDPVTLNLLPKLPKPYITREDQYSKPPHKKLKDRQIDRQNRLNSPPSSIYKSSCTTVYNGYGKGQVVEVAEAAAVVVPELRKQSDEQEAAQSRMIQTCKVIEDSTGVRRVVVTPQSPECYPPSYPSAMSPTHHLPPYLTHHPHFIHNSHTAYYPPVTGPGDMPPQFFPQHHLPHTIYGEQKLYHFMECQATSPEKTSTASLLHKKLKDRQIDRQNRLNRPPSSIYKSSCTTVYNGYGKGHSGGSGG

SEQ ID NO: 746446 - protein, 494 aa, Homo sapiens
  misc_feature (7)..(7): Xaa can be any naturally occurring amino acid
IRNPVSXSRSDPVTLNLLPKLPKPYITREDQYSKPPHKKLKDRQIDRQNRLNSPPSSIYKSSCTTVYNGYGKGHSGGSGGGGSGSGPGIKKTERRARSSPKSNDSDLQEYELEVKRVQDILSGIEKPQVSNIQARAVVLSWAPPVGLSCGPHSGLSFPYSYEVALSDKGRDGKYKIIYYSGEELECNLKDLRPATDYHVRVYAMYNSVKGSCSEPVSFTTHSCAPECPFPPKLAHRSKSSLTLQWKAPIDNGSKITNYLLEWDEGKRNSGFRQCFFGSQKHCKLTKLCPAMGYTFRLAARNDIGTSGYSQEVVCYTLGNIPQMPSAPRLVRAGITWVTLQWSKPEGCSPEEVITYTLEIQEDENDNLFHPKYTGEDLTCTVKNLKRSTQYTFRLTASNTEGKSCPSEVLVCTTSPDRPGPPTRPLVKGPVTSHGFSVKWDPPKDNGGSEILKYLLEITDGNSEASQWEVAYSGSATEYTFTHLKPGTLYNSEHA

SEQ ID NO: 746447 - protein, 273 aa, Homo sapiens
  misc_feature (7)..(7): Xaa can be any naturally occurring amino acid
IRNPVSXSRSDPVTLNLLPKLPKPYITREDQYSKPPHKKLKDRQIDRQNRLNSPPSSIYKSSCTTVYNGYGKGHSGGSGGGGSGSGPGIKKTERRARSSPKSNDSDLQEYELEVKRVQDILSGIEKPQVSNIQARAVVLSWAPPVGLSCGPHSGLSFPYSYEVALSDKGRDGKYKIIYYSGEELECNLKDLRPATDYHVRVYAMYNSVKGSCSEPVSFTTHSCAPECPFPPKLAHRSKSSLTLQWKAPIDNGSKITNYLLEWDEVSLFSYSPI

SEQ ID NO: 746448 - protein, 258 aa, Homo sapiens
SGVSSSKLLRLDGGSQLREFSMNSTSQVMMTDQIPLELPPLLNGEVAMMPHLVNGDAAQQVILVQVNPGETFTIRAEDGTLQCIQGPAEVPMMSPNGSIPPIHVPPGYISQVIEDSTGVRRVVVTPQSPECYPPSYPSAMSPTHHLPPYLTHHPHFIHNSHTAYYPPVTGPGDMPPQFFPQHHLPHTIYGEQKLYHFMECQATSPEKTSTASLLHKKLKDRQIDRQNRLNRPPSSIYKSSCTTVYNGYGKGHSGGSGG

SEQ ID NO: 746449 - protein, 142 aa, Homo sapiens
FRMNGDMPHVPITTLAGIASLTDLLNQLPLPSPLPATTTKSLLFNARTAEEVNCLLACRDDNLVSQLVHSLNQVSTDHIELKDNLGSDDPEGDIPVLLQAVLARSPNVFREKSMQNRYVQSGMMMSQYKLSQNSMHSSPASS

SEQ ID NO: 746450 - protein, 81 aa, Homo sapiens
AIQRPKGAHCDLALGDPGMISLPPGTGPNPRGPGETLCPAGPMGDSSLYVRVRGPALFLPRTWPGEGGTRKIAVRDAQPGS

SEQ ID NO: 746451 - protein, 1359 aa, Homo sapiens
MVGEGPYLISDLDQRGRRRSFAERYDPSLKTMIPVRPCARLAPNPVDDAGLLSFATFSWLTPVMVKGYRQRLTVDTLPPLSTYDSSDTNAKRFRVLWDEEVARVGPEKASLSHVVWKFQRTRVLMDIVANILCIIMAAIGPVILIHQILQQTERTSGKVWVGIGLCIALFATEFTKVFFWALAWAINYRTAIRLKVALSTLVFENLVSFKTLTHISVGEVLNILSSDSYSLFEAALFCPLPATIPILMVFCAAYAFFILGPTALIGISVYVIFIPVQMFMAKLNSAFRRSAILVTDKRVQTMNEFLTCIRLIKMYAWEKSFTNTIQDIRRRERKLLEKAGFVQSGNSALAPIVSTIAIVLTLSCHILLRRKLTAPVAFSVIAMFNVMKFSIAILPFSIKAMAEANVSLRRMKKILIDKSPPSYITQPEDPDTVLLLANATLTWEHEASRKSTPKKLQNQKRHLCKKQRSEAYSERSPPAKGATGPEEQSDSLKSVLHSISFVVRKGKILGICGNVGSGKSSLLAALLGQMQLQKGVVAVNGTLAYVSQQAWIFHGNVRENILFGEKYDHQRYQHTVRVCGLQKDLSNLPYGDLTEIGERGLNLSGGQRQRISLARAVYSDRQLYLLDDPLSAVDAHVGKHVFEECIKKTLRGKTVVLVTHQLQFLESCDEVILLEDGEICEKGTHKELMEERGRYAKLIHNLRGLQFKDPEHLYNAAMVEAFKESPAEREEDAGIIVLAPGNEKDEGKESETGSEFVDTKVPEHQLIQTESPQEGTVTWKTYHTYIKASGGYLLSLFTVFLFLLMIGSAAFSNWWLGLWLDKGSRMTCGPQGNRTMCEVGAVLADIGQHVYQWVYTASMVFMLVFGVTKGFVFTKTTLMASSSLHDTVFDKILKSPMSFFDTTPTGRLMNRFSKDMDELDVRLPFHAENFLQQFFMVVFILVILAAVFPAVLLVVASLAVGFFILLRIFHRGVQELKKVENVSRSPWFTHITSSMQGLGIIHAYGKKESCITYHLLYFNCALRWFALRMDVLMNILTFTVALLVTLSFSSISTSSKGLSLSYIIQLSGLLQVCVRTGTETQAKFTSVELLREYISTCVPECTHPLKVGTCPKDWPSCGEITFRDYQMRYRDNTPLVLDSLNLNIQSGQTVGIVGRTGSGKSSLGMALFRLVEPASGTIFIDEVDICILSLEDLRTKLTVIPQDPVLFVGTVRYNLDPFESHTDEMLWQVLERTFMRDTIMKLPEKLQAEVTENGENFSVGERQLLCVARALLRNSKIILLDEATASMDSKTDTLVQNTIKDAFKGCTVLTIAHRLNTVLNCDHVLVMENGKVIEFDKPEVLAEKPDSAFAMLLAAEVRL

SEQ ID NO: 746452 - protein, 1359 aa, Homo sapiens; identical to SEQ ID NO: 746451

SEQ ID NO: 746453 - protein, 233 aa, Homo sapiens
MRYRDNTPLVLDSLNLNIQSGQTVGIVGRTGSGKSSLGMALFRLVEPASGTIFIDEVDICILSLEDLRTKLTVIPQDPVLFVGTVRYNLDPFESHTDEMLWQVLERTFMRDTIMKLPEKLQAEVTENGENFSVGERQLLCVARALLRNSKIILLDEATASMDSKTDTLVQNTIKDAFKGCTVLTIAHRLNTVLNCDHVLVMENGKVIEFDKPEVLAEKPDSAFAMLLAAEVRL

SEQ ID NO: 746454 - protein, 60 aa, Homo sapiens
HSFSSVKTTHYCLTGCPSDPGLDSVLALSGFTCPHAPPSRPWFMYPGLQDPLPRQTLALF

SEQ ID NO: 746455 - protein, 506 aa, Homo sapiens
ECVTQPFPRDQAERVALRSHSSRTSMASAASVTSLADEVNCPICQGTLREPVTIDCGHNFCRACLTRYCEIPGPDLEESPTCPLCKEPFRPGSFRPNWQLANVVENIERLQLVSTLGLGEEDVCQEHGGKIYFFCEDDEMQLCVVCREAGEHATHTMRFLEDAAAPYREQIHKCLKCLRKEREEIQEIQSRENKRMQVLLTQVSTKRQQVISEFAHLRKFLEEQQSILLAQLESQDGDILRQRDEFDLLVAGEICRFSALIEELEEKNERPARELLTDIRSTLIRCETRKCRKPVAVSPELGQRIRDFPQQALPLQREMKMFLEKLCFELDYEPAHISLDPQTSHPKLLLSEDHQRAQFSSKWQNSPDNPQRFDRATCVLAHTGITGGRHTWVVSIDLAHGASCTVGVVSEDVQRKGELRLRPEEGVWAVRLAWGFVSALGSFPTRLTLKEQPRQVRVSLDYEVGWVTFTNAVTREPIYTFTASFTRKVIPFFGLWGRGSSFSLSS

SEQ ID NO: 746456 - protein, 780 aa, Homo sapiens
MQKSSALKEHSWGAWSEMELEKIQVELDLKYQPPEGATGAWSEEDFGAPIQDSFELIIPNVGFQELEPGEAQLERRAVALGRRLARSLGQQDDEENELELELEQDLDDEPDVELSGVMFSPLKSRARALAHGDPFQVSRAQDFQVGVTVLEAQKLVGVNINPYVAVQVGGQRRVTATQRGTSCPFYNEYFLFEFHDTRLRLQDLLLEITVSGVGVTSVLQRRGDEKAAGLTPPSPKAFHSQTLPFMATRIGTFRMDLGIILDQPGMESSPYGDSARTRALEIDPAVTPHGPLYTHFGEGHLWRRLNSWHFRPSLLSQRSPGHCPHSDSLTATLCVPPVAPYPWLAPSPLDGQFYQRWVPLHDPRDTRAGTKGFIKVTLSVRARGDLPPPMLPPAPGHCSDIEKGAGMRWGGGHGSGGGRGARIRGGAEIPVSPPPLGAPSPRNLLLPRGVPAERPWARLRVRLYRAEGLPALRLGLLGSLVRALHDQRVLVEPYVRVSFLGQEGETSVSAEAAAPEWNEQLSFVELFPPLTRSLRLQLRDDAPLVDAALATHVPDLRRISHPGRAAGFNPTFGPAWVPLYGSPPGAGLRDSLQGLNEGVGQGIWFRGRLLLAVSMQVLEGRAEPEPPQAQQGSTLSRLTRKKKKKARRDQTPKAVPQHLDASPGAEGPEIPRAMEVEVEELLPLPENVLAPCEDFLLFGVLFEATMIDPTVASQPISFEISIGRAGRLEEQLGRGSRAGEGTEGAAVEAQPLLGARPEEEKEEEELGTHAQRPEPMDGSG

SEQ ID NO: 746457 - protein, 736 aa, Homo sapiens
MQKSSALKEHSWGAWSEMELEKIQVELDLKYQPPEGATGAWSEEDFGAPIQDSFELIIPNVGFQELEPGEAQLERRAVALGRRLARSLGQQDDEENELELELEQDLDDEPDVELSGVMFSPLKSRARALAHGDPFQVSRAQDFQVGVTVLEAQKLVGVNINPYVAVQVGGQRRVTATQRGTSCPFYNEYFLFEFHDTRLRLQDLLLEITVSGVGVTSVLQRRGDEKAAGLTPPSPKAFHSQTLPFMATRIGTFRMDLGIILDQPGMESSPYGDSARTRALEIDPAVTPHGPLYTHFGEGHLWRRLNSWHFRPSLLSQRSPGHCPHSDSLTATLCVPPVAPYPWLAPSPLDGQFYQRWVPLHDPRDTRAGTKGFIKVTLSVRARGDLPPPMLPPAPGHCSDIEKGAGMRWGGGHGSGGGRGARIRGGAEIPVSPPPLGAPSPRNLLLPRGVPAERPWARLRVRLYRAEGLPALRLGLLGSLVRALHDQRVLVEPYVRVSFLGQEGETSVSAEAAAPEWNEQLSFVELFPPLTRSLRLQLRDDAPLVDAALATHVPDLRRISHPGRAAGFNPTFGPAWVPLYGSPPGAGLRDSLQGLNEGVGQGIWFRGRLLLAVSMQVLEGRAEPEPPQAQQGSTLSRLTRKKKKKARRDQTPKAVPQHLDASPGAEGPEIPRAMEVEVEELLPLPENVLAPCEDFLLFGVLFEATMIDPTVASQPISFEISIGVWPSRTPECHFRP

SEQ ID NO: 746458 - protein, 876 aa, Homo sapiens
QRKCQCHWDHGSDGNACNDYTGLTGTHDRQVKLTFRGFTQKTRKIHCGPEADIGELFRWPHYGAPLAGECLSVQVVNCSRVFSLRPLGTLVISLQQLQNAGHLVLREALVDENLQVSPIQVELDLKYQPPEGATGAWSEEDFGAPIQDSFELIIPNVGFQELEPGEAQLERRAVALGRRLARSLGQQDDEENELELELEQDLDDEPDVELSGVMFSPLKSRARALAHGDPFQVSRAQDFQVGVTVLEAQKLVGVNINPYVAVQVGGQRRVTATQRGTSCPFYNEYFLFEFHDTRLRLQDLLLEITVSGVGVTSVLQRRGDEKAAGLTPPSPKAFHSQTLPFMATRIGTFRMDLGIILDQPGMESSPYGDSARTRALEIDPAVTPHGPLYTHFGEGHLWRRLNSWHFRPSLLSQEALAIVRHSDSLTATLCVPPVAPYPWLAPSPLDGQFYQRWVPLHDPRDTRAGTKGFIKVTLSVRARGDLPPPMLPPAPGHCSDIEKWAGMRWGGGHGSGGGRGARIRGGAEIPVSPPPLGAPSPRNLLLPRGVPAERPWARLRVRLYRAEGLPALRLGLLGSLVRALHDQRVLVEPYVRVSFLGQEGETSVSAEAAAPEWNEQLSFVELFPPLTRSLRLQLRDDAPLVDAALATHVPDLRRISHPGRAAGFNPTFGPAWVPLYGSPPGAGLRDSLQGLNEGVGQGIWFRGRLLLAVSMQVLEGRAEPEPPQAQQGSTLSRLTRKKKKKARRDQTPKAVPQHLDASPGAEGPEIPRAMEVEVEELLPLPENVLAPCEDFLLFGVLFEATMIDPTVASQPISFEISIGRAGRLEEQLGRGSRAGEGTEGAAVEAQPLLGARPEEEKEEEELGTHAQRPEPMDGSG

SEQ ID NO: 746459 - protein, 729 aa, Homo sapiens
MGDGFQACPLRVFPIRPGEAQLERRAVALGRRLARSLGQQDDEENELELELEQDLDDEPDVELSGVMFSPLKSRARALAHGDPFQVSRAQDFQVGVTVLEAQKLVGVNINPYVAVQVGGQRRVTATQRGTSCPFYNEYFLFEFHDTRLRLQDLLLEITVSGVGVTSVLQRRGDEKAAGLTPPSPKAFHSQTLPFMATRIGTFRMDLGIILDQPGMESSPYGDSARTRALEIDPAVTPHGPLYTHFGEGHLWRRLNSWHFRPSLLAREALAIVRHSDSLTATLCVPPVAPYPWLAPSPLDGQFYQRWVPLHDPRDTRAGTKGFIKVTLSVRARGDLPPPMLPPAPGHCSDIEKGAGMRWGGGHGSGGGRGARIRGGAEIPVSPPPLGAPSPRNLLLPRGVPAERPWARLRVRLYRAEGLPALRLGLLGSLVRALHDQRVLVEPYVRVSFLGQEGETSVSAEAAAPEWNEQLSFVELFPPLTRSLRLQLRDDAPLVDAALATHVPDLRRISHPGRAAGFNPTFGPAWVPLYGSPPGAGLRDSLQGLNEGVGQGIWFRGRLLLAVSMQVLEGRAEPEPPQAQQGSTLSRLTRKKKKKARRDQTPKAVPQHLDASPGAEGPEIPRAMEVEVEELLPLPENVLAPCEDFLLFGVLFEATMIDPTVASQPISFEISIGRAGRLEEQLGRGSRAGEGTEGAAVEAQPLLGARPEEEKEEEELGTHAQRPEPMDGSG

SEQ ID NO: 746460 - protein, 225 aa, Homo sapiens
MEAARHDLKEPGFNPTFGPAWVPLYGSPPGAGLRDSLQGLNEGVGQGIWFRGRLLLAVSMQVLEGRAEPEPPQAQQGSTLSRLTRKKKKKARRDQTPKAVPQHLDASPGAEGPEIPRAMEVEVEELLPLPENVLAPCEDFLLFGVLFEATMIDPTVASQPISFEISIGRAGRLEEQLGRGSRAGEGTEGAAVEAQPLLGARPEEEKEEEELGTHAQRPEPMDGSG

SEQ ID NO: 746461 - protein, 84 aa, Homo sapiens
RLLLAVSMQVLEGRAEPEPPQAQQGSTLSRLTRKKKKKARRDQTPKAVPQHLDASPGAEGPEIPRAMEVEVEELLPLPEVGAGG

SEQ ID NO: 746462 - protein, 102 aa, Homo sapiens
LRRSLCRLGWSGVAQSWLTATSASQVAAILLPQPPGVAGTTDMCHHAWLIFCVFLVEMGFHHVGQAGLELLTSGDLPISASQSAGITGVSHRAQLVLTDNSS

SEQ ID NO: 746463 - protein, 163 aa, Homo sapiens
QALLLTVQSPDVLFLRTQVVTPQEVPIAPQAPHVPPPHSPGRVLLTPHQSACALLRSSLKARSLSPLACGKWSSRTEAPQSPEAPPGRLFPGCNTGSRLKELCFVGAIWEFPPSMKCAGALRRGGATLGSGDIKSGTGSGGSSPLALFSFRCGGSRISRGCGR

SEQ ID NO: 746464 - protein, 448 aa, Homo sapiens
MDHQDPYSVQATAAIAAAITFLILFTIFGNALVILAVLTSRSLRAPQNLFLVSLAAADILVATLIIPFSLANELLGYWYFRRTWCEVYLALDVLFCTSSIVHLCAISLDRYWAVSRALEYNSKRTPRRIKCIILTVWLIAAVISLPPLIYKGDQGPQPRGRPQCKLNQEAWYILASSIGSFFAPCLIMILVYLRIYLIAKRSNRRGPRAKGGPGQGESKQPRPDHGGALASAKLPALASVASAREVNGHSKSTGEKEEGETPEDTGTRALPPSWAALPNSGQGQKEGVCGASPEDEAKEEEEEEEEECEPQAVPVSPASACSPPLQQPQGSRVLATLRGQVLLGRGVGAIGGQWWRRRAQLTREKRFTFVLAVVIGVFVLCWFPFFFSYSLGAICPKHCKVPHGLFQFFFWIGYCNSSLNPVIYTIFNQDFRRAFRRILCRPWTQTAW

SEQ ID NO: 746465 - protein, 341 aa, Homo sapiens
LRSRPWEWSGGSVVMWLDRRGWLRVLGHWRYDLRRPSFTRTWSGDKGPMAETVSTQVGTEGGLRASHQQNGDAGGDAKVELSPGPPKPAGREVEPAPVGGEHPSAAAPGPGKHKKRRGATRERVVPPPKKRRTGVSFGDEHFAETSYYFEGGLRKVRPYYFDFRTYCKGRWVGHSLLHVFSTEFRAQPLAYYEAAVRAGRLQLNEKPVQDLNIVLKDNDFLRNTVHRHEPPVTAEPIRLLAENEDVVVVDKPSSIPVHPCGRFRHNTVIFILGKEHQLKELHPLHRLDRLTSGVLMFAKTAAVSERIHEQVRDRQVSQAFVSYRPLLGLTNALCQKGIMEF

SEQ ID NO: 746466 - protein, 219 aa, Homo sapiens
LRSRPWEWSGGSVVMWLDRRGWLRVLGHWRYDLRRPSFTRTWSGDKGPMAETVSTQVGTEGGLRASHQQNGDAGGDAKVELSPGPPKPAGREVEPAPVGGEHPSAAAPGPGKHKKRRGATRERVVPPPKKRRTGVSFGDEHFAETSYYFEGGLRKVRPYYFDFRTYCKGRWVGHSLLHVFSTEFRAQPLAYYEAAVRAGRLQLNEKPVQDLNIVLKVES

SEQ ID NO: 746467 - protein, 485 aa, Homo sapiens
LRSRPWEWSGGSVVMWLDRRGWLRVLGHWRYDLRRPSFTRTWSGDKGPMAETVSTQVGTEGGLRASHQQNGDAGGDAKVELSPGPPKPAGREVEPAPVGGEHPSAAAPGPGKHKKRRGATRERVVPPPKKRRTGVSFGDEHFAETSYYFEGGLRKVRPYYFDFRTYCKGRWVGHSLLHVFSTEFRAQPLAYYEAAVRAGRLQLNEKPVQDLNIVLKDNDFLRNTVHRHEPPVTAEPIRLLAENEDVVVVDKPSSIPVHPCGRFRHNTVIFILGKEHQLKELHPLHRLDRLTSGVLMFAKTAAVSERIHEQVRDRQLEKEYVCRVEGEFPTEEVTCKEPILVVSYKVGVCRVDPRGKPCETVFQRLSYNGQSSVVRCRPLTGRTHQIRVHLQFLGHPILNDPIYNSVAWGPSRGRGGYIPKTNEELLRDLVAEHQAKQSLDVLDLCEGDLSPGLTDSTAPSSELGKDDLEELAAAAQKMEGLLLGL

SEQ ID NO: 746468 - protein, 559 aa, Homo sapiens
LRSRPWEWSGGSVVMWLDRRGWLRVLGHWRYDLRRPSFTRTWSGDKGPMAETVSTQVGTEGGLRASHQQNGDAGGDAKVELSPGPPKPAGREVEPAPVGGEHPSAAAPGPGKHKKRRGATRERVVPPPKKRRTGVSFGDEHFAETSYYFEGGLRKVRPYYFDFRTYCKGRWVGHSLLHVFSTEFRAQPLAYYEAAVRAGRLQLNEKPVQDLNIVLKDNDFLRNTVHRHEPPVTAEPIRLLAENEDVVVVDKPSSIPVHPCGRFRHNTVIFILGKEHQLKELHPLHRLDRLTSGVLMFAKTAAVSERIHEQVRDRQLEKEYVCRVEGEFPTEEVTCKEPILVVSYKVGVCRVDPRGKPCETVFQRLSYNGQSSVVRCRPLTGRTHQIRVHLQFLGHPILNDPIYNSVAWGPSRGRGGYIPKTNEELLRDLVAEHQAKQSLDVLDLCEGDLSPGLTDSTAPSSELGKDDLEELAAAAQKMEEVAEAAPQELDTIALASEKAVETDVMNQETDPLCAECRLVRQDPLPQDLVMFLHALRYKGPGFEYFSPMPAWAQDDWQKD

SEQ ID NO: 746469 - protein, 559 aa, Homo sapiens; identical to SEQ ID NO: 746468

SEQ ID NO: 746470 - protein, 67 aa, Homo sapiens
RYHQFHCQRTLNPSRAWQGAGCPPFGLSITRAENPLLSPLLFLQAFRYAASPRIAESIQSYPNSLGE

SEQ ID NO: 746471 - protein, 67 aa, Homo sapiens
TEKDRRLMPGEILDRVTHVGDWRPPEESSRSVFRMFLYREERGRPVTTAPVPHGLAPVDINYLYFHA

SEQ ID NO: 746472 - protein, 127 aa, Homo sapiens
MPSCDPGPGPACLPTKTFRSYLPRCHRTYSCVHCRAHLAKHDELISKSFQGSHGRAYLFNSVVNVGCGPAEQRLLLTGLHSVADIFCESCKTTLGWKYEQAFETSQKYKEGKYIIEMSHMVKDNGWD

SEQ ID NO: 746473 - protein, 127 aa, Homo sapiens; identical to SEQ ID NO: 746472

SEQ ID NO: 746474 - protein, 228 aa, Homo sapiens
MAASVPVGFSLWKMVEAASAPGGRNTDSLALAPEAWIGCQVTSISIWFSSGGALAGQPPNTSPALKHGSSQPAPLLHLRPSLRGLHGASPSSPPGIVLQPVMPSCDPGPGPACLPTKTFRSYLPRCHRTYSCVHCRAHLAKHDELISKSFQGSHGRAYLFNSVVNVGCGPAEQRLLLTGLHSVADIFCESCKTTLGWKYEQAFETSQKYKEGKYIIEMSHMVKDNGWD

SEQ ID NO: 746475 - protein, 127 aa, Homo sapiens; identical to SEQ ID NO: 746472

SEQ ID NO: 746476 - protein, 156 aa, Homo sapiens
AAPALEPLSRLRGRPGVCPLLAESRCRRFKGRGKDEEALCGLRQPLCHVVLPIPPPRLPRLPPPPRARQAPSLLRSSVHPRFVWLTQFSSPLPPMQKGDSVATRPQPLFLVNLKWGFPEWVLAPQGTPHRPPGCRRETQAVLSVLWSAPFKSSEVV

SEQ ID NO: 746477 - protein, 309 aa, Homo sapiens
EAEETNGPDRDEERNRKREAGRIGNLGASDLHTGQGHSAVPRGHPSHPRHPDIWNFGCQESSLMQAAWLLGALVVPQLLGFGHGARGAEREWEGGWGGAQEEEREREALMLKHLQEALGLPAGRGDENPAGTVEGKEDWEMEEDQGEEEEEEATPTPSSGPSPSPTPEDIVTYILGRLAGLDAGLHQLHVRLHALDTRVVELTQGLRQLRNAAGDTRDAVQALQEAQGRAEREHGRLEGCLKGLRLGHKCFLLSRDFEGAQPSASPHPLSPDQPNGGTLENCVAQASDDGSWWDHDCQRRLYYVCEFPF

SEQ ID NO: 746478 - protein, 386 aa, Homo sapiens
EAEETNGPDRDEERNRKREAGRIGNLGASDLHTGQGHSAVPRGHPSHPRHPDIWNFGCQESSLMQAAWLLGALVVPQLLGFGHGARGAEREWEGGWGGAQEEEREREALMLKHLQEALGLPAGRGDENPAGTVEGKEDWEMEEDQGEEEEEEATPTPSSGPSPSPTPEDIVTYILGRLAGLDAGLHQLHVRLHALDTRVVELTQGLRQLRNAAGDTRDAVQALQEAQGRAEREHGRLEGCLKGLRLGHKCFLLSRDFEAQAAAQARCTARGGSLAQPADRQQMEALTRYLRAALAPYNWPVWLGVHDRRAEGLYLFENGQRVSFFAWHRSPRPELGAQPSASPHPLSPDQPNGGTLENCVAQASDDGSWWDHDCQRRLYYVCEFPF

SEQ ID NO: 746479 - protein, 302 aa, Homo sapiens
EAEETNGPDRDEERNRKREAGRIGNLGASDLHTGQGHSAVPRGHPSHPRHPDIWNFGCQESSLMQAAWLLGALVVPQLLGFGHGARGAEREWEGGWGGAQEEEREREALMLKHLQEALGLPAGRGDENPAGTVEGKEDWEMEEDQGEEEEEEATPTPSSGPSPSPTPEDIVTYILGRLAGLDAGLHQLHVRLHALDTRVVELTQGLRQLRNAAGDTRDAVQALQEAQGRAEREHGRLEGCLKGLRLGHKCFLLSRDFEAQAAAQARCTARGGSLAQPADRQQMEALTRYCQRRLYYVCEFPF

SEQ ID NO: 746480 - protein, 386 aa, Homo sapiens; identical to SEQ ID NO: 746478

SEQ ID NO: 746481 - protein, 386 aa, Homo sapiens; identical to SEQ ID NO: 746478

SEQ ID NO: 746482 - protein, 237 aa, Homo sapiens
EAEETNGPDRDEERNRKREAGRIGNLGASDLHTGQGHSAVPRGHPSHPRHPDIWNFGCQESSLMQAAGPLAGLDAGLHQLHVRLHALDTRVVELTQGLRQLRNAAGDTRDAVQALQEAQGRAEREHGRLEGCLKGLRLGHKCFLLSRDFEAQAAAQARCTARGGSLAQPADRQQMEALTRYLRAALAPYNWPVWLGVHDRRAEGLYLFGRPAQRLAASAQPGPAQRWHARELRGAGL

SEQ ID NO: 746483 - protein, 463 aa, Homo sapiens [sequence omitted]

SEQ ID NO: 746484 - protein, 104 aa, Homo sapiens; identical to SEQ ID NO: 746438

SEQ ID NO: 746485 - protein, 104 aa, Homo sapiens; identical to SEQ ID NO: 746438

SEQ ID NO: 746486 - protein, 104 aa, Homo sapiens; identical to SEQ ID NO: 746438

SEQ ID NO: 746487 - protein, 104 aa, Homo sapiens; identical to SEQ ID NO: 746438

SEQ ID NO: 746488 - protein, 1134 aa, Homo sapiens
NSQKDVRPKASGGLFEGLGLASAPWGLTWLDIVYRPGRRGGPVRVAPPGAAPGTSVLEEARVAPVAKKTMNKSENLLFAGSSLASQVHAAAVNGDKGALQRLIVGNSALKDKEDQFGRTPLMYCVLADRLDCADALLKAGADVNKTDHSQRTALHLAAQKGNYRFMKLLLTRRANWMQKDLEEMTPLHLTTRHRSPKCLALLLKFMAPGEVDTQDKNKQTALHWSAYYNNPEHVKLLIKHDSNIGIPDVEGKIPLHWAANHKDPSAVHTVRCILDAAPTESLLNWQDYEGRTPLHFAVADGNVTVVDVLTSYESCNITSYDNLFRTPLHWAALLGHAQIVHLLLERNKSGTIPSDSQGATPLHYAAQSNFAETVKVFLKHPSVKDDSDLEGRTSFMWAAGKGSDDVLRTMLSLKSDIDINMADKYGGTALHAAALSGHVSTVKLLLENNAQVDATDVMKHTPLFRACEMGHKDVIQTLIKGGARVDLVDQDGHSLLHWAALGGNADVCQILIENKINPNVQDYAGRTPLQCAAYGGYINCMAVLMENNADPNIQDKEGRTALHWSCNNGYLDAIKLLLDFAAFPNQMENNEERYTPLDYALLGERHEVIQFMLEHGALSIAAIQDIAAFKIQAVYKGYKVRKAFRDRKNLLMKHEQLRKDAAAKKREEENKRKEAEQQKGRRSPDSCRPQALPCLPSTQDVPSRQSRAPSKQPPAGNVAQGPEPRDSRGSPGGSLGGALQKEQHVSSDLQGTNSRRPNETAREHSKGQSACVHFRPNEGSDGSRHPGVPSVEKSRGETAGDERCAKGKGFVKQPSCIRVAGPDEKGEDSRRAAASLPPHDSHWKPSRRHDTEPKAKCAPQKRRTQELRGGRCSPAGSSRPGSARGEAVHAGQNPPHHRTPRNKVTQAKLTGGLYSHLPQSTEELRSGARRLETSTLSEDFQVSKETDPAPGPLSGQSVNIDLLPVELRLQIIQRERRRKELFRKKNKAAAVIQRAWRSYQLRKHLSHLRHMKQLGAGDVDRWRQESTALLLQVWRKELELKFPQTTAVSKAPKSPSKGTSGTKSTKHSVLKQIYGCSHEGKIHHPTRSVKASSVLRLNSVSNLQCIHLLENSGRSKNFSYNLQSATQPKNKTKP

SEQ ID NO: 746489 - protein, 895 aa, Homo sapiens
MNKSENLLFAGSSLASQVHAAAVNGDKGALQRLIVGNSALKDKEDQFGRTPLMYCVLADRLDCADALLKAGADVNKTDHSQRTALHLAAQKGNYRFMKLLLTRRANWMQKDLEEMTPLHLTTRHRSPKCLALLLKFMAPGEVDTQDKNKQTALHWSAYYNNPEHVKLLIKHDSNIGIPDVEGKIPLHWAANHKDPSAVHTVRCILDAAPTESLLNWQDYEGRTPLHFAVADGNVTVVDVLTSYESCNITSYDNLFRTPLHWAALLGHAQIVHLLLERNKSGTIPSDSQGATPLHYAAQSNFAETVKVFLKHPSVKDDSDLEGRTSFMWAAGKGSDDVLRTMLSLKSDIDINMADKYGGTALHAAALSGHVSTVKLLLENNAQVDATDVMKHTPLFRACEMGHKDVIQTLIKGGARVDLVDQDGHSLLHWAALGGNADVCQILIENKINPNVQDYAGRTPLQCAAYGGYINCMAVLMENNADPNIQDKEGRTALHWSCNNGYLDAIKLLLDFAAFPNQMENNEERYTPLDYALLGERHEVIQFMLEHGALSIAAIQDIAAFKIQAVYKGYKVRKAFRDRKNLLMKHEQLRKDAAAKKREEENKRKEAEQQKGRRSPDSCRPQALPCLPSTQDVPSRQSRAPSKQPPAGNVAQGPEPRDSRGSPGGSLGGALQKEQHVSSDLQGTNSRRPNETAREHSKGQSACVHFRPNEGSDGSRHPGVPSVEKSRELRLQIIQRERRRKELFRKKNKAAAVIQRAWRSYQLRKHLSHLRHMKQLGAGDVDRWRQESTALLLQVWRKELELKFPQTTAVSKAPKSPSKGTSGTKSTKHSVLKQIYGCSHEGKIHHPTRSVKASSVLRLNSVSNLQCIHLLENSGRSKNFSYNLQSATQPKNKTKP

SEQ ID NO: 746490 - protein, 170 aa, Homo sapiens
NSQKDVRPKASGGLFEGLGLASAPWGLTWLDIVYRPGRRGGPVRVAPPGAAPGTSVLEEARVAPVAKKTMNKSENLLFAGSSLASQVHAAAVNGDKGALQRLIVGNSALKDKEDQFGRTPLMYCVLADRLDCADALLKAGADVNKTDHSQRTALHLAAQKALRTISTGRI

SEQ ID NO: 746491 - protein, 826 aa, Homo sapiens
MNKSENLLFAGSSLASQVHAAAVNGDKGALQRLIVGNSALKDKEDQFGRTPLMYCVLADRLDCADALLKAGADVNKTDHSQRTALHLAAQKGNYRFMKLLLTRRANWMQKDLEEMTPLHLTTRHRSPKCLALLLKFMAPGEVDTQDKNKQTALHWSAYYNNPEHVKLLIKHDSNIGIPDVEGKIPLHWAANHKDPSAVHTVRCILDAAPTESLLNWQDYEGRTPLHFAVADGNVTVVDVLTSYESCNITSYDNLFRTPLHWAALLGHAQIVHLLLERNKSGTIPSDSQGATPLHYAAQSNFAETVKVFLKHPSVKDDSDLEGRTSFMWAAGKGSDDVLRTMLSLKSDIDINMADKYGGTALHAAALSGHVSTVKLLLENNAQVDATDVMKHTPLFRACEMGHKDVIQTLIKGGARVDLVDQDGHSLLHWAALGGNADVCQILIENKINPNVQDYAGRTPLQCAAYGGYINCMAVLMENNADPNIQDKEGRTALHWSCNNGYLDAIKLLLDFAAFPNQMENNEERYTPLDYALLGERHEVIQFMLEHGALSIAAIQDIAAFKIQAVYKGYKVRKAFRDRKNLLMKHEQLRKDAAAKKREEENKRKEAEQQKGRRSPDSCRPQALPCLPSTQDVPSRQSRAPSKQPPAGNVAQGPEPRDSRGSPGGSLGGALQKEQHVSSDLQGTNSRRPNETAREHSKGQSACVHFRPNEGSDGSRHPGVPSVEKSRELRLQIIQRERRRKELFRKKNKAAAVIQRAWRSYQLRKHLSHLRHMKQLGAGDVDRWRQESTALLLQVWRKELELKFPQTTAVSKVARASSGLGVFYVVP

SEQ ID NO: 746492 - protein, 1406 aa, Homo sapiens
MWSLTASEGESTTAHFFLGAGDEGLGTRGIGMRPEESDSELLEDEEDEVPPEPQIIVGICAMTKKSKSKPMTQILERLCRFDYLTVVILGEDVILNEPVENWPSCHCLISFHSKGFPLDKAVAYSKLRNPFLINDLAMQYYIQDRREVYRILQEEGIDLPRYAVLNRDPARPEECNLIEGEDQVEVNGAVFPKPFVEKPVSAEDHNVYIYYPSSAGGGSQRLFRKIGSRSSVYSPESSVRKTGSYIYEEFMPTDGTDVKVYTVGPDYAHAEARKSPALDGKVERDSEGKEIRYPVMLTAMEKLVARKVCVAFKQTVCGFDLLRANGHSFVCDVNGFSFVKNSMKYYDDCAKILGNTIMRELAPQFQIPWSIPTEAEDIPIVPTTSGTMMELRCVIAIIRHGDRTPKQKMKMEVKHPRFFALFEKHGGYKTGKLKLKRPEQLQEVLDITRLLLAELEKEPGGEIEEKTGKLEQLKSVLEMYGHFSGINRKVQLTYYPHGVKASNEGQDPQRETLAPSLLLVLKWGGELTPAGRVQAEELGRAFRCMYPGGQGDYAGFPGCGLLRLHSTFRHDLKIYASDEGRVQMTAAAFAKGLLALEGELTPILVQMVKSANMNGLLDSDGDSLSSCQHRVKARLHHILQQDAPFGPEDYDQLAPTRSTSLLNSMTIIQNPVKVCDQVFALIENLTHQIRERMQDPRSVDLQLYHSETLELMLQRWSKLERDFRQKSGRYDISKIPDIYDCVKYDVQHNGSLGLQGTAELLRLSKALADVVIPQEYGISREEKLEIAVGFCLPLLRKILLDLQRTHEDESVNKLHPLYSRGVLSPGRHVRTRLYFTSESHVHSLLSVFRYGGLLDETQDAQWQRALDYLSAISELNYMTQIVIMLYEDNTQDPLSEERFHVELHFSPGVKGVEEEGSAPAGCGFRPASSENEEMKTNQGSMENLCPGKASDEPDRALQTSPQPPEGPGLPRRSPLIRNRKAGSMEVLSETSSSRPGGYRLFSSSRPPTEMKQSGLGFEGCSMVPTIYPLETLHNALSLRQVSEFLSRVCQRHTDAQAQASAALFDSMHSSQASDNPFSPPRTLHSPPLQLQQRSEKPPWLETRFCHVGQAGLELLTSSDLPASASQSAGITGVSHRTQPDSSGPSSTVSSAGPSSPTTVDGNSQFGFSDQPSLNSHVAEEHQGLGLLQETPGSGAQELSIEGEQELFEPNQSPQVPPMETSQPYEEVSQPCQEVPDISQPCQDISEALSQPCQKVPDISQQCQENHDNGNHTCQEVPHISQPCQKSSQLCQKVSEEVCQLCLENSEEVSQPCQGVSVEVGKLVHKFHVGVGSLVQETLVEVGSPAEEIPEEVIQPYQEFSVEVGRLAQETSAINLLSQGIPEIDKPSQEFPEEIDLQAQEVPEEIN

SEQ ID NO: 746493 - protein, 105 aa, Homo sapiens
LRLLPSHLMVHPPEQGPFDLHGQTLLHSASRGCCVAELFRFWRPMSRCSNRVFLGPDTQSCSHTLDQLLTLRPGLPPSIFLSERDWKRVAVFFPAWHIHTLAYGS

SEQ ID NO: 746494 - protein, 115 aa, Homo sapiens
MNSGVCLCVLMAVLAAGALTQPVPPADPAGSGLQRAEEAPRRQLRVSQRTDGESRAHLGALLARYIQQARKAPSGRMSIVKNLQNLDPSHRISDRDYMGWMDFGRRSAEEYEYPS

SEQ ID NO: 746495 - protein, 115 aa, Homo sapiens; identical to SEQ ID NO: 746494

SEQ ID NO: 746496 - protein, 115 aa, Homo sapiens; identical to SEQ ID NO: 746494

SEQ ID NO: 746497 - protein, 368 aa, Homo sapiens
SVQCIAFQYSTVLTKSSLNKGCSNKPTTVNKRSVNVNAASGGVQNSGIVREAPATSIATVLPQPMTSAMGKGTVAVQEKAGLPRSINTDTLSKETDSGKNQDFSSFDDTGKSSLGDMFSPIRDDAVVNKGSDESIGKGDGFDFLPQLNSVFPPRKNPVTSSTSVLHSSPLNVFMGSPGKEENENRDLTAESKKIYMGKQESKDSFKQLAKLVTSGAESGNLNTSPSSNQTRNSEKFEKPENEIEAQLICEPPINGSSTPNPKIASSVTAGVASSLSEKIADSIGNNRQNAPLTSIQIRFIQNMIQETLDDFREACHRDIVNLQVEMIKQFHMQLNEMHSLLERYSVNEGLVAEIERLREENKRLRAHF

SEQ ID NO: 746498 - protein, 368 aa, Homo sapiens; identical to SEQ ID NO: 746497

SEQ ID NO: 746499 - protein, 654 aa, Homo sapiens
SAPLSVSQTTLPQSSSTPVLPRARETPVTSFQTSTMTSFMTMLHSSQTADLKSQSTPHQEKVITESKSPSLVSLPTESTKAVTTNSPLPPSLTESSTEQTLPATSTNLAQMSPTFTTTILKTSQPLMTTPGTLSSTASLVTGPIAVQTTAGKQLSLTHPEILVPQISTEGGISTERNRVIVDATTGLIPLTSVPTSAKEMTTKLGVTAEYSPASRSLGTSPSPQTTVVSTAEDLAPKSATFAVQSSTQSPTTLSSSASVNSCAVNPCLHNGECVADNTSRGYHCRCPPSWQGDDCSVDVNECLSNPCPSTATCNNTQGSFICKCPVGYQLEKGICNLVRTFVTEFKLKRTFLNTTVEKHSDLQEVENEITKTLNMCFSALPSYIRSTVHASRESNAVVISLQTTFSLASNVTLFDLADRMQKCVNSCKSSAEVCQLLGSQRRIFRAGSLCKRKSPECDKDTSICTDLDGVALCQCKSGYFQFNKMDHSCRACEDGYRLENETCMSCPFGLGGLNCGNPYQLITVVIAAAGGGLLLILGIALIVTCCRKNKNDISKLIFKSGDFQMSPYAEYPKNPRSQEWGREAIEMHENGSTKNLLQMTDVYYSPTSVRNPELERNGLYPAYTGLPGSRHSCIFPGQYNPSFISDESRRRDYF

SEQ ID NO: 746500 - protein, 654 aa, Homo sapiens; identical to SEQ ID NO: 746499

SEQ ID NO: 746501 - protein, 654 aa, Homo sapiens; identical to SEQ ID NO: 746499

SEQ ID NO: 746502 - protein, 654 aa, Homo sapiens; identical to SEQ ID NO: 746499

SEQ ID NO: 746503 - protein, 314 aa, Homo sapiens
MEFTDRNYTLVTEFILLGFPTRPELQIVLFLMFLTLYAIILIGNIGLMLLIRIDPHLQTPMYFFLSNLSFVDLCYFSDIVPKMLVNFLSENKSISYYGCALQFYFFCTFADTESFILAAMAYDRYVAICNPLLYTVVMSRGICMRLIVLSYLGGNMSSLVHTSFAFILKYCDKNVINHFFCDLPPLLKLSCTDTTINEWLLSTYGSSVEIICFIIIIISYFFILLSVLKIRSFSGRKKTFSTCASHLTSVTIYQGTLLFIYSRPSYLYSPNTDKIISVFYTIFIPVLNPLIYSLRNKDVKDAAEKVLRSKVDSS

SEQ ID NO: 746504 - protein, 385 aa, Homo sapiens
ESVELGTVTSAYQVPSLSTRLTRTDGIMEHITKIPNEAAHRGTIRPVKGPQTSTSPASPKGLHTGGTKRMETTTTALKTTTTALKTTSRATLTTSVYTPTLGTLTPLNASMQMASTIPTEMMITTPYVFPDVPETTSSLATSLGGGGLGWLWEFWKLPSFVAQANRAQGQRQSPRGVTPPLSPIRSPIFYGRPIAILPISVAASITAQRHRRYKALVASEPLSVRLYRLGLAYLAFTGPLAYSALCNTAATLSYVAETFGSFLNWFSFFPLLGRLMEFVLLLPYRIWRLLMGETGFNSSCFQEWAKLYEFVHSFQDEKRQLAYQVLGLSEGATNEEIHRSYQELVKVWHPDHNLDQTEEAQRHFLEIQAAYEVLSQPRKPWGSRR

SEQ ID NO: 746505 - protein, 341 aa, Homo sapiens
MAKGLLVTYALWAVGGPAGLHHLYLGRDSHALLWMLTLGGGGLGWLWEFWKLPSFVAQANRAQGQRQSPRGVTPPLSPIRFAAQVIVGIYFGLVALISLSSMVNFYIVALPLAVGLGVLLVAAVGNQTSDFKNTLGSAFLTSPIFYGRPIAILPISVAASITAQRHRRYKALVASEPLSVRLYRLGLAYLAFTGPLAYSALCNTAATLSYVAETFGSFLNWFSFFPLLGRLMEFVLLLPYRIWRLLMGETGFNSSCFQEWAKLYEFVHSFQDEKRQLAYQVLGLSEGATNEEIHRSYQELVKVWHPDHNLDQTEEAQRHFLEIQAAYEVLSQPRKPWGSRR

SEQ ID NO: 746506 - protein, 385 aa, Homo sapiens; identical to SEQ ID NO: 746504

SEQ ID NO: 746507 - protein, 341 aa, Homo sapiens; identical to SEQ ID NO: 746505

SEQ ID NO: 746508 - protein, 122 aa, Homo sapiens
RRAPPHLMGFRTFLVETGFRCVGRAGLQLLTVSDPPASASRGAGIADGVLLTQCSMVPRLECSGVISATTSTSQPPVLAPQSAEIAASARPLPRLGSEERLCLAAHRLGCEEPLCLAAQSGK

SEQ ID NO: 746509 - protein, 83 aa, Homo sapiens
PSPSLSTVSLSLSFHGFHGLPLPLFPRSPSHAKPKLDCAAAISAHCNVSAWPPIVWDVRSPSAWLPSLESEECLCPAAIPSRK

SEQ ID NO: 746510 - protein, 621 aa, Homo sapiens
MRNLFEQLVRGAEILKEGNELQFIQLVKDFEDFFKKWERTDYELGKYKDLLIKAETERSALDVKLKHAHNQVDADIQRRRRAEANCEKLEQQIQLIGEMFLCDISGSIQLSGEQKSALAFLNRGQPSSSNAGNKRLSISDESGSILSGISFDKTDESLDCDSSLVKTFKRKQREKRCSSSRQFVDGPSGPVKETRSIGSTVDQGNESIVAKTTVTVPKDGGPIKAVPTIETVPYWTRSQRKTGTLQPWNSDPTLNSRQLEPRTETDNVGTPQSNRGMCLNDFVSKTVIKPEFYVPCGKQIKFGKLSLKCQDCCVISRPECRDHCPLPCIPTLIGTPVKIGEGMLADFVSQTFPMIPRIVVHCVNEIEQRGLTETGLYRILGCDSTVKLKEKFLRVKTVPLVSKVDDIHAICSLLKDFLRNFKEPLLTFRLNKAFMEAAEITDEDNSISAMYQAVGELPQANRDTLVFLMIHLQRVAQSPYTKMNVANLAEVFGSTIVAHAVPNPEPVTMLQDIKCQPKVVERLPSLPLEYWSQFSIVEQKNIDPLHVTENSNAFSTPDIKVSLLGPVTTPDHQLLKTPSSSSLSQGVCSTLTKNTPRFGSKGKSATNLGRQGNLFASSMLK

SEQ ID NO: 746511 - protein, 70 aa, Homo sapiens
RILRTFGGPHPKVLLYSSLEDVSETEKGQRQGAMTRQLQGQEETVMKRVIGWRILEDELQFPKIKNVPKE

SEQ ID NO: 746512 - protein, 120 aa, Homo sapiens
VCTLDCFERVFAGLACACQVQLPAEAQLRAVPIGLVLAQVWPIRALLPGRASLSSSGHCQPSCPGTLLQFSFELIFLKAPDIHFSSYSSPSSPLFKALPQRHTGTELRITNKETLIQERK

SEQ ID NO: 746513 - protein, 225 aa, Homo sapiens
MAGTGLVAGEVVVDALPYFDQGYEAPGVREAAAALVEEETRRYRPTKNYLSYLTAPDYSAFETDIMRNEFERLAARQPIELLSMKRYELPAPSSGQKNDITAWQECVNNSMAQLEHQAVRIENLELMSQHGCNAWKVYNENLVHMIEHAQKELQKLRKHIQDLNWQRKNMQLTAGSKLREMESNWVSLVSKNYEIERTIVQLENEIYQIKQQHGEANKENIRQDF

SEQ ID NO: 746514 - protein, 157 aa, Homo sapiens [sequence omitted]

SEQ ID NO: 746515 - protein, 74 aa, Homo sapiens
QAPAELNITEFTQTQKTQANLRSSEWRAQVWWLERLWWMRCRILIKVMKPLVCGKRLQRWWRRKLADTDLLRTT

SEQ ID NO: 746516 - protein, 225 aa, Homo sapiens; identical to SEQ ID NO: 746513

SEQ ID NO: 746517 - protein, 409 aa, Homo sapiens
LELGGGQLEPQAAALLEMLSRLSGLANVVLHELSGDDDTDQNMRAPLDPELHQESDMEFNNTTQEDVQERLAYAEQLVVELKDIIRQKDVQLQQKDEALQEERKAADNKIKKLKLHAKAKLTSLNKYIEEMKAQGGTVLPTEPQSEEQLSKHDKSSTEEEMEIEKIKHKLQEKEELISTLQAQLYSGTGLVAGEVVVDALPYFDQGYEAPGVREAAAALVEEETRRYRPTKNYLSYLTAPDYSAFETDIMRNEFERLAARQPIELLSMKRYELPAPSSGQKNDITAWQECVNNSMAQLEHQAVRIENLELMSQHGCNAWKVYNENLVHMIEHAQKELQKLRKHIQDLNWQRKNMQLTAGSKLREMESNWVSLVSKNYEIERTIVQLENEIYQIKQQHGEANKENIRQDF

SEQ ID NO: 746518 - protein, 159 aa, Homo sapiens
GGVQRSPDRRDTNGMLSMKRYELPAPSSGQKNDITAWQECVNNSMAQLEHQAVRIENLELMSQHGCNAWKVYNENLVHMIEHAQKELQKLRKHIQDLNWQRKNMQLTAGSKLREMESNWVSLVSKNYEIERTIVQLENEIYQIKQQHGEANKENIRQDF

SEQ ID NO: 746519 - protein, 115 aa, Homo sapiens
MAQLEHQAVRIENLELMSQHGCNAWKVYNENLVHMIEHAQKELQKLRKHIQDLNWQRKNMQLTAGSKLREMESNWVSLVSKNYEIERTIVQLENEIYQIKQQHGEANKENIRQDF

SEQ ID NO: 746520 - protein, 399 aa, Homo sapiens
LELGGGQLEPQAAALLEMLSRLSGLANVVLHELSGDDDTDQNMRAPLDPELHQESDMEFNNTTQEDVQERLAYAEQLVVELKDIIRQKDVQLQQKDEALQEERKAADNKIKKLKLHAKAKLTSLNKYIEEMKAQGGTVLPTEPQSEEQLSKHDKSSTEEEMEIEKIKHKLQEKEELISTLQAQLTRAQVWWLERLWWMRCRILIKAAALVEEETRRYRPTKNYLSYLTAPDYSAFETDIMRNEFERLAARQPIELLSMKRYELPAPSSGQKNDITAWQECVNNSMAQLEHQAVRIENLELMSQHGCNAWKVYNENLVHMIEHAQKELQKLRKHIQDLNWQRKNMQLTAGSKLREMESNWVSLVSKNYEIERTIVQLENEIYQIKQQHGEANKENIRQDF

SEQ ID NO: 746521 - protein, 225 aa, Homo sapiens; identical to SEQ ID NO: 746513

SEQ ID NO: 746522 - protein, 232 aa, Homo sapiens
MAGTGLVAGEVVVDALPYFDQGYEAPGVREAAAALVEEETRRYRPTKNYLSYLTAPDYSAFETDIMRNEFERLAARQPIELLSMKRYELPAPSSGQKNDITAWQECVNNSMAQLEHQAVRIENLELMSQHGCNAWKVYNENLVHMIEHAQKELQKLRKHIQDLNWQRKNMQLTAGSKLREMESNWGLWAVRICRLNGLCPAMTHDIYQLSSNMERQPRHIRRILKHLQVTCV

SEQ ID NO: 746523 - protein, 225 aa, Homo sapiens; identical to SEQ ID NO: 746513

SEQ ID NO: 746524 - protein, 225 aa, Homo sapiens; identical to SEQ ID NO: 746513

SEQ ID NO: 746525 - protein, 160 aa, Homo sapiens
MRNEFERLAARQPIELLSMKRYELPAPSSGQKNDITAWQECVNNSMAQLEHQAVRIENLELMSQHGCNAWKVYNENLVHMIEHAQKELQKLRKHIQDLNWQRKNMQLTAGSKLREMESNWVSLVSKNYEIERTIVQLENEIYQIKQQHGEANKENIRQDF

SEQ ID NO: 746526 - protein, 227 aa, Homo sapiens
  misc_feature (53)..(53): Xaa can be any naturally occurring amino acid
MVRERGMQLHGGRRRSVVSIDRAVTEERYSAGYLVHKAPEYHILTYRKLDINXGKCNLERDLGWTRTRPRVVHCGSRYEKRIMTLTEQYELPAPSSGQKNDITAWQECVNNSMAQLEHQAVRIENLELMSQHGCNAWKVYNENLVHMIEHAQKELQKLRKHIQDLNWQRKNMQLTAGSKLREMESNWVSLVSKNYEIERTIVQLENEIYQIKQQHGEANKENIRQDF

SEQ ID NO: 746527 - protein, 174 aa, Homo sapiens
  misc_feature (28)..(28): Xaa can be any naturally occurring amino acid
RAHFSRELPEETREAYERLLKRQNQRGXRALFQDIKKPTVDKYQSTVGSGSFCLLEPTVQMGTKKEIGTQRVITEPEGGKVLRRHELLGGRVLLGSCWLIPGQATSPPGPGFSSVNEGVDPDLPLRLLHASRAICSLSFPCSRLLLPSPMLGLSPPGHSSQPWTSSQPWTSSQP

SEQ ID NO: 746528 - protein, 140 aa, Homo sapiens
MQTSACKLRRGRVQAGSFCLLEPTVQMGTKKEIGTQRVITEPEGGKVLRRHELLGGRVLLGSCWLIPGQATSPPGPGFSSVNEGVDPDLPLRLLHASRAICSLSFPCSRLLLPSPMLGLSPPGHSSQPWTSSQPWTSSQP

SEQ ID NO: 746529 - protein, 86 aa, Homo sapiens
MLCVSGFTSNLYSSKKDDKMKEISRTSNWGSSFSEKSGCMQTHPSMNLDCRDVTYVMNLLLIASSSSSSMTKKKIVTMNTSLGQNK

SEQ ID NO: 746530 - protein, 107 aa, Homo sapiens
MAVPAASKGGTSDPSHSFPARHLNPAPNISIGFLNKSILRAQFSPPRDSWRTHAELRVVRRVWGALGRREKTPHSTATSSLPETALGRRGSRAGNLAQVLVGPRAAA

SEQ ID NO: 746531 - protein, 78 aa, Homo sapiens
FCAVEPLGLSWAVVGSWGGRAGAGEGKSKSWKRSRGVVNQTSRPPEGLVQTYRRDLLEVRIVFVCLSIVAEWGNGERT

SEQ ID NO: 746532 - protein, 106 aa, Homo sapiens [sequence omitted]

SEQ ID NO: 746533 - protein, 319 aa, Homo sapiens
  misc_feature (15)..(15): Xaa can be any naturally occurring amino acid
EKDQLSFSVSAPTLXNQLPPNIRCPPESLYLGPILKFGSKEQKQAWVTPFTSGDKIGCFALSEPGNGSDAGAASTTARAEGDSWVLNGTKAWITNAWEASAAVVFASTDRALQNKGISAFLVPMPTPGLTLGKKEDKLGIRGSSTANLIFEDCRIPKDSILGEPGMGFKIAMQTLDMGRIGIASQALGIAQTALDCAVNYAENRMAFGAPLTKLQVIQFKLADMALALESARLLTWRAAMLKDNKKPFIKEAAMAKLAASEAATAISHQAIQILGGMGYVTEMPAERHYRDARITEIYEGTSEIQRLVIAGHLLRSYRS

SEQ ID NO: 746534 - protein, 379 aa, Homo sapiens
  misc_feature (7)..(7): Xaa can be any naturally occurring amino acid
TGRSRAXELCLSPMAAALLARASGPARRALCPRAWRQLHTIYQSVELPETHQMLLQTCRDFAEKELFPIAAQVDKEHLFPAAQVKKMGGLGLLAMDVPEELGGAGLDYLAYAIAMEEISRGCASTGVIMSVNNSLYLGPILKFGSKEQKQAWVTPFTSGDKIGCFALSEPGNGSDAGAASTTARAEGDSWVLNGTKAWITNAWEASAAVVFASTDRALQNKGISAFLVPMPTPGLTLGKKEDKLGIRGSSTANLIFEDCRIPKDSILGEPGMGFKIAMFKLADMALALESARLLTWRAAMLKDNKKPFIKEAAMAKLAASEAATAISHQAIQILGGMGYVTEMPAERHYRDARITEIYEGTSEIQRLVIAGHLLRSYRS

SEQ ID NO: 746535 - protein, 425 aa, Homo sapiens
  misc_feature (7)..(7): Xaa can be any naturally occurring amino acid
TGRSRAXELCLSPMAAALLARASGPARRALCPRAWRQLHTIYQSVELPETHQMLLQTCRDFAEKELFPIAAQVDKEHLFPAAQVKKMGGLGLLAMDVPEELGGAGLDYLAYAIAMEEISRGCASTGVIMSVNNSLYLGPILKFGSKEQKQAWVTPFTSGDKIGCFALSEPGNGSDAGAASTTARAEGDSWVLNGTKAWITNAWEASAAVVFASTDRALQNKGISAFLVPMPTPGLTLGKKEDKLGIRGSSTANLIFEDCRIPKDSILGEPGMGFKIAMQTLDMGRIGIASQALGIAQTALDCAVNYAENRMAFGAPLTKLQVIQFKLADMALALESARLLTWRAAMLKDNKKPFIKEAAMAKLAASEAATAISHQAIQILGGMGYVTEMPAERHYRDARITEIYEGTSEIQRLVIAGHLLRSYRS

SEQ ID NO: 746536 - protein, 425 aa, Homo sapiens; identical to SEQ ID NO: 746535
  misc_feature (7)..(7): Xaa can be any naturally occurring amino acid

SEQ ID NO: 746537 - protein, 1011 aa, Homo sapiens
MQKPSGLKPPGRGGKHSSPMGRTSTGSASSSAAVAASSKEGSPLHKQSSGPSSSPAAAAAPEKPGPKAAEVGDDFLGDFVVGERVWVNGVKPGVVQYLGETQFAPGQWAGVVLDDPVGKNDGAVGGVRYFECPALQGIFTRPSKLTRQPTAEGSGSDAHSVESLTAQNLSLHSGTATPPLTSRVIPLRESVLNSSVKTGNESGSNLSDSGSVKRGEKDLRLGDRVLVGGTKTGVVRYVGETDFAKGEWCGVELDEPLGKNDGAVAGTRYFQCPPKFGLFAPIHKVIRIGFPSTSPAKAKKTKRMAMGVSALTHSPSSSSISSVSSVASSVGGRPSRSGLLTETSSRYARKISGTTALQEALKEKQQHIEQLLAERDLERAEVAKATSHICEVEKEIALLKAQHEQYVAEAEEKLQRARLLVESVRKEKVDLSNQLEEERRKVEDLQFRVEEESITKGDLELTTVAEKSRVLQLEEELTLRRGEIEELQQCLLHSGPPPPDHPDAAEILRLRERLLSASKEHQRESGVLRDKYEKALKAYQAEVDKLRAANEKYAQEVAGLKDKVQQATSENMGLMDNWKSKLDSLASDHQKSLEDLKATLNSGPGAQQKEIGELKAVMEGIKMEHQLELGNLQAKHDLETAMHVKEKEALREKLQEAQEELAGLQRHWRAQLEVQASQHRLELQEAQDQRRDAELRVHELEKLDVEYRGQAQAIEFLKEQISLAEKKMLDYERLQRAEAQGKQEVESLREKLLVAENRLQAVEALCSSQHTHMIESNDISEETIRTKETVEGLQDKLNKRDKEVTALTSQTEMLRAQVSALESKCKSGEKKVDALLKEKRRLEAELETVSRKTHDASGQLVLISQELLRKERSLNELRVLLLEANRHSPGPERDLSREVHKAEWRIKEQKLKDDIRGLREKLTGLDKEKSLSDQRRYSLIDPSSAPELLRLQHQLMSTEDALRDALDQAQQVEKLMEAMRSCPDKAQTIGNSGSANGIHQQDKAQKQEDKH

SEQ ID NO: 746538 - protein, 121 aa, Homo sapiens
LIGEMPQEDLHAVVKNCFAVVNSSVSEGMSAAILEAMDLEVPVLARNIPGNAAVVKHEVTGLLFSNPQEFVHLAKRLVSDPALEKEIVVNGREYVRMYHSWQVERDTYQQLIRKLEGSTED

SEQ ID NO: 746539 - protein, 189 aa, Homo sapiens
LCVPPTQILVHIGFLTEESGDVFSPRVLKGGPLGEMVQWADILTALYVLGHGLRVTVSLKELQSNLGVPPGRGSCPLTMPLPFDLIYTDYHGLQQMKRHMGLSFKKYRCRIRVIDTFGTEPAYNHEEYATLHGYRTNWGYWNLNPKQFMTMFPHTPDNSFMGFVSEELNETEKRLIKGGKASNMAVVYG

SEQ ID NO: 746540 - protein, 412 aa, Homo sapiens
SLKELLQSNLGVPPGRGSCPLTMPLPFDLIYTDYHGLQQMKRHMGLSFKKYRCRIRVIDTFGTEPAYNHEEYATLHGYRTNWGYWNLNPKQFMTMFREEKFLGILNKYMEIHGTVYYESQRPPEVPAFVKNHGLLPQPEFQQLLRKAKLFIGFGFPYEGPAPLEAIANGCIFLQSRFSPPHSSLNHEFFRGKPTSREVFSQHPYAENFIGKPHVWTVDYNNSEEFEAAIKAIMRTQVDPYLPYEYTCEGMLERIHAYIQHQDFCRAPDPALPEAHAPQSPFVLAPNATHLEWARNTSLAPGAWPPAHALRAWLAVPGRACTDTCLDHGLICEPSFFPFLNSQDAFLKLQVPCDSTESEMNHLYPAFAQPGQECYLQKEPLLFSCAGSNTKYRRLCPCRDFRKGQVALCQGCL

SEQ ID NO: 746541 - protein, 217 aa, Homo sapiens
GSLGMAQDVRAHQTSTPNAEHGRAPTAGPSPAPCVCPSLPQVDPYLPYEYTCEGMLERIHAYIQHQDFCRAPDPALPEAHAPQSPFVLAPNATHLEWARNTSLAPGAWPPAHALRAWLAVPGRACTDTCLDHGLICEPSFFPFLNSQDAFLKLQVPCDSTESEMNHLYPAFAQPGQECYLQKEPLLFSCAGSNTKYRRLCPCRDFRKGQVALCQGCL

SEQ ID NO: 746542 - protein, 412 aa, Homo sapiens; identical to SEQ ID NO: 746540

SEQ ID NO: 746543 - protein, 130 aa, Homo sapiens
STMFCSSSLMGVISDMTQTKEAIVSASSLPMSIIIVGVGPAMFEAMEELDGDDVRVSSRGRYAERDIVQFVPFRDYVDRSGNQVLSMARLAKDVLAEIPEQLLSYMRTRDIQPRPPPPANPSPIPAPEQP

SEQ ID NO: 746544 - protein, 104 aa, Homo sapiens
MKLAALLGLCVALSCSSAAAFLVGSAKPVAQPVAALESAAEAGAGTLANPLGTLNPLKLLLSSLGIPVNHLIEGSQKCVAELGPQAVGAVKALKALLGALTVFG

SEQ ID NO: 746545 - protein, 104 aa, Homo sapiens; identical to SEQ ID NO: 746544

SEQ ID NO: 746546 - protein, 104 aa, Homo sapiens; identical to SEQ ID NO: 746544

SEQ ID NO: 746547 - protein, 101 aa, Homo sapiens
MKLAALLGLCVALSCSSAAAFLVGSAKPVAQPVAALESAAEAGAGTLANPLGTLNPLKLLLSSLGIPVNHLIEGSQKCVTLSLGQTGQHSPRDSPGKFLPH

SEQ ID NO: 746548 - protein, 121 aa, Homo sapiens
ARASLPGQPQNCTRGVPALRQGCFPSCPSKPCPWEKPGSPGGNWVGRIRAAGAGKAEVAPRGCASPGDASGTAPLPLPTEPAAAAPPPEFLVAGLGALKLGFCFPGGPDSVWLSRDWSIYT

SEQ ID NO: 746549 - protein, 261 aa, Homo sapiens
LGLSGIEAEENFEEDSHRPLINGGENEDEYEPNYSIQDDSSVAQVKAISFYQACCLPGVIPYSLAYACLKLVNYSFFFWLPFYLSNNFGWKEAEADKLSIWYDVGGIIGGTLQGFISDVLQKRAPVLALSLLLAVGSLIGYSRSPNDKSINALLMTVTGFFIGGPSNMISSAISADLGRQELIQRSSEALATVTGIVDGSGSIGAAVGQYLVSLIRDKLGWMWVFYFFILMTSCTIVFISPLIVREIFSLVLRRQAHILRE

SEQ ID NO: 746550 - protein, 241 aa, Homo sapiens
LGLSGIEAEENFEEDSHRPLINGGENEDEYEPNYSIQDDSSVAQVKAISFYQACCLPGVIPYSLAYACLKLVNYSFFFWLPFYLSNNFGWKEAEADKLSIWYDVGGIIGGTLQGFISDVLQKRAPVLALSLLLAVGSLIGYSRSPNDKSINALLMTVTGFFIGGPSNMISSAISADLGRQELIQRSSEALATVTGIVDGSGSIGAAVGQYLVSLIRDKLGWMWVFYFFILMLRRQAHILRE

SEQ ID NO: 746551 - protein, 67 aa, Homo sapiens
EDYRETTSKETGSHIEGVTGARETERTMSATSGPLGLRVCPNLGLSRSSSLILDCQASLNTASHLRC

SEQ ID NO: 746552 - protein, 239 aa, Homo sapiens
LGLSGIEAEENFEEDSHRPLINGGENEDEYEPNYSIQDDSSVAQVKAISFYQACCLPGVIPYSLAYACLKLVNYSFFFWLPFYLSNNFGWKEAEADKLSIWYDVGGIIGGTLQGFISDVLQKRAPVLALSLLLAVGSLIGYSRSPNDKSINALLMTVTGFFIGGPSNMISSAISADLGRQELIQRSSEALATVTGIVDGSGSIGAAVGQTSCTIVFISPLIVREIFSLVLRRQAHILRE

SEQ ID NO: 746553 - protein, 269 aa, Homo sapiens
GPSALLPPLLQPPPLPPPCRQVCGKLSVVAAAMGRKSSKAKEKKQKRLEERAAMDAVCAKVDAANRLGDPLEAFPVFKKYDRNGLNVSIECKRVSGLEPATVDWAFDLTKTNMQTMYEQSEWGWKDREKREEMTDDRAWYLIAWENSSVPVAFSHFRFDVECGDEVLYCYEVQLESKVRRKGLGKFLIQILQLMANSTQMKKVMLTVFKHNHGAYQFFREALQFEIDDSSPSMSGCCGEDCSYEILSRRTKFGDSHHSHAGGHCGGCCH

SEQ ID NO: 746554 - protein, 269 aa, Homo sapiens; identical to SEQ ID NO: 746553

SEQ ID NO: 746555 - protein, 157 aa, Homo sapiens
MQTMYEQSEWGWKDREKREEMTDDRAWYLIAWENSSVPVAFSHFRFDVECGDEVLYCYEVQLESKVRRKGLGKFLIQILQLMANSTQMKKVMLTVFKHNHGAYQFFREALQFEIDDSSPSMSGCCGEDCSYEILSRRTKFGDSHHSHAGGHCGGCCH

SEQ ID NO: 746556 - protein, 194 aa, Homo sapiens
MGCCGCSGGCGSGCGGCGSGCGGCGSGCGGCGSSCCVPICCCKPVCCCVPACSCSSCGSCGGSKGGRGSCGGSKGDCGSCGGSKGGCGSCGCSQCSCYKPCCCSSGCGSSCCQSSCCKPCCSQSSCCKPCSCSSGCGSSCCQSSCCKPCCSQSSCCKPCCCSSGCGSSCCQSSCCKPCCSQSSCCVPICCQCKI

SEQ ID NO: 746557 - protein, 299 aa, Homo sapiens
MLRLFYFSAIIASVILNFVGIIMNLFITVVNCKTWVKSHRISSSDRILFSLGITRFLMLGLFLVNTIYFVSSNTERSVYLSAFFVLCFMFLDSSSVWFVTLLNILYCVKITNFQHSVFLLLKRNISPKIPRLLLACVLISAFTTCLYITLSQASPFPELVTTRNNTSFNISEGILSLVVSLVLSSSLQFIINVTSASLLIHSLRRHIQKMQKNATGFWNPQTEAHVGAMKLMVYFLILYIPYSVATLVQYLPFYAGMDMGTKSICLIFATLYSPGHSVLIIITHPKLKTTAKKILCFKK

SEQ ID NO: 746558 - protein, 601 aa, Homo sapiens [sequence omitted]

SEQ ID NO: 746559 - protein, 618 aa, Homo sapiens
RRRSRAGWRAAGWRRRHGGAESGAETRPPIRVTVKTPKDKEEIVICDRASVKEFKEEISRRFKAQQDQLVLIFAGKILKDGDTLNQHGIKDGLTVHLVIKTPQKAQDPAAATASSPSTPDPASAPSTTPASPATPAQPSTSGSASSDAGSGSRRSSGGGPSPGAGEGSPSATASILSGFGGILGLGSLGLGSANFMELQQQMQRQLMSNPEMLSQIMENPLVQDMMSNPDLMRHMIMANPQMQQLMERNPEISHMLNNPELMRQTMELARNPAMMQEMMRNQDRALSNLESIPGGYNALRRMYTDIQEPMFSAAREQFGNNPFSSLAGNSDSSSSQPLRTENREPLPNPWSPSPPTSQAPGSGGEGTGGSGTSQVHPTVSNPFGINAASLGSGMFNSPEMQALLQQISENPQLMQNVISAPYMRSMMQTLAQNPDFAAQMMVNVPLFAGNPQLQEQLRLQLPVFLQQMQNPESLSILTNPRAMQALLQIQQGLQTLQTEAPGLVPSLGSFGMSRTPAPSAGSNAGSTPEAPTSSPATPATSSPTGASSAQQQLMQQMIQLLAGSGNSQVQTPEVRFQQQLEQLNSMGFINREANLQALIATGGDINAAIERLLGSQLS

SEQ ID NO: 746560 - protein, 684 aa, Homo sapiens
RRRSRAGWRAAGWRRRHGGAESGAETRPPIRVTVKTPKDKEEIVICDRASVKEFKEEISRRFKAQQDQLVLIFAGKILKDGDTLNQHGIKDGLTVHLVIKTPQKAQDPAAATASSPSTPDPASAPSTTPASPATPAQPSTSGSASSDAGSGSRRSSGGGPSPGAGEGSPSATASILSGFGGILGLGSLGLGSANFMELQQQMQRQLMSNPEMLSQIMENPLVQDMMSNPDLMRHMIMANPQMQQLMERNPEISHMLNNPELMRQTMELARNPAMMQEMMRNQDRALSNLESIPGGYNALRRMYTDIQEPMFSAAREQFGNNPFSSLAGNSDSSSSQPLRTENREPLPNPWSPSPPTSQAPGSGGEGTGGSGTSQVHPTVSNPFGINAASLGSGMFNSPEMQALLQQISENPQLMQNVISAPYMRSMMQTLAQNPDFAAQMMVNVPLFAGNPQLQEQLRLQLPVFLQQMQNPESLSILTNPRAMQALLQIQQGLQTLQTEAPGLVPRWGRGAGGQQGSSNFSPSTLLSATLSASFVSLRVCFPVSSNCFSFWIHILIPFLDAISYLLVSLAYSLGSFGMSRTPAPSAGSNAGSTPEAPTSSPATPATSSPTGASSAQQQLMQQMIQLLAGSGNSQVQTPEVRFQQQLEQLNSMGFINREANLQALIATGGDINAAIERLLGSQLS

SEQ ID NO: 746561 - protein, 601 aa, Homo sapiens [sequence omitted]

SEQ ID NO: 746562 - protein, 407 aa, Homo sapiens
MLAVEAGGAVVGGPLRGLGRDPPVLLRPYSMQQLMERNPEISHMLNNPELMRQTMELARNPAMMQEMMRNQDRALSNLESIPGGYNALRRMYTDIQEPMFSAAREQFGNNPFSSLAGNSDSSSSQPLRTENREPLPNPWSPSPPTSQAPGSGGEGTGGSGTSQVHPTVSNPFGINAASLGSGMFNSPEMQALLQQISENPQLMQNVISAPYMRSMMQTLAQNPDFAAQMMVNVPLFAGNPQLQEQLRLQLPVFLQQMQNPESLSILTNPRAMQALLQIQQGLQTLQTEAPGLVPSLGSFGMSRTPAPSAGSNAGSTPEAPTSSPATPATSSPTGASSAQQQLMQQMIQLLAGSGNSQVQTPEVRFQQQLEQLNSMGFINREANLQALIATGGDINAAIERLLGSQLS

SEQ ID NO: 746563 - protein, 178 aa, Homo sapiens
MVNVPLFAGNPQLQEQLRLQLPVFLQQMQNPESLSILTNPRAMQALLQIQQGLQTLQTEAPGLVPSLGSFGMSRTPAPSAGSNAGSTPEAPTSSPATPATSSPTGASSAQQQLMQQMIQLLAGSGNSQVQTPEVRFQQQLEQLNSMGFINREANLQALIATGGDINAAIERLLGSQLS

SEQ ID NO: 746564 - protein, 618 aa, Homo sapiens; identical to SEQ ID NO: 746559

SEQ ID NO: 746565 - protein, 144 aa, Homo sapiens
RRRSRAGWRAAGWRRRHGGAESGAETRPPIRVTVKTPKDKEEIVICDRASVKEFKEEISRRFKAQQDQLVLIFAGKILKDGDTLNQHGIKDGLTVHLVIKTPQKAQDPAAATASSPSTPDPASAPSTTPASPATPAAAPLLSGF

SEQ ID NO: 746566 - protein, 331 aa, Homo sapiens
RRRSRAGWRAAGWRRRHGGAESGAETRPPIRVTVKTPKDKEEIVICDRASVKEFKEEISRRFKAQQDQLVLIFAGKILKDGDTLNQHGIKDGLTVHLVIKTPQKAQDPAAATASSPSTPDPASAPSTTPASPATPAQPSTSGSASSDAGSGSRRSSGGGPSPGAGEGSPSATASILSGFGGILGLGSLGLGSANFMELQQQMQRQLMSNPEMLSQIMENPLVQDMMSNPDLMRHMIMANPQMQQLMERNPEISHMLNNPELMRQTMELARNPAMMQEMMRNQDPESLLRADSWAEKEECGEQPALHSNPPQPYCMTVTYFYLCFKTYRASH

SEQ ID NO: 746567 - protein, 597 aa, Homo sapiens
EEEEPGGLAGGRVAAAAWRSRERGRDEAPHSGHRQDPQGQGGNCDLRSSLGQGGKILKDGDTLNQHGIKDGLTVHLVIKTPQKAQDPAAATASSPSTPDPASAPSTTPASPATPAQPSTSGSASSDAGSGSRRSSGGGPSPGAGEGSPSATASILSGFGGILGLGSLGLGSANFMELQQQMQRQLMSNPEMLSQIMENPLVQDMMSNPDLMRHMIMANPQMQQLMERNPEISHMLNNPELMRQTMELARNPAMMQEMMRNQDRALSNLESIPGGYNALRRMYTDIQEPMFSAAREQFGNNPFSSLAGNSDSSSSQPLRTENREPLPNPWSPSPPTSQAPGSGGEGTGGSGTSQVHPTVSNPFGINAASLGSGMFNSPEMQALLQQISENPQLMQNVISAPYMRSMMQTLAQNPDFAAQMMVNVPLFAGNPQLQEQLRLQLPVFLQQMQNPESLSILTNPRAMQALLQIQQGLQTLQTEAPGLVPSLGSFGMSRTPAPSAGSNAGSTPEAPTSSPATPATSSPTGASSAQQQLMQQMIQLLAGSGNSQVQTPEVRFQQQLEQLNSMGFINREANLQALIATGGDINAAIERLLGSQLS

SEQ ID NO: 746568 - protein, 601 aa, Homo sapiens [sequence omitted]

SEQ ID NO: 746569 - protein, 464 aa, Homo sapiens
RRRSRAGWRAAGWRRRHGGAESGAETRPPIRVTVKTPKDKEEIVICDRASVKESNPEMLSQIMENPLVQDMMSNPDLMRHMIMANPQMQQLMERNPEISHMLNNPELMRQTMELARNPAMMQEMMRNQDRALSNLESIPGGYNALRRMYTDIQEPMFSAAREQFGNNPFSSLAGNSDSSSSQPLRTENREPLPNPWSPSPPTSQAPGSGGEGTGGSGTSQVHPTVSNPFGINAASLGSGMFNSPEMQALLQQISENPQLMQNVISAPYMRSMMQTLAQNPDFAAQMMVNVPLFAGNPQLQEQLRLQLPVFLQQMQNPESLSILTNPRAMQALLQIQQGLQTLQTEAPGLVPSLGSFGMSRTPAPSAGSNAGSTPEAPTSSPATPATSSPTGASSAQQQLMQQMIQLLAGSGNSQVQTPEVRFQQQLEQLNSMGFINREANLQALIATGGDINAAIERLLGSQLS

SEQ ID NO: 746570 - protein, 618 aa, Homo sapiens; identical to SEQ ID NO: 746559

SEQ ID NO: 746571 - protein, 575 aa, Homo sapiens
RRRSRAGWRAAGWRRRHGGAESGAETRPPIRVTVKTPKDKEEIVICDRASVKEFKEEISRRFKAQQDQLVLIFAGKILKDGDTLNQHGIKDGLTVHLVIKTPQKAQDPAAATASSPSTPDPASAPSTTPASPATPAQPSTSGSASSDAGSGSRRSSGGGPSPGAGEGSPSATASILSGFGGILGLGSLGLGSANFMELQQQMQRQLMSNPEMLSQIMENPLVQDMMSNPDLMRHMIMANPQMQQLMERNPEISHMLNNPELMRQTMELARNPAMMQEMMRNQDRALSNLESIPGGYNALRRMYTDIQEPMFSAAREQFGNNPFSSLAGNSDSSSSQPLRTENREPLPNEREDKRKTRREEKRTKKEKREKTSKENNKNEQKNTKKKKEQTKKTGQGEEEQSESEADGQRRHKRKGTKRKNRRSEESKTKEEASRSNDQGKEKHTATKQKNRKNESKNRKKQNTGRQEKNTQTEEEQSTKTRTETTKTERPEDTRKKEKKRKRRRKATTERKERRRHDAKRQREKKTGHERTEKKKRSRKQETSKHKKESRKNKKANKASQHRRAQRGEQDEEEKK

SEQ ID NO: 746572 - protein, 44 aa, Homo sapiens
MMQEMMRNQDRALSNLESIPGGYNALRRMYTDIQEPMFSAAREQ

SEQ ID NO: 746573 - protein, 108 aa, Homo sapiens
ALVFQSGGITSISHHAQLHCKHVCFLGAAGRVILLKPNHVVSLCFPESSVVSYLIQNKSPSPFSSRQCSQSVTLEAIVPPCSSPLLSTVLLPALRHTWPLCLCTCSSL

SEQ ID NO: 746574 - protein, 68 aa, Homo sapiens
TETGSWLTASRESGYQSQNHKELNSAKNLNELGSGILPRRAQPGHHLNFGLRNRKQRIHSSPPGSTEL

SEQ ID NO: 746575 - protein, 212 aa, Homo sapiens
REPRAQGSESPISASPEASAISMMASPFALLMALVVLSCKSSCSLGCDLPETHSLDNRRTLMLLAQMSRISPSSCLMDRHDFGFPQEEFDGNQFQKAPAISVLHELIQQIFNLFTTKDSSAAWDEDLLDKFCTELYQQLNDLEACVMQEERVGETPLMNADSILAVKKYFRRITLYLTEKKYSPCAWEVVRAEIMRSLSLSTNLQERLRRKE

SEQ ID NO: 746576 - protein, 329 aa, Homo sapiens
MAAQYGSMSFNPSTPGASYGPGRQEPRNSQLRIVLVGKTGAGKSATGNSILGRKVFHSGTAAKSITKKCEKRSSSWKETELVVVDTPGIFDTEVPNAETSKEIIRCILLTSPGPHALLLVVPLGRYTEEEHKATEKILKMFGERARSFMILIFTRKDDLGDTNLHDYLREAPEDIQDLMDIFGDRYCALNNKATGAEQEAQRAQLLGLIQRVVRENKEGCYTNRMYQRAEEEIQKQTQAMQELHRVELEREKARIREEYEEKIRKLEDKVEQEKRKKQMEKKLAEQEAHYAVRQQRARTEVESKDGILELIMTALQIASFILLRLFAED

SEQ ID NO: 746577 - protein, 258 aa, Homo sapiens
LTSSLLLFLNILAEYCVQNQRGVQDPDFSGPGRQEPRNSQLRIVLVGKTGAGKSATGNSILGRKVFHSGTAAKSITKKCEKRSSSWKETELVVVDTPGIFDTEVPNAETSKEIIRCILLTSPGPHALLLVVPLGRYTEEEHKATEKILKMFGERARSFMILIFTRKDDLGDTNLHDYLREAPEDIQDLMDIFGDRYCALNNKATGAEQEAQRAQLLGLIQRVVRENKEGCYTNRMYTGIRMKLEYETTNSGTVPLVNM

SEQ ID NO: 746578 - protein, 432 aa, Homo sapiens
MRPWALAVTRWPPSAPVGQRRFSAGPGSTPGQLWGSPGLEGPLASPPARDERLPSQQPPSRPPHLPVEERRASAPAGGSPRMLHPATQQSPFMVDLHEQVHQGPVPLSYTVTTVTTQGFPLPTGQHIPGCSAQQLPACSVMFSGQHYPLCCLPPPLIQACTMQQLPVPYQAYPHLISSDHYILHPPPPAPPPQPTHMAPLGQFVSLQTQHPRMPLQRLDNDVDLRGDQPSLGSFTYSTSAPGPALSPSVPLHYLPHDPLHQELSFGVPYSHMMPRRLSTQRYRLQQPLPPPPPPPPPPPYYPSFLPYFLSMLPMSPTAMGPTISLDLDVDDVEMENYEALLNLAERLGDAKPRGLTKADIEQLPSYRFNPDSHQSEQTLCVVCFSDFEARQLLRVLPCNHEFHTKCVDKWLKANRTCPICRADASEVPREAE

SEQ ID NO: 746579 - protein, 137 aa, Homo sapiens
MGREWPRPAPSLLPAFPELVPGSAQRGVPAISPCICQAPKTPSLVCLPARPPRSCLSVPDRVSLLCTLRSLLFLLALSARGPLPQWGRWRSLAPGWADRAPSWVRRSHALKWRALCPGGTARCVDRRCHEPFPEPQG

SEQ ID NO: 746580 - protein, 327 aa, Homo sapiens
MEWRNHSGRVSEFVLLGFPAPAPLQVLLFALLLLAYVLVLTENTLIIMAIRNHSTLHKPMYFFLANMSFLEIWYVTVTIPKMLAGFVGSKQDHGQLISFEGCMTQLYFFLGLGCTECVLLAVMAYDRYMAICYPLHYPVIVSGRLCVQMAAGSWAGGFGISMVKVFLISGLSYCGPNIINHFFCDVSPLLNLSCTDMSTAELTDFILAIFILLGPLSVTGASYVAITGAVMHIPSAAGRYKAFSTCASHLTVVIIFYAASIFIYARPKALSAFDTNKLVSVLYAVIVPLLNPIIYCLRNQEVKRALCCTLHLYQHQDPDPKKASRNV

SEQ ID NO: 746581 - protein, 73 aa, Homo sapiens [sequence omitted]

SEQ ID NO: 746582 - protein, 136 aa, Homo sapiens; identical to SEQ ID NO: 741065

SEQ ID NO: 746583 - protein, 216 aa, Homo sapiens
EKPSPTIHWRTHTKENIYECSKCGKSFRGKSHLSVHQRIHTGEKPYECSICGKTFSGKSHLSVHHRTHTGEKPYECRRCGKAFGEKSTLIVHQRMHTGEKPYKCNECGKAFSEKSPLIKHQRIHTGERPYECTDCKKAFSRKSTLIKHQRIHTGEKPYKCSECGKAFSVKSTLIVHHRTHTGEKPYECVRRSDGPFTKSTSSNLLNASRILLDHIS

SEQ ID NO: 746584 - protein, 214 aa, Homo sapiens
EKPSPTIHWRTHTKENIYECSKCGKSFRGKSHLSVHQRIHTGEKPYECSICGKTFSGKSHLSVHHRTHTGEKPYECRRCGKAFGEKSTLIVHQRMHTGEKPYKCNECGKAFSEKSPLIKHQRIHTGERPYECTDCKKAFSRKSTLIKHQRIHTGEKPYKCSECGKAFSVKSTLIVHHRTHTGEKPYECRDCGKAFSGKSTLIKHQRSHTGDKNL

SEQ ID NO: 746585 - protein, 564 aa, Homo sapiens
PEPHGAAGSGRTVKPRRRRRRRRRRPGRERGALWRRVSGAPGGGGGRAARDHLSSPHHGRTEGAAAEGSQGAPAGFQYLSTGIAMTPALREATAKGISFSSLPSTMESDKMLYMESPRTVDEKLKGDTFSQMLGFPTPEPTLNTNFVNLKHFGSPQSSKHYQTVFLMRSNSTLNKHNENYKQKKLGEPSCNKLKNILYNGSNIQLSKICLSHSEEFIKKEPLSDTTSQCMKDVQIILDSNITKDTNVDKVQLQNCKWYQENALLDKVTDAEIKKGLLHCTQKKIVPGHSNVPVSSSAAEKEEEVHARLLHCVSKQKILLSQARRTQKHLQMLLAKHVVKHYGQQMKLSMKHQLPKMKTFHEPTTILGNSLPKCTEIKPEVNTLTAENKLWDDAKNGFARCTAAEIQRFAFSATGLLSHVEEGLDSDATDSSSDDDLDEYTLRKNVAVNCSTEWKWLVDRARVGSRWTWLQAQISDLECKIQQLTDIHRQIRASKGIVVLEECQLPKDILKKQMQFADQAASLNILGNPQVPQECQDPVPEQDFEMSPSSPTLLLRNIEKQVKSK

SEQ ID NO: 746586 - protein, 601 aa, Homo sapiens
PEPHGAAGSGRTVKPRRRRRRRRRRPGRERGALWRRVSGAPGGGGGRAARDHLSSPHHGRTEGAAAEGSQGAPAGFQYLSTGIAMTPALREATAKGISFSSLPSTMESDKMLYMESPRTVDEKLKGDTFSQMLGFPTPEPTLNTNFVNLKHFGSPQSSKHYQTVFLMRSNSTLNKHNENYKQKKLGEPSCNKLKNILYNGSNIQLSKICLSHSEEFIKKEPLSDTTSQCMKDVQIILDSNITKDTNVDKVQLQNCKWYQENALLDKVTDAEIKKGLLHCTQKKIVPGHSNVPVSSSAAEKEEEVHARLLHCVSKQKILLSQARRTQKHLQMLLAKHVVKHYGQQMKLSMKHQLPKMKTFHEPTTILGNSLPKCTEIKPEVNTLTAENKLWDDAKNGFARCTAAEIQRFAFSATGLLSHVEEGLDSDATDSSSDDDLDEYTLRKNVAVNCSTEWKWLVDRARVGSRWTWLQAQISDLECKIQQLTDIHRQIRASKGIVVLEECQLPKDILKKQMQFADQAASLNILGNPQVPQECQDPVPEQDFEMSPSSPTLLLRNIEKQSAQLTEIINSLIAPLNLSPTSSPLSSKSCSHKCLANGIYRR

SEQ ID NO: 746587 - protein, 183 aa, Homo sapiens
DKVTDAEIKKGLLHCTQKKIVPGHSNVPVSSSAAEKEEEVHARLLHCVSKQKILLSQARRTQKHLQMLLAKHVVKHYGQQMKLSMKHQLPKMKTFHEPTTILGNSLPKCTEIKPEVNTLTAENKLWDDAKNGFARCTAAEIQRFAFSATGLLSHVEEGLDSDATDSSSDDDLDEYTLRKNVAV

SEQ ID NO: 746588 - protein, 634 aa, Homo sapiens
PEPHGAAGSGRTVKPRRRRRRRRRRPGRERGALWRRVSGAPGGGGGRAARDHLSSPHHGRTEGAAAEGSQGAPAGFQYLSTGIAMTPALREATAKGISFSSLPSTMESDKMLYMESPRTVDEKLKGDTFSQMLGFPTPEPTLNTNFVNLKHFGSPQSSKHYQTVFLMRSNSTLNKHNENYKQKKLGEPSCNKLKNILYNGSNIQLSKICLSHSEEFIKKEPLSDTTSQCMKDVQIILDSNITKDTNVDKVQLQNCKWYQENALLDKVTDAEIKKGLLHCTQKKIVPGHSNVPVSSSAAEKEEEVHARLLHCVSKQKILLSQARRTQKHLQMLLAKHVVKHYGQQMKLSMKHQLPKMKTFHEPTTILGNSLPKCTEIKPEVNTLTAENKLWDDAKNGFARCTAAEIQRFAFSATGLLSHVEEGLDSDATDSSSDDDLDEYTLRKNVAVNCSTEWKWLVDRARVGSRWTWLQAQISDLECKIQQLTDIHRQIRASKGIVVLEECQLPKDILKKQMQFADQAASLNILGNPQVPQECQDPVPEQDFEMSPSSPTLLLRNIEKQSAQLTEIINSLIAPLNLSPTSSPLSSKSCSHKCLANGIYRRTQRTRESIMQDETRESIMQDENKLCYMPATQRI

SEQ ID NO: 746589 - protein, 246 aa, Homo sapiens
RVGAGPAPQPLLLAELLPPPGGRADARSWGRRGGAGGAAAGLTGPMRRKEKRLLQAVALVLAALVLLPNVGLWALYRERQPDGTPGGSGAAVAPAAGQGSHSRQKKTFFLGDGQKLKDWHDKEAIRRDAQRVGNGEQGRPNPMTDAERVDQAYRENGFNIYVSDKISLNRSLPDIRHPNCNSKRYLETLPNTSIIIPFHNEGWSSLLRTVHSVLNRSPPELVAEIVLVDDFSDRDLPTASTPSPFV

SEQ ID NO: 746590 - protein, 586 aa, Homo sapiens
RVGAGPAPQPLLLAELLPPPGGRADARSWGRRGGAGGAAAGLTGPDEAEEKRLLQAVALVLAALVLLPNVGLWALYRERQPDGTPGGSGAAVAPAAGQGSHSRQKKTFFLGDGQKLKDWHDKEAIRRDAQRVGNGEQGRPNPMTDAERVDQAYRENGFNIYVSDKISLNRSLPDIRHPNCNSKRYLETLPNTSIIIPFHNEGWSSLLRTVHSVLNRSPPELVAEIVLVDDFSDRDRIARNRKTIVCPMIDVIDHDDFRYETQAGDAMRGAFDWEMYYKRIPIPPELQKADPSDPFESPVMAGGLFAVDRKWFWELGGYDPGLEIWGGEQYEISFKVWMCGGRMEDIPCSRVGHIYRKYVPYKVPAGVSLARNLKRVAEVWMDEYAEYIYQRRPEYRHLSAGDVAVQKKLRSSLNCKSFKWFMTKIAWDLPKFYPPVEPPAAAWGEIRNVGTGLCADTKHGALGSPLRLEGCVRGRGEAAWNNMQVFTFTWREDIRPGDPQHTKKFCFDAISHTSPVTLYDCHSMKGNQLWKYRKDKTLYHPVSGSCMDCSESDHRIFMNTCNPSSLTQQWLFEHTNSTVLEKFNRN

SEQ ID NO: 746591 - protein, 463 aa, Homo sapiens
DCINAADCITPRVTASNAASLLRTVHSVLNRSPPELVAEIVLVDDFSDREHLKKPLEDYMALFPSVRILRTKKREGLIRTRMLGASVATGDVITFLDSHCEANVNWLPPLLDRIARNRKTIVCPMIDVIDHDDFRYETQAGDAMRGAFDWEMYYKRIPIPPELQKADPSDPFESPVMAGGLFAVDRKWFWELGGYDPGLEIWGGEQYEISFKVWMCGGRMEDIPCSRVGHIYRKYVPYKVPAGVSLARNLKRVAEVWMDEYAEYIYQRRPEYRHLSAGDVAVQKKLRSSLNCKSFKWFMTKIAWDLPKFYPPVEPPAAAWGEIRNVGTGLCADTKHGALGSPLRLEGCVRGRGEAAWNNMQVFTFTWREDIRPGDPQHTKKFCFDAISHTSPVTLYDCHSMKGNQLWKYRKDKTLYHPVSGSCMDCSESDHRIFMNTCNPSSLTQQWLFEHTNSTVLEKFNRN

SEQ ID NO: 746592 - protein, 196 aa, Homo sapiens
ERLKVLPTAQGKLYQDDLKVNPANVSHLVSPFTWQGPGGHLKAPQWSTSSLFPFQIRNVGTGLCADTKHGALGSPLRLEGCVRGRGEAAWNNMQVFTFTWREDIRPGDPQHTKKFCFDAISHTSPVTLYDCHSMKGNQLWKYRKDKTLYHPVSGSCMDCSESDHRIFMNTCNPSSLTQQWLFEHTNSTVLEKFNRN

SEQ ID NO: 746593 - protein, 517 aa, Homo sapiens
RRLRGSPTPNPMTDAERVDQAYRENGFNIYVSDKISLNRSLPDIRHPNCNSKRYLETLPNTSIIIPFHNEGWSSLLRTVHSVLNRSPPELVAEIVLVDDFSDREHLKKPLEDYMALFPSVRILRTKKREGLIRTRMLGASVATGDVITFLDSHCEANVNWLPPLLDRIARNRKTIVCPMIDVIDHDDFRYETQAGDAMRGAFDWEMYYKRIPIPPELQKADPSDPFESPVMAGGLFAVDRKWFWELGGYDPGLEIWGGEQYEISFKVWMCGGRMEDIPCSRVGHIYRKYVPYKVPAGVSLARNLKRVAEVWMDEYAEYIYQRRPEYRHLSAGDVAVQKKLRSSLNCKSFKWFMTKIAWDLPKFYPPVEPPAAAWGEIRNVGTGLCADTKHGALGSPLRLEGCVRGRGEAAWNNMQVFTFTWREDIRPGDPQHTKKFCFDAISHTSPVTLYDCHSMKGNQLWKYRKDKTLYHPVSGSCMDCSESDHRIFMNTCNPSSLTQQWLFEHTNSTVLEKFNRN

SEQ ID NO: 746594 - protein, 517 aa, Homo sapiens; identical to SEQ ID NO: 746593

SEQ ID NO: 746595 - protein, 274 aa, Homo sapiens
MLAWRDGELEAETSSSLFLLAMQVWMCGGRMEDIPCSRVGHIYRKYVPYKVPAGVSLARNLKRVAEVWMDEYAEYIYQRRPEYRHLSAGDVAVQKKLRSSLNCKSFKWFMTKIAWDLPKFYPPVEPPAAAWGEIRNVGTGLCADTKHGALGSPLRLEGCVRGRGEAAWNNMQVFTFTWREDIRPGDPQHTKKFCFDAISHTSPVTLYDCHSMKGNQLWKYRKDKTLYHPVSGSCMDCSESDHRIFMNTCNPSSLTQQWLFEHTNSTVLEKFNRN

SEQ ID NO: 746596 - protein, 517 aa, Homo sapiens; identical to SEQ ID NO: 746593

SEQ ID NO: 746597 - protein, 648 aa, Homo sapiens
RVGAGPAPQPLLLAELLPPPGGRADARSWGRRGGAGGAAAGLTGPDEAEEKRLLQAVALVLAALVLLPNVGLWALYRERQPDGTPGGSGAAVAPAAGQGSHSRQKKTFFLGDGQKLKDWHDKEAIRRDAQRVGNGEQGRPNPMTDAERVDQAYRENGFNIYVSDKISLNRSLPDIRHPNCNSKRYLETLPNTSIIIPFHNEGWSSLLRTVHSVLNRSPPELVAEIVLVDDFSDREHLKKPLEDYMALFPSVRILRTKKREGLIRTRMLGASVATGDVITFLDSHCEANVNWLPPLLDRIARNRKTIVCPMIDVIDHDDFRYETQAGDAMRGAFDWEMYYKRIPIPPELQKADPSDPFESPVMAGGLFAVDRKWFWELGGYDPGLEIWGGEQYEISFKVWMCGGRMEDIPCSRVGHIYRKYVPYKVPAGVSLARNLKRVAEVWMDEYAEYIYQRRPEYRHLSAGDVAVQKKLRSSLNCKSFKWFMTKIAWDLPKFYPPVEPPAAAWGEIRNVGTGLCADTKHGALGSPLRLEGCVRGRGEAAWNNMQVFTFTWREDIRPGDPQHTKKFCFDAISHTSPVTLYDCHSMKGNQLWKYRKDKTLYHPVSGSCMDCSESDHRIFMNTCNPSSLTQQWLFEHTNSTVLEKFNRN

SEQ ID NO: 746598 - protein, 274 aa, Homo sapiens; identical to SEQ ID NO: 746595

SEQ ID NO: 746599 - protein, 586 aa, Homo sapiens; identical to SEQ ID NO: 746590

SEQ ID NO: 746600 - protein, 111 aa, Homo sapiens [sequence omitted]

SEQ ID NO: 746601 - protein, 122 aa, Homo sapiens
RIPAALTSTRKGVEEQLAQLRCEMEQQSQEYQILLDVKTRLEQEIATYRRLLEGEDAHLSSQQASGQSYSSREVFTSSSSSSSRQTRPDVMNNVLHLHSRPAGFVSVRIPYIDSQAHNSPLL

SEQ ID NO: 746602 - protein, 187 aa, Homo sapiens
HPFPIYPSTFSSLSQLLARSPPSSGTMTTCSRQFTSSSSMKGSCGIGGGIGGGSSRISSVLAGGSCRAPSTYGGGLSVSSSRFSSGGAYGLGGGYGGGFSSSSSSFGSGFGGGYGGGLGAGFGGGLGAGFGGGFAGGDGLLVGSEKVTMQNLNDRLASYLDKVRALEEANADLEVKIRDWYQRQRPC

SEQ ID NO: 746603 - protein, 98 aa, Homo sapiens
MSPNLHSTRSYCKTEGVASHTASGGVILPPDSARDDYLTHRCYRTRNQRASHRRGPSLRQGALHCPLWRVRPPDVARRMQPALLIPPPPGHHATVLEV

SEQ ID NO: 746604 - protein, 106 aa, Homo sapiens
RYPACCLPWMWQRSTTAGPAPLRDGAAEPGVQDPAGREDAAGAGDRPPTAACWRARTPTSPPPSSPLDRSHARDVTSSSRQIRTKVMDVHDGKVVSTHEQVLRTKN

SEQ ID NO: 746605 - protein, 93 aa, Homo sapiens
DASDWWLDGDGIESINYLGQYSHFHDIDSSFHERGMFSICLCPLLVRGDQASPDMQNLNDRLASYLDKVRALEEANADLEVKIRDWYQRQRPC

SEQ ID NO: 746606 - protein, 101 aa, Homo sapiens
GPLVIEAIDVGFHTDINGLRRVLDETDPGQELTWRCRLKEPEGGAGLPEEEPRGGDECPERPGGWRCQWTYMDNGPKWTMDLNGHMDLNGDGPKWTMDLNG

SEQ ID NO: 746607 - protein, 85 aa, Homo sapiens
MAIVALGIPLFSNYTLQTGRLGTFGEWPGSPREVVAEGPFSVSLCPDWGCYPKSLISFKGSAASSASLPWAQEGGDRDGVHPYVA

SEQ ID NO: 746608 - protein, 233 aa, Homo sapiens
GTPTRKHFPFFGEKNLLTRSSLLGTMTTCSRQFTSSSSMKGSCGIGGGIGGGSSRISSVLAGGSCRAPSTYGGGLSVSSRFSSGGACGLGGGYGGGFSSSSSFGSGFGGGYGGGLGAGFGGGLGAGFGGGFAGGDGLLVGSEKVTMQNLNDRLASYLDKVRALEEANADLEVKIRDWYQRQRPSEIKDYSPYFKTIEDLRNKIIAATIENAQPILQIDNARLAADDFRTKYET

SEQ ID NO: 746609 - protein, 233 aa, Homo sapiens; identical to SEQ ID NO: 746608

SEQ ID NO: 746610 - protein, 233 aa, Homo sapiens; identical to SEQ ID NO: 746608

SEQ ID NO: 746611 - protein, 233 aa, Homo sapiens; identical to SEQ ID NO: 746608

SEQ ID NO: 746612 - protein, 233 aa, Homo sapiens; identical to SEQ ID NO: 746608

SEQ ID NO: 746613 - protein, 233 aa, Homo sapiens; identical to SEQ ID NO: 746608

SEQ ID NO: 746614 - protein, 233 aa, Homo sapiens; identical to SEQ ID NO: 746608

SEQ ID NO: 746615 - protein, 233 aa, Homo sapiens; identical to SEQ ID NO: 746608

SEQ ID NO: 746616 - protein, 233 aa, Homo sapiens; identical to SEQ ID NO: 746608

SEQ ID NO: 746617 - protein, 380 aa, Homo sapiens
RVVPARNFGIVSFFQPTAHSLTSLLGTMTTCSRQFTSSSSMKGSCGIGGGIGGGSSRISSVLAGGSCRAPSTYGGGLSVSSRFSSGGACGLGGGYGGGFSSSSSFGSGFGGGYGGGLGAGFGGGLGAGFGGGFAGGDGLLVGSEKVTMQNLNDRLASYLDKVRALEEANADLEVKIRDWYQRQRPSEIKDYSPYFKTIEDLRNKIIAATIENAQPILQIDNARLAADDFRTKYEHELALRQTVEADVNGLRRVLDELTLARTDLEMQIEGLKEELAYLRKNHEEEMLALRGQTGGDVNVEMDAAPGVDLSRILNEMRDQYEQMAEKNRRDAETWFLSKTEELNREVATNSELVQSGKQRDLGAPDAPCRTWRLSCSPSSA

SEQ ID NO: 746618 - protein, 233 aa, Homo sapiens; identical to SEQ ID NO: 746608

SEQ ID NO: 746619 - protein, 403 aa, Homo sapiens
RVVPARNFGIVSFFQPTAHSLTSLLGTMTTCSRQFTSSSSMKGSCGIGGGIGGGSSRISSVLAGGSCRAPSTYGGGLSVSSRFSSGGACGLGGGYGGGFSSSSSFGSGFGGGYGGGLGAGFGGGLGAGFGGGFAGGDGLLVGSEKVTMQNLNDRLASYLDKVRALEEANADLEVKIRDWYQRQRPSEIKDYSPYFKTIEDLRNKHLRNPGGKTKREFFPFPNKGPPNQRVGGTKCHMPILQIDNARLAADDFRTKYEHELALRQTVEADVNGLRRVLDELTLARTDLEMQIEGLKEELAYLRKNHEEEMLALRGQTGGDVNVEMDAAPGVDLSRILNEMRDQYEQMAEKNRRDAETWFLSKTEELNREVATNSELVQSGKQRDLGAPDAPCRTWRLSCSPSSA

SEQ ID NO: 746620 - protein, 232 aa, Homo sapiens
MAVASAAAAALVVASGEDMVVALVLASVVAWVLALVASEIKDYSPYFKTIEDLRNKIIAATIENAQPILQIDNARLAADDFRTKYEHELALRQTVEADVNGLRRVLDELTLARTDLEMQIEGLKEELAYLRKNHEEEMLALRGQTGGDVNVEMDAAPGVDLSRILNEMRDQYEQMAEKNRRDAETWFLSKTEELNREVATNSELVQSGKQRDLGAPDAPCRTWRLSCSPSSA

SEQ ID NO: 746621 - protein, 500 aa, Homo sapiens
RVVPARNFGIVSFFQPTAHSLTSLLGTMTTCSRQFTSSSSMKGSCGIGGGIGGGSSRISSVLAGGSCRAPSTYGGGLSVSSRFSSGGACGLGGGYGGGFSSSSSFGSGFGGGYGGGLGAGFGGGLGAGFGGGFAGGDGLLVGSEKVTMQNLNDRLASYLDKVRALEEANADLEVKIRDWYQRQRPSEIKDYSPYFKTIEDLRNKIIAATIENAQPILQIDNARLAADDFRTKYEHELALRQTVEADVNGLRRVLDELTLARTDLEMQIEGLKEELAYLRKNHEEEMLALRGQTGGDVNVEMDAAPGVDLSRILNEMRDQYEQMAEKNRRDAETWFLSKTEELNKEVASNSELVQSSRSEVTELRRVLQGLEIELQSQLSMKASLENSLEETKGRYCMQLSQIQGLIGSVEEQLAQLRCEMEQQSQEYQILLDVKTRLEQEIATYRRLLEGEDAHLSSQQASGQSYSSREVFTSSSSSSSRQTRPILKEQSSSSFSQGQSS

SEQ ID NO: 746622 - protein, 500 aa, Homo sapiens; identical to SEQ ID NO: 746621

SEQ ID NO: 746623 - protein, 500 aa, Homo sapiens; identical to SEQ ID NO: 746621

SEQ ID NO: 746624 - protein, 500 aa, Homo sapiens; identical to SEQ ID NO: 746621

SEQ ID NO: 746625 - protein, 233 aa, Homo sapiens; identical to SEQ ID NO: 746608

SEQ ID NO: 746626 - protein, 233 aa, Homo sapiens; identical to SEQ ID NO: 746608

SEQ ID NO: 746627 - protein, 500 aa, Homo sapiens; identical to SEQ ID NO: 746621

SEQ ID NO: 746628 - protein, 233 aa, Homo sapiens; identical to SEQ ID NO: 746608

SEQ ID NO: 746629 - protein, 233 aa, Homo sapiens; identical to SEQ ID NO: 746608

SEQ ID NO: 746630 - protein, 233 aa, Homo sapiens; identical to SEQ ID NO: 746608

SEQ ID NO: 746631 - protein, 233 aa, Homo sapiens; identical to SEQ ID NO: 746608

SEQ ID NO: 746632 - protein, 600 aa, Homo sapiens
RVVPARNFGIVSFFQPTAHSLTSLLGTMTTCSRQFTSSSSMKGSCGIGGGIGGGSSRISSVLAGGSCRAPSTYGGGLSVSSRFSSGGACGLGGGYGGGFSSSSSFGSGFGGGYGGGLGAGFGGGLGAGFGGGFAGGDGLLVGSEKVTMQNLNDRLASYLDKVRALEEANADLEVKIRDWYQRQRPSEIKDYSPYFKTIEDLRNKIIAATIENAQPILQIDNARLAADDFRTKYEHELALRQTVEADVNGLRRVLDELTLARTDLEMQIEGLKEELAYLRKNHEEEMLALRGQTGGDVNVEMDAAPGVDLSRILNEMRDQYEQMAEKNRRDAETWFLSKTEELNKEVASNSELVQSSRSEVTELRRVLQGLEIELQSQLSMDEGPSTAAAPKSPVMATTPSKSHSLVPPFFSQDGTRDSWDRYIDRETKPWNSGLAFLHIVWPISTPTGIKIQASLKKHAQRPGGTGVTTSMDSFSLSHLQKASLENSLEETKGRYCMQLSQIQGLIGSVEEQLAQLRCEMEQQSQEYQILLDVKTRLEQEIATYRRLLEGEDAHLSSQQASGQSYSSREVFTSSSSSSSRQTRPILKEQSSSSFSQGQSS

SEQ ID NO: 746633 - protein, 233 aa, Homo sapiens; identical to SEQ ID NO: 746608

SEQ ID NO: 746634 - protein, 233 aa, Homo sapiens; identical to SEQ ID NO: 746608

SEQ ID NO: 746635 - protein, 233 aa, Homo sapiens; identical to SEQ ID NO: 746608

SEQ ID NO: 746636 - protein, 381 aa, Homo sapiens
RVVPARNFGIVSFFQPTAHSLTSLLGTMTTCSRQFTSSSSMKGSCGIGGGIGGGSSRISSVLAGGSCRAPSTYGGGLSVSSRFSSGGACGLGGGYGGGFSSSSSFGSGFGGGYGGGLGAGFGGGLGAGFGGGFAGGDGLLVGSEKVTMQNLNDRLASYLDKVRALEEANADLEVKIRDWYQRQRPSEIKDYSPYFKTIEDLRNKIIAATIENAQPILQIDNARLAADDFRTKYEHELALRQTVEADVNGLRRVLDELTLARTDLEMQIEGLKEELAYLRKNHEEEMLALRGQTGGDVNVEMDAAPGVDLSRILNEMRDQYEQMAEKNRRDAETWFLSKTEELNKEVASNSELVQSSRSEVTELRRVLQGLEIELQSQLSMV

SEQ ID NO: 746637 - protein, 233 aa, Homo sapiens; identical to SEQ ID NO: 746608

SEQ ID NO: 746638 - protein, 233 aa, Homo sapiens; identical to SEQ ID NO: 746608

SEQ ID NO: 746639 - protein, 512 aa, Homo sapiens
MVPARNFGIVSFFQPTAHSLTSLLGTMTTCSRQFTSSSSMKGSCGIGGGIGGGSSRISSVLAGGSCRAPSTYGGGLSVSSRFSSGGACGLGGGYGGGFSSSSSFGSGFGGGYGGGLGAGFGGGLGAGFGGGFAGGDGLLVGSEKVTMQNLNDRLASYLDKVRALEEANADLEVKIRDWYQRQRPSEIKDYSPYFKTIEDLRNKIIAATIENAQPILQIDNARLAADDFRTKYEHELALRQTVEADVNGLRRVLDELTLARTDLEMQIEGLKEELAYLRKNHEEEMLALRGQTGGDVNVEMDAAPGVDLSRILNEMRDQYEQMAEKNRRDAETWFLSKTEELNKEVASNSELVQSSRSEVTELRRVLQGLEIELQSQLSMKASLENSLEETKGRYCMQLSQIQGLIGSVEEQLAQLRCEMEQQSQEYQILLDVKTRLEQEIATYRRLLEGEDAHLSSQQASGQSYSSREVFTSSSSSSSRQTRPILKEQSSSSFSQGQTASTTASCPPAGLTS

SEQ ID NO: 746640 - protein, 340 aa, Homo sapiens
RVVPARNFGIVSFFQPTAHSLTSLLGTMTTCSRQFTSSSSMKGSCGIGGGIGGGSSRISSVLAGGSCRAPSTYGGGLSVSSRFSSGGACGLGGGYGGGFSSSSSFGSGFGGGYGGGLGAGFGGGLGAGFGGGFAGGDGLLVGSEKVTMQNLNDRLASYLDKVRALEEANADLEVKIRDWYQRQRPLPRQYHAERIENMREEIIAATIENAQPILQSQLSMKASLENSLEETKGRYCMQLSQIQGLIGSVEEQLAQLRCEMEQQSQEYQILLDVKTRLEQEIATYRRLLEGEDAHLSSQQASGQSYSSREVFTSSSSSSSRQTRPILKEQSSSSFSQGQSS

SEQ ID NO: 746641 - protein, 473 aa, Homo sapiens
RVVPARNFGIVSFFQPTAHSLTSLLGTMTTCSRQFTSSSSMKGSCGIGGGIGGGSSRISSVLAGGSCRAPSTYGGGLSVSSRFSSGGACGLGGGYGGGFSSSSSFGSGFGGGYGGGLGAGFGGGLGAGFGGGFAGGDGLLVGSEKVTMQNLNDRLASYLDKVRALEEANADLEVKIRDWYQRQRPSEIKDYSPYFKTIEDLRNKIIAATIENAQPILQIDNARLAADDFRTKYEHELALRQTVEADVNGLRRVLDELTLARTDLEMQIEGLKEELAYLRKNHEEEMLALRGQTGGDVNVEMDAAPGVDLSRILNEMRDQYEQMAEKNRRDAETWFLSKTEELNREVATNSELVQSGKQRDLGAPDAPCRTWRLSCSPSSAWSGIVPGRVVHPGLAGRERPHSLIVDSLSLPHRKHPWRTAWRRPKVATALQLAQIQETDWQRGGAYLQVLHGARSSEISLFPLHQLAVGATSR

SEQ ID NO: 746642 - protein, 233 aa, Homo sapiens; identical to SEQ ID NO: 746608

SEQ ID NO: 746643 - protein, 299 aa, Homo sapiens
RVVPARNFGIVSFFQPTAHSLTSLLGTMTTCSRQFTSSSSMKGSCGIGGGIGGGSSRISSVLAGGSCRAPSTYGGGLSVSSRFSSGGACGLGGGYGGGFSSSSSFGSGFGGGYGGGLGAGFGGGLGAGFGGGFAGGDGLLVGSEKVTMQNLNDRLASYLDKVRALEEANADLEVKIRDWYQRQRPSEIKDYSPYFKTIEDLRNKIIAATIENAQPILQIDNARLAADDFRTKYEHELALRQTVEADVNGLRRVLDELTLARTDLEMQIEGLKEELAYLRKNHEELKRSDPGKMVTAEDW

SEQ ID NO: 746644 - protein, 214 aa, Homo sapiens
RVVPARNFGIVSFFQPTAHSLTSLLGTMTTCSRQFTSSSSMKGSCGIGGGIGGGSSRISSVLAGGSCRAPSTYGGGLSVSSRFSSGGACGLGGGYGGGFSSSSSFGSGFGGGYGGGLGAGFGGGLGAGFGGGFAGGDGLLVGSEKVTMQNLNDRLASYLDKVRALEEANADLEVKIRDWYQRQRPSEIKDYSPYFKTIEDLRNKIMTVKEIRLH

SEQ ID NO: 746645 - protein, 157 aa, Homo sapiens
MVGWGQRARDKEWGGPPSRASRPRASESSGLQPEDLTSVLARYEHELALRQTVEADVNGLRRVLDELTLARTDLEMQIEGLKEELAYLRKNHEEGTVAAGFRGGRLVWWGCQMHPGPGEKSAELTASCHPFPGDACSERSDRRRCERGDGCCTWRGP

SEQ ID NO: 746646 - protein, 505 aa, Homo sapiens
RPVPAPSAHRPPPVSEPRDLQVLRPRLRAGPAWWLSGGARGSSGTCGVRGRRGPERSPARETWTETRPATTRGLRMKPSLLCRPLSCFLMLLPWPLATLTSTTLWQCPPGEEPDLDPGQGTLCRPCPPGTFSAAWGSSPCQPHARCSLWRRLEAQVGMATRDTLCGDCWPGWFGPWGVPRVPCQPCSWAPLGTHGCDEWGRRARRGVEVAAGASSGGETRQPGNGTRAGGPEETAAQYAVIAIVPVFCLMGLLGILVCNLLKRKGYHCTAHKEVGPGPGGGGSGINPAYRTEDANEDTIGVLVRLITEKKENAAALEELLKEYHSKQLVQTSHRPVSKLPPAPPNVPHICPHRHHLHTVQGLASLSGPCCSRCSQKKWPEVLLSPEAVAATTPVPSLLPNPTRVPKAGAKAGRQGEITILSVGRFRVARIPEQRTSSMVSEVKTITEAGPSWGDLPDSPQPGLPPEQQALLGSGGSRTKWLKPPAENKAEENRYVVRLSESNLVI

SEQ ID NO: 746647 - protein, 485 aa, Homo sapiens
GSAHLPGPAGDSFKRRAGCAAVRALAEPGRGAESNGEPSWSCRGAARPATTRGLRMKPSLLCRPLSCFLMLLPWPLATLTSTTLWQCPPGEEPDLDPGQGTLCRPCPPGTFSAAWGSSPCQPHARCSLWRRLEAQVGMATRDTLCGDCWPGWFGPWGVPRVPCQPCSWAPLGTHGCDEWGRRARRGVEVAAGASSGGETRQPGNGTRAGGPEETAAQYAVIAIVPVFCLMGLLGILVCNLLKRKGYHCTAHKEVGPGPGGGGSGINPAYRTEDANEDTIGVLVRLITEKKENAAALEELLKEYHSKQLVQTSHRPVSKLPPAPPNVPHICPHRHHLHTVQGLASLSGPCCSRCSQKKWPEVLLSPEAVAATTPVPSLLPNPTRVPKAGAKAGRQGEITILSVGRFRVARIPEQRTSSMVSEVKTITEAGPSWGDLPDSPQPGLPPEQQALLGSGGSRTKWLKPPAENKAEENRYVVRLSESNLVI

SEQ ID NO: 746648 - protein, 285 aa, Homo sapiens
MKVIWASLSLDPTFAGALGGLSPKCTCSGPLRRPGLPSAGRSWFSSGVRLPPLPQDSGPFFSPGINPAYRTEDANEDTIGVLVRLITEKKENAAALEELLKEYHSKQLVQTSHRPVSKLPPAPPNVPHICPHRHHLHTVQGLASLSGPCCSRCSQKKWPEVLLSPEAVAATTPVPSLLPNPTRVPKAGAKAGRQGEITILSVGRFRVARIPEQRTSSMVSEVKTITEAGPSWGDLPDSPQPGLPPEQQALLGSGGSRTKWLKPPAENKAEENRYVVRLSESNLVI

SEQ ID NO: 746649 - protein, 485 aa, Homo sapiens; identical to SEQ ID NO: 746647

SEQ ID NO: 746650 - protein, 485 aa, Homo sapiens; identical to SEQ ID NO: 746647

SEQ ID NO: 746651 - protein, 161 aa, Homo sapiens
VCAPSRPSRRFIQKARRLRGCPGARRAGPRRRVERGAELELPRRSQAGDHQGPEDEAKSAVPAPVLLPYAAALASRHPDINNPLAVPTWGGARPGPRAGHIMQALPPRHLLSCMGLQPMPAPCPLQPLEEAGGPGGHGNSRYTLWRLLAWVSQRECGEGSW

SEQ ID NO: 746652 - protein, 303 aa, Homo sapiens
MPVAAFGGGWRPRWAWQLEIHSVETAGLGINPAYRTEDANEDTIGVLVRLITEKKENAAALEELLKEYHSKQLVQTSHRPVSKCVGWWEITGPKPTLTSLPPGDLPLGSPSSHPVPCWGLLPLAWPMATSACAPCRLPPAPPNVPHICPHRHHLHTVQGLASLSGPCCSRCSQKKWPEVLLSPEAVAATTPVPSLLPNPTRVPKAGAKAGRQGEITILSVGRFRVARIPEQRTSSMVSEVKTITEAGPSWGDLPDSPQPGLPPEQQALLGSGGSRTKWLKPPAENKAEENRYVVRLSESNLVI

SEQ ID NO: 746653 - protein, 245 aa, Homo sapiens
RPVPAPSAHRPPPVSEPRDLQVLRPRLRAGPAWWLSGGARGSSGTCGVRGRRGPERSPARETLDRDQAGDHQGPEDEAKSAVPAPVLLPYAAALASRHPDINNPLAVPTWGGARPGPRAGHIMQALPPRHLLSCMGLQPMPAPCPLQPLEEAGGPGGHGNSRYTLWRLLAWVVWALGGSPRSMSTMFGGETRQPGNGTRAGGPEETAAQYAVIAIVPVFCLSILFLLFIETHHCPILVSPPPSMC

SEQ ID NO: 746654 - protein, 146 aa, Homo sapiens
TVTSFPRSTGRGACQAQPCLLIPPHRRRRNVFTSFFSVAKGACFQGVVLYGVWVLTRERFLAGVPVRCHFPFWLLEPGSFFILYLRGQSFLITLHPLAREVPATRSKVLSRHSGPARLAGGLRSSPGLLPEEPGWGCLLANAANKK

SEQ ID NO: 746655 - protein, 114 aa, Homo sapiens
QLLGSSSLPTSASQVAGTPGISQCIIEPICSTCLDWGTSAASVSLQNTGKHSTHRSLWSRHSTQMRIPQLQEILQKEVRELPGDAQVLRGLSDVIASSCGCCDLCPVFVSLISL

SEQ ID NO: 746656 - protein, 37 aa, Homo sapiens
MGAPFCHLLIEPRGCCDCESCCPVCCLLARPTQWGHQ

SEQ ID NO: 746657 - protein, 108 aa, Homo sapiens
QIWRHALPDFKLYYKAIVTKTTWYWLKNRHIDQWNRTEKPEINPKTYSQLIFNKANKNIKWGKDITFSKCCWYNWQATCGRMKLDPHLSPYTKINAKRIKDLNLRTKL

SEQ ID NO: 746658 - protein, 246 aa, Homo sapiens
SGLSRGSAAGGRALGRPWPGRRVACVGSAGDSGGSGAGGACATAWVCEMAADISESSGADCKGDPRNSAKLDADYPLRVLYCGVCSLPTEYCEYMPDVAKCRQWLEKNFPNEFAKLTVENSPKQEAGISEGQGTAGEEEEKKKQKRGGRGQIKQKKKTVPQKVTIAKIPRAKKKYVTRVCGLATFEIDLKEAQRFFAQKFSCGASVTGEDEIIIQGDFTDDIIDVIQEKWPEVDDDSIEDLGEVKK

SEQ ID NO: 746659 - protein, 246 aa, Homo sapiens; identical to SEQ ID NO: 746658

SEQ ID NO: 746660 - protein, 976 aa, Homo sapiens
SVSRSMLFVFLKAIMMLGDAKIGNNSVSSLKNDDFTMRGLRCDGNADDIWTASQNPKSCGKSISIETANLREYARYVLRTICQQEWVGEHCLKEPERLCTDKELILDPVLSNMQAQKLLQLICYPHGIKECTEGDNLQRQHIKRILQNLEQWTLRQSWLELQLMIKQCLKDPGSGSVAEMNNLLDNIAKATIEVFQQSADLNNSSNSGMSLFNPNSIGSADTSSTRQNGIKTFLSSSERRGVWLVAPLIARLPTSVQGRVLKAAGEELEKGQHLGSSSKKERDRQKQKSMSLLSQQPFLSLVLTCLKGQDEQREGLLTSLQNQVNQILSNWREERYQDDIKARQMMHEALQLRLNLVGGMFDTVQRSTQWTTDWALLLLQIITSGTVDMHTNNELFTTVLDMLGVLINGTLASDLSNASPGGSEENKRAYMNLVKKLKKELGDKRSESIDKVRQLLPLPKQTCDVITCEPMGSLIDTKGNKIAGFDSIDKKQGLQVSTKQKVSPWDLFEGQKNPAPLSWAWFGTVRVDRRVIKYEEQHHLLLYHTHPMPKPRSYYLQPLPLPPEEEEEEPTSPVSQEPERKSAELSDQGKTTTDEEKKTKGRKRKTKSSSRVDEYPQSNIYRVPPNYSPISSQMMHHPQSTLWGYNLVGQPQQPGFFLQNQSLTPGGSRLDPAGSFVPTNTKQALSNMLQRRSGAMMQPPSLHAITSQQQLIQMKLLQQQQQQRLLRQAQTRPFQQGQPGDQAALFAAQARPSPQLPQYPGLQQAQTMPQGYTMYGTQMPLQQTSQQQAGSVVLSPSYNSRAYPAAHSNPVLMERLRQIQQQPSGYVQQQASPYLQPLTGSQRLNHQALQQSPLVGGGIDAVLTSAHPNLPSVPLPQDPMRPRQPQVRQQQRLLQMQQPQQPQPQQPPQPQQSSQSQSQTLGLQAMQPQQPLFPRQGLQQTQQQQQTAALVRQLQKQLSSNQPQQGVTPYGHPSHF

SEQ ID NO: 746661 - protein, 1435 aa, Homo sapiens
FSVFQDESSSHECNQRTILLYGVGKERDEARHQLKKITKDILKILNKKSTTETGVGDEGQKARKNKQETFPTLETVFTKLQLLSYFDQHQVTSQISNNVLEQITSFASGTSYHLPLAHHIQLIFDLMEPALNINGLIDFAIQLLNELSVVEAELLLKSSSLAGSYTTGLCVCIVAVLRRYHSCLILNPDQTAQVFEGLCGVVKHVVNPSECSSPERCILAYLYDLYVSCSHLRSKFGDLFSSACSKVKQTIYNNVMPANSNLRWDPDFMMDFIENPSARSINYSMLGKILSDNAANRYSFVCNTLMNVCMGHQDAGRINDIANFSSELTACCTVLSSEWLGVLKALCCSSNHVWGFNDVLCTVDVSDLSFHDSLATFIAILIARQCFSLEDVVQHVALPSLLAAACGDADAEPGARMTCRLLLHLFRAPQACFLPQATGKPFPGIRSSCDRHLLAAAHNSIEVGAVFAVLKAIMMLGDAKIGNNSVSSLKNDDFTMRGLRCDGNADDIWTASQNPKSCGKSISIETANLREYARYVLRTICQQEWVGEHCLKEPERLCTDKELILDPVLSNMQAQKLLQLICYPHGIKECTEGDNLQRQHIKRILQNLEQWTLRQSWLELQLMIKQCLKDPGSGSVAEMNNLLDNIAKATIEVFQQSADLNNSSNSGMSLFNPNSIGSADTSSTRQNGIKTFLSSSERRGVWLVAPLIARLPTSVQGRVLKAAGEELEKGQHLGSSSKKERDRQKQKSMSLLSQQPFLSLVLTCLKGQDEQREGLLTSLQNQVNQILSNWREERYQDDIKARQMMHEALQLRLNLVGGMFDTVQRSTQWTTDWALLLLQIITSGTVDMHTNNELFTTVLDMLGVLINGTLASDLSNASPGGSEENKRAYMNLVKKLKKELGDKRSESIDKVRQLLPLPKQTCDVITCEPMGSLIDTKGNKIAGFDSIDKKQGLQVSTKQKVSPWDLFEGQKNPAPLSWAWFGTVRVDRRVIKYEEQHHLLLYHTHPMPKPRSYYLQPLPLPPEEEEEEPTSPVSQEPERKSAELSDQGKTTTDEEKKTKGRKRKTKSSSRVDEYPQSNIYRVPPNYSPISSQMMHHPQSTLWGYNLVGQPQQPGFFLQNQSLTPGGSRLDPAGSFVPTNTKQALSNMLQRRSGAMMQPPSLHAITSQQQLIQMKLLQQQQQQRLLRQAQTRPFQQGQPGDQAALFAAQARPSPQLPQYPGLQQAQTMPQGYTMYGTQMPLQQTSQQQAGSVVLSPSYNSRAYPAAHSNPVLMERLRQIQQQPSGYVQQQASPYLQPLTGSQRLNHQALQQSPLVGGGIDAVLTSAHPNLPSVPLPQDPMRPRQPQVRQQQRLLQMQQPQQPQPQQPPQPQQSSQSQSQTLGLQAMQPQQPLFPRQGLQQTQQQQQTAALVRQLQKQLSSNQPQQGVTPYGHPSHF

SEQ ID NO: 746662 - protein, 291 aa, Homo sapiens
MIPIQLTVFFMIIYVLESLTIIVQSSLIVAVLGREWLQVRRLMPVDMILISLGISRFCLQWASMLNNFCSYFNLNYVLCNLTITWEFFNILTFWLNSLLTVFYCIKVSSFTHHIFLWLRWRILRLFPWILLGSLMITCVTIIPSAIGNYIQIQLLTMEHLPRNSTVTDKLENFHQYQFQAHTVALVIPFILFLASTIFLMASLTKQIQHHSTGHCNPSMKARFTALRSLAVLFIVFTSYFLTILITIIGTLFDKRCWLWVWEAFVYAFILMHSTSLMLSSPTLKRILKGKC

SEQ ID NO: 746663 - protein, 109 aa, Homo sapiens
KTLQSKLGTPPGFTYEIELSLFSLLITLLSPHPQVSSLRSGNMPYLLLYLQGPAQCGPSEALNNHLLNDSICHRISEGKTGPFRFVECFQAFLSTSHLIYMERTSRDCY

SEQ ID NO: 746664 - protein, 114 aa, Homo sapiens
RQENHLNLGGGGCSEPRSYHCTPAWVTERDSVSKKKKTQKPTNKQNKTPMQLKLIDNWVKKERQLNRKQTVGLKQKWLKIARSRQFSQELLSRKQSLGKSKKNPTQSNLPFISR

SEQ ID NO: 746665 - protein, 129 aa, Homo sapiens
HSFIHSFIKGKRLGDRAFRKRVFVFSPGRVMALPGRRSRPARAQSWRRVAVGRRDFRVGGILNAAMAQTVQNVTLSLTLPITCHICLGKVMGDCGHSYKTGLDKSLAGAEGRLVRGRGRGVRRGDGRKR

SEQ ID NO: 746666 - protein, 752 aa, Homo sapiens
HSFIHSFIKGKRLGDRAFRKRVFVFSPGRVMALPGRRSRPARAQSWRRVAVRQPVICINNHVFCSICIDLWLKNNSQCPACRVPITPENPCKEIIGGTSESEPMLSHTVRKHLRKTRLELLHKEYEDEIDCLQKEVEELKSKNLSLESQIKTILDPLTLVQGNQNEDKHLVTDNPSKINPETVAEWKKKLRTANEIYEKVKDDVDKLKEANKKLKLENGGLVRENLRLKAEVDNRSPQKFGRFAVAALQSKVEQYERETNRLKKALERSDKYIEELESQVAQLKNSSEEKEAMNSICQTALSADGKGSKGSEEDVVSKNQGDSARKQPGSSTSSSSHLAKPSSSRLCDTSSARQESTSKADLNCSKNKDLYQEQVEVMLDVTDTSMDTYLEREWGNKPSDCVPYKDEELYDLPAPCTPLSLSCLQLSTPENRESSVVQAGGSKKHSNHLRKLVFDDFCDSSNVSNKDSSEDDISRSENEKKSECFSSPKTGFWDCCSTSYAQNLDFESSEGNTIANSVGEISSKLSEKSGLCLSKRLNSIRSFEMNRTRTSSEASMDAAYLDKISELDSMMSESDNSKSPCNNGFKSLDLDGLSKSSQGSEFLEEPDKLEEKTELNLSKGSLTNDQLENGSEWKPTSFFLLSPSDQEMNEDFSLHSSSCPVTNEIKPPSCLFQTEFSQGILLSSSHRLFEDQRFGSSLFKMSSEMHSLHNHLQSPWSTSFVPEKRNKNVNQSTKRKIQSSLSSASPSKATKS

SEQ ID NO: 746667 - protein, 791 aa, Homo sapiens
HSFIHSFIKGKRLGDRAFRKRVFVFSPGRVMALPGRRSRPARAQSWRRVAVGRRDFRVGGILNAAMAQTVQNVTLSLTLPITCHICLGKVRQPVICINNHVFCSICIDLWLKNNSQCPACRVPITPENPCKEIIGGTSESEPMLSHTVRKHLRKTRLELLHKEYEDEIDCLQKEVEELKSKNLSLESQIKTILDPLTLVQGNQNEDKHLVTDNPSKINPETVAEWKKKLRTANEIYEKVKDDVDKLKEANKKLKLENGGLVRENLRLKAEVDNRSPQKFGRFAVAALQSKVEQYERETNRLKKALERSDKYIEELESQVAQLKNSSEEKEAMNSICQTALSADGKGSKGSEEDVVSKNQGDSARKQPGSSTSSSSHLAKPSSSRLCDTSSARQESTSKADLNCSKNKDLYQEQVEVMLDVTDTSMDTYLEREWGNKPSDCVPYKDEELYDLPAPCTPLSLSCLQLSTPENRESSVVQAGGSKKHSNHLRKLVFDDFCDSSNVSNKDSSEDDISRSENEKKSECFSSPKTGFWDCCSTSYAQNLDFESSEGNTIANSVGEISSKLSEKSGLCLSKRLNSIRSFEMNRTRTSSEASMDAAYLDKISELDSMMSESDNSKSPCNNGFKSLDLDGLSKSSQGSEFLEEPDKLEEKTELNLSKGSLTNDQLENGSEWKPTSFFLLSPSDQEMNEDFSLHSSSCPVTNEIKPPSCLFQTEFSQGILLSSSHRLFEDQRFGSSLFKMSSEMHSLHNHLQSPWSTSFVPEKRNKNVNQSTKRKIQSSLSSASPSKATKS

SEQ ID NO: 746668 - protein, 791 aa, Homo sapiens; identical to SEQ ID NO: 746667

SEQ ID NO: 746669 - protein, 276 aa, Homo sapiens
HSFIHSFIKGKRLGDRAFRKRVFVFSPGRVMALPGRRSRPARAQSWRRVAVGRRDFRVGGILNAAMAQTVQNVTLSLTLPITCHICLGKVRQPVICINNHVFCSICIDLWLKNNSQCPACRVPITPENPCKEIIGGTSESEPMLSHTVRKHLRKTRLELLHKEYEDEIDCLQKEVEELKSKNLSLESQIKTILDPLTLVQGNQNEDKHLVTDNPSKINPETVAEWKKKLRTANEIYEKVKDDVDKLKERNKNVNQSTKRKIQSSLSSASPSKATKS

SEQ ID NO: 746670 - protein, 387 aa, Homo sapiens
MPTTIEREFEELDTQRRWQPLYLEIRNESHDYPHRVAKFPENRNRNRYRDVSPYDHSRVKLQNAENDYINASLVDIEEAQRSYILTQGPLPNTCCHFWLMVWQQKTKAVVMLNRIVEKESVKCAQYWPTDDQEMLFKETGFSVKLLSEDVKSYYTVHLLQLENINSGETRTISHFHYTTWPDFGVPESPASFLNFLFKVRESGSLNPDHGPAVIHCSAGIGRSGTFSLVDTCLVLMEKGDDINIKQVLLNMRKYRMGLIQTPDQLRFSYMAIIEGAKCIKGDSSIQKRWKELSKEDLSPAFDHSPNKIMTEKYNGNRIGLEEEKLTGDRCTGLSSKMQDTMEENSESALRKRIREDRKATTAQKVQQMKQRLNENERKRKRPRLTDT

SEQ ID NO: 746671 - protein, 415 aa, Homo sapiens
MPTTIEREFEELDTQRRWQPLYLEIRNESHDYPHRVAKFPENRNRNRYRDVSPYDHSRVKLQNAENDYINASLVDIEEAQRSYILTQGPLPNTCCHFWLMVWQQKTKAVVMLNRIVEKESVKCAQYWPTDDQEMLFKETGFSVKLLSEDVKSYYTVHLLQLENINSGETRTISHFHYTTWPDFGVPESPASFLNFLFKVRESGSLNPDHGPAVIHCSAGIGRSGTFSLVDTCLVLMEKGDDINIKQVLLNMRKYRMGLIQTPDQLRFSYMAIIEGAKCIKGDSSIQKRWKELSKEDLSPAFDHSPNKIMTEKYNGNRIGLEEEKLTGDRCTGLSSKMQDTMEENSESALRKRIREDRKATTAQKVQQMKQRLNENERKRKRWLYWQPILTKMGFMSVILVGAFVGWTLFFQQNAL

SEQ ID NO: 746672 - protein, 282 aa, Homo sapiens
LRLGTRPVLNRPRVEDVKSYYTVHLLQLENINSGETRTISHFHYTTWPDFGVPESPASFLNFLFKVRESGSLNPDHGPAVIHCSAGIGRSGTFSLVDTCLVLMEKGDDINIKQVLLNMRKYRMGLIQTPDQLRFSYMAIIEGAKCIKGDSSIQKRWKELSKEDLSPAFDHSPNKIMTEKYNGNRIGLEEEKLTGDRCTGLSSKMQDTMEENSESALRKRIREDRKATTAQKVQQMKQRLNENERKRKRTRLTDTNIHDLSNMATRLSPSTIRRLLIYELDVC

SEQ ID NO: 746673 - protein, 410 aa, Homo sapiens
MPTTIEREFEELDTQRRWQPLYLEIRNESHDYPHRVAKFPENRNRNRYRDVSPYDHSRVKLQNAENDYINASLVDIEEAQRSYILTQGPLPNTCCHFWLMVWQQKTKAVVMLNRIVEKESVKCAQYWPTDDQEMLFKETGFSVKLLSEDVKSYYTVHLLQLENINYIENLWITLYLKLLMLDVKRSLKSGETRTISHFHYTTWPDFGVPESPASFLNFLFKVRESGSLNPDHGPAVIHCSAGIGRSGTFSLVDTCLVLMEKGDDINIKQVLLNMRKYRMGLIQTPDQLRFSYMAIIEGAKCIKGDSSIQKRWKELSKEDLSPAFDHSPNKIMTEKYNGNRIGLEEEKLTGDRCTGLSSKMQDTMEENSESALRKRIREDRKATTAQKVQQMKQRLNENERKRKRPRLTDT

SEQ ID NO: 746674 - protein, 156 aa, Homo sapiens
GKQNGSGNSAIAILMARSSEDGYGTIPSPISVIGSQAYMAIIEGAKCIKGDSSIQKRWKELSKEDLSPAFDHSPNKIMTEKYNGNRIGLEEEKLTGDRCTGLSSKMQDTMEENSESALRKRIREDRKATTAQKVQQMKQRLNENERKRKRPRLTDT

SEQ ID NO: 746675 - protein, 387 aa, Homo sapiens; identical to SEQ ID NO: 746670

SEQ ID NO: 746676 - protein, 305 aa, Homo sapiens
MPTTIEREFEELDTQRRWQPLYLEIRNESHDYPHRVAKFPENRNRNRYRDVSPYDHSRVKLQNAENDYINASLVDIEEAQRSYILTQGPLPNTCCHFWLMVWQQKTKAVVMLNRIVEKESVKCAQYWPTDDQEMLFKETGFSVKLLSEDVKSYYTVHLLQLENINSGETRTISHFHYTTWPDFGVPESPASFLNFLFKVRESGSLNPDHGPAVIHCSAGIGRSGTFSLVDTCLVLMEKGDDINIKQVLLNMRKYRMGLIQTPDQLRFSYMAIIEGAKCIKGDSSIQVNFIQVLNHIYLLNTHSIK

SEQ ID NO: 746677 - protein, 80 aa, Homo sapiens
ERNDSLKLHRYTALRKRIREDRKATTAQKVQQMKQRLNENERKRKRWLYWQPILTKMGFMSVILVGAFVGWTLFFQQNAL

SEQ ID NO: 746678 - protein, 379 aa, Homo sapiens
MPYGCSIPRWQPVYLEIRNESHDYPHRVAKFPENRNRNRYRDVSPYDHSRVKLQNAENDYINASLVDIEEAQRSYILTQGPLPNTCCHFWLMVWQQKTKAVVMLNRIVEKESVKCAQYWPTDDQEMLFKETGFSVKLLSEDVKSYYTVHLLQLENINSGETRTISHFHYTTWPDFGVPESPASFLNFLFKVRESGSLNPDHGPAVIHCSAGIGRSGTFSLVDTCLVLMEKGDDINIKQVLLNMRKYRMGLIQTPDQLRFSYMAIIEGAKCIKGDSSIQKRWKELSKEDLSPAFDHSPNKIMTEKYNGNRIGLEEEKLTGDRCTGLSSKMQDTMEENSESALRKRIREDRKATTAQKVQQMKQRLNENERKRKRPRLTDT

SEQ ID NO: 746679 - protein, 248 aa, Homo sapiens
SRVQTICHFSLPSSWDYRHAPLCPDKSGETRTISHFHYTTWPDFGVPESPASFLNFLFKVRESGSLNPDHGPAVIHCSAGIGRSGTFSLVDTCLVLMEKGDDINIKQVLLNMRKYRMGLIQTPDQLRFSYMAIIEGAKCIKGDSSIQKRWKELSKEDLSPAFDHSPNKIMTEKYNGNRIGLEEEKLTGDRCTGLSSKMQDTMEENSESALRKRIREDRKATTAQKVQQMKQRLNENERKRKRPRLTDT

SEQ ID NO: 746680 - protein, 415 aa, Homo sapiens
MPTTIEREFEELDTQRRWQPLYLEIRNESHDYPHRVAKFPENRNRNRYRDVSPYDHSRVKLQNAENDYINASLVDIEEAQRSYILTQGPLPNTCCHFWLMVWQQKTKAVVMLNRIVEKESVKCAQYWPTDDQEMLFKETGFSVKLLSEDVKSYYTVHLLQLENINSGETRTISHFHYTTWPDFGVPESPASFLNFLFKVRESGSLNPDHGPAVIHCSAGIGRSGTFSLVDTCLVLMEKGDDINIKQVLLNMRKYRMGLIQTPDQLRFSYMAIIEGAKCIKGDSSIQKRWKELSKEDLSPAFDHSPNKIMTEKYNGNRIGLEEEKLTGDRCTGLSSKMQDTMEENSESALRKRIREDRKATTAQKVQQMKQRLNENERKRKRTRLTDTNIHDLSNMATRLSPSTIRRLLIYELDVC

SEQ ID NO: 746681 - protein, 215 aa, Homo sapiens
LAISRRRQRLLEERHGADQARWSKPQRESGSGREVVWGEGRRQSRGGAGCGPFWRTLIECPKLPGMCVDPSSLRSPAGVKLHTCLHSTLPVPKRAHRRRKNGCQHLPTMVQESVTFKDVAILFTQEEWGQLSPAQRALYRDVMLENYSNLVSLGLLGPKPDTFSQLEKREVWMPEDTPGGFCLDGVSLCYQAGACSEPRSRHCTPAWATEQDFIS

SEQ ID NO: 746682 - protein, 230 aa, Homo sapiens
LAISRRRQRLLEERHGADQARWSKPQRESGSGREVVWGEGRRQSRGGAGCGPFWRTLIECPKLPGMCVDPSSLRSPAGVKLHTCLHSTLPVPKRAHRRRKNGCQHLPTMVQESVTFKDVAILFTQEEWGQLSPAQRALYRDVMLENYSNLVSLGLLGPKPDTFSQLEKREVWMPEDTPGGFCLDWMTMPASKKSTVKAEIPEEELDQWTIKERFSSSSHWKCASLLEWQC

SEQ ID NO: 746683 - protein, 1353 aa, Homo sapiens
MLDPSSSEEESDEIVEEESGKEVLGSAPSGARLSPSRTSEGSAGSAGLGGGGAGAGAGVGAGGGGGSGASSGGGAGGLQPSSRAGGGRPSSPSPSVVSEKEKEELERLQKEEEERKKRLQLYVFVMRCIAYPFNAKQPTDMARRQQKISKQQLQTVKDRFQAFLNGETQIMADEAFMNAVQSYYEVFLKSDRVARMVQSGGCSANDSREVFKKHIEKRVRSLPEIDGLSKETVLSSWMAKFDAIYRGEEDPRKQQARMTASAASELILSKEQLYEMFQNILGIKKFEHQLLYNACQLDNPDEQAAQIRRELDGRLQMADQIARERKFPKFVSKEMENMYIEELKSSVNLLMANLESMPVSKGGEFKLQKLKRSHNASIIDMGEESENQLSKSDVVLSFSLEVVIMEVQGLKSLAPNRIVYCTMEVEGGEKLQTDQAEASKPTWGTQGDFSTTHALPAVKVKLFTESTGVLALEDKELGRVILHPTPNSPKQSEWHKMTVSKNCPDQDLKIKLAVRMDKPQNMKHSGYLWAIGKNVWKRWKKRFFVLVQVSQYTFAMCSYREKKAEPQELLQLDGYTVDYTDPQPGLEGGRAFFNAVKEGDTVIFASDDEQDRILWVQAMYRATGQSHKPVPPTQVQKLNAKGGNVPQLDAPISQFYADRAQKHGMDEFISSNPCNFDHASLFEMVQRLTLDHRLNDSYSCLGWFSPGQVFVLDEYCARNGVRGCHRHLCYLRDLLERAENGAMIDPTLLHYSFAFCASHVHGNRPDGIGTVTVEEKERFEEIKERLRVLLENQITHFRYCFPFGRPEGAVKATLSLVERVLMKDIVTPVPQEEVKTVIRKCLEQAALVNYSRLSEYAKIEENQKDAENVGRLITPAKKLEDTIRLAELVIEVLQQNEEHHAEPHVDKGEAFAWWSDLMVEHAETFLSLFAVDMDAALEVQPPDTWDSFPLFQLLNDFLRTDYNLCNGKFHKHLQDLFAPLVVRYVDLMESSIAQSIHRGFERESWEPVKSLTSNLPNVNLPNVNLPKVPNLPVNIPLGIPQMPTFSAPSWMAAIYDADNGSGTSEDLFWKLDALQTFIRDLHWPEEEFGKHLEQRLKLMASDMIESCVKRTRIAFEVKLQKTSRSTDFRVPQSICTMFNVMVDAKAQSTKLCSMEMGQEHQYHSKIDELIEETVKEMITLLVAKFVTILEGVLAKLSRYDEGTLFSSFLSFTVKAASKYVDVPKPGMDVADAYVTFVRHSQDVLRDKVNEEMYIERLFDQWYNSSMNVICTWLTDRMDLQLHIYQLKTLIRMVKKTYRDFRLQGVLDSTLNSKTYETIRNRLTVEEATASVSEGGGLQGISMKDSDEEDEEDD

SEQ ID NO: 746684 - protein, 512 aa, Homo sapiens
GSEATLSLLERVLMKDIVTPVPQEEVKTVIRKCLEQAALVNYSRLSEYAKIEGKKREMYEHPVFCLASQVMDLTIQNQKDAENVGRLITPAKKLEDTIRLAELVIEVLQQNEEHHAEAFAWWSDLMVEHAETFLSLFAVDMDAALEVQPPDTWDSFPLFQLLNDFLRTDYNLCNGKFHKHLQDLFAPLVVRYVDLMESSIAQSIHRGFERESWEPVNNGSGTSEDLFWKLDALQTFIRDLHWPEEEFGKHLEQRLKLMASDMIESCVKRTRIAFEVKLQKTSRSTDFRVPQSICTMFNVMVDAKAQSTKLCSMEMGQEHQYHSKIDELIEETVKEMITLLVAKFVTILEGVLAKLSRYDEGTLFSSFLSFTVKAASKYVDVPKPGMDVADAYVTFVRHSQDVLRDKVNEEMYIERLFDQWYNSSMNVICTWLTDRMDLQLHIYQLKTLIRMVKKTYRDFRLQGVLDSTLNSKTYETIRNRLTVEEATASVSEGGGLQGISMKDSDEEDEEDD

SEQ ID NO: 746685 - protein, 806 aa, Homo sapiens
GPQRRQDKESRSGMVPSFFGLCDKGDVEFICVEDQGLLGGVRVPVSLVKQLEEPGSNVHRDSHDDANDGPQLNDGPQLNDGPQLNDGPQLNDGPQLNDGPQLNDGPQLDAPISQFYADRAQKHGMDEFISSNPCNFDHASLFEMVQRLTLDHRLNDSYSCLGWFSPGQVFVLDEYCARNGVRGCHRHLCYLRDLLERAENGAMIDPTLLHYSFAFCASHVHGNRPDGIGTVTVEEKERFEEIKERLRVLLENQITHFRYCFPFGRPEGAVKATLSLVERVLMKDIVTPVPQEEVKTVIRKCLEQAALVNYSRLSEYAKIEENQKDAENVGRLITPAKKLEDTIRLAELVIEVLQQNEEHHAEAFAWWSDLMVEHAETFLSLFAVDMDAALEVQPPDTWDSFPLFQLLNDFLRTDYNLCNGKFHKHLQDLFAPLVVRYVDLMESSIAQSIHRGFERESWEPVKSLTSNLPNVNLPNVNLPKVPNLPVNIPLGIPQMPTFSAPSWMAAIYDADNGSGTSEDLFWKLDALQTFIRDLHWPEEEFGKHLEQRLKLMASDMIESCVKRTRIAFEVKLQKTSRSTDFRVPQSICTMFNVMVDAKAQSTKLCSMEMGQEHQYHSKIDELIEETVKEMITLLVAKFVTILEGVLAKLSRYDEGTLFSSFLSFTVKAASKYVDVPKPGMDVADAYVTFVRHSQDVLRDKVNEEMYIERLFDQWYNSSMNVICTWLTDRMDLQLHIYQLKTLIRMVKKTYRDFRLQGVLDSTLNSKTYETIRNRLTVEEATASVSEGGGLQGISMKDSDEEDEEDD

SEQ ID NO: 746686 - protein, 434 aa, Homo sapiens
MDAENVGRLITPAKKLEDTIRLAELVIEVLQQNEEHHAEAFAWWSDLMVEHAETFLSLFAVDMDAALEVQPPDTWDSFPLFQLLNDFLRTDYNLCNGKFHKHLQDLFAPLVVRYVDLMESSIAQSIHRGFERESWEPVNNGSGTSEDLFWKLDALQTFIRDLHWPEEEFGKHLEQRLKLMASDMIESCVKRTRIAFEVKLQKTSRSTDFRVPQSICTMFNVMVDAKAQSTKLCSMEMGQEHQYHSKIDELIEETVKEMITLLVAKFVTILEGVLAKLSRYDEGTLFSSFLSFTVKAASKYVDVPKPGMDVADAYVTFVRHSQDVLRDKVNEEMYIERLFDQWYNSSMNVICTWLTDRMDLQLHIYQLKTLIRMVKKTYRDFRLQGVLDSTLNSKTYETIRNRLTVEEATASVSEGGGLQGISMKDSDEEDEEDD

SEQ ID NO: 746687 - protein, 138 aa, Homo sapiens
MFSCFFTEKPGMDVADAYVTFVRHSQDVLRDKVNEEMYIERLFDQWYNSSMNVICTWLTDRMDLQLHIYQLKTLIRMVKKTYRDFRLQGVLDSTLNSKTYETIRNRLTVEEATASVSEGGGLQGISMKDSDEEDEEDD

SEQ ID NO: 746688 - protein, 720 aa, Homo sapiens
MENMYIEELKSSVNLLMANLESMPVSKGGEFKLQKLKRSHNASIIDMGEESENQLSKSDVVLSFSLEVVIMEVQGLKSLAPNRIVYCTMEVEGGEKLQTDQAEASKPTWGTQGDFSTTHALPAVKVKLFTESTGVLALEDKELGRVILHPTPNSPKQSEWHKMTVSKNCPDQDLKIKLAVRMDKPQNMKHSGYLWAIGKNVWKRWKKRFFVLVQVSQYTFAMCSYREKKAEPQELLQLDGYTVDYTDPQPGLEGGRAFFNAVKEGDTVIFASDDEQDRILWVQAMYRATGQSHKPVPPTQVQKLNAKGGNVPQLDAPISQFYADRAQKHGMDEFISSNPCNFDHASLFEMVQRLTLDHRLNDSYSCLGWFSPGQVFVLDEYCARNGVRGCHRHLCYLRDLLERAENGAMIDPTLLHYSFAFCASHVHGNRPDGIGTVTVEEKERFEEIKERLRVLLENQITHFRYCFPFGRPEGAVKATLSLVERVLMKDIVTPVPQEEVKTVIRKCLEQAALVNYSRLSEYAKIEENQKDAENVGRLITPAKKLEDTIRLAELVIEVLQQNEEHHAEAFAWWSDLMVEHAETFLSLFAVDMDAALEVQPPDTWDSFPLFQLLNDFLRTDYNLCNGKFHKHLQDLFAPLVVRYVDLMESSIAQSIHRGFERESWEPVNNGSGTSEDLFWKLDALQTFIRDLHWPEEEFGKHLEQRLKLMASDMIESCVKR

SEQ ID NO: 746689 - protein, 483 aa, Homo sapiens
MENMYIEELKSSVNLLMANLESMPVSKGGEFKLQKLKRSHNASIIDMGEESENQLSKSDVVLSFSLEVVIMEVQGLKSLAPNRIVYCTMEVEGGEKLQTDQAEASKPTWGTQGDFSTTHALPAVKVKLFTESTGVLALEDKELGRVILHPTPNSPKQSEWHKMTVSKNCPDQDLKIKLAVRMDKPQNMKHSGYLWAIGKNVWKRWKKRFFVLVQVSQYTFAMCSYREKKAEPQELLQLDGYTVDYTDPQPGLEGGRAFFNAVKEGDTVIFASDDEQDRILWVQAMYRATGQSHKPVPPTQVQKLNAKGGNVPQLDAPISQFYADRAQKHGMDEFISSNPCNFDHASLFEMVQRLTLDHRLNDSYSCLGWFSPGQVFVLDEYCARNGVRGCHRHLCYLRDLLERAENGAMIDPTLLHYSFAFCASHVHGNSQQMHVYLSGLPPNTDPEGSKTPSPPEPEAKKDTKKESKKRKDSKTQANQELKR

SEQ ID NO: 746690 - protein, 457 aa, Homo sapiens
MLDPSSSEEESDEIVEEESGKEVLGSAPSGARLSPSRTSEGSAGSAGLGGGGAGAGAGVGAGGGGGSGASSGGGAGGLQPSSRAGGGRPSSPSPSVVSEKEKEELERLQKEEEERKKRLQLYVFVMRCIAYPFNAKQPTDMARRQQKISKQQLQTVKDRFQAFLNGETQIMADEAFMNAVQSYYEVFLKSDRVARMVQSGGCSANDSREVFKKHIEKRVRSLPEIDGLSKETVLSSWMAKFDAIYRGEEDPRKQQARMTASAASELILSKEQLYEMFQNILGIKKFEHQLLYNACQLDNPDEQAAQIRRELDGRLQMADQIARERKFPKFVSKEMENMYIEELKSSVNLLMANLESMPVSKGGEFKLQKLKRSHNASIIDMGEESENQLSKSDVVLSFSLEVVIMEVQGLKSLAPNRIVYCTMEVEGGEKLQTDQAEASKPTVIRRNRREQLPHSAI

SEQ ID NO: 746691 - protein, 434 aa, Homo sapiens; identical to SEQ ID NO: 746686

SEQ ID NO: 746692 - protein, 1012 aa, Homo sapiens
MENMYIEELKSSVNLLMANLESMPVSKGGEFKLQKLKRSHNASIIDMGEESENQLSKSDVVLSFSLEVVIMEVQGLKSLAPNRIVYCTMEVEGGEKLQTDQAEASKPTWGTQGDFSTTHALPAVKVKLFTESTGVLALEDKELGRVILHPTPNSPKQSEWHKMTVSKNCPDQDLKIKLAVRMDKPQNMKHSGYLWAIGKNVWKRWKKRFFVLVQVSQYTFAMCSYREKKAEPQELLQLDGYTVDYTDPQPGLEGGRAFFNAVKEGDTVIFASDDEQDRILWVQAMYRATGQSHKPVPPTQVQKLNAKGGNVPQLDAPISQFYADRAQKHGMDEFISSNPCNFDHASLFEMVQRLTLDHRLNDSYSCLGWFSPGQVFVLDEYCARNGVRGCHRHLCYLRDLLERAENGAMIDPTLLHYSFAFCASHVHGNRPDGIGTVTVEEKERFEEIKERLRVLLENQITHFRYCFPFGRPEGAVKATLSLVERVLMKDIVTPVPQEEVKTVIRKCLEQAALVNYSRLSEYAKIEENQKDAENVGRLITPAKKLEDTIRLAELVIEVLQQNEEHHAEAFAWWSDLMVEHAETFLSLFAVDMDAALEVQPPDTWDSFPLFQLLNDFLRTDYNLCNGKFHKHLQDLFAPLVVRYVDLMESSIAQSIHRGFERESWEPVKSLTSNLPNVNLPNVNLPKVPNLPVNIPLGIPQMPTFSAPSWMAAIYDADNGSGTSEDLFWKLDALQTFIRDLHWPEEEFGKHLEQRLKLMASDMIESCVKRTRIAFEVKLQKTSRSTDFRVPQSICTMFNVMVDAKAQSTKLCSMEMGQEHQYHSKIDELIEETVKEMITLLVAKFVTILEGVLAKLSRYDEGTLFSSFLSFTVKAASKYVDVPKPGMDVADAYVTFVRHSQDVLRDKVNEEMYIERLFDQWYNSSMNVICTWLTDRMDLQLHIYQLKTLIRMVKKTYRDFRLQGVLDSTLNSKTYETIRNRLTVEEATASVSEGGGLQGISMKDSDEEDEEDD

SEQ ID NO: 746693 - protein, 416 aa, Homo sapiens
MDAENVGRLITPAKKLEDTIRLAELVIEVLQQNEEHHAEAFAWWSDLMVEHAETFLSLFAVDMDAALEVQPPDTWDSFPLFQLLNDFLRTDYNLCNGKFHKHLQDLFAPLVVRYVDLMESSIAQSIHRGFERESWEPVNNGSGTSEDLFWKLDALQTFIRDLHWPEEEFGKHLEQRLKLMASDMIESCVKRTRIAFEVKLQKTSRSTDFRVPQSICTMFNVMVDAKAQSTKLCSMEMGQEHQYHSKIDELIEETVKEMITLLVAKFVTILEGVLAKLSRYDEGTLFSSFLSFTVKAASKYVDVPKPGMDVADAYVTFVRHSQDVLRDKVNEEMYIERLFDQWYNSSMNVICTWLTDRMDLQLHIYQLKTLIRMVKKTYETIRNRLTVEEATASVSEGGGLQGISMKDSDEEDEEDD

SEQ ID NO: 746694 - protein, 177 aa, Homo sapiens
MITLLVAKFVTILEGVLAKLSRYDEGTLFSSFLSFTVKAASKYVDVPKPGMDVADAYVTFVRHSQDVLRDKVNEEMYIERLFDQWYNSSMNVICTWLTDRMDLQLHIYQLKTLIRMVKKTYRDFRLQGVLDSTLNSKTYETIRNRLTVEEATASVSEGGGLQGISMKDSDEEDEEDD

SEQ ID NO: 746695 - protein, 525 aa, Homo sapiens
MENMYIEELKSSVNLLMANLESMPVSKGGEFKLQKLKRSHNASIIDMGEESENQLSKSDVVLSFSLEVVIMEVQGLKSLAPNRIVYCTMEVEGGEKLQTDQAEASKPTWGTQGDFSTTHALPAVKVKLFTESTGVLALEDKELGRVILHPTPNSPKQSEWHKMTVSKNCPDQDLKIKLAVRMDKPQNMKHSGYLWAIGKNVWKRWKKRFFVLVQVSQYTFAMCSYREKKAEPQELLQLDGYTVDYTDPQPGLEGGRAFFNAVKEGDTVIFASDDEQDRILWVQAMYRATGQSHKPVPPTQVQKLNAKGGNVPQLDAPISQFYADRAQKHGMDEFISSNPCNFDHASLFEMVQRLTLDHRLNDSYSCLGWFSPGQVFVLDEYCARNGVRGCHRHLCYLRDLLERAENGAMIDPTLLHYSFAFCASHVHGNSQQMHVYLSGLPPNTDPEGSKTPSPPEPEAKKDTKKESKKRKDSKTQANQELKRPDGIGTVTVEEKERFEEIKERLRVLLENQITHFRYRLSIWST

SEQ ID NO: 746696 - protein, 274 aa, Homo sapiens
MLHHHCRRNPELQEELQIQAAVAAGDVHTVRKMLEQGYSPNGRDANGWTLLHFSAARGKERCVRVFLEHGADPTVKDLIGGFTALHYAAMHGRARIARLMLESEYRSDIINAKSNDGWTPLHVAAHYGRDSFVRLLLEFKAEVDPLSDKGTTPLQLAIIRERSSCVKILLDHNANIDIQNGFLLRYAVIKSNHSYCRMFLQRGADTNLGRLEDGQTPLHLSALRDDVLCARMLYNYGADTNTRNYEGQTPLAVSISISGSSRPCLDFLQEVTSM

SEQ ID NO: 746697 - protein, 318 aa, Homo sapiens
MLHHHCRRNPELQEELQIQAAVAAGDVHTVRKMLEQGYSPNGRDANGWTLLHFSAARGKERCVRVFLEHGADPTVKDLIGGFTALHYAAMHGRARIARLMLESEYRSDIINAKSNDGWTPLHVAAHYGRDSFVRLLLEFKAEVDPLSDKGTTPLQLAIIRERSSCVKILLDHNANIDIQNGFLLRYAVIKSNHSYCRMFLQRGADTNLGRLEDGQTPLHLSALRDDVLCARMLYNYGADTNTRNYEGQTPLAVSISISGSSRPCLDFLQEVTRQPRNLQDLCRIKIRQCIGLQNLKLLDELPIAKVMKDYLKHKFDDI

SEQ ID NO: 746698 - protein, 318 aa, Homo sapiens; identical to SEQ ID NO: 746697

SEQ ID NO: 746699 - protein, 318 aa, Homo sapiens
MVNQSSTPGFLLLGFSEHPGLERTLFVVVFTSYLLTLVGNTLIILLSALDPKLHSPMYFFLSNLSFLDLCFTTSCVPQMLVNLWGPKKTISFLDCSVQIFIFLSLGTTECILLTVMAFDRYVAVCQPLHYATIIHPRLCWQLASVAWVIGLVESVVQTPSTLHLPFCPDRQVDDFVCEVPALIRLSCEDTSYNEIQVAVASVFILVVPLSLILVSYGAITWAVLRINSAKGRRKAFGTCSSHLTVVTLFYSSVIAVYLQPKNPYAQERGKFFGLFYAVGTPSLNPLIYTLRNKEVTRAFRRLLGKEMGLHTKLRESCL

SEQ ID NO: 746700 - protein, 122 aa, Homo sapiens
VKSLIDTGQPQHVGDGVITQIYLTEGLEALPAGRLSKALEDRRDWSAEWGGIEGKMEIEPERAPNARTCSSPRIRSSRRTRPKTSRWGTPKSLEEQHPHDPLCSFRQKDLLPLFVQLFVFLK

SEQ ID NO: 746701 - protein, 446 aa, Homo sapiens
AATPRALECEPIVARRLKGQYPSEPFNMAEDVSSAAPSPRGCADGRDADPTEEQMAETERNDEEQFECQELLECQVQVGAPEEEEEEEEDAGLVAEAEAVAAGWMLDFLCLSLCRAFRDGRSEDFRRTRNSAEAIIHGLSSLTACQLRTIYICQFLTRIAAGKTLDAQFENDERITPLESALMIWGSIEKEHDKLHEEIQNLIKIQAIAVCMENGNFKEAEEVFERIFGDPNSHMPFKSKLLMIISQKDTFHSFFQHFSYNHMMEKIKSYVNYVLSEKSSTFLMKAAAKVVESKRTRTITSQDKPSGNDVEMETEANLDTRKRSHKNLFLSKLQHGTQQQDLNKKERRVGTPQSTKKKKESRRATESRIPVSKSQPVTPEKHRARKRQAWLWEEDKNLRSGVRKYGEGNWSKILLHYKFNNRTSVMLKDRWRTMKKLKLISSDSED

SEQ ID NO: 746702 - protein, 466 aa, Homo sapiens
AATPRALECEPIVARRLKGQYPSEPFNMAEDVSSAAPSPRGCADGRDADPTEEQMAETERNDEEQFECQELLECQVQVGAPEEEEEEEEDAGLVAEAEAVAAGWMLDFLCLSLCRAFRDGRSEDFRRTRNSAEAIIHGLSSLTACQLRTIYICQFLTRIAAGKTLDAQFENDERITPLESALMIWGSIEKEHDKLHEEIQNLIKIQAIAVCMENGNFKEAEEVFERIFGDPNSHMPFKSKLLMIISQKDTFHSFFQHFSYNHMMEKIKSYVNYVLSEKSSTFLMKAAAKVVESKRTRTITSQDKPSGNDVEMETEANLDTRKSVSDKQSAVTESSEGTVSLLRSHKNLFLSKLQHGTQQQDLNKKERRVGTPQSTKKKKESRRATESRIPVSKSQPVTPEKHRARKRQAWLWEEDKNLRSGVRKYGEGNWSKILLHYKFNNRTSVMLKDRWRTMKKLKLISSDSED

SEQ ID NO: 746703 - protein, 471 aa, Homo sapiens
AATPRALECEPIVARRLKGQYPSEPFNMAEDVSSAAPSPRGCADGRDADPTEEQMAETERNDEEQFECQELLECQVQVGAPEEEEEEEEDAGLVAEAEAVAAGWMLDFLCLSLCRAFRDGRSEDFRRTRNSAEVKTFMGAETGYLKSSPPNTGWQEMFTIIHGLSSLTACQLRTIYICQFLTRIAAGKTLDAQFENDERITPLESALMIWGSIEKEHDKLHEEIQNLIKIQAIAVCMENGNFKEAEEVFERIFGDPNSHMPFKSKLLMIISQKDTFHSFFQHFSYNHMMEKIKSYVNYVLSEKSSTFLMKAAAKVVESKRTRTITSQDKPSGNDVEMETEANLDTRKRSHKNLFLSKLQHGTQQQDLNKKERRVGTPQSTKKKKESRRATESRIPVSKSQPVTPEKHRARKRQAWLWEEDKNLRSGVRKYGEGNWSKILLHYKFNNRTSVMLKDRWRTMKKLKLISSDSED

SEQ ID NO: 746704 - protein, 446 aa, Homo sapiens; identical to SEQ ID NO: 746701

SEQ ID NO: 746705 - protein, 272 aa, Homo sapiens
MEPSNKTLIKIQAIAVCMENGNFKEAEEVFERIFGDPNSHMPFKSKLLMIISQKDTFHSFFQHFSYNHMMEKIKSYVNYVLSEKSSTFLMKAAAKVVESKRTRTITSQDKPSGNDVEMETEANLDTRKSVSDKQSAVTESSEGTVSLLRSHKNLFLSKLQHGTQQQDLNKKERRVGTPQSTKKKKESRRATESRIPVSKSQPVTPEKHRARKRQAWLWEEDKNLRSGVRKYGEGNWSKILLHYKFNNRTSVMLKDRWRTMKKLKLISSDSED

SEQ ID NO: 746706 - protein, 384 aa, Homo sapiens
AATPRALECEPIVARRLKGQYPSEPFNMAEDVSSAAPSPRGCADGRDADPTEEQMAETERNDEEQFECQELLECQVQVGAPEEEEEEEEDAGLVAEAEAVAAGWMLDFLCLSLCRAFRDGRSEDFRRTRNSAEAIIHGLSSLTACQLRTIYICQFLTRIAAGKTLDAQFENDERITPLESALMIWGSIEKEHDKLHEEIQNLIKIQAIAVCMENGNFKEAEEVFERIFGDPNSHMPFKSKLLMIISQKDTFHSFFQHFSYNHMMEKIKSYVNYVLSEKSSTFLMKAAAKVVESKRTRTITSQDKPSGNDVEMETEANLDTRKRSHKNLFLSKLQHGTQQQDLNKKERRVGTPQITYICLTKLTMNKKEGVRKGLCFLVLLKHYR

SEQ ID NO: 746707 - protein, 108 aa, Homo sapiens
SAGTVTVATTAAVEFPGDQGTRETGRKEKTQGSGPLSQNPGDPFPVTRCFSWSPRAHSCSPLDIELYLVQAGDTRVRDMANSPQPWWHFKLWSSTPFYLLLVNSQRPQ

SEQ ID NO: 746708 - protein, 628 aa, Homo sapiens
MALRARALYDFRSENPGEISLREHEVLSLCSEQDIEGWLEGVNSRGDRGLFPASYVQVIRAPEPGPAGDGGPGAPARYANVPPGGFEPLPVAPPASFKPPPDAFQALLQPQQAPPPSTFQPPGAGFPYGGGALQPSPQQLYGGYQASQGSDDDWDDEWDDSSTVADEPGALGSGAYPDLDGSSSAGVGAAGRYRLSTRSDLSLGSRGGSVPPQHHPSGPKSSATVSRNLNRFSTFVKSGGEAFVLGEASGFVKDGDKLCVVLGPYGPEWQENPYPFQCTIDDPTKQTKFKGMKSYISYKLVPTHTQVPVHRRYKHFDWLYARLAEKFPVISVPHLPEKQATGRFEEDFISKRRKGLIWWMNHMASHPVLAQCDVFQHFLTCPSSTDEKAWKQGKRKAEKDEMVGANFFLTLSTPPAAALDLQEVESKIDGFKCFTKKMDDSALQLNHTANEFARKQVTGFKKEYQKVGQSFRGLSQAFELDQQAFSVGLNQAIAFTGDAYDAIGELFAEQPRQDLDPVMDLLALYQGHLANFPDIIHVQKGKAWPLEQVIWSVLCRLKGATLTAVPLWVSDSYSTGEEASRDVDAWVFSLECKLDCSTGSFLLEYLALGNEYSFSKVQRVPLMTVLSF

SEQ ID NO: 746709 - protein, 123 aa, Homo sapiens
  misc_feature (1)..(1): Xaa can be any naturally occurring amino acid
XEMGSCPGTQAGLELLTSGDPPAWASQSAGITGVSHCARLVCACCIKFGKSFFAARHVVLINTVVYLSIMWYISSDIYFQYLLDYKGRLLRSCFLIIFGVIGPQGFKRRLDCALHVGFIHCPN

SEQ ID NO: 746710 - protein, 169 aa, Homo sapiens
MRECNGVILAHCSLRLLGSSNSPVSASRVAGITGACHHAQLISVFLVETGFHHIGQAGLELLTSGDPPAWASQSAGITGVSHCARLVCACCIKFGKSFFAARHVVLINTVVYLSIMWYISSDIYFQYLLDYKGRLLRSCFLIIFGVIGPQGFKRRLDCALHVGFIHCPN

SEQ ID NO: 746711 - protein, 317 aa, Homo sapiens
MSKSLKKLVEESREKNQPEVDMSDRGISNMLDVNGLFTLSHITQLVLSHNKLTMVPPNIAELKNLEVLNFFNNQIEELPTQISSLQKLKHLNLGMNRLNTLPRGFGSLPALEVLDLTYNNLSENSLPGNFFYLTTLRALYLSDNDFEILPPDIGKLTKLQILSLRDNDLISLPKEIGELTQLKELHIQGNRLTVLAPELGNLDLTGQKQVFKAENNPWVTPIADQFQLGRVPCFEYIRSETYKSSTADHMQANQKPPKHDTDKSKTDQPENPGSQNRLGRDGIGGFQHLLFSDDYLSWPVSIIPCACSRYYHNHLRS

SEQ ID NO: 746712 - protein, 268 aa, Homo sapiens
GAETGRVRCSVPVLQGVRAAGVRSAEACGCTPIVLGATFRVTLSHITQLVLSHNKLTMVPPNIAELKNLEVLNFFNNQIEELPTQISSLQKLKHLNLGMNRLNTLPRGFGSLPALEVLDLTYNNLSENSLPGNFFYLTTLRALYLSDNDFEILPPDIGKQVFKAENNPWVTPIADQFQLGRVPCFEYIRSETYKSSTADHMQANQKPPKHDTDKSKTDQPENPGSHDSLGRDGIGGFQHLLFSDDYLSWPVSIIPCACSRYYHNHLRS

SEQ ID NO: 746713 - protein, 299 aa, Homo sapiens
MSKSLKKLVEESREKNQPEVDMSDRGISNMLDVNGLFTLSHITQLVLSHNKLTMVPPNIAELKNLEVLNFFNNQIEELPTQISSLQKLKHLNLGMNRLNTLPRGFGSLPALEVLDLTYNNLSVSDNDFEILPPDIGKLTKLQILSLRDNDLISLPKEIGELTQLKELHIQGNRLTVLAPELGNLDLTGQKQVFKAENNPWVTPIADQFQLGRVPCFEYIRSETYKSSTGDHMQANQKPPKHDSDKSKKDQPENPGSQNSLGRDGIAGFQHLLFSHDYLTWPVSIIPCACSRYYHNHLRS

SEQ ID NO: 746714 - protein, 318 aa, Homo sapiens
GAETGRVRCSVPVLQGVRAAGVRSAEACGCTPIVLGATFRVTLSHITQLVLSHNKLTMVPPNIAELKNLEVLNFFNNQIEELPTQISSLQKLKHLNLGMNRLNTLPRGFGSLPALEVLDLTYNNLSENSLPGNFFYLTTLRALYLSDNDFEILPPDIGKLTKLQILSLRDNDLISLPKEIGELTQLKELHIQGNRLTVLAPELGNLDLTGQKQVFKAENNPWVTPIADQFQLGRVPCFEYIRSETYKSSTADHMQANQKPPKHDTDKSKTDQPENPGSQNRLGRDGIGGFQHLLFSDIISLGRFQLSHVPVAVITITT

SEQ ID NO: 746715 - protein, 303 aa, Homo sapiens
GAETGRVRCSVPVLQGVRAAGVRSAEACGCTPIVLGATFRVTLSHITQLVLSHNKLTMVPPNIAELKNLEVLNFFNNQIEELPTQISSLQKLKHLNLGMNRLNTLPRGFGSLPALEVLDLTYNNLSVSDNDFEILPPDIGKLTKLQILSLRDNDLISLPKEIGELTQLKELHIQGNRLTVLAPELGNLDLTGQKQVFKAENNPWVTPIADQFQLGRVPCVEYIRSETYKSSTGDHMQANQKPPKHDTDKSKTDQPENPGSQNRLGRDGIGGFQHLLFSDDYLSWPVSIIPCACSRYYHNHLRS

SEQ ID NO: 746716 - protein, 478 aa, Homo sapiens
MDTSDLFASCRKGDVGRVRYLLEQRDVEVNVRDKWDSTPLYYACLCGHEELVLYLLANGARCEANTFDGERCLYGALSDPIRRALRDYKQVTASCRRRDYYDDFLQRLLEQGIHSDVVFVVHGKPFRVHRCVLGARSAYFANMLDTKWKGKSVVVLRHPLINPVAFGALLQYLYTGRLDIGVEHVSDCERLAKQCQLWDLLSDLEAKCEKVSEFVASKPGTCVKVLTIEPPPADPRLREDMALLADCALPPELRGDLWELPFPCPDGFNSCPDICFRVAGCSFLCHKAFFCGRSDYFRALLDDHFRESEEPATSGGPPAVTLHGISPDVFTHVLYYMYSDHTELSPEAAYDVLSVADMYLLPGLKRLCGRSLAQMLDEDTVVGVWRVAKLFRLARLEDQCTEYMAKVIEKLVEREDFVEAVKEEAAAVAARQETDSIPLVDDIRFHVASTVQTYSAIEEAQQRLRALEDLLVSIGLDC

SEQ ID NO: 746717 - protein, 498 aa, Homo sapiens
RAGRGGAERVYIRRVRGFAARGRSARVPSSAPWTPATCSPAAGRGMWAECGTCWSSETWRYYACLCGHEELVLYLLANGARCEANTFDGERCLYGALSDPIRRALRDYKQVTASCRRRDYYDDFLQRLLEQGIHSDVVFVVHGKPFRVHRCVLGARSAYFANMLDTKWKGKSVVVLRHPLINPVAFGALLQYLYTGRLDIGVEHVSDCERLAKQCQLWDLLSDLEAKCEKVSEFVASKPGTCVKVLTIEPPPADPRLREDMALLADCALPPELRGDLWELPFPCPDGFNSCPDICFRVAGCSFLCHKAFFCGRSDYFRALLDDHFRESEEPATSGGPPAVTLHGISPDVFTHVLYYMYSDHTELSPEAAYDVLSVADMYLLPGLKRLCGRSLAQMLDEDTVVGVWRVAKLFRLARLEDQCTEYMAKVIEKLVEREDFVEAVKEEAAAVAARQETDSIPLVDDIRFHVASTVQTYSAIEEAQQRLRALEDLLVSIGLDC

SEQ ID NO: 746718 - protein, 104 aa, Homo sapiens
RAGRGGAERVYIRRVRGFAARGRSARVPSSAPWTPATCSPAAGRGMWAECDHEPVLTQALTSFLPRYLLEQRDVEVLCLLVWARGAGTLPSGQWSPLRGQHLRW

SEQ ID NO: 746719 - protein, 206 aa, Homo sapiens
ERGGAGLSVFTSAGCAASPPEVVRLGYHPPRHGHQRPVRQLQEGGCGPSAVRTSQPGEGAGGGRPRNASGPGTGGWAAAERRAPLPGHSPRSAPAGQTTRTPAAAPQRKRAGAGTLMAIDPRRASCKKGLLSGGPKAQKWAERRRATVRPGRARTSDPPGAGRGYRPGTPDVAPFSRALWTWRGEHLEPIIGLRSLRIRKLLTQLK

SEQ ID NO: 746720 - protein, 336 aa, Homo sapiens
MLDTKWKGKSVVVLRHPLINPVAFGALLQYLYTGRLDIGVEHVSDCERLAKQCQLWDLLSDLEAKCEKVSEFVASKPGTCVKVLTIEPPPADPRLREDMALLADCALPPELRGDLWELPFPCPDGFNSCPDICFRVAGCSFLCHKAFFCGRSDYFRALLDDHFRESEEPATSGGPPAVTLHGISPDVFTHVLYYMYSDHTELSPEAAYDVLSVADMYLLPGLKRLCGRSLAQMLDEDTVVGVWRVAKLFRLARLEDQCTEYMAKVIEKLVEREDFVEAVKEEAAAVAARQETDSIPLVDDIRFHVASTVQTYSAIEEAQQRLRALEDLLVSIGLDC

SEQ ID NO: 746721 - protein, 336 aa, Homo sapiens; identical to SEQ ID NO: 746720

SEQ ID NO: 746722 - protein, 508 aa, Homo sapiens
MDTSDLFASCRKGDVGRVRYLLEQRDVEVNVRDKWDSTPLYYACLCGHEELVLYLLANGARCEANTFDGERCLYGALSDPIRRALRDYKQVTASCRRRDYYDDFLQRLLEQGIHSDVVFVVHGKPFRVHRCVLGARSAYFANMLDTKWKGKSVVVLRHPLINPVAFGALLQYLYTGRLDIGVEHVSDCERLAKQCQLWDLLSDLEAKCEKVSEFVASKPGTCVKVLTIEPPPADPRLREDMALLADCALPPELRGDLWELPFPCPDGFNSCPDICFRVAGCSFLCHKAFFCGRSDYFRALLDDHFRESEEPATSGGPPAVTLHGISPDVFTHVLYYMYSDHTEGGSGRAGDGTQPVLPWAERERQGPGGLWKGPAGPMVDVLRRLEGRLWDFGFFFQVEEALLGSRERMSDEPVSQTLHTCQPLGILSFSSRRVEGGWGQPPLCGAADPWGSGFPVSSSLAACLCLQLPQGVRKPRLQGSSRVLKVCSARVCERERECVCACAWLRAL

SEQ ID NO: 746723 - protein, 406 aa, Homo sapiens
CGESARLWPALGSECSEEWGGAVPSILPPGLSLPRLLEQGIHSDVVFVVHGKPFRVHRCVLGARSAYFANMLDTKWKGKSVVVLRHPLINPVAFGALLQYLYTGRLDIGVEHVSDCERLAKQCQLWDLLSDLEAKCEKVSEFVASKPGTCVKVLTIEPPPADPRLREDMALLADCALPPELRGDLWELPFPCPDGFNSCPDICFRVAGCSFLCHKAFFCGRSDYFRALLDDHFRESEEPATSGGPPAVTLHGISPDVFTHVLYYMYSDHTELSPEAAYDVLSVADMYLLPGLKRLCGRSLAQMLDEDTVVGVWRVAKLFRLARLEDQCTEYMAKVIEKLVEREDFVEAVKEEAAAVAARQETDSIPLVDDIRFHVASTVQTYSAIEEAQQRLRALEDLLVSIGLDC

SEQ ID NO: 746724 - protein, 508 aa, Homo sapiens; identical to SEQ ID NO: 746722

SEQ ID NO: 746725 - protein, 508 aa, Homo sapiens; identical to SEQ ID NO: 746722

SEQ ID NO: 746726 - protein, 508 aa, Homo sapiens; identical to SEQ ID NO: 746722

SEQ ID NO: 746727 - protein, 392 aa, Homo sapiens
MDTSDLFASCRKGDVGRVRYLLEQRDVEVNVRDKWDSTPLYYACLCGHEELVLYLLANGARCEANTFDGERCLYGALSDPIRRALRDYKQVTASCRRRDYYDDFLQRLLEQGIHSDVVFVVHGKPFRVHRCVLGARSAYFANMLDTKWKGKSVVVLRHPLINPVAFGALLQYLYTGRLDIGVEHVSDCERLAKQCQLWDLLSDLEAKCEKVSEFVTCSTTCTATTLSGGSGRAGDGTQPVLPWAERERQGPGGLWKGPAGPMVDVLRRLEGRLWDFGFFFQVEEALLGSRERMSDEPVSQTLHTCQPLGILSFSSRRVEGGWGQPPLCGAADPWGSGFPVSSSLAACLCLQLPQGVRKPRLQGSSRVLKVCSARVCERERECVCACAWLRAL

SEQ ID NO: 746728 - protein, 121 aa, Homo sapiens [sequence omitted]

SEQ ID NO: 746729 - protein, 121 aa, Homo sapiens [sequence omitted]

SEQ ID NO: 746730 - protein, 515 aa, Homo sapiens
MDTSDLFASCRKGDVGRVRYLLEQRDVEVNVRDKWDSTPLYYACLCGHEELVLYLLANGARCEANTFDGERCLYGALSDPIRRALRDYKQVTASCRRRDYYDDFLQRLLEQGIHSDVVFVVHGKPFRVHRCVLGARSAYFANMLDTKWKGKSVVVLRHPLINPVAFGALLQYLYTGRLDIGVEHVSDCERLAKQCQLWDLLSDLEAKCEKVSEFVASKPGTCVKVLTIEPPPADPRLREDMALLADCALPPELRGDLWELPFPCPDGFNSCPDICFRVAGCSFLCHKCLCPPVAPGPSPLPEPPSSSSGDRPWPSHFLSPASPRAFFCGRSDYFRALLDDHFRESEEPATSGGPPAVTLHGISPDVFTHVLYYMYSDHTELSPEAAYDVLSVADMYLLPGLKRLCGRSLAQMLDEDTVVGVWRVAKLFRLARLEDQCTEYMAKVIEKLVEREDFVEAVKEEAAAVAARQETDSIPLVDDIRFHVASTVQTYSAIEEAQQRLRALEDLLVSIGLDC

SEQ ID NO: 746731 - protein, 423 aa, Homo sapiens
MDTSDLFASCRKGDVGRVRYLLEQRDVEVNVRDKWDSTPLYYACLCGHEELVLYLLANGARCEANTFDGERCLYGALSDPIRRALRDYKQVTASCRRRDYYDDFLQRLLEQGIHSDVVFVVHGKPFRVHRCVLGARSAYFANMLDTKWKGKSVVVLRHPLINPVAFGALLQYLYTGRLDIGVEHVSDCERLAKQCQLWDLLSDLEAKCEKVSEFVASKPGTCVKVLTIEPPPADPRLREDMALLADCALPPELRGDLWELPFPCPDGFNSCPDICFRVAGCSFLCHKAFFCGRSDYFRALLDDHFRESEEPATSGGPPAVTLHGISPDVFTHVLYYMYSDHTELSPEAAYDVLSVADMYLLPGLKRLCGRSLAQMLDEDTVVGVWRVAKLFRLARLEDQCTEYMAKVIEKKVGQWSAVGGKEG

SEQ ID NO: 746732 - protein, 142 aa, Homo sapiens [sequence omitted]

SEQ ID NO: 746733 - protein, 220 aa, Homo sapiens
MEGQECRGSQAPTDQPRGLWGPAAVPVHRAFFCGRSDYFRALLDDHFRESEEPATSGGPPAVTLHGISPDVFTHVLYYMYSDHTELSPEAAYDVLSVADMYLLPGLKRLCGRSLAQMLDEDTVVGVWRVAKLFRLARLEDQCTEYMAKVIEKLVEREDFVEAVKEEAAAVAARQETDSIPLVDDIRFHVASTVQTYSAIEEAQQRLRALEDLLVSIGLDC

SEQ ID NO: 746734 - protein, 121 aa, Homo sapiens [sequence omitted]

SEQ ID NO: 746735 - protein, 64 aa, Homo sapiens
MALLADCALPPELRVSAGLVGRKGVLGWQAVTGSPDTWAQFLVWSWTSYFPFLNLVVHFCEQLL

SEQ ID NO: 746736 - protein, 336 aa, Homo sapiens; identical to SEQ ID NO: 746720

SEQ ID NO: 746737 - protein, 206 aa, Homo sapiens
MDTSDLFASCRKGDVGRVRYLLEQRDVEVNVRDKWDSTPLYYACLCGHEELVLYLLANGARCEANTFDGERCLYGALSDPIRRALRDYKQVTASCRRRDYYDDFLQRLLEQGIHSDVVFVVHGKPFRVHRCVLGARSAYFANMLDTKWKGKSVVVLRHPLINPVAFGALLQYLYTVTPWVQGRRRGSGPSFWTAVHLGVAGLTFHL

SEQ ID NO: 746738 - protein, 261 aa, Homo sapiens
MDTSDLFASCRKGDVGRVRYLLEQRDVEVNVRDKWDSTPLYYACLCGHEELVLYLLANGARCEANTFDGERCLYGALSDPIRRALRDYKQVTASCRRRDYYDDFLQRLLEQGIHSDVVFVVHGKPFRVHRCVLGARSAYFANMLDTKWKGKSVVVLRHPLINPVAFGALLQYLYTGRLDIGVEHVSDCERLAKQCQLWDLLSDLEAKCEKVSEFVASKPGTCVKVLTIEPPPADPRLREDMALLADCALPPELRGLFLWPQ

SEQ ID NO: 746739 - protein, 236 aa, Homo sapiens
MDTSDLFASCRKGDVGRVRYLLEQRDVEVNVRDKWDSTPLYYACLCGHEELVLYLLANGARCEANTFDGERCLYGALSDPIRRALRDYKQVTASCRRRDYYDDFLQRLLEQGIHSDVVFVVHGKPFRVHRCVLGARSAYFANMLDTKWKGKSVVVLRHPLINPVAFGALLQYLYTGRLDIGVEHVSDCERLAKQCQLWDLLSDLEAKCEKVSEFVTCSTTCTATTLSCPPRQPMMC

SEQ ID NO: 746740 - protein, 432 aa, Homo sapiens
MDTSDLFASCRKGDVGRVRYLLEQRDVEVNVRDKWDSTPLYYACLCGHEELVLYLLANGARCEANTFDGERCLYGALSDPIRRALRDYKQVTASCRRRDYYDDFLQRLLEQGIHSDVVFVVHGKPFRVHRCVLGARSAYFANMLDTKWKGKSVVVLRHPLINPVAFGALLQYLYTGRLDIGVEHVSDCERLAKQCQLWDLLSDLEAKCEKVSEFVASKPGTCVKVLTIEPPPADPRLREDMALLADCALPPELRGDLWELPFPCPDGFNSCPDICFRVAGCSFLCHKAFFCGRSDYFRALLDDHFRESEEPATSGGPPAVTLHGISPDVFTHVLYYMYSDHTELSPEAAYDVLSVADMYLLPGLKRLCGRSLAQMLDEDTVVGVWRVAKLFRLARLEDQCTEYMAKVIEKELSWRQACVCVCVQLFFLLPAH

SEQ ID NO: 746741 - protein, 460 aa, Homo sapiens
MDTSDLFASCRKGDVGRVRYLLEQRDVEVNVRDKWDSTPLYYACLCGHEELVLYLLANGARCEANTFDGERCLYGALSDPIRRALRDYKQVTASCRRRDYYDDFLQRLLEQGIHSDVVFVVHGKPFRVHRCVLGARSAYFANMLDTKWKGKSVVVLRHPLINPVAFGALLQYLYTGRLDIGVEHVSDCERLAKQCQLWDLLSDLEAKCEKVSEFVASKPGTCVKVLTIEPPPADPRLREDMALLADCALPPELRGDLWELPFPCPDGFNSCPDICFRVAGCSFLCHKCLCPPVAPGPSPLPEPPSSSSGDRPWPSHFLSPASPRAFFCGRSDYFRALLDDHFRESEEPATSGGPPAVTLHGISPDVFTHVLYYMYSDHTELSPEAAYDVLSVADMYLLPGLKRLCGRSLAQMLDEDTVVGVWRVAKLFRLARLEDQCTEYMAKVIEKKVGQWSAVGGKEG

SEQ ID NO: 746742 - protein, 217 aa, Homo sapiens
MEGSFSDGGALPEGLAEEAEPQGAAWSGDSGTVSQSHSSASGPWEDEGAEDGAPGRDLPLLRRAAAGYAACLLPGAGARPEVEALDASLEDLLTRVDEFVGMLDMLRGDSSHVVSEGVPRIHAKAAEMRRIYSRIDRLEAFVRMVGGRVARMEEQVTKAEAELGTFPRAFKKLLHTMNVPSLFSKSAPSRPQQAGYEAPVLFRTEDYFPCCSERPQL

SEQ ID NO: 746743 - protein, 217 aa, Homo sapiens; identical to SEQ ID NO: 746742

SEQ ID NO: 746744 - protein, 101 aa, Homo sapiens
QDMQKFKNEVNTLEEEFLALKKENVQLHKEVEEEMEKHRSNSTELSGTLTDGTTVGNDDDGLNQQIPRKENEEHDSLQIKQLMKRTRSKTKYILRLTLLTQ

SEQ ID NO: 746745 - protein, 369 aa, Homo sapiens
MFCVTPPELETKMNITKGGLVLFSANSNSSCMELSKKIAERLGVEMGKVQVYQEPNRETRVQIQESVRGKDVFIIQTVSKDVNTTIMELLIMVYACKTSCAKSIIGVIPYFPYSKQCKMRKRGSIVSKLLASMMCKAGLTHLITMDLHQKEIQGFFNIPVDNLRASPFLLQYIQEEIPDYRNAVIVAKSPASAKRAQSFAERLRLGIAVIHGEAQDAESDLVDGRHSPPMVRSVAAIHPSLEIPMLIPKEKPPITVVGDVGGRIAIIVDDIIDDVDSFLAAAETLKERGAYKIFVMATHGLLSSDAPRRIEESAIDEVVVTNTIPHEVQKLQCPKIKTVDISMILSEAIRRIHNGESMSYLFRNIGLDD

SEQ ID NO: 746746 - protein, 369 aa, Homo sapiens; identical to SEQ ID NO: 746745

SEQ ID NO: 746747 - protein, 369 aa, Homo sapiens; identical to SEQ ID NO: 746745

SEQ ID NO: 746748 - protein, 369 aa, Homo sapiens; identical to SEQ ID NO: 746745

SEQ ID NO: 746749 - protein, 369 aa, Homo sapiens; identical to SEQ ID NO: 746745

SEQ ID NO: 746750 - protein, 283 aa, Homo sapiens
MELLIMVYACKTSCAKSIIGVIPYFPYSKQCKMRKRGSIVSKLLASMMCKAGLTHLITMDLHQKEIQGFFNIPVDNLRASPFLLQYIQEEIPDYRNAVIVAKSPASAKRAQSFAERLRLGIAVIHGEAQDAESDLVDGRHSPPMVRSVAAIHPSLEIPMLIPKEKPPITVVGDVGGRIAIIVDDIIDDVDSFLAAAETLKERGAYKIFVMATHGLLSSDAPRRIEESAIDEVVVTNTIPHEVQKLQCPKIKTVDISMILSEAIRRIHNGESMSYLFRNIGLDD

SEQ ID NO: 746751 - protein, 283 aa, Homo sapiens; identical to SEQ ID NO: 746750

SEQ ID NO: 746752 - protein, 283 aa, Homo sapiens; identical to SEQ ID NO: 746750

SEQ ID NO: 746753 - protein, 140 aa, Homo sapiens
MVRSVAAIHPSLEIPMLIPKEKPPITVVGDVGGRIAIIVDDIIDDVDSFLAAAETLKERGAYKIFVMATHGLLSSDAPRRIEESAIDEVVVTNTIPHEVQKLQCPKIKTVDISMILSEAIRRIHNGESMSYLFRNIGLDD

SEQ ID NO: 746754 - protein, 351 aa, Homo sapiens
MFCVTPPELETKMNITKGGLVLFSANSNSSCMELSKKIAERLGVEMGKVQVYQEPNRETRVQIQESVRGKDVFIIQTVSKDVNTTIMELLIMVYACKTSCAKSIIGVIPYFPYSKQCKMRKRGSIVSKLLASMMCKAGLTHLITMDLHQKEIQGFFNIPVDNLRASPFLLQYIQEEIPDYRNAVIVAKSPASAKRAQSFAERLRLGIAVIHGEAQDAESDLVDGRHSPPMVRSVAAIHPSLEIPMLIPKEKPPITVVGDVGGRIAIIVDDIIDDVDSFLAAAETLKERGAYKIFVMATHGLLSSDAPRRIEESAIDEVVVTNTIPHEVQKLQCPKIKTVDISMIRNIGLDD

SEQ ID NO: 746755 - protein, 156 aa, Homo sapiens
MGHGDGDMGPCRLHKAKWKSRFFTVNVGRPFFFPGCLTYYCRSAHIHSFPSVLWQDDIIDDVDSFLAAAETLKERGAYKIFVMATHGLLSSDAPRRIEESAIDEVVVTNTIPHEVQKLQCPKIKTVDISMILSEAIRRIHNGESMSYLFRNIGLDD

SEQ ID NO: 746756 - protein, 369 aa, Homo sapiens; identical to SEQ ID NO: 746745

SEQ ID NO: 746757 - protein, 369 aa, Homo sapiens; identical to SEQ ID NO: 746745

SEQ ID NO: 746758 - protein, 283 aa, Homo sapiens; identical to SEQ ID NO: 746750

SEQ ID NO: 746759 - protein, 382 aa, Homo sapiens
MTGSENWKTKKVLMFCVTPPELETKMNITKGGLVLFSANSNSSCMELSKKIAERLGVEMGKVQVYQEPNRETRVQIQESVRGKDVFIIQTVSKDVNTTIMELLIMVYACKTSCAKSIIGVIPYFPYSKQCKMRKRGSIVSKLLASMMCKAGLTHLITMDLHQKEIQGFFNIPVDNLRASPFLLQYIQEEIPDYRNAVIVAKSPASAKRAQSFAERLRLGIAVIHGEAQDAESDLVDGRHSPPMVRSVAAIHPSLEIPMLIPKEKPPITVVGDVGGRIAIIVDDIIDDVDSFLAAAETLKERGAYKIFVMATHGLLSSDAPRRIEESAIDEVVVTNTIPHEVQKLQCPKIKTVDISMILSEAIRRIHNGESMSYLFRNIGLDD

SEQ ID NO: 746760 - protein, 355 aa, Homo sapiens
MPAQKGREPSRGTAEEESILMRKQAQRVEMTCPRLQASGGLNPETRVQIQESVRGKDVFIIQTVSKDVNTTIMELLIMVYACKTSCAKSIIGVIPYFPYSKQCKMRKRGSIVSKLLASMMCKAGLTHLITMDLHQKEIQGFFNIPVDNLRASPFLLQYIQEEIPDYRNAVIVAKSPASAKRAQSFAERLRLGIAVIHGEAQDAESDLVDGRHSPPMVRSVAAIHPSLEIPMLIPKEKPPITVVGDVGGRIAIIVDDIIDDVDSFLAAAETLKERGAYKIFVMATHGLLSSDAPRRIEESAIDEVVVTNTIPHEVQKLQCPKIKTVDISMILSEAIRRIHNGESMSYLFRNIGLDD

SEQ ID NO: 746761 - protein, 140 aa, Homo sapiens; identical to SEQ ID NO: 746753

SEQ ID NO: 746762 - protein, 76 aa, Homo sapiens
QDMQKFKNEVNTLEEEFLALKKENVQLHKEVEEEMEKHRSNSTELSGTLTDGTTVGNDDDGLNQQIPRKENEEHDR

SEQ ID NO: 746763 - protein, 399 aa, Homo sapiens
MNTRNRVVNSGLGASPASRPTRDPQDPSGRQGELSPVEDQREGLEAAPKGPSRESVVHAGQRRTSAYTLIAPNINRRNEIQRIAEQELANLEKWKEQNRAKPVHLVPRRLGGSQSETEVRQKQQLQLMQSKYKQKLKREESVRIKKEAEEAELQKMKAIQREKSNKLEEKKRLQENLRREAFREHQQYKTAEFLSKLNTESPDRSACQSAVCGPQSSTWARSWAYRDSLKAEENRKLQKMKDEQHQKSELLELKRQQQEQERAKIHQTEHRRVNNAFLDRLQGKSQPGGLEQSGGCWNMNSGNSWGSLLVFSRHLRVYEKILTPIWPSSTDLEKPHEMLFLNVILFSLTVFTLISTAHTLDRAVRSDWLLLVLIYACLEELIPELIFNLYCQGNATLFF

SEQ ID NO: 746764 - protein, 162 aa, Homo sapiens
ENHLNEKQEQRSMGDLFPSNKLEEKKRLQENLRREAFREHQQYKTAEFLSKLNTESPDRSACQSAVCGPQSSTWARSWAYRDSLKAEENRKLQKMKDEQHQKSELLELKRQQQEQERAKIHQTEHRRVNNAFLDRLQGKSQPGGLEQSGGCWNMNSGNSWGI

SEQ ID NO: 746765 - protein, 307 aa, Homo sapiens
MNTRNRVVNSGLGASPASRPTRDPQDPSGRQGELSPVEDQREGLEAAPKGPSRESVVHAGQRRTSAYTLIAPNINRRNEIQRIAEQELANLEKWKEQNRAKPVHLVPRRLGGSQSETEVRQKQQLQLMQSKYKQKLKREESVRIKKEAEEAELQKMKAIQREKSNKLEEKKRLQENLRREAFREHQQYKTAEFLSKLNTESPDRSACQSAVCGPQSSTWARSWAYRDSLKAEENRKLQKMKDEQHQKSELLELKRQQQEQERAKIHQTEHRRVNNAFLDRLQGKSQPGGLEQSGGCWNMNSGNSWGI

SEQ ID NO: 746766 - protein, 272 aa, Homo sapiens
MNTRNRVVNSGLGASPASRPTRDPQDPSGRQGELSPVEDQREGLEAAPKGPSRESVVHAGQRREEQAYVPARLADKLASYNQRSGAERVRSTSAYTLIAPNINRRNEIQRIAEQELANLEKWKEQNRAKPVHLVPRRLGGSQSETEVRQKQQLQLMQSKYKQKLKREESVRIKKEAEEAELQKMKAIQREKSNKLEEKKRLQENLRREAFREHQQYKTAEFLSKLNTESPDRSACQSAVCGPQSSTWKLPILPRDHSVPKKLGYRAFSKGRR

SEQ ID NO: 746767 - protein, 318 aa, Homo sapiens
MNTRNRVVNSGLGASPASRPTRDPQDPSGRQGELSPVEDQREGLEAAPKGPSRESVVHAGQRRTSAYTLIAPNINRRNEIQRIAEQELANLEKWKEQNRAKPVHLVPRRLGGSQSETEVRQKQQLQLMQSKYKQKLKREESVRIKKEAEEAELQKMKAIQREKSNKLEEKKRLQENLRREAFREHQQYKTAEFLSKLNTESPDRSACQSAVCGPQSSTWKLPILPRDHSWARSWAYRDSLKAEENRKLQKMKDEQHQKSELLELKRQQQEQERAKIHQTEHRRVNNAFLDRLQGKSQPGGLEQSGGCWNMNSGNSWGI

SEQ ID NO: 746768 - protein, 169 aa, Homo sapiens
MNTRNRVVNSGLGASPASRPTRDPQDPSGRQGELSPVEDQREGLEAAPKGPSRESVVHAGQRRTSAYTLIAPNINRRNEIQRIAEQELANLEKWKEQNRAKPVHLVPRRLGGSQSETEVRQKQQLQLMQSKYKQKLKREESVRIKKEAEEAELQKMKPNTACSRLISGS

SEQ ID NO: 746769 - protein, 222 aa, Homo sapiens
MVKCCSAIGCASRCLPNSKLKGLTFHVFPTDENIKRKWVLAMKRLDVNAAGIWEPKKGDVLCSRHFKKTDFDRSAPNIKLKPGVIPSIFDSPYHLQGKREKLHCRKNFTLKTVPATNYNHHLVGASSCIEEFQSQFIFEHSYSVMDSPKKLKHKLDHVIGELEDTKESLRNVLDREKRFQKSLRKTIRELKDECLISQETANRLDTFCWDCCQESIEQDYIS

SEQ ID NO: 746770 - protein, 222 aa, Homo sapiens; identical to SEQ ID NO: 746769

SEQ ID NO: 746771 - protein, 222 aa, Homo sapiens; identical to SEQ ID NO: 746769

SEQ ID NO: 746772 - protein, 181 aa, Homo sapiens
MKRLDVNAAGIWEPKKGDVLCSRHFKKTDFDRSAPNIKLKPGVIPSIFDSPYHLQGKREKLHCRKNFTLKTVPATNYNHHLVGASSCIEEFQSQFIFEHSYSVMDSPKKLKHKLDHVIGELEDTKESLRNVLDREKRFQKSLRKTIRELKDECLISQETANRLDTFCWDCCQESIEQDYIS

SEQ ID NO: 746773 - protein, 222 aa, Homo sapiens; identical to SEQ ID NO: 746769

SEQ ID NO: 746774 - protein, 83 aa, Homo sapiens
GGGVGGEAAPGSGGPAPTGYERAGEAGPAAPAPPAHGPPGSRFRGRRRGVGAGQGRGLRRSRLSCWVGVGPSAWGLRQCPTPR

SEQ ID NO: 746775 - protein, 117 aa, Homo sapiens
MKFQYKEVHPFEYRKKEGEKIRKKYPDRVPLIVEKAPKARVPDLDRRKYLVPSDLTDGQFYLLIRKRIHLRPEDALFFFVNNTIPPTSATMGQLYEDSHEEDDFLYVAYSNESVYGK

SEQ ID NO: 746776 - protein, 460 aa, Homo sapiens
MNTSAPPAVSPNITVLAPGKGPWQVAFIGITTGLLSLATVTGNLLVLISFKVNTELKTVNNYFLLSLACADLIIGTFSMNLYTTYLLMGHWALGTLACDLWLALDYVASNASVMNLLLISFDRYFSVTRPLSYRAKRTPRRAALMIGLAWLVSFVLWAPAILFWQYLVGERTVLAGQCYIQFLSQPIITFGTAMAAFYLPVTVMCTLYWRIYRETENRARELAALQGSETPGKGGGSSSSSERSQPGAEGSPETPPGRCCRCCRAPRLLQAYSWKEEEEEDEGSMESLTSSEGEEPGSEVVIKMPMVDPEAQAPTKQPPRSSPNTVKRPTKKGRDRAGKGQKPRGKEQLAKRKTFSLVKEKKAARTLSAILLAFILTWTPYNIMVLVSTFCKDCVPETLWELGYWLCYVNSTINPMCYALCNKAFRDTFRLLLLCRWDKRRWRKIPKRPGSVHRTPSRQC

SEQ ID NO: 746777 - protein, 101 aa, Homo sapiens
GLVVVISTLQGLEIFPRTCPTYSKTSTNQPAPYLLFCRRCRPLPVNSVDLVSQVRTATQWALEENARTQCVLSFRNFSVWPGVVAHACNPSTLGGQGRGIT

SEQ ID NO: 746778 - protein, 316 aa, Homo sapiens
LLLFYTEKGNDVGSVYKKYPQGRGLRRTSSSIDLPRKDTVCSSQEWVAKYGLKKLKLEISRCMGPNCTHQKSGQRSASAKHCSIFPSVEIHGVVRHIQWTPREMEVYIRHLEKVLRRYVQRLQWLLSGSRRLFGTVLESKVCILLDTSGSMGPYLQQVKTELVLLIWEQLRKCCDSFNLLSFAESLQSWQDTLVETTDAACHEAMQWVTHLQAQGSTSILQALLKAFSFHDLEGLYLLTDGKPDTSCSLVLNEVQKLREKRDVKVHTISLNCSDRAAVEFLRKLASFTGGRYHCPVGEDTLSKIHSLLTKGFINEK

SEQ ID NO: 746779 - protein, 625 aa, Homo sapiens
RTRTRDGGGKMAESGGSSGGAGGGGAFGAGPGPERPNSTADKNGALKCTFSAPSHSTSLLQGLATLRAQGQLLDVVLTINREAFPAHKVVLAACSDYFRAMFTGGMREASQDVIELKGVSARGLRHIIDFAYSAEVTLDLDCVQDVLGAAVFLQMLPVVELCEEFLKAAMSVETCLNIGQMATTFSLASLRESVDAFTFRHFLQIAEEEDFLRLPLERLVFFLQSNRLQSCAEIDLFRAAVRWLQHDPARRPRASHVLCHIRFPLMQSSELVDSVQTLDIMVEDVLCRQYLLEAFNYQVLPFRQHEMQSPRTAVRSDVPSLVTFGGTPYTDSDRSVSSKVYQLPEPGARHFRELTEMEVGCSHTCVAVLDNFVYVAGGQHLQYRSGEGAVDACYRYDPHLNRWLRLQAMQESRIQFQLNVLCGMVYATGGRNRAGSLASVERYCPRRNEWGYACSLKRRTWGHAGAASGGRLYISGGYGISVEDKKALHCYDPVADQWEFKAPMSEPRVLHAMVGAGGRIYALGGRMDHVDRCFDVLAVEYYVPETDQWTSVSPMRAGQSEAGCCLLERKIYIVGGYNWRLNNVTGIVQVYNTDTDEWERDLHFPESFAGIACAPVLLPRAGTRR

SEQ ID NO: 746780 - protein, 625 aa, Homo sapiens; identical to SEQ ID NO: 746779

SEQ ID NO: 746781 - protein, 975 aa, Homo sapiens
MDLNSASTVVLQVLTQATSQDTAVLKPAEEQLKQWETQPGFYSVLLNIFTNHTLDINVRWLAVLYFKHGIDRYWRRVAPHALSEEEKTTLRAGLITNFNEPINQIATQIAVLIAKVARLDCPRQWPELIPTLIESVKVQDDLRQHRALLTFYHVTKTLASKRLAADRKLFYDLASGIYNFACSLWNHHTDTFLQEVSSGNEAAILSSLERTLLSLKVLRKLTVNGFVEPHKNMEVMGFLHGIFERLKQFLECSRSIGTDNVCRDRLEKTIILFTKVLLDFLDQHPFSFTPLIQRSLEFSVSYVFTEVGEGVTFERFIVQCMNLIKMIVKNYAYKPSKNFEDSSPETLEAHKIKMAFFTYPTLTEICRRLVSHYFLLTEEELTMWEEDPEGFTVEETGGDSWKYSLRPCTEVLFIDIFHEYNQTLTPVLLEMMQTLQGPTNVEDMNALLIKDAVYNAVGLAAYELFDSVDFDQWFKNQLLPELQVIHNRYKPLRRRVIWLIGQWISVKFKSDLRPMLYEAICNLLQDQDLVVRIETATTLKLTVDDFEFRTDQFLPYLETMFTLLFQLLQQVTECDTKMHVLHVLSCVIERVNMQIRPYVGCLVQYLPLLWKQSEEHNMLRCAILTTLIHLVQGLGADSKNLYPFLLPVIQLSTDVSQPPHVYLLEDGLELWLVTLENSPCITPELLRIFQNMSPLLELSSENLRTCFKIINGYIFLSSTEFLQTYAVGLCQSFCELLKEITTEGQVQVLKVVENALKVNPILGPQMFQPILPYVFKGIIEGERYPVVMSTYLGVMGRVLLQNTSFFSSLLNEMAHKFNQEMDQLLGNMIEMWVDRMDNITQPERRKLSALALLSLLPSDNSVIQDKFCGIINISVEGLHDVMTEDPETGTYKDCMLMSHLEEPKVTEDEEPPTEQDKRKKMLALKDPVHTVSLQQFIYEKLKAQQEMLGEQGFQSLMETVDTEIVTQLQEFLQGF

SEQ ID NO: 746782 - protein, 232 aa, Homo sapiens [sequence omitted]

SEQ ID NO: 746783 - protein, 196 aa, Homo sapiens
MCGLQFSLPCLRLFLVVTCYLLLLLHKEILGCSSVCQLCTGRQINCRNLGLSSIPKNFPESTVFLYLTGNNISYINESELTGLHSLVALYLDNSNILYVYPKAFVQLRHLYFLFLNNNFIKRLDPGIFKGLLNLRNLYLQYNQVSFVPRGVFNDLVSVQYLNLQRNRLTVLGSGTFVGMVALRILDLSNNNILRIS

SEQ ID NO: 746784 - protein, 975 aa, Homo sapiens; identical to SEQ ID NO: 746781

SEQ ID NO: 746785 - protein, 951 aa, Homo sapiens
MDLNSASTVVLQVLTQATSQDTAVLKPAEEQLKQWETQPGFYSVLLNIFTNHTLDINVRWLAVLYFKHGIDRYWRRVAPHALSEEEKTTLRAGLITNFNEPINQIATQIAVLIAKVARLDCPRQWPELIPTLIESVKVQDDLRQHRALLTFYHVTKTLASKRLAADRKLFYDLASGIYNFACSLWNHHTDTFLQEVSSGNEAAILSSLERTLLSLKVLRKLTVNGFVEPHKNMEVMGFLHGIFERLKQFLECTLDFLDQHPFSFTPLIQRSLEFSVSYVFTEVGEGVTFERFIVQCMNLIKMIVKNYAYKPSKNFEDSSPETLEAHKIKMAFFTYPTLTEICRRLVSHYFLLTEEELTMWEEDPEGFTVEETGGDSWKYSLRPCTEVLFIDIFHEYNQTLTPVLLEMMQTLQGPTNVEDMNALLIKDAVYNAVGLAAYELFDSVDFDQWFKNQLLPELQVIHNRYKPLRRRVIWLIGQWISVKFKSDLRPMLYEAICNLLQDQDLVVRIETATTLKLTVDDFEFRTDQFLPYLETMFTLLFQLLQQVTECDTKMHVLHVLSCVIERVNMQIRPYVGCLVQYLPLLWKQSEEHNMLRCAILTTLIHLVQGLGADSKNLYPFLLPVIQLSTDVSQPPHVYLLEDGLELWLVTLENSPCITPELLRIFQNMSPLLELSSENLRTCFKIINGYIFLSSTEFLQTYAVGLCQSFCELLKEITTEGQVQVLKVVENALKVNPILGPQMFQPILPYVFKGIIEGERYPVVMSTYLGVMGRVLLQNTSFFSSLLNEMAHKFNQEMDQLLGNMIEMWVDRMDNITQPERRKLSALALLSLLPSDNSVIQDKFCGIINISVEGLHDVMTEDPETGTYKDCMLMSHLEEPKVTEDEEPPTEQDKRKKMLALKDPVHTVSLQQFIYEKLKAQQEMLGEQGFQSLMETVDTEIVTQLQEFLQGF

SEQ ID NO: 746786 - protein, 975 aa, Homo sapiens; identical to SEQ ID NO: 746781

SEQ ID NO: 746787 - protein, 284 aa, Homo sapiens [sequence omitted]

SEQ ID NO: 746788 - protein, 106 aa, Homo sapiens
MTTADGWTTFRRQDAGERKCQAVGSTLQTSPDTNHHHPNTEGSMDKGQLVLGPKHQLQLLDPGKRGRAPVTAPWAPLLFHSQGHPPSSWCPIPRQTGPPLAEDLQS

SEQ ID NO: 746789 - protein, 386 aa, Homo sapiens
TRKRLAGQCGREKSRADRLGAPVLAHPKMAERQEEQRGSPPLRAEGKADAEVKLILYHWTHSFSSQKVRLVIAEKALKCEEHDVSLPLSEHNEPWFMRLNSTGEVPVLIHGENIICEATQIIDYLEQTFLDERTPRLMPDKESMYYPRVQHYRELLDSLPMDAYTHGCILHPELTVDSMIPAYATTRIRSQIGNTESELKKLAEENPDLQEAYIAKQKRLKSKLLDHDNVKYLKKILDELEKVLDQVETELQRRNEETPEEGQQPWLCGESFTLADVSLAVTLHRLKFLGFARRNWGNGKRPNLETYYERVLKRKTFNKVLGHVNNILISAVLPTAFRVAKKRAPKVLGTTLVVGLLAGVGYFAFMLFRKRLGSMILAFRPRPNYF

SEQ ID NO: 746790 - protein, 386 aa, Homo sapiens; identical to SEQ ID NO: 746789

SEQ ID NO: 746791 - protein, 249 aa, Homo sapiens
MPDKESMYYPRVQHYRELLDSLPMDAYTHGCILHPELTVDSMIPAYATTRIRSQIGNTESELKKLAEENPDLQEAYIAKQKRLKSKLLDHDNVKYLKKILDELEKVLDQVETELQRRNEETPEEGQQPWLCGESFTLADVSLAVTLHRLKFLGFARRNWGNGKRPNLETYYERVLKRKTFNKVLGHVNNILISAVLPTAFRVAKKRAPKVLGTTLVVGLLAGVGYFAFMLFRKRLGSMILAFRPRPNYF

SEQ ID NO: 746792 - protein, 290 aa, Homo sapiens
MRLNSTGEVPVLIHGENIICEATQIIDYLEQTFLDERTPRLMPDKESMYYPRVQHYRELLDSLPMDAYTHGCILHPELTVDSMIPAYATTRIRSQIGNTESELKKLAEENPDLQEAYIAKQKRLKSKLLDHDNVKYLKKILDELEKVLDQVETELQRRNEETPEEGQQPWLCGESFTLADVSLAVTLHRLKFLGFARRNWGNGKRPNLETYYERVLKRKTFNKVLGHVNNILISAVLPTAFRVAKKRAPKVLGTTLVVGLLAGVGYFAFMLFRKRLGSMILAFRPRPNYF

SEQ ID NO: 746793 - protein, 249 aa, Homo sapiens; identical to SEQ ID NO: 746791

SEQ ID NO: 746794 - protein, 373 aa, Homo sapiens
TPKGIGLGRRARERSQKKGKPRPFEGKRGKGRPRRVKVNSVTNLERISFQLSKRVRLVIAEKALKCEEHDVSLPLSEHNEPWFMRLNSTGEVPVLIHGENIICEATQIIDYLEQTFLDERTPRLMPDKESMYYPRVQHYRELLDSLPMDAYTHGCILHPELTVDSMIPAYATTRIRSQIGNTESELKKLAEENPDLQEAYIAKQKRLKSKLLDHDNVKYLKKILDELEKVLDQVETELQRRNEETPEEGQQPWLCGESFTLADVSLAVTLHRLKFLGFARRNWGNGKRPNLETYYERVLKRKTFNKVLGHVNNILISAVLPTAFRVAKKRAPKVLGTTLVVGLLAGVGYFAFMLFRKRLGSMILAFRPRPNYF

SEQ ID NO: 746795 - protein, 249 aa, Homo sapiens; identical to SEQ ID NO: 746791

SEQ ID NO: 746796 - protein, 386 aa, Homo sapiens; identical to SEQ ID NO: 746789

SEQ ID NO: 746797 - protein, 1062 aa, Homo sapiens
REPRRAGRWGRGCTYESRDARVQSEGGGMASVFMCGVEDLLFSGSRFVWNLTVSTLRRWYTERLRACHQVLRTWCGLQDVYQMTEGRHCQVHLLDDRRLELLVQPKLLARELLDLVASHFNLKEKEYFGITFIDDTGQQNWLQLDHRVLDHDLPKKPGPTILHFAVRFYIESISFLKDKTTVELFFLNAKACVHKGQIEVESETIFKLAAFILQEAKGDYTSDENARKDLKTLPAFPTKTLQEHPSLAYCEDRVIEHYLKIKGLTRGQAVVQYMKIVEALPTYGVHYYAVKDKQGLPWWLGISYKGIGQYDIQDKVKPRKLFQWKQLENLYFREKKFAVEVHDPRRISVSRRTFGQSGLFVQTWYANSSLIKSIWVMAISQHQFYLDRKQSKAKIPSARSLDEIAMDLTETGTQRASKLVTLEAKSQFIMASNGSLISSGSQDSEVSEEQKREKILELKKKEKLLQEKLLKKVEELKKICLREAELTGKMPKEYPLNIGEKPPQVRRRVGTAFKLDDNLLPSEEDPALQELESNFLIQQKLVEAAKKLANEPDLCKTVKKKRKQDYTDAMKKLQEIENAINEYRIRCGKKPSQKATVLPEDIIPSESSSLSDTTTYDDPSDAFTFPGQRSSSVPHSPRILPPKSLGIERIHFRKSSINEQFVDTRQSREMLSTHSSPYKTLERRPQGGRSMPTTPVLTRNAYSSSHLEPESSSQHCRQRSGSLESQSHLLSEMDSDKPFFSLSKSQRSSSTEILDDGSSYTSQSSTEYYCVTPVTGPYYTTQTLDTRTRGRRRSKKQNVSTSNSGSMPNLAQKDSLRNGVYSKSQEPPSSSYYIAGYTPYAECDFYYSGGYVYENDTEGQYSVNPSYRSSAHYGYERQRDYSRSFHEDEVDRVPHNPYATLRLPRKAAAKSEHITKNIHKALVAEHLRGWYQRASGQKDQGHSPQTSFDSDRGSQRCLGFAGLQVPCSPSSRASLYSSVSSTNASGNWRTQLTIGLSDYETPAHSSYTSCYGNVYNPLPSPSRQYTEISQLDGTDGNQLEDNLESSEQRLFWHEDSKPGTLV

SEQ ID NO: 746798 - protein, 283 aa, Homo sapiens
TLRTDSYQLGSNTGQLETEMTEGRHCQVHLLDDRRLELLVQPKLLARELLDLVASHFNLKEKEYFGITFIDDTGQQNWLQLDHRVLDHDLPKKPGPTILHFAVRFYIESISFLKDKTTVELFFLNAKACVHKGQIEVESETIFKLAAFILQEAKGDYTSDENARKDLKTLPAFPTKTLQEHPSLAYCEDRVIEHYLKIKGLTRGQAVVQYMKIVEALPTYGVHYYAVKDKQGLPWWLGISYKGIGQYDIQDKVKPRKLFQWKRLENLYFREKKFAVEVHDPRR

SEQ ID NO: 746799 - protein, 171 aa, Homo sapiens
REPRRAGRWGRGCTYESRDARVQSEGGGMASVFMCGVEDLLFSGSRFVWNLTVSTLRRWYTERLRACHQVLRTWCGLQDVYQISTSAKAFWIISHSSTFASPTPVWSPHKIRSHHVVQTGLELLASSNLPTSASQSPGIYRHEPPHLASPPFYFLPWLSQPGIREGGGPQW

SEQ ID NO: 746800 - protein, 989 aa, Homo sapiens
MSRGHGGSEMTEGRHCQVHLLDDRRLELLVQPKLLARELLDLVASHFNLKEKEYFGITFIDDTGQQNWLQLDHRVLDHDLPKKPGPTILHFAVRFYIESISFLKDKTTVELFFLNAKACVHKGQIEVESETIFKLAAFILQEAKGDYTSDENARKDLKTLPAFPTKTLQEHPSLAYCEDRVIEHYLKIKGLTRGQAVVQYMKIVEALPTYGVHYYAVKDKQGLPWWLGISYKGIGQYDIQDKVKPRKLFQWKQLENLYFREKKFAVEVHDPRRISVSRRTFGQSGLFVQTWYANSSLIKSIWVMAISQHQFYLDRKQSKAKIPSARSLDEIAMDLTETGTQRASKLVTLEAKSQFIMASNGSLISSGSQDSEVSEEQKREKILELKKKEKLLQEKLLKKVEELKKICLREAELTGKMPKEYPLNIGEKPPQVRRRVGTAFKLDDNLLPSEEDPALQELESNFLIQQKLVEAAKKLANEPDLCKTVKKKRKQDYTDAMKKLQEIENAINEYRIRCGKKPSQKATVLPEDIIPSESSSLSDTTTYDDPSDAFTFPGQRSSSVPHSPRILPPKSLGIERIHFRKSSINEQFVDTRQSREMLSTHSSPYKTLERRPQGGRSMPTTPVLTRNAYSSSHLEPESSSQHCRQRSGSLESQSHLLSEMDSDKPFFSLSKSQRSSSTEILDDGSSYTSQSSTEYYCVTPVTGPYYTTQTLDTRTRGRRRSKKQNVSTSNSGSMPNLAQKDSLRNGVYSKSQEPPSSSYYIAGYTPYAECDFYYSGGYVYENDTEGQYSVNPSYRSSAHYGYERQRDYSRSFHEDEVDRVPHNPYATLRLPRKAAAKSEHITKNIHKALVAEHLRGWYQRASGQKDQGHSPQTSFDSDRGSQRCLGFAGLQVPCSPSSRASLYSSVSSTNASGNWRTQLTIGLSDYETPAHSSYTSCYGNVYNPLPSPSRQYTEISQLDGTDGNQLEDNLESSEQRLFWHEDSKPGTLV

SEQ ID NO: 746801 - protein, 127 aa, Homo sapiens
MGREKKCLPTTNSLNPNTPSLNSVFTSNLYNQDSIPQTTVPWKITATSAENRVTFRVRFDSDAGSHVRQGFRTVASAHLAGCWLHHTLPSTNSPKNRWIRKPTAPGSELWASPKPDNICVPCSCFRT

SEQ ID NO: 746802 - protein, 848 aa, Homo sapiens
GKTVQMGQELQGEVVIIITDQYGNQIQAFSPSSLSSLSIAGVGLDSSNLKTTFQENTQSISVRGIKFIPGPPGNKDLCFTWREFSDFIRVQLISGPPAKLLLIDWPELKESIPVINGRDLQNPIIVQLCDQWDNPAPVQHVKISLTKASNLKLMPSNQQHKTDEKGRANLGVFSVFAPRGEHTLQVKAIYNKSIIEGPIIKLMILPDPEKPVRLNVKYDKDASFLAGGLFTDFMISVISEDDSIIKNINPARISMKMWKLSTSGNRPPANAETFSCNKIKDNDKEDGCFYFRDKVIPNKVGTYCIQFGFMMDKTNILNSEQVIVEVLPNQPVKLVPKIKPPTPAVSNVRSVASRTLVRDLHLSITDDYDNHTGIDLVGTIIATIKGSNEEDTDTPLFIGKVRTLEFPFVNGSAEIMSLVLAESSPGRDSTEYFIVFEPRLPLLSRTLEPYILPFMFYNDVKKQQQMAALTKEKDQLSQSIVMYKSLFEASQQLLNEMKCQVEEARLKEAQLRNELKIHNIDIPTTQQVPHIEALLKRKLSEQEELKKKPRRSCTLPNYTKGSGDVLGKIAHLAQIEDDRAAMVISWHLASDMDCVVTLTTDAARRIYDETQGRQQVLPLDSIYKKTLPDWKRSLPHFRNGKLYFKPIGDPVFARDLLTFPDNVEHCETVFGMLLGDTIILDNLDAANHYRKEVVKITHCPTLLTRDGDRIRSNGKFGGLQNKAPPMDKLRGMVFGAPVPKQCLILGEQIDLLQQYRSAVCKLDSVNKDLNSQLEYLRTPDMRKKKQELDEHEKNLKLIEEKLGMTPIRKCNDSLRHSPKVETTDCPVPPKRMRREATRQNRIITKTDV

SEQ ID NO: 746803 - protein, 848 aa, Homo sapiens; identical to SEQ ID NO: 746802

SEQ ID NO: 746804 - protein, 186 aa, Homo sapiens
HLLTFLVFGMLLGDTIILDNLDAANHYRKEVVKITHCPTLLTRDGDRIRSNGKFGGLQNKAPPMDKLRGMVFGAPVPKQCLILGEQIDLLQQYRSAVCKLDSVNKDLNSQLEYLRTPDMRKKKQELDEHEKNLKLIEEKLGMTPIRKCNDSLRHSPKVETTDCPVPPKRMRREATRQNRIITKTDV

SEQ ID NO: 746805 - protein, 848 aa, Homo sapiens; identical to SEQ ID NO: 746802

SEQ ID NO: 746806 - protein, 539 aa, Homo sapiens
MMDKTNILNSEQVIVEVLPNQPVKLVPKIKPPTPAVSNVRSVASRTLVRDLHLSITDDYDNHTGIDLVGTIIATIKGSNEEDTDTPLFIGKVRTLEFPFVNGSAEIMSLVLAESSPGRDSTEYFIVFEPRLPLLSRTLEPYILPFMFYNDVKKQQQMAALTKEKDQLSQSIVMYKSLFEASQQLLNEMKCQVEEARLKEAQLRNELKIHNIDIPTTQQVPHIEALLKRKLSEQEELKKKPRRSCTLPNYTKGSGDVLGKIAHLAQIEDDRAAMVISWHLASDMDCVVTLTTDAARRIYDETQGRQQVLPLDSIYKKTLPDWKRSLPHFRNGKLYFKPIGDPVFARDLLTFPDNVEHCETVFGMLLGDTIILDNLDAANHYRKEVVKITHCPTLLTRDGDRIRSNGKFGGLQNKAPPMDKLRGMVFGAPVPKQCLILGEQIDLLQQYRSAVCKLDSVNKDLNSQLEYLRTPDMRKKKQELDEHEKNLKLIEEKLGMTPIRKCNDSLRHSPKVETTDCPVPPKRMRREATRQNRIITKTDV

SEQ ID NO: 746807 - protein, 848 aa, Homo sapiens; identical to SEQ ID NO: 746802

SEQ ID NO: 746808 - protein, 300 aa, Homo sapiens
GKTVQMGQELQGEVVIIITDQYGNQIQAFSPSSLSSLSIAGVGLDSSNLKTTFQENTQSISVRGIKFIPGPPGNKDLCFTWREFSDFIRVQLISGPPAKLLLIDWPELKESIPVINGRDLQNPIIVQLCDQWDNPAPVQHVKISLTKASNLKLMPSNQQHKTDEKGRANLGVFSVFAPRGEHTLQVKAIYNKSIIEGPIIKLMILPDPEKPVRLNVKYDKDASFLAGGLFTDFMISVISEDDSIIKNINPARISMKMWKLSTSGNRPPANAETFSCNKIKDNDKEDGCFYFRYFSKHFIF

SEQ ID NO: 746809 - protein, 235 aa, Homo sapiens
DNWHKGRKAGGKRRPCHKKRKYELGRPAANSKTDPCRIHTVRVRGGNKKYCAPRLDVGNFSWGSRVIVAPVITKRSSECGSYQLRSTTETQHVCRHREHPWLTAIASQSRPSEAGSTQYAHECVARFPHYCRLAPWGPYSKGSMKLDLRCRNDRGCFENQKEGCLKKNFTRETIEVNRDKRNAKMSSLLGEQFQQGKLLACIASRPGQCGRADGYVLEGKELEFYLRKIKAQKGK

SEQ ID NO: 746810 - protein, 844 aa, Homo sapiens
MAACEGRRSGALGSSQSDFLTPPVGGAPWAVATTVVMYPPPPPPPHRDFISVTLSFGESYDNSKSWRRRSCWRKWKQLSRLQRNMILFLLAFLLFCGLLFYINLADHWKALAFRLEEEQKMRPEIAGLKPANPPVLPAPQKADTDPENLPEISSQKTQRHIQRGPPHLQIRPPSQDLKDGTQEEATKRQEAPVDPRPEGDPQRTVISWRGAVIEPEQGTELPSRRAEVPTKPPLPPARTQGTPVHLNYRQKGVIDVFLHAWKGYRKFAWGHDELKPVSRSFSEWFGLGLTLIDALDTMWILGLRKEFEEARKWVSKKLHFEKDVDVNLFESTIRILGGLLSAYHLSGDSLFLRKAEDFGNRLMPAFRTPSKIPYSDVNIGTGVAHPPRWTSDSTVAEVTSIQLEFRELSRLTGDKKFQEAVEKVTQHIHGLSGKKDGLVPMFINTHSGLFTHLGVFTLGARADSYYEYLLKQWIQGGKQETQLLEDYVEAIEGVRTHLLRHSEPSKLTFVGELAHGRFSAKMDHLVCFLPGTLALGVYHGLPASHMELAQELMETCYQMNRQMETGLSPEIVHFNLYPQPGRRDVEVKPADRHNLLRPETVESLFYLYRVTGDRKYQDWGWEILQSFSRFTRVPSGGYSSINNVQDPQKPEPRDKMESFFLGETLKYLFLLFSDDPNLLSLDAYVFNTEAQPSAYLDPCLGWMAAGVGTSGGQRHLAGSVAFSKGPRSTGNRQVAQALNWLWAPPRLCFNQDTVRTSEAVSLGVMRGGLGRWSLRLLPPEDTNHDSRLLKPEQVSVGRPEGGFEVVPGTGVTEWTAQGAALPGLVKPQMSPIQGSGGAAVTPEA

SEQ ID NO: 746811 - protein, 137 aa, Homo sapiens
LRGLLTAARVAAGSCWRKWKQLSRLQRNMILFLLAFLLFCGLLFYINLADHWKALAFRLEEEQKMRPEIAGLKPANPPVLPAPQKADTDPENLPEISSQKTQRHIQRGPPHLQIRLAALSTACYPDTFPGHGPVKRS

SEQ ID NO: 746812 - protein, 154 aa, Homo sapiens
MAACEGRRSGALGSSQSDFLTPPVGGAPWAVATTVVMYPPPPPPPHRDFISVTLSFGESYDNSKSWRRRSCWRKWKQLSRLQRNMILFLLAFLLFCGLLFYINLADHWKALAFRLEEETRCPKKVKIKIKLGREIVTLKLTDSTDCTSFSSPGL

SEQ ID NO: 746813 - protein, 160 aa, Homo sapiens
MAACEGRRSGALGSSQSDFLTPPVGGAPWAVATTVVMYPPPPPPPHRDFISVTLSFGESYDNSKSWRRRSCWRKWKQLSRLQRNMILFLLAFLLFCGLLFYINLADHWKALAFRLEEEQKMRPEIAGLKPANPPVLPAPQKADTDPENLPEISSQNFETH

SEQ ID NO: 746814 - protein, 126 aa, Homo sapiens [sequence omitted]

SEQ ID NO: 746815 - protein, 315 aa, Homo sapiens
MGLTEGVFLILSGTQFTLGILVNCFIELVNGSSWFKTKRMSLSDFIITTLALLRIILLCIILTDSFLIEFSPNTHDSGIIMQIIDVSWTFTNHLSIWLATCLGVLYCLKIASFSHPTFLWLKWRVSRVMVWMLLGALLLSCGSTASLINEFKLYSVFRGIEATRNVTEHFRKKRSEYYLIHVLGTLWYLPPLIVSLASYSLLIFSLGRHTRQMLQNGTSSRDPTTEAHKRAIRIILSFFFLFLLYFLAFLIASFGNFLPKTKMAKMIGEVMTMFYPAGHSFILILGNSKLKQTFVVMLRCESGHLKPGSKGPIFS

SEQ ID NO: 746816 - protein, 300 aa, Homo sapiens
RSYISQIRRGVRRRVKQVFGLRRPRPRQKPVRRQWAARLIFSLARTLPKPAPSSGSRAHRWPPAVSGAHGAALIGLAAQASSRSNMNLVGSYAHHHHHHHPHPAHPMLHEPFLFGPASRCHQERPYFQSWLLSPADAAPDFPAGGPPPAAAAAATAYGPDARPGQSPGRLEALGGRLGRRKGSGPKKERRRTESINSAFAELRECIPNVPADTKLSKIKTLRLATSYIAYLMDVLAKDAQSGDPEAFKAELKKADGGRESKRKRELQQHEGFPPALGPVEKRIKGRTGWPQQVWALELNQ

SEQ ID NO: 746817 - protein, 48 aa, Homo sapiens
KILEENLESTLLDMNLGKERLTKSPKAIATKTIIGKWDLTKLNSFCTA

SEQ ID NO: 746818 - protein, 1636 aa, Homo sapiens
AGLLLDTIKRPALQGLCLCLDFQFDTVVKDRPTILSKLLLLHFLKQDIPALSWEFFVNRFETLSLEAQLHLDCNKEFPFPTTITAVRTNVANLSDAALWKIKRARFARNRQKSVRSLRDSVKGPVESKRALSLPETLTSKIPMRLTRHEQSAPALGGTPEQTPGQQSPENDNTIKDLLPEDAGIDHQTVHQLITVLMKFMAKDESSAESDISSAKAFNTVKRHLYVLLGYDQQEGCFMIAPQKMRLSTCFNAFIAGIAQVMDYNINLGKHLLPLVVQVLKYCSCPQLRHYFQQPPRCSLWSLKPHIRQMWLKALLVILYKYPYRDCDISKILLHLIHITVNTLNAQYHSCKPHATAGPLYSDNSNISRYSEKEKEEDSVFDESDIHDTPTGPCNKESQTFFARLKRIGGSKMVKYQPVEMNVQRSEIELAEYRETGALQDSLLHCVREESIPKKKLRSFKQKSLDIGNADSLLFTLDEHRRKSCIDRCDIEKPPTQAAYIAQRPNDPGRSRQNSATRPDNSEIPENPAMEGFPDARRPVIPEVRLNCMETFEVKVDSPVKPAPKEDLDLIDLSSDSTSGPEKHSILSTSDSDSLVFEPLPPLRIVESDEEEETMNQGDDGPSGKNAASSPSIPSHPSVLSLSTAPLVQVSVEDCSKDFSSKDSGNNQSAGNTDSALITLEDPMDAEGSSKPEELPEFSCGSPLTLKQKRDLLQKSFALPEMSLDDHPDPGTEGEKPGELMPSSGAKTVLLKVPEDAENPTESEKPDTSAESDTEQNPERKVEEDGAEESEFKIQIVPRQRKQRKIAVSAIQREYLDISFNILDKLGEQKDPDPSTKGLSTLEMPRESSSAPTLDAGVPETSSHSSISTQYRQMKRGSLGVLTMSQLMKRQLEHQSSAPHNISNWDTEQIQPGKRQCNVPTCLNPDLEGQPLRMRGATKSSLLSAPSIVSMFVPAPEEFTDEQPTVMTDKCHDCGAILEEYDEETLGLAIVVLSTFIHLSPDLAAPLLLDIMQSVGRLASSTTFSNQAESMMVPGNAAGVAKQFLRCIFHQLAPNGIFPQLFQSTIKDGTFLRTLASSLMDFNELSSIAALSQLLEGLNNKKNLPAGGAMIRCLENIATFMEALPMDSPSSLWTTISNQFQTFFAKLPCVLPLKCSLDSSLRIMICLLKIPSTNATRSLLEPFSKLLSFVIQNAVFTLAYLVELCGLCYRAFTKERDKFYLSRSVVLELLQALKLKSPLPDTNLLLLVQFICADAGTKLAESTILSKQMIASVPGCGTAAMECVRQYINEVLDFMADMHTLTKLKSHMKTCSQPLHEDTFGGHLKVGLAQIAAMDISRGNHRDNKAVIRYLPWLYHPPSAMQQGPKEFIECVSHIRLLSWLLLGSLTHNAVCPNASSPCLPIPLDAGSHVADHLIVILIGFPEQSKTSVLHMCSLFHAFIFAQLWTVYCEQSAVATNLQNQNEFSFTAILTALEFWSRVTPSILQLMAHNKVMVEMVCLHVISLMEALQECNSTIFVKLIPMWLPMIQSNIKHLSAGLQLRLQAIQNHVNHHSLRTLPGSGQSSAGLAALRKWLQCTQFKMAQVEIPVLGSSLSILSSMSGLLGAQCQHSGLAIMGLKTNNLIQAGWGTYWYCTFSF

SEQ ID NO: 746819 - protein, 1636 aa, Homo sapiens; identical to SEQ ID NO: 746818

SEQ ID NO: 746820 - protein, 1523 aa, Homo sapiens
AGLLLDTIKRPALQGLCLCLDFQFDTVVKDRPTILSKLLLLHFLKQDIPALSWEFFVNRFETLSLEAQLHLDCNKEFPFPTTITAVRTNVANLSDAALWKIKRARFARNRQKSVRSLRDSVKGPVESKRALSLPETLTSKIPMRLTRHEQSAPALGGTPEQTPGQQSPENDNTIKDLLPEDAGIDHQTVHQLITVLMKFMAKDESSAESDISSAKAFNTVKRHLYVLLGYDQQEGCFMIAPQKMRLSTCFNAFIAGIAQVMDYNINLGKHLLPLVVQVLKYCSCPQLRHYFQQPPRCSLWSLKPHIRQMWLKALLVILYKYPYRDCDISKILLHLIHITVNTLNAQYHSCKPHATAGPLYSDNSNISRYSEKEKEEDSVFDESDIHDTPTGPCNKESQTFFARLKRIGGSKMVKYQPVEMNVQRSEIELAEYRETGALQDSLLHCVREESIPKKKLRSFKQKSLDIGNADSLLFTLDEHRRKSCIDRCDIEKPPTQAAYIAQRPNDPGRSRQNSATRPDNSEIPENPAMEGFPDARRPVIPEVRLNCMETFEVKVDSPVKPAPKEDLDLIDLSSDSTSGPEKHSILSTSDSDSLVFEPLPPLRIVESDEEEETMNQGDDGPSGKNAASSPSIPSHPSVLSLSTAPLVQVSVEDCSKDFSSKDSGNNQSAGNTDSALITLEDPMDAEGSSKPEELPEFSCGSPLTLKQKRDLLQKSFALPEMSLDDHPDPGTEGEKPGELMPSSGAKTVLLKVPEDAENPTESEKPDTSAESDTEQNPERKVEEDGAEESEFKIQIVPRQRKQRKIAVSAIQREYLDISFNILDKLGEQKDPDPSTKGLSTLEMPRESSSAPTLDAGVPETSSHSSISTQYRQMKRGSLGVLTMSQLMKRQLEHQSSAPHNISNWDTEQIQPGKRQCNVPTCLNPDLEGQPLRMRGATKSSLLSAPSIVSMFVPAPEEFTDEQPTVMTDKCHDCGAILEEYDEETLGLAIVVLSTFIHLSPDLAAPLLLDIMQSVGRLASSTTFSNQAESMMVPGNAAGVAKQFLRCIFHQLAPNGIFPQLFQSTIKDGTFLRTLASSLMDFNELSSIAALSQLLEGLNNKKNLPAGGAMIRCLENIATFMEALPMDSPSSLWTTISNQFQTFFAKLPCVLPLKCSLDSSLRIMICLLKIPSTNATRSLLEPFSKLLSFVIQNAVFTLAYLVELCGLCYRAFTKERDKFYLSRSVVLELLQALKLKSPLPDTNLLLLVQFICADAGTKLAESTILSKQMIASVPGCGTAAMECVRQYINEVLDFMADMHTLTKLKSHMKTCSQPLHEDTFGGHLKVGLAQIAAMDISRGNHRDNKAVIRYLPWLYHPPSAMQQGPKEFIECVSHIRLLSWLLLGSLTHNAVCPNASSPCLPIPLDAGSHVADHLIVILIGFPEQSKTSVLHMCSLFHAFIFAQLWTVYCEQSAVATNLQNQNEFSFTAILTALEFWSRVTPSILQLMAHNKVVSSQTSFPSEMESQSVHTTPNPHTPCFHRSQL

SEQ ID NO: 746821 - protein, 313 aa, Homo sapiens
MEGKNLTSISECFLLGFSEQLEEQKPLFGSFLFMYLVTVAGNLLIILVIITDTQLHTPMYFFLANLSLADACFVSTTVPKMLANIQIQSQAISYSGCLLQLYFFMLFVMLEAFLLAVMAYDCYVAICHPLHYILIMSPGLCIFLVSASWIMNALHSLLHTLLMNSLSFCANHEIPHFFCDINPLLSLSCTDPFTNELVIFITGGLTGLICVLCLIISYTNVFSTILKIPSAQGKRKAFSTCSSHLSVVSLFFGTSFCVDFSSPSTHSAQKDTVASVMYTVVTPMLNPFIYSLRNQEIKSSLRKLIWVRKIHSP

SEQ ID NO: 746822 - protein, 105 aa, Homo sapiens
PFFKALLVKTNRLWPQTSDGPGPSLGTCWRGRSRELHPARGTAPLPSAQLFCLVFGGQAAGRLPCSCQSFLQEAGELRQTHLRRAYQPWGTVRLDDVCTLQVVGT

SEQ ID NO: 746823 - protein, 164 aa, Homo sapiens
MLADKPFFLVLEEDGTTVETEEYFQALAGDTVFMVLQKGQKWQPPSEQGTRHPLSLSHKPAKKIDVARVTFDLYKLNPQDFIGCLNVKATFYDTYSLSYDLHCCGAKRIMKEAFRWALFSMQATGHVLLGTSCYLQQLLDATEEGQPPKGKASSLIPTCLKILQ

SEQ ID NO: 746824 - protein, 101 aa, Homo sapiens
GQDRAGAHSSHVLSLSVPWTRTVNCGTAHPRPDENTGASLSFSFVSGISCALFYFVGCRASRGCRASRGCRASRGCRASRGCRASRGCRASRGCRASRGGT

SEQ ID NO: 746825 - protein, 348 aa, Homo sapiens
HPRHPPAQPLSAQRYPLSLGIPCGTRVHEISQNQQVCAVQTKTQSVTPGAGRQLCLPLGFLLLLFETESGSVIQARMQWHDLGSLQPPLPGFKRLSCLSLLSTWYYRHPPPRLANFCIFSRDRFRHVGQAGLELLTSSDLSSASQSAGITGVSYLPGLFPWAFKKQSWMEVVQVLTKPAGNPSCMYPQGTFVIPLLVTAHRDPTQFKDPDCFNPTNFLDKGKFQDNDAFMPFASGAGRGGRGPAWTGSGVPGAHCAPVYPAKQMCLGTGLAHSGIFLFLTATLQRFCLLPVVRPGTINLTCSALAWAVSPQTSSSSQWPAEVRLHYGGLTGPQTSIPSSVNKGPKLQM

SEQ ID NO: 746826 - protein, 124 aa, Homo sapiens
LQQCTQEHAKEIPRFLLQLVSPAAILDNSPAFLNVVETNPFKHLTHLSLKLLPGNDVEIKKFLAGCLKCSKEEKLSLMQSLDDATKQLDFTRKTLAEKKQELDKLRNEWASHTAALTNKHSQEL

SEQ ID NO: 746827 - protein, 104 aa, Homo sapiens
MYDPCLHPSENLFSLPASPGAPQVFLCFSTEPANSHKQPLRYQPLPLQPLLIQLLQGCPHPASQSSFPPAPVTIGKETSVYRLSPPLKKIEQGSCLSAHCCLFV

SEQ ID NO: 746828 - protein, 85 aa, Homo sapiens
ESAGAEDSDDPETRPNGEKGERRDAMDYKVMNTTMSSLQDLKDFKPLAVTKHKATLLEQRREAGWEEAPSFGQTIDHLLRCPGSC

SEQ ID NO: 746829 - protein, 565 aa, Homo sapiens
MRPRSALPRLLLPLLLLPAAGPAQFHGEKGISIPDHGFCQPISIPLCTDIAYNQTIMPNLLGHTNQEDAGLEVHQFYPLVKVQCSPELRFFLCSMYAPVCTVLEQAIPPCRSICERARQGCEALMNKFGFQWPERLRCEHFPRHGAEQICVGQNHSEDGAPALLTTAPPPGLQPGAGGTPGGPGGGGAPPRYATLEHPFHCPRVLKVPSYLSYKFLGERDCAAPCEPARPDGSMFFSQEETRFARLWILTWSVLCCASTFFTVTTYLVDMQRFRYPERPIIFLSGCYTMVSVAYIAGFVLQERVVCNERFSEDGYRTVVQGTKKEGCTILFMMLYFFSMASSIWWVILSLTWFLAAGMKWGHEAIEANSQYFHLAAWAVPAVKTITILAMGQIDGDLLSGVCFVGLNSLDPLRGFVLAPLFVYLFIGTSFLLAGFVSLFRIRTIMKHDGTKTEKLERLMVRIGVFSVLYTVPATIVIACYFYEQAFREHWERSWVSQHCKSLAIPCPAHYTPRMSPDFTVYMIKYLMTLIVGITSGFWIWSGKTLHSWRKFYTRLTNSRHGETTV

SEQ ID NO: 746830 - protein, 565 aa, Homo sapiens; identical to SEQ ID NO: 746829

SEQ ID NO: 746831 - protein, 229 aa, Homo sapiens
AAASKVCKEAREAAAGPAQFHGEKGISIPDHGFCQPISIPLCTDIAYNQTILAMGQIDGDLLSGVCFVGLNSLDPLRGFVLAPLFVYLFIGTSFLLAGFVSLFRIRTIMKHDGTKTEKLERLMVRIGVFSVLYTVPATIVIACYFYEQAFREHWERSWVSQHCKSLAIPCPAHYTPRMSPDFTVYMIKYLMTLIVGITSGFWIWSGKTLHSWRKFYTRLTNSRHGETTV

SEQ ID NO: 746832 - protein, 128 aa, Homo sapiens
RPILSATVTKRKATCTRENQTEINKPKAKRCLNSAVGEHEKVINNQKEKEDFHSYLPIIDPILSKSKSYKNEVTPSSTTASVARKRKSDGSMEDANVRVAITEHTEVREIKRIHFSPSEPKTSAVKKT

SEQ ID NO: 746833 - protein, 550 aa, Homo sapiens
AETGTCSRGCRSPGAWRGRGRGRRAQNRLGHPSPWLFEPGPDRDVIMDHHVSTIKPRRIQNQNVIHRLERRRISSGKTRHLLKSMSTRAARQQRTYCRDTKEKSCPMAMTSVSVNIRGRLFERFFVLLHITNVAANGEHLNRECSLFTDDCRCVIVGSAAYLPDEPHPPFFEVYRNSESVTPNPRSPLEDYSLHIIDLHTGRLCDTRTFKCDKVVLSHNQGLYLYKNILAILSVQQQTIHVFQVTPEGTFIDVRTIGRFCYEDDLLTVSAVFPEVQRDSQTGMANPFRDPFINSLKHRLLVYLWRRAEQDGSAMAKRRFFQYFDQLRQLRMWKMQLLDENHLFIKYTSEDVVTLRVTDPSQASFFVVYNMVTTEVIAVFENTSDELLELFENFCDLFRNATLHSEVQFPCSASSNNFARQIQRRFKDTIINAKYGGHTEAVRRLLGQLPISAQSYSGSPYLDLSLFSYDDKWVSVMERPKTCGDHPIRFYARDSGLLKFEIQAGLLGRPINHTVRRLVAFTFHPFEPFAISVQRTNAEYVVNFHMRHCCT

SEQ ID NO: 746834 - protein, 596 aa, Homo sapiens
AETGTCSRGCRSPGAWRGRGRGRRAQNRLGHPSPWLFEPGPDRDVIMDHHVSTIKPRRIQNQNVIHRLERRRISSGKAGTHWHQVRVFHQNVFPNFTVVNVEKPPCFLRKFSPDGRYFIAFSSDQTSLEIYEYQGCQAAEDLLQGYEGEILSNGNDQRSVNIRGRLFERFFVLLHITNVAANGEHLNRECSLFTDDCRCVIVGSAAYLPDEPHPPFFEVYRNSESVTPNPRSPLEDYSLHIIDLHTGRLCDTRTFKCDKVVLSHNQGLYLYKNILAILSVQQQTIHVFQVTPEGTFIDVRTIGRFCYEDDLLTVSAVFPEVQRDSQTGMANPFRDPFINSLKHRLLVYLWRRAEQDGSAMAKRRFFQYFDQLRQLRMWKMQLLDENHLFIKYTSEDVVTLRVTDPSQASFFVVYNMVTTEVIAVFENTSDELLELFENFCDLFRNATLHSEVQFPCSASSNNFARQIQRRFKDTIINAKYGGHTEAVRRLLGQLPISAQSYSGSPYLDLSLFSYDDKWVSVMERPKTCGDHPIRFYARDSGLLKFEIQAGLLGRPINHTVRRLVAFTFHPFEPFAISVQRTNAEYVVNFHMRHCCT

SEQ ID NO: 746835 - protein, 402 aa, Homo sapiens
AETGTCSRGCRSPGAWRGRGRGRRAQNRLGHPSPWLFEPGPDRDVIMDHHVSTIKPRRIQNQNVIHRLERRRISSGKAGTHWHQVRVFHQNVFPNFTVVNVEKPPCFLRKFSPDGRYFIAFSSDQTSLEIYEYQGCQAAEDLLQGYEGEILSNGNDQRSVNIRGRLFERFFVLLHITNVAANGEHLNRECSLFTDDCRCVIVGSAAYLPDEPHPPFFEVYRNSESVTPNPRSPLEDYSLHIIDLHTGRLCDTRTFKCDKVVLSHNQGLYLYKNILAILSVQQQTIHVFQVTPEGTFIDVGPRLVEITQSGSMPGTRACSSLRSRRGYWAAPSTTQCDALLPSPFTLLSLSLFLCRGLMLSMLSTSICDTAARRCLTRARLSGLPRLCHSLISVDSKAKAPDY

SEQ ID NO: 746836 - protein, 132 aa, Homo sapiens
PTRPRTRGSTHASENRLGHPSPWLFEPGPDRCWEYSKELDQFPALWYGGTDTKKRCDNGSSCFYHQASKNPKPKCHSPLGTPADQFRQDQTSLEIYEYQGCQAAEDLLQGYEGEILSNGNDQRHLSLWCTIW

SEQ ID NO: 746837 - protein, 561 aa, Homo sapiens
MVGQILKRDVIMDHHVSTIKPRRIQNQNVIHRLERRRISSGKAGTHWHQVRVFHQNVFPNFTVVNVEKPPCFLRKFSPDGRYFIAFSSDQTSLEIYEYQGCQAAEDLLQGYEGEILSNGNDQRSVNIRGRLFERFFVLLHITNVAANGEHLNRECSLFTDDCRCVIVGSAAYLPDEPHPPFFEVYRNSESVTPNPRSPLEDYSLHIIDLHTGRLCDTRTFKCDKVVLSHNQGLYLYKNILAILSVQQQTIHVFQVTPEGTFIDVRTIGRFCYEDDLLTVSAVFPEVQRDSQTGMANPFRDPFINSLKHRLLVYLWRRAEQDGSAMAKRRFFQYFDQLRQLRMWKMQLLDENHLFIKYTSEDVVTLRVTDPSQASFFVVYNMVTTEVIAVFENTSDELLELFENFCDLFRNATLHSEVQFPCSASSNNFARQIQRRFKDTIINAKYGGHTEAVRRLLGQLPISAQSYSGSPYLDLSLFSYDDKWVSVMERPKTCGDHPIRFYARDSGLLKFEIQAGLLGRPINHTVRRLVAFTFHPFEPFAISVQRTNAEYVVNFHMRHCCT

SEQ ID NO: 746838 - protein, 231 aa, Homo sapiens
MVGQILKRDVIMDHHVSTIKPRRIQNQNVIHRLERRRISSGKASFFVVYNMVTTEVIAVFENTSDELLELFENFCDLFRNATLHSEVQFPCSASSNNFARQIQRRFKDTIINAKYGGHTEAVRRLLGQLPISAQSYSGSPYLDLSLFSYDDKWVSVMERPKTCGDHPIRFYARDSGLLKFEIQAGLLGRPINHTVRRLVAFTFHPFEPFAISVQRTNAEYVVNFHMRHCCT

SEQ ID NO: 746839 - protein, 119 aa, Homo sapiens
MRHKYQDGVDQIEKKPGKIQQRLGTVAHACNPSTLGGQGGQITWDQVFENSLANMANPRFDQNIEISLVWWRVPVIPAIQEGEAKNGLNSGGGGCSELRSCNCTLAGQERDSISKIKLK

SEQ ID NO: 746840 - protein, 234 aa, Homo sapiens
MRWAAPGKKTSGLQQKNIEVKTKKNKQKTPGNGDGGSTSETPQPPRKKRAQVDPTVENEETFMNRVEVKVKIPEELKPWLVDDWPLKQAKQLFYLPAEKNVDSILEDYANYKKSHGNTDNKEYAVNEVVAGIKEYFNLMLGTQLLNKFERPQYAEILADCPDAPMSQVYGVPHLLRLSVQIGAMLAYTPLNEKSLALLLNYLHDFLKYLAKNSATLFSASDYEVALPEYHRKAV

SEQ ID NO: 746841 - protein, 124 aa, Homo sapiens
MSLEQKSQHCKPEEGLDTQEEALGLVGVQAATTEEQEAVSSSSPLVPGTLGEVPAAGSPGPLKSPQGASAIPTAIDFTLWRQSIKGSSNQEEEGPSTSPDPESVFRAALSKKVADLIHFLLLKY

SEQ ID NO: 746842 - protein, 401 aa, Homo sapiens
MSLTHNKNFRKLLKEITGETALRLTELNTKEFAGFQIGLLNKDLKPQTYRNAYDIPRRGLLDQLTRMRSNLLKTHKFIVGQDEDSLHSVPVAQMGNYQEYLKTLASPLREIDPDQPKRLHTFGNPFKQDKKGMMIDEADEFVAGPQNKVKRPGEPNSPMSSKRRRSMSLLLRKPQTPPTVTNHVGGKGPPSASWFPSYPNLIKPTLVHTDATIIHDGHEEKMENGQITPDGFLSKSAPSELINMTGDLMPPNQVDSLSDDFTSLSKDGLIQKPGSNAFVGGAKNCSLSVDDQKDPVASTLGAMPNTLQITPAMAQGINADIKHQLMKEVRKFGRKYERIFILLEEVQGPLEMKKQFVEFTIKEAARFKRRVLIQYLEKVLEKINSHHLHNNISHINSRSSC

SEQ ID NO: 746843 - protein, 541 aa, Homo sapiens
MASMRVVKELEDLQKKPPPYLRNLSSDDANVLVWHCSPPTHDLFKVHKLKPNLKWRQAFDSYLKTLPPYYLLPLKKALRMMGAPNLISDNLDCGLSYSVISYLKKLSQQTKLESERILASVGKKPPQEIGIKVKNHSGGGMSLTHNKNFRKLLKEITGETALRLTELNTKEFAGFQIGLLNKDLKPQTYRNAYDIPRRGLLDQLTRMRSNLLKTHKFIVGQDEDSLHSVPVAQMGNYQEYLKTLASPLREIDPDQPKRLHTFGNPFKQDKKGMMIDEADEFVAGPQNKVKRPGEPNSPMSSKRRRSMSLLLRKPQTPPTVTNHVGGKGPPSASWFPSYPNLIKPTLVHTDATIIHDGHEEKMENGQITPDGFLSKSAPSELINMTGDLMPPNQVDSLSDDFTSLSKDGLIQKPGSNAFVGGAKNCSLSVDDQKDPVASTLGAMPNTLQITPAMAQGINADIKHQLMKEVRKFGRKYERIFILLEEVQGPLEMKKQFVEFTIKEAARFKRRVLIQYLEKVLEKINSHHLHNNISHINSRSSC

SEQ ID NO: 746844 - protein, 339 aa, Homo sapiens
MSLTHNKNFRKLLKEITGETALRLTELNTKEFAGFQIGLLNKDLKPQTYRNAYDIPRRGLLDQLTRMRSNLLKTHKFIVGQDEDSLHSVPVAQMGNYQEYLKTLASPLREIDPDQPKRLHTFGNPFKQDKKGMMIDEADEFVAGPQNKVKRPGEPNSPMSSKRRRNATIIHDGHEEKMENGQITPDGFLSKSAPSELINMTGDLMPPNQVDSLSDDFTSLSKDGLIQKPGSNAFVGGAKNCSLSVDDHPAMAQGINADIKHQLMKEVRKFGRKYERIFILLEEVQGPLEMKKQFVEFTIKEAARFKRRVLIQYLEKVLEKINSHHLHNNISHINSRSSC

SEQ ID NO: 746845 - protein, 397 aa, Homo sapiens
MSLTHNKNFRKLLKEITGETALRLTELNTKEFAGFQIGLLNKDLKPQTYRNAYDIPRRGLLDQLTRMRSNLLKTHKFIVGQDEDSLHSVPVAQMGNYQEYLKTLASPLREIDPDQPKRLHTFGNPFKQDKKGMMIDEADEFVAGPQNKVKRPGEPNSPMSSKRRRSMSLLLRKPQTPPTVTNHVGGKGPPSASWFPSYPNLIKPTLVHTDATIIHDGHEEKMENGQITPDGFLSKSAPSELINMTGDLMPPNQVDSLSDDFTSLSKDGLIQKPGSNAFVGGAKNCSLSVDDQKDPVASTLGAMPNTLQITPAMAQGINADIKHQLMKEVRKFGRKYERIFILLEEVQGPLEMKKQFVEFTIKEAARFKRRVLIQYLEKRHYKVHLRLPPTSDICSCM

SEQ ID NO: 746846 - protein, 399 aa, Homo sapiens
AQGRPPAAEAMRVLVRRCWGPPLAHGARRGRPSPQWRALARLGWEDCRDSRVREKPPWRVLFFGTDQFAREALRALHAARENKEEELIDKLEVVTMPSPSPKGLPVKQYAVQSQLPVYEWPDVGSGEYDVGVVASFGRLLNEALILKFPYGILNVHPSCLPRWRGPAPVIHTVLHGDTVTGVTIMQIRPKRFDVGPILKQETVPVPPKSTAKELEAVLSRLGANMLISVLKNLPESLSNGRQQPMEGATYAPKISAGTSCIKWEEQTSEQIFRLYRAIGNIIPLQTLWMANTIKLLDLVEVNSSVLADPKLTGQALIPGSVIYHKQSQILLVYCKDGWIGVRSVMLKKSLTATDFYNGYLHPWYQKNSQAQPSQCRFQTLRLPTKKKQKKTVAMQQCIE

SEQ ID NO: 746847 - protein, 149 aa, Homo sapiens
AQGRPPAAEAMRVLVRRCWGPPLAHGARRGRPSPQWRALARLGWEDCRDSRVREKPPWRVLFFGTDQFAREALRALHAARENKEEELIDKLEVVTMPSPSPKGLPVKQYAVQSQLPVYEWPDVGSGEYDVGVVASFGRLLNEALILKFP

SEQ ID NO: 746848 - protein, 109 aa, Homo sapiens
  misc_feature (4)..(4): Xaa can be any naturally occurring amino acid
  misc_feature (7)..(7): Xaa can be any naturally occurring amino acid
  misc_feature (14)..(14): Xaa can be any naturally occurring amino acid
STRXILXSHLSTIXSPYYPKLTGQALIPGSVIYHKQSQILLVYCKDGWIGVRSVMLKKSLTATDFYNGYLHPWYQKNSQAQPSQCRFQTLRLPTKKKQKKTVAMQQCIE

SEQ ID NO: 746849 - protein, 298 aa, Homo sapiens
AQGRPPAAEAMRVLVRRCWGPPLAHGARRGRPSPQWRALARLGWEDCRDSRVREKPPWRVLFFGTDQFAREALRALHAARENKEEELIDKLEVVTMPSPSPKGLPVKQYAVQSQLPVYEWPDVGSGEYDVGVVASFGRLLNEALILKFPYGILNVHPSCLPRWRGPAPVIHTVLHGDTVTGVTIMQIRPKRFDVGPILKQETVPVPPKSTAKELEAVLSRLGANMLISVLKNLPESLSNGRQQPMEGATYAPKISAGTSCIKWEEQTSEQIFRLYRAIGNIVSWEVRLQFYLVGFLCV

SEQ ID NO: 746850 - protein, 231 aa, Homo sapiens
AQGRPPAAEAMRVLVRRCWGPPLAHGARRGRPSPQWRALARLGWEDCRDSRVREKPPWRVLFFGTDQFAREALRALHAARENKEEELIDKLEVVTMPSPSPKGLPVKQYAVQSQLPVYEWPDVGSGEYDVGVVASFGRLLNEALILKFPYGILNVHPSCLPRWRGPAPVIHTVLHGDTVTGVTIMQIRPKRFDVGPILKQETVPVPPKSTAKELEAVLSRLGANMLISSPC

SEQ ID NO: 746851 - protein, 48 aa, Homo sapiens
MLIHSLIHCKASVHWKLDAIVSTKEKEAAESIEPRSQSSRVSQIDRVV

SEQ ID NO: 746852 - protein, 467 aa, Homo sapiens
MATQTCTPTFSTGSIKGLCGTAGGISRVSSIRSVGSCRVPSLAGAAGYISSARSGLSGLGSCLPGSYLSSECHTSGFVGSGGWFCEGSFNGSEKETMQFLNDRLANYLEKVRQLERENAELESRIQEWYEFQIPYICPDYQSYFKTIEDFQQKILLTKSENARLVLQIDNAKLAADDFRTKYETELSLRQLVEADINGLRRILDELTLCKADLEAQVESLKEELMCLKKNHEEEVSVLRCQLGDRLNVEVDAAPPVDLNKILEDMRCQYEALVENNRRDVEAWFNTQTEELNQQVVSSSEQLQCCQTEIIELRRTVNALEIELQAQHSMRNSLESTLAETEARYSSQLAQMQCLISNVEAQLSEIRCDLERQNQEYQVLLDVKARLEGEIATYRHLLEGEDCKLPPQPCATACKPVIRVPSVPPVPCVPSVPCTPAPQVGTQIRTITEEIRDGKVISSREHVQSRPL

SEQ ID NO: 746853 - protein, 417 aa, Homo sapiens
MLRSGLSGLGSCLPGSYLSSECHTSGFVGSGGWFCEGSFNGSEKETMQFLNDRLANYLEKVRQLERENAELESRIQEWYEFQIPYICPDYQSYFKTIEDFQQKILLTKSENARLVLQIDNAKLAADDFRTKYETELSLRQLVEADINGLRRILDELTLCKADLEAQVESLKEELMCLKKNHEEEVSVLRCQLGDRLNVEVDAAPPVDLNKILEDMRCQYEALVENNRRDVEAWFNTQTEELNQQVVSSSEQLQCCQTEIIELRRTVNALEIELQAQHSMRNSLESTLAETEARYSSQLAQMQCLISNVEAQLSEIRCDLERQNQEYQVLLDVKARLEGEIATYRHLLEGEDCKLPPQPCATACKPVIRVPSVPPVPCVPSVPCTPAPQVGTQIRTITEEIRDGKVISSREHVQSRPL

SEQ ID NO: 746854 - protein, 112 aa, Homo sapiens
MLRSGLSGLGSCLPGSYLSSECHTSGFVGSGGWFCEGSFNGSEKETMQFLNDRLANYLEKVRQLERENAELESRIQEWYEFQIPYICPDYQSYFKTIEDFQQKVRETWPLSS

SEQ ID NO: 746855 - protein, 126 aa, Homo sapiens
MPEPAKSAPAPKKGSKKAVTKAQKKDGRKRKRSRKESYSVYVYKVLKQVHPDTGISSKAMGIMNSFVNDIFERIAGEASRLPHYNKRSTITSREIQTAVRLLLPGELAKHAVSEGTKAVTKYTSAK

SEQ ID NO: 746856 - protein, 86 aa, Homo sapiens
MVRHPYSVQTQLSTEAKAIWRSMQQQETNLLANLTTNDARDNSKDFQNSKVGAAATSRDEGCNCPIIGEIVISCYWLFEIPPLISE

SEQ ID NO: 746857 - protein, 64 aa, Homo sapiens
MQQQETNLLANLTTNDARDNSKDFQNSKVGAAATSRDEGCNCPIIGEIVISCYWLFEIPPLISE

SEQ ID NO: 746858 - protein, 82 aa, Homo sapiens
MQCLYFILILKGYFHQQHHTLLITIALCFLQQQQETNLLANLTTNDARDNSKDFQNSKVGAAATSRDEGETQKCIQKPLHEK

SEQ ID NO: 746859 - protein, 616 aa, Homo sapiens
AHPFYTCSFAPNQEAIMSCRSYRVSSGHRVGNFSSCSAMTPQNLNRFRANSVSCWSGPGFRGLGSFGSRSVITFGSYSPRIAAVGSRPIHCGVRFGAGCGMGFGDGRGVGLGPRADSCVGLGFGAGSGIGYGFGGPGFGYRVGGVGVPAAPSITAVTVNKSLLTPLNLEIDPNAQRVKKDEKEQIKTLNNKFASFIDKVRFLEQQNKLLETKWSFLQEQKCIRSNLEPLFESYITNLRRQLEVLVSDQARLQAERNHLQDVLEGFKKKYEEEVVCRANAENEFVALKKDVDAAFMNKSDLEANVDTLTQEIDFLKTLYMEEIQLLQSHISETSVIVKMDNSRDLNLDGIIAEVKAQYEEVARRSRADAEAWYQTKYEEMQVTAGQHCDNLRNIRNEINELTRLIQRLKAEIEHAKAQRAKLEAAVAEAEQQGEATLSDAKCKLADLECALQQAKQDMARQLCEYQELMNAKLGLDIEIATYRRLLEGEESRLCEGVGPVNISVSSSRGGLVCGPEPLVAGSTLSRGGVTFSGSSSVCATSGVLASCGPSLGGARVAPATGDLLSTGTRSGSMLISEACVPSVPCPLPTQGGFSSCSGGRSSSVRFVSTTTSCRTKY

SEQ ID NO: 746860 - protein, 186 aa, Homo sapiens
MKAVNEQGKEVTEFGNKYWLMLNEKEAQQVYGGKEARTEEMKWRQWADDWLVHLISPNVYRTPTEALASFDYIVREGKFGAVEGAVAKYMGAAAMYLISKRLKSRHRLQDNVREDLYEAADKWVAAVGKDRPFMGGQKPNLADLAVYGVLRVMEGLDAFDDLMQHTHIQPWYLRVERAITEASPAH

SEQ ID NO: 746861 - protein, 186 aa, Homo sapiens; identical to SEQ ID NO: 746860

SEQ ID NO: 746862 - protein, 186 aa, Homo sapiens; identical to SEQ ID NO: 746860

SEQ ID NO: 746863 - protein, 186 aa, Homo sapiens; identical to SEQ ID NO: 746860

SEQ ID NO: 746864 - protein, 337 aa, Homo sapiens
MKAVNEQGKEVTEFGNKYWLMLNEKEAQQVYGGKEARTEEMKWRQWADDWLVHLISPNVYRTPTEALASFDYIVREGKFGAVEGAVAKYMGAAAMYLISKRLKSRQVCVHIRGLLSPSLRCHEQWCSHHTPQETSGRPRPRAGGKRIMDYGSLGQDGTWTQSSCSPPLGTAGLALKPEAWALTGASSVAFSLAWSLAFTTASPSGTDAPEASADVMLSPGVPSWLPHLPPLPRGDPLPCWAGSGGSPEGLFPSPPRHRLQDNVREDLYEAADKWVAAVGKDRPFMGGQKPNLADLAVYGVLRVMEGLDAFDDLMQHTHIQPWYLRVERAITEASPAH

SEQ ID NO: 746865 - protein, 144 aa, Homo sapiens
MKAVNEQGKEVTEFGNKYWLMLNEKEAQQVYGGKEARTEEMKWRQWADDWLVHLISPNVYRTPTEALASFDYIVREGKFGAVEGAVAKYMGAAAMYLISKRLKSSRPESGEAFSVTVAVEAGQGPTTPRVGAEGGQAPRGGRPP

SEQ ID NO: 746866 - protein, 360 aa, Homo sapiens
MPRCNSDRGQALDPRRAGLASRGRRAARAPWLQLVRGARGCWELRRWPWGDALGLYHTARWHLRAQDLHAERSAAQLSLSSRLQLTLYQYKTCPFCSKVRAFLDFHALPYQVVEVNPVRRAEIKFSSYRKVPILVAQEGESSQQLNDSSVIISALKTYLVSGQPLEEIITYYPAMKAVNEQGKEVTEFGNKYWLMLNEKEAQQVYGGKEARTEEMKWRQWADDWLVHLISPNVYRTPTEALASFDYIVREGKFGAVEGAVAKYMGAAAMYLISKRLKSRHRLQDNVREDLYEAADKWVAAVGKDRPFMGGQKPNLADLAVYGVLRVMEGLDAFDDLMQHTHIQPWYLRVERAITEASPAH

SEQ ID NO: 746867 - protein, 178 aa, Homo sapiens
MKAVNEQGKEVTEFGNKYWLMLNEKEAQQVEEMKWRQWADDWLVHLISPNVYRTPTEALASFDYIVREGKFGAVEGAVAKYMGAAAMYLISKRLKSRHRLQDNVREDLYEAADKWVAAVGKDRPFMGGQKPNLADLAVYGVLRVMEGLDAFDDLMQHTHIQPWYLRVERAITEASPAH

SEQ ID NO: 746868 - protein, 186 aa, Homo sapiens; identical to SEQ ID NO: 746860

SEQ ID NO: 746869 - protein, 321 aa, Homo sapiens
APARPGATAPCGTAPGSPQARWHLRAQDLHAERSAAQLSLSSRLQLTLYQYKTCPFCSKVRAFLDFHALPYQVVEVNPVRRAEIKFSSYRKVPILVAQEGESSQQLNDSSVIISALKTYLVSGQPLEEIITYYPAMKAVNEQGKEVTEFGNKYWLMLNEKEAQQVYGGKEARTEEMKWRQWADDWLVHLISPNVYRTPTEALASFDYIVREGKFGAVEGAVAKYMGAAAMYLISKRLKSRHRLQDNVREDLYEAADKWVAAVGKDRPFMGGQKPNLADLAVYGVLRVMEGLDAFDDLMQHTHIQPWYLRVERAITEASPAH

SEQ ID NO: 746870 - protein, 410 aa, Homo sapiens
SEHVTLAARVCAGALCAMDGVAALCHVDVLGVCLPPCLLATHCMMLCVLVASAVCVLCCVLCPDAPVCLHASVELVMPCWLSLWMLAVLLGPVWLMPWWLYHTVLLVGTLLLPMDLTAELLSACCMLSLSSRLQLTLYQYKTCPFCSKVRAFLDFHALPYQVVEVNPVRRAEIKFSSYRKVPILVAQEGESSQQLNDSSVIISALKTYLVSGQPLEEIITYYPAMKAVNEQGKEVTEFGNKYWLMLNEKEAQQVYGGKEARTEEMKWRQWADDWLVHLISPNVYRTPTEALASFDYIVREGKFGAVEGAVAKYMGAAAMYLISKRLKSRHRLQDNVREDLYEAADKWVAAVGKDRPFMGGQKPNLADLAVYGVLRVMEGLDAFDDLMQHTHIQPWYLRVERAITEASPAH

SEQ ID NO: 746871 - protein, 271 aa, Homo sapiens
  misc_feature (4)..(4): Xaa can be any naturally occurring amino acid
CRRXDRESCTHAFLDFHALPYQVVEVNPVRRAEIKFSSYRKVPILVAQEGESSQQLNDSSVIISALKTYLVSGQPLEEIITYYPAMKAVNEQGKEVTEFGNKYWLMLNEKEAQQVYGGKEARTEEMKWRQWADDWLVHLISPNVYRTPTEALASFDYIVREGKFGAVEGAVAKYMGAAAMYLISKRLKSRHRLQDNVREDLYEAADKWVAAVGKDRPFMGGQKPNLADLAVYGVLRVMEGLDAFDDLMQHTHIQPWYLRVERAITEASPAH

SEQ ID NO: 746872 - protein, 385 aa, Homo sapiens
AGTGLGSLGCPRRRLCGGGSGLQLGRGSPAEGPSSLAPHFAILSLEISGSAGRPLRVGEIRDTWFPRPLRLSLSSRLQLTLYQYKTCPFCSKVRAFLDFHALPYQVVEVNPVRRAEIKFSSYRKVPILVAQEGESSGRQIRNAWHSAWGLVCSFQNPPCPSTWEAKWQQLNDSSVIISALKTYLVSGQPLEEIITYYPAMKAVNEQGKEVTEFGNKYWLMLNEKEAQQVYGGKEARTEEMKWRQWADDWLVHLISPNVYRTPTEALASFDYIVREGKFGAVEGAVAKYMGAAAMYLISKRLKSRHRLQDNVREDLYEAADKWVAAVGKDRPFMGGQKPNLADLAVYGVLRVMEGLDAFDDLMQHTHIQPWYLRVERAITEASPAH

SEQ ID NO: 746873 - protein, 186 aa, Homo sapiens; identical to SEQ ID NO: 746860

SEQ ID NO: 746874 - protein, 387 aa, Homo sapiens
TITPYDKQKTKQRIDRARITLVTRVSGRCGLVGAPWPGGWEAAPSRCYPRRAGLASRGRRAARAPWLQLVRGARGCWELRRWPWGDALGLYHTARWHLRAQDLHAERSAAQLSLSSRLQLTLYQYKTCPFCSKVRAFLDFHALPYQVVEVNPVRRAEIKFSSYRKVPILVAQEGESSQQLNDSSVIISALKTYLVSGQPLEEIITYYPAMKAVNEQGKEVTEFGNKYWLMLNEKEAQQVEEMKWRQWADDWLVHLISPNVYRTPTEALASFDYIVREGKFGAVEGAVAKYMGAAAMYLISKRLKSRHRLQDNVREDLYEAADKWVAAVGKDRPFMGGQKPNLADLAVYGVLRVMEGLDAFDDLMQHTHIQPWYLRVERAITEASPAH

SEQ ID NO: 746875 - protein, 494 aa, Homo sapiens
MDPAARVVRALWPGGCALAWRLGGRPQPLLPTQSRAGFAGAAGGPSPVAAARKGSPRLLGAAALALGGCPGAVPHGAVAPARPGPPRRALSRAEVVEVNPVRRAEIKFSSYRKVPILVAQEGESSQQLNDSSVIISALKTYLVSGQPLEEIITYYPAMKAVNEQGKEVTEFGNKYWLMLNEKEAQQVYGGKEARTEEMKWRQWADDWLVHLISPNVYRTPTEALASFDYIVREGKFGAVEGAVAKYMGAAAMYLISKRLKSRQVCVHIRGLLSPSLRCHEQWCSHHTPQETSGRPRPRAGGKRIMDYGSLGQDGTWTQSSCSPPLGTAGLALKPEAWALTGASSVAFSLAWSLAFTTASPSGRMLPEASADVMLSPGVPSWLPHLPPLPRGDPLPCWAGSGGSPEGLFPSPPRHRLQDNVREDLYEAADKWVAAVGKDRPFMGGQKPNLADLAVYGVLRVMEGLDAFDDLMQHTHIQPWYLRVERAITEASPAH

SEQ ID NO: 746876 - protein, 148 aa, Homo sapiens
MDPAARVVRALWPGGCALAWRLGGRPQPLLPTQSRAGFAGAAGGPSPVAAARKGSPRLLGAAALALGGCPGAVPHGAVAPARPGPPRRALSRAALPVQPPAADPVPVQDVSLLQQGPSLPRLPCPALPRIFELNALFAVLKIRNSRSL

SEQ ID NO: 746877 - protein, 119 aa, Homo sapiens
GWYWSGEFGMSAETPMRWRLRASARAGEPSRRTEQPGTPLCHPLPGNLGVGGPAASRGRNQRHVVSKAPSGSGKFYGSGHSRKRTMRREGRENRNTAAHLVPGRVVSGAFSGRKSRRLY

SEQ ID NO: 746878 - protein, 149 aa, Homo sapiens
TRATRLRAHGLAWHLTRLFNGLECGAALPVARVVLLLGTGPERKWQKLGMGCWSLKECVGATGLNAARCSPVTLIKRLLFRAVFILPIHRSESTELPTLPPAPHSRQRHQPGAILYKLFQQNVPGKEMTAEGSAPWGQEVLRPMGSAGR

SEQ ID NO: 746879 - protein, 87 aa, Homo sapiens
GSDDDGEVVETPSQLGHPPVGRHVLSVASSGVLLKDYFLEQFSFYRYIDQRVRSFPHCLPHPIAGRGTSQAPSFTSCFSKMSLGLND

SEQ ID NO: 746880 - protein, 86 aa, Homo sapiens
GSDDDGEVVETPSQLGHPPVGRHVLSVASSGVLLKDYFLEQFSFYRYIDQRVRSFPHCLPHPIAGRGTSQAPSFTSCFSKMSLGRK

SEQ ID NO: 746881 - protein, 73 aa, Homo sapiens
VALTMMVRWWRRPHSWATLPSGDTFCQLLPLESLEGNDRRRECTVGAGGAAANGQCWEMKPTAAIAPERTWRC

SEQ ID NO: 746882 - protein, 149 aa, Homo sapiens
MKEALHQIVVRCSELVSSTSLPRLSVSRLQGPPDSQPLGTLGQGGWKLLGIVGSLAPETLGGLGTEFGPCTHPLPFDMVRERERDDELRQGWLLQCPQCARTLLCHCGPFLTPPSQTSSSGFQLCSLKPSGSLVTATEPLSNFAFSYFP

SEQ ID NO: 746883 - protein, 977 aa, Homo sapiens
ERQALQPRPRLGRPRLGRGVGSGCSSGLLSWLGNPRGRWLRLPGMTATPESLFPTGDELDSSQLQMESDEVDTLKEGEDPADRMHPFLAIYELQSLKVHPLVFAPGVPVTAQVVGTERYTSGSKVGTCTLYSVRLTHGDFSWTTKKKYRHFQELHRDLLRHKVLMSLLPLARFAVAYSPARDAGNREMPSLPRAGPEGSTRHAASKQKYLENYLNRLLTMSFYRNYHAMTEFLEVSQLSFIPDLGRKGLEGMIRKRSGGHRVPGLTCCGRDQVCYRWSKRWLVVKDSFLLYMCLETGAISFVQLFDPGFEVQVGKRSTEARHGVRIDTSHRSLILKCSSYRQARWWAQEITELAQGPGRDFLQLHRHDSYAPPRPGTLARWFVNGAGYFAAVADAILRAQEEIFITDWWLSPEVYLKRPAHSDDWRLDIMLKRKAEEGVRVSILLFKEVELALGINSGYSKRALMLLHPNIKVMRHPDQVTLWAHHEKLLVVDQVVAFLGGLDLAYGRWDDLHYRLTDLGDSSESAASQPPTPRPDSPATPDLSHNQFFWLGKDYSNLITKDWVQLDRPFEDFIDRETTPRMPWRDVGVVVHGLPARDLARHFIQRWNFTKTTKAKYKTPTYPYLLPKSTSTANQLPFTLPGGQCTTVQVLRSVDRWSAGTLENSILNAYLHTIRESQHFLYIENQFFISCSDGRTVLNKVGDEIVDRILKAHKQGWCYRVYVLLPLLPGFEGDISTGGGNSIQAILHFTYRTLCRGEYSILHRLKAAMGTAWRDYISICGLRTHGELGGHPVSELIYIHSKVLIADDRTVIIGSANINDRSLLGKRDSELAVLIEDTETEPSLMNGAEYQAGRFALSLRKHCFGVILGANTRPDLDLRDPICDDFFQLWQDMAESNANIYEQIFRCLPSNATRSLRTLREYVAVEPLATVSPPLARSELTQVQGHLVHFPLKFLEDESLLPPLGSKEGMIPLEVWT

SEQ ID NO: 746884 - protein, 933 aa, Homo sapiens
MTATPESLFPTGDELDSSQLQMESDEVDTLKEGEDPADRMHPFLAIYELQSLKVHPLVFAPGVPVTAQVVGTERYTSGSKVGTCTLYSVRLTHGDFSWTTKKKYRHFQELHRDLLRHKVLMSLLPLARFAVAYSPARDAGNREMPSLPRAGPEGSTRHAASKQKYLENYLNRLLTMSFYRNYHAMTEFLEVSQLSFIPDLGRKGLEGMIRKRSGGHRVPGLTCCGRDQVCYRWSKRWLVVKDSFLLYMCLETGAISFVQLFDPGFEVQVGKRSTEARHGVRIDTSHRSLILKCSSYRQARWWAQEITELAQGPGRDFLQLHRHDSYAPPRPGTLARWFVNGAGYFAAVADAILRAQEEIFITDWWLSPEVYLKRPAHSDDWRLDIMLKRKAEEGVRVSILLFKEVELALGINSGYSKRALMLLHPNIKVMRHPDQVTLWAHHEKLLVVDQVVAFLGGLDLAYGRWDDLHYRLTDLGDSSESAASQPPTPRPDSPATPDLSHNQFFWLGKDYSNLITKDWVQLDRPFEDFIDRETTPRMPWRDVGVVVHGLPARDLARHFIQRWNFTKTTKAKYKTPTYPYLLPKSTSTANQLPFTLPGGQCTTVQVLRSVDRWSAGTLENSILNAYLHTIRESQHFLYIENQFFISCSDGRTVLNKVGDEIVDRILKAHKQGWCYRVYVLLPLLPGFEGDISTGGGNSIQAILHFTYRTLCRGEYSILHRLKAAMGTAWRDYISICGLRTHGELGGHPVSELIYIHSKVLIADDRTVIIGSANINDRSLLGKRDSELAVLIEDTETEPSLMNGAEYQAGRFALSLRKHCFGVILGANTRPDLDLRDPICDDFFQLWQDMAESNANIYEQIFRCLPSNATRSLRTLREYVAVEPLATVSPPLARSELTQVQGHLVHFPLKFLEDESLLPPLGSKEGMIPLEVWT

SEQ ID NO: 746885 - protein, 922 aa, Homo sapiens
MTATPESLFPTGDELDSSQLQMESDEVDTLKEGEDPADRMHPFLAIYELQSLKVHPLVFAPGVPVTAQVVGTERYTSGSKVGTCTLYSVRLTHGDFSWTTKKKYRHFQELHRDLLRHKVLMSLLPLARFAVAYSPARDAGNREMPSLPRAGPEGSTRHAASKQKYLENYLNRLLTMSFYRNYHAMTEFLEVSQLSFIPDLGRKGLEGMIRKRSGGHRVPGLTCCGRDQVCYRWSKRWLVVKDSFLLYMCLETGAISFVQLFDPGFEVQVGKRSTEARHGVRIDTSHRSLILKCSSYRQARWWAQEITELAQGPGRDFLQLHRHDSYAPPRPGTLARWFVNGAGYFAAVADAILRAQEEIFITDWWLSPEVYLKRPAHSDDWRLDIMLKRKAEEGVRVSILLFKEVELALGINSGYSKRALMLLHPNIKVMRHPDQVTLWAHHEKLLVVDQVVAFLGGLDLAYGRWDDLHYRLTDLGDSSESAASQPPTPRPDSPATPDLSHNQFFWLGKDYSNLITKDWVQLDRPFEDFIDRETTPRMPWRDVGVVVHGLPARDLARHFIQRWNFTKTTKAKYKTPTYPYLLPKSTSTANQLPFTLPGGQCTTVQVLRSVDRWSAGTLENSILNAYLHTIRESQHFLYIENQFFISCSDGRTVLNKVGDEIVDRILKAHKQGWCYRVYVLLPLLPGFEGDISTGGGNSIQAILHFTYRTLCRGEYSILHRLKAAMGTAWRDYISICGLRTHGELGGHPVSELIYIHSKVLIADDRTVIIGSANINDRSLLGKRDSELAVLIEDTETEPSLMNGAEYQAGSVILGANTRPDLDLRDPICDDFFQLWQDMAESNANIYEQIFRCLPSNATRSLRTLREYVAVEPLATVSPPLARSELTQVQGHLVHFPLKFLEDESLLPPLGSKEGMIPLEVWT

SEQ ID NO: 746886 - protein, 103 aa, Homo sapiens
LEDSSESAASQPPTPRPDSPATPDLSHNQFFWLGKDYSNLITKDWVQLDRPFEDFIDRETTPRMPWRDVGVVVHGLPARDLARHFIQRWNFTKVFIPSDRGWR

SEQ ID NO: 746887 - protein, 977 aa, Homo sapiens; identical to SEQ ID NO: 746883

SEQ ID NO: 746888 - protein, 623 aa, Homo sapiens
TTVLRSSLSRAFWLLTPLTSLAWPPPRFVNGAGYFAAVADAILRAQEEIFITDWWLSPEVYLKRPAHSDDWRLDIMLKRKAEEGVRVSILLFKEVELALGINSGYSKRALMLLHPNIKVMRHPDQVTLWAHHEKLLVVDQVVAFLGGLDLAYGRWDDLHYRLTDLGDSSESAASQPPTPRPDSPATPDLSHNQFFWLGKDYSNLITKDWVQLDRPFEDFIDRETTPRMPWRDVGVVVHGLPARDLARHFIQRWNFTKTTKAKYKTPTYPYLLPKSTSTANQLPFTLPGGQCTTVQVLRSVDRWSAGTLENSILNAYLHTIRESQHFLYIENQFFISCSDGRTVLNKVGDEIVDRILKAHKQGWCYRVYVLLPLLPGFEGDISTGGGNSIQAILHFTYRTLCRGEYSILHRLKAAMGTAWRDYISICGLRTHGELGGHPVSELIYIHSKVLIADDRTVIIGSANINDRSLLGKRDSELAVLIEDTETEPSLMNGAEYQAGRFALSLRKHCFGVILGANTRPDLDLRDPICDDFFQLWQDMAESNANIYEQIFRCLPSNATRSLRTLREYVAVEPLATVSPPLARSELTQVQGHLVHFPLKFLEDESLLPPLGSKEGMIPLEVWT

SEQ ID NO: 746889 - protein, 299 aa, Homo sapiens
IYPCLANQFFISCSDGRTVLNKVGDEIVDRILKAHKQGWCYRVYVLLPLLPGFEGDISTGGGNSIQAILHFTYRTLCRGEYSILHRLKAAMGTAWRDYISICGLRTHGELGGHPVSELIYIHSKVLIADDRTVIIGSANINDRSLLGKRDSELAVLIEDTETEPSLMNGAEYQAGRFALSLRKHCFGVILGANTRPDLDLRDPICDDFFQLWQDMAESNANIYEQIFRCLPSNATRSLRTLREYVAVEPLATVSPPLARSELTQVQGHLVHFPLKFLEDESLLPPLGSKEGMIPLEVWT

SEQ ID NO: 746890 - protein, 303 aa, Homo sapiens
MSVSDILPQNNQFFISCSDGRTVLNKVGDEIVDRILKAHKQGWCYRVYVLLPLLPGFEGDISTGGGNSIQAILHFTYRTLCRGEYSILHRLKAAMGTAWRDYISICGLRTHGELGGHPVSELIYIHSKVLIADDRTVIIGSANINDRSLLGKRDSELAVLIEDTETEPSLMNGAEYQAGRFALSLRKHCFGVILGANTRPDLDLRDPICDDFFQLWQDMAESNANIYEQIFRCLPSNATRSLRTLREYVAVEPLATVSPPLARSELTQVQGHLVHFPLKFLEDESLLPPLGSKEGMIPLEVWT

SEQ ID NO: 746891 - protein, 163 aa, Homo sapiens
ASSSQSAGNTGVSHRTQPILNYLSRDNVTFLVLRFSKDLNLALLGPLFSYSVILGANTRPDLDLRDPICDDFFQLWQDMAESNANIYEQIFRCLPSNATRSLRTLREYVAVEPLATVSPPLARSELTQVQGHLVHFPLKFLEDESLLPPLGSKEGMIPLEVWT

SEQ ID NO: 746892 - protein, 427 aa, Homo sapiens
ERQALQPRPRLGRPRLGRGVGSGCSSGLLSWLGNPRGRWLRLPGMTATPESLFPTGDELDSSQLQMESDEVDTLKEGEDPADRMHPFLAIYELQSLKVHPLVFAPGVPVTAQVVGTERYTSGSKVGTCTLYSVRLTHGDFSWTTKKKYRHFQELHRDLLRHKVLMSLLPLARFAVAYSPARDAGNREMPSLPRAGPEGSTRHAASKQKYLENYLNRLLTMSFYRNYHAMTEFLEVSQLSFIPDLGRKGLEGMIRKRSGGHRVPGLTCCGRDQVCYRWSKRWLVVKDSFLLYMCLETGAISFVQLFDPGFEIWGGRHSPGLGRRRESQSSSPLLPSANHFSMLQRRSTAPARVSRVKPLIPGEGGSAPGPTTHCSLPLPALEPPPCPRALPAHCCQGGGKDKATSGFSPHQGKEGGHINSLHQPADRH

SEQ ID NO: 746893 - protein, 104 aa, Homo sapiens
GGWAGPREGAKGGLARVGRRGPTQGTSIQFLIPLGGNLHSVFCPLDSRRLFLDNQEEIPSFSGAASGPPETQSLDESAPSGSVRATGLLPVEGRCSPPSFLSVS

SEQ ID NO: 746894 - protein, 142 aa, Homo sapiens
PVQAVNVGQLLAVNAEEDAWLRAQVISTEENKIKVCYVDYGFSENVEKSKAYKLNPKFCSLSFQATKCKLAGLEVLSDDPDLVKVVESLTCGKIFAVEILDKADIPLVVLYDTSGEDDININATCLKAICDKSLEVHLQVPL

SEQ ID NO: 746895 - protein, 589 aa, Homo sapiens
PVQAVNVGQLLAVNAEEDAWLRAQVISTEENKIKVCYVDYGFSENVEKSKAYKLNPKFCSLSFQATKCKLAGLEVLSDDPDLVKVVESLTCGKIFAVEILDKADIPLVVLYDTSGEDDININATCLKAICDKSLEVHLQVDAMYTNVKVTNICSDGTLYCQVPCKGLNKLSDLLRKIEDYFHCKHMTSECFVSLPFCGKICLFHCKGKWLRVEITNVHSSRALDVQFLDSGTVTSVKVSELREIPPRFLQEMIAIPPQAIKCCLADLPQSIGMWTPDAVLWLRDSVLNCSDCSIKVTKVDETRGIAHVYLFTPKNFPDPHRSINRQITNADLWKHQKDVFLSAISSGADSPNSKNGNMPMSGNTGENFRKNLTDVIKKSMVDHTSAFSTEELPPPVHLSKPGEHMDVYVPVACHPGYFVIQPWQEIHKLEVLMEEMILYYSVSEERHIAVEKDQVYAAKVENKWHRVLLKGILTNGLVSVYELDYGKHELVNIRKVQPLVDMFRKLPFQAVTAQLAGVKCNQWSEEASMVFRNHVEKKPLVALVQTVIENANPWDRKVVVYLVDTSLPDTDTWIHDFMSEYLIELSKVN

SEQ ID NO: 746896 - protein, 589 aa, Homo sapiens; identical to SEQ ID NO: 746895

SEQ ID NO: 746897 - protein, 128 aa, Homo sapiens
MSGRGKQGGKARAKAKTRSSRAGLQFPVGRVHRLLRKGNYAERVGAGAPVYLAAVLEYLTAEILELAGNAARDNKKTRIIPRHLQLAIRNDEELNKLLGKVTIAQGGVLPNIQAVLLPKKTESHHKTK

SEQ ID NO: 746898 - protein, 204 aa, Homo sapiens
RQPSPSFVRWSPTSRPREAFLTFNPISRAPQSWSSPSSDTQRNGDQEPDAGFPSPCEDPVDQLHAHPVQPPDSVQWGREQTIVHPHSRLQLAEGRGRWGCRATNVDGDRAPGDSLCWGTYGGRIQTPQCLRATRPRQDLVSDDLEAGPEVQEGVPRDREGTGVTTVPPDSHLPAPVGGALFAYRVFAHVVGYNEDAGGGGLCPC

SEQ ID NO: 746899 - protein, 117 aa, Homo sapiens
MKLDSSSGCPRASFQPARPHRARHPHWREFDLMFHKALYLRRRGMGLSPSLCCRNPEFVAAKKTKEITIVIIMTLFMKTHLDVPPNQNNNSGNIQAMAKIIQAIKSSRPLFYKIPKV

SEQ ID NO: 746900 - protein, 706 aa, Homo sapiens
LMGQFGKRLLSWSRLKFAGRDGVGGGGTPVVQFDIEGAPTYSLGLRNLDVSKLKRRRRETRPQRTMATAKGIAIGIDLGTTYSCVGVFQHGKVEIIANDQGNRTTPSYVAFTDTERLIGDAAKNQVAMNPQNTVFDAKRLIGRKFNDPVVQADMKLWPFQVINEGGKPKVLVSYKGENKAFYPEEISSMVLTKLKETAEAFLGHPVTNAVITVPAYFNDSQRQATKDAGVIAGLNVLRIINEPTAAAIAYGLDKGGQGERHVLIFDLGGGTFDVSILTIDDGIFEVKATAGDTHLGGEDFDNRLVSHFVEEFKRKHKKDISQNKRAVRRLRTACERAKRTLSSSTQANLEIDSLYEGIDFYTSITRARFEELCADLFRGTLEPVEKALRDAKMDKAKIHDIVLVGGSTRIPKVQRLLQDYFNGRDLNKSINPDEAVAYGAAVQAAILMGDKSEKVQDLLLLDVAPLSLGLETAGGVMTALIKRNSTIPTKQTQIFTTYSDNQPGVLIQVYEGERAMTKDNNLLGRFDLTGIPPAPRGVPQIEVTFDIDANGILNVTAMDKSTGKVNKITITNDKGRLSKEEIERMVLDAEKYKAEDEVQREKIAAKNALESYAFNMKSVVSDEGLKGKISESDKNKILDKCNELLSWLEVNQLAEKDEFDHKRKELEQMCNPIITKLYQGGCTGPACGTGYVPGRPATGPTIEEVD

SEQ ID NO: 746901 - protein, 706 aa, Homo sapiens; identical to SEQ ID NO: 746900

SEQ ID NO: 746902 - protein, 366 aa, Homo sapiens
MDFLNSSDQNLTSEELLNRMPSKILVSLTLSGLALMTTTINSLVIAAIIVTRKLHHPANYLICSLAVTDFLVAVLVMPFSIVYIVRESWIMGQVVCDIWLSVDITCCTCSILHLSAIALDRYRAITDAVEYARKRTPKHAGIMITIVWIISVFISMPPLFWRHQGTSRDDECIIKHDHIVSTIYSTFGAFYIPLALILILYYKIYRAAKTLYHKRQASRIAKEEVNGQVLLESGEKSTKSVSTSYVLEKSLSDPSTDFDKIHSTVRSLRSEFKHEKSWRRQKISGTRERKAATTLGLILGAFVICWLPFFVKELVVNVCDKCKISEEMSNFLAWLGYLNSLINPLIYTIFNEDFKKAFQKLVRCRC

SEQ ID NO: 746903 - protein, 75 aa, Homo sapiens
MENPLALTGIPPPGPLPGLPMEVVPLLNPITVYPIAPFLSFHVNICKLFLPSKETNISLPSALCERVLDSLHLKT

SEQ ID NO: 746904 - protein, 1396 aa, Homo sapiens
MRSLWFIIVISFLPNTEGFSRAALPFGLVRRELSCEGYSIDLRCPGSDVIMIESANYGRTDDKICDADPFQMENTDCYLPDAFKIMTQRCNNRTQCIVVTGSDVFPDPCPGTYKYLEVQYECVPYIFVCPGTLKAIVDSPCIYEAEQKAGAWCKDPLQAADKIYFMPWTPYRTDTLIEYASLEDFQNSRQTTTYKLPNRVDGTGFVVYDGAVFFNKERTRNIVKFDLRTRIKSGEAIINYANYHDTSPYRWGGKTDIDLAVDENGLWVIYATEQNNGMIVISQLNPYTLRFEATWETVYDKRAASNAFMICGVLYVVRSVYQDNESETGKNSIDYIYNTRLNRGEYVDVPFPNQYQYIAAVDYNPRDNQLYVWNNNFILRYSLEFGPPDPAQVPTTAVTITSSAELFKTIISTTSTTSQKGPMSTTVAGSQEGSKGTKPPPAVSTTKIPPITNIFPLPERFCEALDSKGIKWPQTQRGMMVERPCPKGTRGTASYLCMISTGTWNPKGPDLSNCTSHWVNQLAQKIRSGENAASLANELAKHTKGPVFAGDVSSSVRLMEQLVDILDAQLQELKPSEKDSAGRSYNKAIVDTVDNLLRPEALESWKHMNSSEQAHTATMLLDTLEEGAFVLADNLLEPTRVSMPTENIVLEVAVLSTEGQIQDFKFPLGIKGAGSSIQLSANTVKQNSRNGLAKLVFIIYRSLGQFLSTENATIKLGADFIGRNSTIAVNSHVISVSINKESSRVYLTDPVLFTLPHIDPDNYFNANCSFWNYSERTMMGYWSTQGCKLVDTNKTRTTCACSHLTNFAILMAHREIAYKDGVHELLLTVITWVGIVISLVCLAICIFTFCFFRGLQSDRNTIHKNLCINLFIAEFIFLIGIDKTKYAIACPIFAGLLHFFFLAAFAWMCLEGVQLYLMLVEVFESEYSRKKYYYVAGYLFPATVVGVSAAIDYKSYGTEKACWLHVDNYFIWSFIGPVTFIILLNIIFLVITLCKMVKHSNTLKPDSSRLENIKSWVLGAFALLCLLGLTWSFGLLFINEETIVMAYLFTIFNAFQGVFIFIFHCALQKKVRKEYGKCFRHSYCCGGLPTESPHSSVKASTTRTSARYSSGTQSRIRRMWNDTVRKQSESSFISGDINSTSTLNQGHSLNNARDTSAMDTLPLNGNFNNSYSLHKGDYNDSVQVVDCGLSLNDTAFEKMIISELVHNNLRGSSKTHNLELTLPVKPVIGGSSSEDDAIVADASSLMHSDNPGLELHHKELEAPLIPQRTHSLLYQPQKKVKSEGTDSYVSQLTAEAEDHLQSPNRDSLYTSMPNLRDSPYPESSPDMEEDLSPSRRSENEDIYYKSMPNLGAGHQLQMCYQISRGNSDGYIIPINKEGCIPEGDVREGQMQLVTSL

SEQ ID NO: 746905 - protein, 1396 aa, Homo sapiens; identical to SEQ ID NO: 746904

SEQ ID NO: 746906 - protein, 1396 aa, Homo sapiens; identical to SEQ ID NO: 746904

SEQ ID NO: 746907 - protein, 1170 aa, Homo sapiens
MRSLWFIIVISFLPNTEGFSRAALPFGLVRRELSCEGYSIDLRCPGSDVIMIESANYGRTDDKICDADPFQMENTDCYLPDAFKIMTQRCNNRTQCIVVTGSDVFPDPCPGTYKYLEVQYECVPYIFVCPGTLKAIVDSPCIYEAEQKAGAWCKDPLQAADKIYFMPWTPYRTDTLIEYASLEDFQNSRQTTTYKLPNRVDGTGFVVYDGAVFFNKERTRNIVKFDLRTRIKSGEAIINYANYHDTSPYRWGGKTDIDLAVDENGLWVIYATEQNNGMIVISQLNPYTLRFEATWETVYDKRAASNAFMICGVLYVVRSVYQDNESETGKNSIDYIYNTRLNRGEYVDVPFPNQYQYIAAVDYNPRDNQLYVWNNNFILRYSLEFGPPDPAQVPTTAVTITSSAELFKTIISTTSTTSQKGPMSTTVAGSQEGSKGTKPPPAVSTTKIPPITNIFPLPERFCEALDSKGIKWPQTQRGMMVERPCPKGTRGTASYLCMISTGTWNPKGPDLSNCTSHWVNQLAQKIRSGENAASLANELAKHTKGPVFAGDVSSSVRLMEQLVDILDAQLQELKPSEKDSAGRSYNKAIVDTVDNLLRPEALESWKHMNSSEQAHTATMLLDTLEEGAFVLADNLLEPTRVSMPTENIVLEVAVLSTEGQIQDFKFPLGIKGAGSSIQLSANTVKQNSRNGLAKLVFIIYRSLGQFLSTENATIKLGADFIGRNSTIAVNSHVISVSINKESSRVYLTDPVLFTLPHIDPDNYFNANCSFWNYSERTMMGYWSTQGCKLVDTNKTRTTCACSHLTNFAILMAHREIAYKDGVHELLLTVITWVGIVISLVCLAICIFTFCFFRGLQSDRNTIHKNLCINLFIAEFIFLIGIDKTKYAIACPIFAGLLHFFFLAAFAWMCLEGVQLYLMLVEVFESEYSRKKYYYVAGYLFPATVVGVSAAIDYKSYGTEKACWLHVDNYFIWSFIGPVTFIILLNIIFLVITLCKMVKHSNTLKPDSSRLENIKSWVLGAFALLCLLGLTWSFGLLFINEETIVMAYLFTIFNAFQGVFIFIFHCALQKKVRKEYGKCFRHSYCCGGLPTESPHSSVKASTTRTSARYSSGTQSRIRRMWNDTVRKQSESSFISGDINSTSTLNQGLTSHGLRAHLQDLYHLELLLGQIA

SEQ ID NO: 746908 - protein, 1116 aa, Homo sapiens
MRSLWFIIVISFLPNTEGFSRAALPFGLVRRELSCEGYSIDLRCPGSDVIMIESANYGRTDDKICDADPFQMENTDCYLPDAFKIMTQRCNNRTQCIVVTGSDVFPDPCPGTYKYLEVQYECVPYIFVCPGTLKAIVDSPCIYEAEQKAGAWCKDPLQAADKIYFMPWTPYRTDTLIEYASLEDFQNSRQTTTYKLPNRVDGTGFVVYDGAVFFNKERTRNIVKFDLRTRIKSGEAIINYANYHDTSPYRWGGKTDIDLAVDENGLWVIYATEQNNGMIVISQLNPYTLRFEATWETVYDKRAASNAFMICGVLYVVRSVYQDNESETGKNSIDYIYNTRLNRGEYVDVPFPNQYQYIAAVDYNPRDNQLYVWNNNFILRYSLEFGPPDPAQVPTTAVTITSSAELFKTIISTTSTTSQKGPMSTTVAGSQEGSKGTKPPPAVSTTKIPPITNIFPLPERFCEALDSKGIKWPQTQRGMMVERPCPKGTRGTASYLCMISTGTWNPKGPDLSNCTSHWVNQLAQKIRSGENAASLANELAKHTKGPVFAGDVSSSVRLMEQLVDILDAQLQELKPSEKDSAGRSYNKAIVDTVDNLLRPEALESWKHMNSSEQAHTATMLLDTLEEGAFVLADNLLEPTRVSMPTENIVLEVAVLSTEGQIQDFKFPLGIKGAGSSIQLSANTVKQNSRNGLAKLVFIIYRSLGQFLSTENATIKLGADFIGRNSTIAVNSHVISVSINKESSRVYLTDPVLFTLPHIDPDNYFNANCSFWNYSERTMMGYWSTQGCKLVDTNKTRTTCACSHLTNFAILMAHREIAYKDGVHELLLTVITWVGIVISLVCLAICIFTFCFFRGLQSDRNTIHKNLCINLFIAEFIFLIGIDKTKYAIACPIFAGLLHFFFLAAFAWMCLEGVQLYLMLVEVFESEYSRKKYYYVAGYLFPATVVGVSAAIDYKSYGTEKACWLHVDNYFIWSFIGPVTFIILLNIIFLVITLCKMVKHSNTLKPDSSRLENIKSWVLGAFALLCLLGLTWSFGLLFINEETIVMAYLFTIFNAFQGVFIFIFHCALQKKVRKEYGKCFRHSYCCGGLPTESPHSSVKASTTRTSARYSSGTQDIH

SEQ ID NO: 746909 - protein, 1396 aa, Homo sapiens; identical to SEQ ID NO: 746904

SEQ ID NO: 746910 - protein, 1452 aa, Homo sapiens
MRSLWFIIVISFLPNTEGFSRAALPFGLVRRELSCEGYSIDLRCPGSDVIMIESANYGRTDDKICDADPFQMENTDCYLPDAFKIMTQRCNNRTQCIVVTGSDVFPDPCPGTYKYLEVQYECVPYIFVCPGTLKAIVDSPCIYEAEQKAGAWCKDPLQAADKIYFMPWTPYRTDTLIEYASLEDFQNSRQTTTYKLPNRVDGTGFVVYDGAVFFNKERTRNIVKFDLRTRIKSGEAIINYANYHDTSPYRWGGKTDIDLAVDENGLWVIYATEQNNGMIVISQLNPYTLRFEATWETVYDKRAASNAFMICGVLYVVRSVYQDNESETGKNSIDYIYNTRLNRGEYVDVPFPNQYQYIAAVDYNPRDNQLYVWNNNFILRYSLEFGPPDPAQVPTTAVTITSSAELFKTIISTTSTTSQKGPMSTTVAGSQEGSKGTKPPPAVSTTKIPPITNIFPLPERFCEALDSKGIKWPQTQRGMMVERPCPKGTRGTASYLCMISTGTWNPKGPDLSNCTSHWVNQLAQKIRSGENAASLANELAKHTKGPVFAGDVSSSVRLMEQLVDILDAQLQELKPSEKDSAGRSYNKLQKREKTCRAYLKAIVDTVDNLLRPEALESWKHMNSSEQAHTATMLLDTLEEGAFVLADNLLEPTRVSMPTENIVLEVAVLSTEGQIQDFKFPLGIKGAGSSIQLSANTVKQNSRNGLAKLVFIIYRSLGQFLSTENATIKLGADFIGRNSTIAVNSHVISVSINKESSRVYLTDPVLFTLPHIDPDNYFNANCSFWNYSERTMMGYWSTQGCKLVDTNKTRTTCACSHLTNFAILMAHREIAYKDGVHELLLTVITWVGIVISLVCLAICIFTFCFFRGLQSDRNTIHKNLCINLFIAEFIFLIGIDKTKYAIACPIFAGLLHFFFLAAFAWMCLEGVQLYLMLVEVFESEYSRKKYYYVAGYLFPATVVGVSAAIDYKSYGTEKACWLHVDNYFIWSFIGPVTFIILLNIIFLVITLCKMVKHSNTLKPDSSRLENIKSWVLGAFALLCLLGLTWSFGLLFINEETIVMAYLFTIFNAFQGVFIFIFHCALQKKVRKEYGKCFRHSYCCGGLPTESPHSSVKASTTRTSARYSSGTQSRIRRMWNDTVRKQSESSFISGDINSTSTLNQGMTGNYLLTNPLLRPHGTNNPYNTLLAETVVCNAPSAPVFNSPGHSLNNARDTSAMDTLPLNGNFNNSYSLHKGDYNDSVQVVDCGLSLNDTAFEKMIISELVHNNLRGSSKTHNLELTLPVKPVIGGSSSEDDAIVADASSLMHSDNPGLELHHKELEAPLIPQRTHSLLYQPQKKVKSEGTDSYVSQLTAEAEDHLQSPNRDSLYTSMPNLRDSPYPESSPDMEEDLSPSRRSENEDIYYKSMPNLGAGHQLQMCYQISRGNSDGYIIPINKEGCIPEGDVREGQMQLVTSL

SEQ ID NO: 746911 - protein, 1396 aa, Homo sapiens; identical to SEQ ID NO: 746904

SEQ ID NO: 746912 - protein, 789 aa, Homo sapiens
MNSSEQAHTATMLLDTLEEGAFVLADNLLEPTRVSMPTENIVLEVAVLSTEGQIQDFKFPLGIKGAGSSIQLSANTVKQNSRNGLAKLVFIIYRSLGQFLSTENATIKLGADFIGRNSTIAVNSHVISVSINKESSRVYLTDPVLFTLPHIDPDNYFNANCSFWNYSERTMMGYWSTQGCKLVDTNKTRTTCACSHLTNFAILMAHREIAYKDGVHELLLTVITWVGIVISLVCLAICIFTFCFFRGLQSDRNTIHKNLCINLFIAEFIFLIGIDKTKYAIACPIFAGLLHFFFLAAFAWMCLEGVQLYLMLVEVFESEYSRKKYYYVAGYLFPATVVGVSAAIDYKSYGTEKACWLHVDNYFIWSFIGPVTFIILLNIIFLVITLCKMVKHSNTLKPDSSRLENIKSWVLGAFALLCLLGLTWSFGLLFINEETIVMAYLFTIFNAFQGVFIFIFHCALQKKVRKEYGKCFRHSYCCGGLPTESPHSSVKASTTRTSARYSSGTQSRIRRMWNDTVRKQSESSFISGDINSTSTLNQGHSLNNARDTSAMDTLPLNGNFNNSYSLHKGDYNDSVQVVDCGLSLNDTAFEKMIISELVHNNLRGSSKTHNLELTLPVKPVIGGSSSEDDAIVADASSLMHSDNPGLELHHKELEAPLIPQRTHSLLYQPQKKVKSEGTDSYVSQLTAEAEDHLQSPNRDSLYTSMPNLRDSPYPESSPDMEEDLSPSRRSENEDIYYKSMPNLGAGHQLQMCYQISRGNSDGYIIPINKEGCIPEGDVREGQMQLVTSL

SEQ ID NO: 746913 - protein, 1156 aa, Homo sapiens
MRSLWFIIVISFLPNTEGFSRAALPFGLVRRELSCEGYSIDLRCPGSDVIMIESANYGRTDDKICDADPFQMENTDCYLPDAFKIMTQRCNNRTQCIVVTGSDVFPDPCPGTYKYLEVQYECVPYIFVCPGTLKAIVDSPCIYEAEQKAGAWCKDPLQAADKIYFMPWTPYRTDTLIEYASLEDFQNSRQTTTYKLPNRVDGTGFVVYDGAVFFNKERTRNIVKFDLRTRIKSGEAIINYANYHDTSPYRWGGKTDIDLAVDENGLWVIYATEQNNGMIVISQLNPYTLRFEATWETVYDKRAASNAFMICGVLYVVRSVYQDNESETGKNSIDYIYNTRLNRGEYVDVPFPNQYQYIAAVDYNPRDNQLYVWNNNFILRYSLEFGPPDPAQVPTTAVTITSSAELFKTIISTTSTTSQKGPMSTTVAGSQEGSKGTKPPPAVSTTKIPPITNIFPLPERFCEALDSKGIKWPQTQRGMMVERPCPKGTRGTASYLCMISTGTWNPKGPDLSNCTSHWVNQLAQKIRSGENAASLANELAKHTKGPVFAGDVSSSVRLMEQLVDILDAQLQELKPSEKDSAGRSYNKAIVDTVDNLLRPEALESWKHMNSSEQAHTATMLLDTLEEGAFVLADNLLEPTRVSMPTENIVLEVAVLSTEGQIQDFKFPLGIKGAGSSIQLSANTVKQNSRNGLAKLVFIIYRSLGQFLSTENATIKLGADFIGRNSTIAVNSHVISVSINKESSRVYLTDPVLFTLPHIDPDNYFNANCSFWNYSERTMMGYWSTQGCKLVDTNKTRTTCACSHLTNFAILMAHREIAYKDGVHELLLTVITWVGIVISLVCLAICIFTFCFFRGLQSDRNTIHKNLCINLFIAEFIFLIGIDKTKYAIACPIFAGLLHFFFLAAFAWMCLEGVQLYLMLVEVFESEYSRKKYYYVAGYLFPATVVGVSAAIDYKSYGTEKACWLHVDNYFIWSFIGPVTFIILLNIIFLVITLCKMVKHSNTLKPDSSRLENIKSWVLGAFALLCLLGLTWSFGLLFINEETIVMAYLFTIFNAFQGVFIFIFHCALQKKVRKEYGKCFRHSYCCGGLPTESPHSSVKASTTRTSARYSSGTQSRIRRMWNDTVRKQSESSFISGDINSTSTLNQGGINLNILLQD

SEQ ID NO: 746914 - protein, 1200 aa, Homo sapiens
MRSLWFIIVISFLPNTEGFSRAALPFGLVRRELSCEGYSIDLRCPGSDVIMIESANYGRTDDKICDADPFQMENTDCYLPDAFKIMTQRCNNRTQCIVVTGSDVFPDPCPGTYKYLEVQYECVPYIFVCPGTLKAIVDSPCIYEAEQKAGAWCKDPLQAADKIYFMPWTPYRTDTLIEYASLEDFQNSRQTTTYKLPNRVDGTGFVVYDGAVFFNKERTRNIVKFDLRTRIKSGEAIINYANYHDTSPYRWGGKTDIDLAVDENGLWVIYATEQNNGMIVISQLNPYTLRFEATWETVYDKRAASNAFMICGVLYVVRSVYQDNESETGKNSIDYIYNTRLNRGEYVDVPFPNQYQYIAAVDYNPRDNQLYVWNNNFILRYSLEFGPPDPAQVPTTAVTITSSAELFKTIISTTSTTSQKGPMSTTVAGSQEGSKGTKPPPAVSTTKIPPITNIFPLPERFCEALDSKGIKWPQTQRGMMVERPCPKGTRGTASYLCMISTGTWNPKGPDLSNCTSHWVNQLAQKIRSGENAASLANELAKHTKGPVFAGDVSSSVRLMEQLVDILDAQLQELKPSEKDSAGRSYNKAIVDTVDNLLRPEALESWKHMNSSEQAHTATMLLDTLEEGAFVLADNLLEPTRVSMPTENIVLEVAVLSTEGQIQDFKFPLGIKGAGSSIQLSANTVKQNSRNGLAKLVFIIYRSLGQFLSTENATIKLGADFIGRNSTIAVNSHVISVSINKESSRVYLTDPVLFTLPHIDPDNYFNANCSFWNYSERTMMGYWSTQGCKLVDTNKTRTTCACSHLTNFAILMAHREIAYKDGVHELLLTVITWVGIVISLVCLAICIFTFCFFRGLQSDRNTIHKNLCINLFIAEFIFLIGIDKTKYAIACPIFAGLLHFFFLAAFAWMCLEGVQLYLMLVEVFESEYSRKKYYYVAGYLFPATVVGVSAAIDYKSYGTEKACWLHVDNYFIWSFIGPVTFIILLNIIFLVITLCKMVKHSNTLKPDSSRLENIKSWVLGAFALLCLLGLTWSFGLLFINEETIVMAYLFTIFNAFQGVFIFIFHCALQKKVRKEYGKCFRHSYCCGGLPTESPHSSVKASTTRTSARYSSGTQSRIRRMWNDTVRKQSESSFISGDINSTSTLNQGMTGNYLLTNPLLRPHGTNNPYNTLLAETVVCNAPSAPVFNSPATLRPDSLSRQT

SEQ ID NO: 746915 - protein, 1414 aa, Homo sapiens
MRSLWFIIVISFLPNTEGFSRAALPFGLVRRELSCEGYSIDLRCPGSDVIMIESANYGRTDDKICDADPFQMENTDCYLPDAFKIMTQRCNNRTQCIVVTGSDVFPDPCPGTYKYLEVQYECVPYIFVCPGTLKAIVDSPCIYEAEQKAGAWCKDPLQAADKIYFMPWTPYRTDTLIEYASLEDFQNSRQTTTYKLPNRVDGTGFVVYDGAVFFNKERTRNIVKFDLRTRIKSGEAIINYANYHDTSPYRWGGKTDIDLAVDENGLWVIYATEQNNGMIVISQLNPYTLRFEATWETVYDKRAASNAFMICGVLYVVRSVYQDNESETGKNSIDYIYNTRLNRGEYVDVPFPNQYQYIAAVDYNPRDNQLYVWNNNFILRYSLEFGPPDPAQVPTTAVTITSSAELFKTIISTTSTTSQKGPMSTTVAGSQEGSKGTKPPPAVSTTKIPPITNIFPLPERFCEALDSKGIKWPQTQRGMMVERPCPKGTRGTASYLCMISTGTWNPKGPDLSNCTSHWVNQLAQKIRSGENAASLANELAKHTKGPVFAGDVSSSVRLMEQLVDILDAQLQELKPSEKDSAGRSYNKAIVDTVDNLLRPEALESWKHMNSSEQAHTATMLLDTLEEGAFVLADNLLEPTRVSMPTENIVLEVAVLSTEGQIQDFKFPLGIKGAGSSIQLSANTVKQNSRNGLAKLVFIIYRSLGQFLSTENATIKLGADFIGRNSTIAVNSHVISVSINKESSRVYLTDPVLFTLPHIDPDNYFNANCSFWNYSERTMMGYWSTQGCKLVDTNKTRTTCACSHLTNFAILMAHREIAYKDGVHELLLTVITWVGIVISLVCLAICIFTFCFFRGLQSDRNTIHKNLCINLFIAEFIFLIGIDKTKYAIACPIFAGLLHFFFLAAFAWMCLEGVQLYLMLVEVFESEYSRKKYYYVAGYLFPATVVGVSAAIDYKSYGTEKACWLHVDNYFIWSFIGPVTFIILLNIIFLVITLCKMVKHSNTLKPDSSRLENIKSWVLGAFALLCLLGLTWSFGLLFINEETIVMAYLFTIFNAFQGVFIFIFHCALQKKVRKEYGKCFRHSYCCGGLPTESPHSSVKASTTRTSARYSSGTQSRIRRMWNDTVRKQSESSFISGDINSTSTLNQGLTSHGLESPSSRFISFRGHSLNNARDTSAMDTLPLNGNFNNSYSLHKGDYNDSVQVVDCGLSLNDTAFEKMIISELVHNNLRGSSKTHNLELTLPVKPVIGGSSSEDDAIVADASSLMHSDNPGLELHHKELEAPLIPQRTHSLLYQPQKKVKSEGTDSYVSQLTAEAEDHLQSPNRDSLYTSMPNLRDSPYPESSPDMEEDLSPSRRSENEDIYYKSMPNLGAGHQLQMCYQISRGNSDGYIIPINKEGCIPEGDVREGQMQLVTSL

SEQ ID NO: 746916 - protein, 464 aa, Homo sapiens
MSIHGYLFPATVVGVSAAIDYKSYGTEKACWLHVDNYFIWSFIGPVTFIILLNIIFLVITLCKMVKHSNTLKPDSSRLENIKSWVLGAFALLCLLGLTWSFGLLFINEETIVMAYLFTIFNAFQGVFIFIFHCALQKKVRKEYGKCFRHSYCCGGLPTESPHSSVKASTTRTSARYSSGTQSRIRRMWNDTVRKQSESSFISGDINSTSTLNQGHSLNNARDTSAMDTLPLNGNFNNSYSLHKGDYNDSVQVVDCGLSLNDTAFEKMIISELVHNNLRGSSKTHNLELTLPVKPVIGGSSSEDDAIVADASSLMHSDNPGLELHHKELEAPLIPQRTHSLLYQPQKKVKSEGTDSYVSQLTAEAEDHLQSPNRDSLYTSMPNLRDSPYPESSPDMEEDLSPSRRSENEDIYYKSMPNLGAGHQLQMCYQISRGNSDGYIIPINKEGCIPEGDVREGQMQLVTSL

SEQ ID NO: 746917 - protein, 403 aa, Homo sapiens
MVSSGCRMRSLWFIIVISFLPNTEGFSRAALPFGLVRRELSCEGYSIDLRCPGSDVIMIESANYGRTDDKICDADPFQMENTDCYLPDAFKIMTQRLQLFTVGNAGKPGTFQVLAFKYNFVLNDIKKFCTKEIEFLWKGTEDSNDNSPSSVSGHSLNNARDTSAMDTLPLNGNFNNSYSLHKGDYNDSVQVVDCGLSLNDTAFEKMIISELVHNNLRGSSKTHNLELTLPVKPVIGGSSSEDDAIVADASSLMHSDNPGLELHHKELEAPLIPQRTHSLLYQPQKKVKSEGTDSYVSQLTAEAEDHLQSPNRDSLYTSMPNLRDSPYPESSPDMEEDLSPSRRSENEDIYYKSMPNLGAGHQLQMCYQISRGNSDGYIIPINKEGCIPEGDVREGQMQLVTSL

SEQ ID NO: 746918 - protein, 1156 aa, Homo sapiens; identical to SEQ ID NO: 746913

SEQ ID NO: 746919 - protein, 262 aa, Homo sapiens
SEPLQRKQMLARHSLNNARDTSAMDTLPLNGNFNNSYSLHKGDYNDSVQVVDCGLSLNDTAFEKMIISELVHNNLRGSSKTHNLELTLPVKPVIGGSSSEDDAIVADASSLMHSDNPGLELHHKELEAPLIPQRTHSLLYQPQKKVKSEGTDSYVSQLTAEAEDHLQSPNRDSLYTSMPNLRDSPYPESSPDMEEDLSPSRRSENEDIYYKSMPNLGAGHQLQMCYQISRGNSDGYIIPINKEGCIPEGDVREGQMQLVTSL

SEQ ID NO: 746920 - protein, 624 aa, Homo sapiens
MRSLWFIIVISFLPNTEGFSRAALPFGLVRRELSCEGYSIDLRCPGSDVIMIESANYGRTDDKICDADPFQMENTDCYLPDAFKIMTQRCNNRTQCIVVTGSDVFPDPCPGTYKYLEVQYECVPYIFVCPGTLKAIVDSPCIYEAEQKAGAWCKDPLQAADKIYFMPWTPYRTDTLIEYASLEDFQNSRQTTTYKLPNRVDGTGFVVYDGAVFFNKERTRNIVKFDLRTRIKSGEAIINYANYHDTSPYRWGGKTDIDLAVDENGLWVIYATEQNNGMIVISQLNPYTLRFEATWETVYDKRAASNAFMICGVLYVVRSVYQDNESETGKNSIDYIYNTRLNRGEYVDVPFPNQYQYIAAVDYNPRDNQLYVWNNNFILRYSLEFGPPDPAQVPTTAVTITSSAELFKTIISTTSTTSQKGPMSTTVAGSQEGSKGTKPPPAVSTTKIPPITNIFPLPERFCEALDSKGIKWPQTQRGMMVERPCPKGTRGTASYLCMISTGTWNPKGPDLSNCTSHWVNQLAQKIRSGENAASLANELAKHTKGPVFAGDVSSSVRLMEQLVDILDAQLQELKPSEKDSAGRSYNKLQKREKTCRAYLKVSLLCCHPAFSLLQLPATLYHLAA

SEQ ID NO: 746921 - protein, 156 aa, Homo sapiens
IPQTFCRFCGYTHSSSQRMKFTTLLFLAAVAGALVYAEDASSDSTGADPAQEAGTSKPNEEISGPAEPASPPETTTTAQETSAAAVQGTAKVTSSRQELNPLKSIVEKSILLTEQALAKAGKGMHGGVPGGKQFIENGSEFAQKLLKKFSLLKPWA

SEQ ID NO: 746922 - protein, 349 aa, Homo sapiens
CCLSSQVAGVGRLERDSEKVPAEGGRRYGDSQGVADEDGGRRTSHHVWRINGLHGHSGAESRERVSDDGERKCEESDRRSRVAAGSLSADAGFSRSDLRRVSENLGHCRSVSRERVRGDSGHSHSCSWERVRGDSTFCSSDVNFSEVGGHQTTDSRGTAREDRGLRLSGPWEGVSDIRDPRTSDFGDRVSDDRSRRFSGSWEGGSVEGGHSVGSSWEEVSGDRGYAASDSSGVSGSEDASYRFSGFWERESEDEGFRCSFWERAREDLGPRPSDDGEEGRCRCSGSWVRASEDASYRFSGFWERESEDEGSAAASGREPERTLGPVLVTTEKRALPLQWLVGGSIWCKP

SEQ ID NO: 746923 - protein, 425 aa, Homo sapiens
CCLSSQVAGVGRLERDSEKVPAEGGRRYGDSQGVADEDGGRRTSHHVWRINGLHGHSGAESRERVSDDGERKCEESDRRSRVAAGSLSADAGFSRSDLRRVSENLGHCRSVSRERVRGDSGHSHSCSWERVRGDSTFCSSDVNFSEVGGHQTTDSRGTAREDRGLRLSGPWEGVSDIRDPRTSDFGDRVSDDRSRRFSGSWEGGSVEGGHSVGSSWEEVSGDRGYAASDSSGVSGSEDASYRFSGFWERESEDEGFRCSFWERAREDLGPRPSDDGEEGRCRCSGSWVRASEDRRSIRGLDSTPPQSRRCCAMPGVANSGPSTSSRETANPCSRKKVHFGSIHDAVRAGDVKQLSEIVVRGASINELDVLHKFTPLHWAAHSGSLECLHWLLWHGADITHVTTRGWTASHIAAIRGQDACVQVII

SEQ ID NO: 746924 - protein, 55 aa, Homo sapiens
MILAVGLSVCGFYCVEACSFYIQLSFYHEGMLNFTEYFFGIYRNGHMVMSFILLM

SEQ ID NO: 746925 - protein, 134 aa, Homo sapiens
GRLGPPGSLREEAGAGKEGSLGPAWGGRQEGPRAQCGPFFSLCATEPRARLLCEEDALTPSDLGSDGAEIAGPGLVARLVPHLGLCERPGAGSCLFPSFRQVCIQERGGQGQKDAGRLLISTEELISCETLTVI

SEQ ID NO: 746926 - protein, 103 aa, Homo sapiens
ALRVLSGPHPIIAQHTPFNMRGHPFIALRPERSHRPENTEQAAALTLLDTLEPEGVLAVFDHGQHVPDGEPRHGGLVHLQQQLLRHQFAAALIGHLAGLHLPQ

SEQ ID NO: 746927 - protein, 126 aa, Homo sapiens
ALRVLSGPHPIIAQHTPFNMRGHPFIALRPERSHRPENTEQAAALTLLDTLEPEGVLAVFDHGQHVPDGEPRHGGLVHLQQQLLRHQFAAALIGHLAGLHLPQQRKQWWWRRRRRRRQPERAVAEL

SEQ ID NO: 746928 - protein, 115 aa, Homo sapiens
GRLGPPGSLREEAGAGKEGSLGPAWGGRQEGPRAQCGPFFSLCATEPRARLLCEEDALTPSDLGSDGAEIAGPGLVARLVPHLGLCERPGAGSCRLHPREGRTGAKGCREAADFH

SEQ ID NO: 746929 - protein, 115 aa, Homo sapiens; identical to SEQ ID NO: 746928

SEQ ID NO: 746930 - protein, 126 aa, Homo sapiens; identical to SEQ ID NO: 746927

SEQ ID NO: 746931 - protein, 115 aa, Homo sapiens; identical to SEQ ID NO: 746928

SEQ ID NO: 746932 - protein, 115 aa, Homo sapiens [sequence omitted]

SEQ ID NO: 746933 - protein, 105 aa, Homo sapiens
MRGLGSSWLLRGLERHTSRSLAELVPQQDLVSLHCCRCISPPHVGAAVTSYWDPSPIQPHPGCGTTRCPVPLGRRRGGTCNAPSQPGKHSGFTLCKEGWYPLSGV

SEQ ID NO: 746934 - protein, 105 aa, Homo sapiens; identical to SEQ ID NO: 746933

SEQ ID NO: 746935 - protein, 842 aa, Homo sapiens
MKRGRLPSSSEDSDDNGSLSTTWSQNSRSQHRRSSCSRHEDRKPSEVFRTDLITAMKLHDSYQLNPDEYYVLADPWRQEWEKGVQVPVSPGTIPQPVARVVSEEKSLMFIRPKKYIVSSGSEPPELGYVDIRTLADSVCRYDLNDMDAAWLELTNEEFKEMGMPELDEYTMERVLEEFEQRCYDNMNHAIETEEGLGIEYDEDVVCDVCQSPDGEDGNEMVFCDKCNICVHQACYGILKVPEGSWLCRTCALGVQPKCLLCPKKGGAMKPTRSGTKWVHVSCALWIPEVSIGSPEKMEPITKVSHIPSSRWALVCSLCNEKFGASIQCSVKNCRTAFHVTCAFDRGLEMKTILAENDEVKFKSYCPKHSSHRKPEESLGKGAAQENGAPECSPRNPLEPFASLEQNREEAHRVSVRKQKLQQLEDEFYTFVNLLDVARALRLPEEVVDFLYQYWKLKRKVNFNKPLITPKKDEEDNLAKREQDVLFRRLQLFTHLRQDLERVRNLTYMVTRREKIKRSVCKVQEQIFNLYTKLLEQERVSGVPSSCSSSSLENMLLFNSPSVGPDAPKIEDLKWHSAFFRKQMGTSLVHSLKKPHKRDPLQNSPGSEGKTLLKQPDLCGRREGMVVPESFLGLEKTFAEARLISAQQKNGVVMPDHGKRRDNRFHCDLIKGDLKDKSFKQSHKPLRSTDVSQRHLDNTRAATSPGVGQSAPGTRKEIVPKCNGSLIKVNYNQTAVKVPTTPASPVKNWGGFRIPKKGERQQQGEAHDGACHQHSDYPYLGLGRVPAKERAKSKLKSDNENDGYVPDVEMSDSESEASEKKCIHTSSTISRRTDIIRRSILAS

SEQ ID NO: 746936 - protein, 907 aa, Homo sapiens
GWYGPEFLVTCASARCVRAGESRGPPGSPPAAARTHAAPSERAAPSPAPRPNPSAAGCLLFPGEIMKRGRLPSSSEDSDDNGSLSTTWSQNSRSQHRRSSCSRHEDRKPSEVFRTDLITAMKLHDSYQLNPDEYYVLADPWRQEWEKGVQVPVSPGTIPQPVARVVSEEKSLMFIRPKKYIVSSGSEPPELGYVDIRTLADSVCRYDLNDMDAAWLELTNEEFKEMGMPELDEYTMERVLEEFEQRCYDNMNHAIETEEGLGIEYDEDVVCDVCQSPDGEDGNEMVFCDKCNICVHQACYGILKVPEGSWLCRTCALGVQPKCLLCPKKGGAMKPTRSGTKWVHVSCALWIPEVSIGSPEKMEPITKVSHIPSSRWALVCSLCNEKFGASIQCSVKNCRTAFHVTCAFDRGLEMKTILAENDEVKFKSYCPKHSSHRKPEESLGKGAAQENGAPECSPRNPLEPFASLEQNREEAHRVSVRKQKLQQLEDEFYTFVNLLDVARALRLPEEVVDFLYQYWKLKRKVNFNKPLITPKKDEEDNLAKREQDVLFRRLQLFTHLRQDLERVRNLTYMVTRREKIKRSVCKVQEQIFNLYTKLLEQERVSGVPSSCSSSSLENMLLFNSPSVGPDAPKIEDLKWHSAFFRKQMGTSLVHSLKKPHKRDPLQNSPGSEGKTLLKQPDLCGRREGMVVPESFLGLEKTFAEARLISAQQKNGVVMPDHGKRRDNRFHCDLIKGDLKDKSFKQSHKPLRSTDVSQRHLDNTRAATSPGVGQSAPGTRKEIVPKCNGSLIKVNYNQTAVKVPTTPASPVKNWGGFRIPKKGERQQQGEAHDGACHQHSDYPYLGLGRVPAKERAKSKLKSDNENDGYVPDVEMSDSESEASEKKCIHTSSTISRRTDIIRRSILAS

SEQ ID NO: 746937 - protein, 842 aa, Homo sapiens; identical to SEQ ID NO: 746935

SEQ ID NO: 746938 - protein, 842 aa, Homo sapiens; identical to SEQ ID NO: 746935

SEQ ID NO: 746939 - protein, 509 aa, Homo sapiens
MKRGRLPSSSEDSDDNGSLSTTWSQNSRSQHRRSSCSRHEDRKPSEVFRTDLITAMKLHDSYQLNPDEYYVLADPWRQEWEKGVQVPVSPGTIPQPVARVVSEEKSLMFIRPKKYIVSSGSEPPELGYVDIRTLADSVCRYDLNDMDAAWLELTNEEFKEMGMPELDEYTMERVLEEFEQRCYDNMNHAIETEEGLGIEYDEDVVCDVCQSPDGEDGNEMVFCDKCNICVHQACYGILKVPEGSWLCRTCALGVQPKCLLCPKKGGAMKPTRSGTKWVHVSCALWIPEVSIGSPEKMEPITKVSHIPSSRWALVCSLCNEKFGASIQCSVKNCRTAFHVTCAFDRGLEMKTILAENDEVKFKSYCPKHSSHRKPEESLGKGAAQENGAPECSPRNPLEPFASLEQNREEAHRVSVRKQKLQQLEDEFYTFVNLLDVARALRLPEEVVDFLYQYWKLKRKVNFNKPLITPKKDEEDNLAKREQDVLFRRLQLFTHLRQDLERVMIDTDTL

SEQ ID NO: 746940 - protein, 876 aa, Homo sapiens
GTRQWGCLNFRGRLNSSLSPLPPVIGCLLFPGEIMKRGRLPSSSEDSDDNGSLSTTWSQNSRSQHRRSSCSRHEDRKPSEVFRTDLITAMKLHDSYQLNPDEYYVLADPWRQEWEKGVQVPVSPGTIPQPVARVVSEEKSLMFIRPKKYIVSSGSEPPELGYVDIRTLADSVCRYDLNDMDAAWLELTNEEFKEMGMPELDEYTMERVLEEFEQRCYDNMNHAIETEEGLGIEYDEDVVCDVCQSPDGEDGNEMVFCDKCNICVHQACYGILKVPEGSWLCRTCALGVQPKCLLCPKKGGAMKPTRSGTKWVHVSCALWIPEVSIGSPEKMEPITKVSHIPSSRWALVCSLCNEKFGASIQCSVKNCRTAFHVTCAFDRGLEMKTILAENDEVKFKSYCPKHSSHRKPEESLGKGAAQENGAPECSPRNPLEPFASLEQNREEAHRVSVRKQKLQQLEDEFYTFVNLLDVARALRLPEEVVDFLYQYWKLKRKVNFNKPLITPKKDEEDNLAKREQDVLFRRLQLFTHLRQDLERVRNLTYMVTRREKIKRSVCKVQEQIFNLYTKLLEQERVSGVPSSCSSSSLENMLLFNSPSVGPDAPKIEDLKWHSAFFRKQMGTSLVHSLKKPHKRDPLQNSPGSEGKTLLKQPDLCGRREGMVVPESFLGLEKTFAEARLISAQQKNGVVMPDHGKRRDNRFHCDLIKGDLKDKSFKQSHKPLRSTDVSQRHLDNTRAATSPGVGQSAPGTRKEIVPKCNGSLIKVNYNQTAVKVPTTPASPVKNWGGFRIPKKGERQQQGEAHDGACHQHSDYPYLGLGRVPAKERAKSKLKSDNENDGYVPDVEMSDSESEASEKKCIHTSSTISRRTDIIRRSILAS

SEQ ID NO: 746941 - protein, 842 aa, Homo sapiens; identical to SEQ ID NO: 746935

SEQ ID NO: 746942 - protein, 89 aa, Homo sapiens
ITAVLISFGHWGQWGESLLRSTNSSNPCWKRPQATIALDTELYAGLCCPRRLSCADEKGWGEARGRGGAELHKRAKPAVSNALVAVQGK

SEQ ID NO: 746943 - protein, 89 aa, Homo sapiens; identical to SEQ ID NO: 746942

SEQ ID NO: 746944 - protein, 357 aa, Homo sapiens
MNWVNKSVPQEFILLVFSDQPWLEIPPFVMFLFSYILTIFGNLTIILVSHVDFKLHTPMYFFLSNLSLLDLCYTTSTVPQMLVNICNTRKVISYGGCVAQLFIFLALGSTECLLLAVMCFDRFVAICRPLHYSIIMHQRLCFQLAAASWISGFSNSVLQSTWTLKMPLCGHKEVDHFFCEVPALLKLSCVDTTANEAELFFISVLFLLIPVTLILISYAFIVQAVLRIQSAEGQRKAFGTCGSHLIVVSLFYGTAISMYLQPPSPSSKDRGKMVSLFCGIIAPMLNPLIYTLRNKEVKEAFKRLVAKSLLNQEIRNMQMISFAKDTVLTYLTNFSASCPIFVITIENYCNLPQRKFP

SEQ ID NO: 746945 - protein, 107 aa, Homo sapiens [sequence omitted]

SEQ ID NO: 746946 - protein, 226 aa, Homo sapiens
LPSQLVILGPDVCHDFGKVLRFGASTSTVNSELAIWACEAFYFLFVVLLHEEQLLLEGLDLCLQLQPSDIGVINFLAKPMDVVLHRLAHGQLCLILDSKVISSKTGTVDLQNGAGIVHSICRDLSPQVLDGLEVMAPVSDLGSLLLQMLPDFALQLLVLSLQAPHSAQVGGQAVVQALHGLLLVLDASHSCQTPGHPRGQAPDPMPPWKLVEQDTEIQEPEPPAPA

SEQ ID NO: 746947 - protein, 407 aa, Homo sapiens
MNKSQGSVSFTDVTVDFTQEEWEQLDPSQRILYMDVMLENYSNLLSVEVWKADDQMERDHRNPDEQARQFLILKNQTPIEERGDLFGKALNLNTDFVSLRQVPYKYDLYEKTLKYNSDLLNSNRSYAGKQTDECNEFGKALLYLKQEKTHSGVEYSEYNKSGKALSHKAAIFKHQKIKNLVQPFICTYCDKAFSFKSLLISHKRIHTGEKPYECNVCKKTFSHKANLIKHQRIHTGEKPFECPECGKAFTHQSNLIVHQRAHMEKKPYECSECGKTFAQKFELTTHQRIHTGERPYECNECAKTFFKKSNLIIHQKIHTGEKRYECSECGKSFIQNSQLIIHMRTHTGEKPYECTECGKTFSQRSTLRLHLRIHTGEKPYECSECGKAFSRKSRLSVHQRVHIGEKP

SEQ ID NO: 746948 - protein, 219 aa, Homo sapiens
MDRSLRNVLVVSFGFLLLFTAYGGLQSLQSSLYSEEGLGVTALSTLYGGMLLSSMFLPPLLIERLGCKGTIILSMCGYVAFSVGNFFASWYTLIPTSILLGLGAAPLWSAQCTYLTITGNTHAEKAGKRGKDMVNQYFGIFFLIFQSSGVWGNLISSLVFGQTPSQETLPEEQLTSCGASDCLMATTTTNSTQRPSQQLVYTLLGIYTGTSSIGPGQGP

SEQ ID NO: 746949 - protein, 159 aa, Homo sapiens
MEGLSDVASFATKLKNTLIQYHSIEEDKWRVAKKTKDVTVWRKPSEEFNGYLYKAQGVIDDLVYSIIDHIRPGPCRLDWDSLMTSLDILENFEENCCVMRYTTAGQLWNIISPREFVDFSYTVGYKEGLLSCGNNLNMLCFFSVWFKYLCFLGWMSLSL

SEQ ID NO: 746950 - protein, 127 aa, Homo sapiens
RTLYSSYWFGENLRRINGYLYKAQGVIDDLVYSIIDHIRPGPCRLDWDSLMTSLDILENFEENCCVMRYTTAGQLWNIISPREFVDFSYTVGYKEGLLSCGNNLNMLCFFSVWFKYLCFLGWMSLSL

SEQ ID NO: 746951 - protein, 122 aa, Homo sapiens
PNPCDTNFLYNKPAHVSLSLKQKFFKKKKSNYFKMFYKALQWLIPAYFSTSYHVIFFPHTRHIPGTLATFQFLKPTLFLDLEAFNSMFLNSILPGSIPSVLFTGKTPLPSRDCCPLKCGFPQ

SEQ ID NO: 746952 - protein, 525 aa, Homo sapiens
VHIMDPGCLYYGVQPVGTPGAPDRRESRGVCQGRAEHRLSRQDLEAREDAGYASLELPGDSTLLSPTLETEETSDDLISPYASFSFTADRLTPLLSGWLDKLSPQGNYVFQRRFVQFNGRSLMYFGSDKDPFPKGVIPLTAIEMTRSSKDNKFQVITGQRVFVFRTESEAQRDMWCSTLQSCLKEQRLLGHPRPPQPPRPLRTGMLELRGHKAKVFAALSPGELALYKSEQAFSLGIGICFIELQGCSVRETKSRSFDLLTPHRCFSFTAESGGARQSWAAALQEAVTETLSDYEVAEKIWSNRANRQCADCGSSRPDWAAVNLGVVICKQCAGQHRALGSGISKVQSLKLDTSVWSNEIVQLFIVLGNDRANRFWAGTLPPGEGLHPDATPGPRGEFISRKYRLGLFRKPHPQYPDHSQLLQALCAAVARPNLLKNMTQLLCVEAFEGEEPWFPPAPDGSCPGLLPSDPSPGVYNEVVVRATYSGFLYCSPVSNKAGPSPPRRGRDAPPRLWCVLGAALEMFAS

SEQ ID NO: 746953 - protein, 123 aa, Homo sapiens
RSKVTNSVQVITHVKEKLHFMDMENACKKTQLAEIEAQAALGRDILTKTKQAREGLRTDNIRLNQKCGLLGKDSLLRDLEEKVDKTELLHRRLESLKRHHASLTLSCRGVRQKIREAKAFLPS

SEQ ID NO: 746954 - protein, 877 aa, Homo sapiens
MARPRRAREPLLVALLPLAWLAQAGLARAAGSVRLAGGLTLGGLFPVHARGAAGRACGPLKKEQGVHRLEAMLYALDRVNADPELLPGVRLGARLLDTCSRDTYALEQALSFVQALIRGRGDGDEVGVRCPGGVPPLRPAPPERVVAVVGASASSVSIMVANVLRLFAIPQISYASTAPELSDSTRYDFFSRVVPPDSYQAQAMVDIVRALGWNYVSTLASEGNYGESGVEAFVQISREAGGVCIAQSIKIPREPKPGEFSKVIRRLMETPNARGIIIFANEDDIRRVLEAARQANLTGHFLWVGSDSWGAKTSPILSLEDVAVGAITILPKRASIDGFDQYFMTRSLENNRRNIWFAEFWEENFNCKLTSSGTQSDDSTRKCTGEERIGRDSTYEQEGKVQFVIDAVYAIAHALHSMHQALCPGHTGLCPAMEPTDGRMLLQYIRAVRFNGSAGTPVMFNENGDAPGRYDIFQYQATNGSASSGGYQAVGQWAETLRLDVEALQWSGDPHEVPSSLCSLPCGPGERKKMVKGVPCCWHCEACDGYRFQVDEFTCEACPGDMRPTPNHTGCRPTPVVRLSWSSPWAAPPLLLAVLGIVATTTVVATFVRYNNTPIVRASGRELSYVLLTGIFLIYAITFLMVAEPGAAVCAARRLFLGLGTTLSYSALLTKTNRIYRIFEQGKRSVTPPPFISPTSQLVITFSLTSLQVVGMIAWLGARPPHSVIDYEEQRTVDPEQARGVLKCDMSDLSLIGCLGYSLLLMVTCTVYAIKARGVPETFNEAKPIGFTMYTTCIIWLAFVPIFFGTAQSAEKIYIQTTTLTVSLSLSASVSLGMLYVPKTYVILFHPEQNVQKRKRSLKATSTVAAPPKGEDAEAHK

SEQ ID NO: 746955 - protein, 247 aa, Homo sapiens
MAWAGSRRVPAGTRAAAERCCRLSLSPGAQPAPPPGPLPPPRPMRFLTSCSLLLPRAAQILAAEAGLPSSRSFMGFAAPFTNKRKAYSERRIMGYSMQEMYEVVSNVQEYREFVPWCKKSLVVSSRKGHLKAQLEVGFPPVMERYTSAVSMVKPHMVKAVCTDGKLFNHLETIWRFSPGIPAYPRTCTVDFSISFEFRSLLHSQLATMFFDEVVKQNVAAFERRAATKFGPETAIPRELMFHEVHQT

SEQ ID NO: 746956 - protein, 252 aa, Homo sapiens
GSLRTPGFRGGGVLYWDAGAAGTGSNHALGANVELWIMLLQVVREGKFSGFLTSCSLLLPRAAQILAAEAGLPSSRSFMGFAAPFTNKRKAYSERRIMGYSMQEMYEVVSNVQEYREFVPWCKKSLVVSSRKGHLKAQLEVGFPPVMERYTSAVSMVKPHMVKAVCTDGKLFNHLETIWRFSPGIPAYPRTCTVDFSISFEFRSLLHSQLATMFFDEVVKQNVAAFERRAATKFGPETAIPRELMFHEVHQT

SEQ ID NO: 746957 - protein, 247 aa, Homo sapiens; identical to SEQ ID NO: 746955

SEQ ID NO: 746958 - protein, 151 aa, Homo sapiens
MQEMYEVVSNVQEYREFVPWCKKSLVVSSRKGHLKAQLEVGFPPVMERYTSAVSMVKPHMVKAVCTDGKLFNHLETIWRFSPGIPAYPRTCTVDFSISFEFRSLLHSQLATMFFDEVVKQNVAAFERRAATKFGPETAIPRELMFHEVHQT

SEQ ID NO: 746959 - protein, 176 aa, Homo sapiens
MAWAGSRRVPAGTRAAAERCCRLSLSPGAQPAPPPGPLPPPRPMRFLTSCSLLLPRAAQILAAEAGLPSSRSFMGFAAPFTNKRKAYSERRIMGYSMQEMYEVVSNVQEYREFVPWCKKSLVVSSRKGHLKAQLEVGFPPVMERYTSAVSMVKPHMVKVRPVWEGLTRFFVFSSFI

SEQ ID NO: 746960 - protein, 114 aa, Homo sapiens
MAWAGSRRVPAGTRAAAERCCRLSLSPGAQPAPPPGPLPPPRPMRFLTSCSLLLPRAAQILAAEAGLPSSRSFMGFAAPFTNKRKAYSERRIMGYSMQEMYEVVSNVQEYRCLY

SEQ ID NO: 746961 - protein, 193 aa, Homo sapiens
MDGGTLPRSAPPAPPVPVGCAARRRPASPELLRCSRRRRPATAETGGGAAAVARRNERERNRVKLVNLGFQALRQHVPHGGASKKLSKVETLRSAVEYIRALQRLLAEHDAVRNALAGGLRPQAVRPSAPRGPPGTTPVAASPSRASSSPGRGGSSEPGSPRSAYSSDDSGCEGALSPAERELLDFSSWLGGY

SEQ ID NO: 746962 - protein, 736 aa, Homo sapiens
MAGIIKKQILKHLSRFTKNLSPDKINLSTLKGEGQLTNLELDEEVLQNVLELPTWLAITRVYCNRASIRIQWTKLKTHPICLCLDKVEVEMKTCEDPRPPNGQSPIALASGQSEYGFAEKVVEGMFIIVNSITIKIHSKAFHASFELWQLQGYSVNPNWQQSDLRLTRITDPCRGEVLTFKEITWQTLRIEADATDNGDQDPVTTPLRLITNQGRIQIALKRRTKDCNVISSKLMFLLDDLLWVLTDSQLKAMMKYAESLSEAMEKSAHQRKSLAPEPVQITPPAPSAQQSWAQAFGGSQGNSNSSSSRLSQYFEKFDVKESSYHLLISRLDLHICDDSQSREPGVSANRLMGGAMQLTFRKMAFDYYPFHWAGDSCKHWVRHCEAMETRGQWAQKLVMEFQSKMEKWHEETGLKPPWHLGVDSLFRRKADSLSSPRKNPLERSPSQGRQPAFQPPAWNRLRSSCMVVRVDDLDIHQVSTAGQPSKKPSTLLSCSRKLHNLPTQVSAIHIEFTEYYFPDNQELPVPCPNLYIQLNGLTFTMDPVSLLWGNLFCLDLYRSLEQFKAIYKLEDSSQKDEHLDIRLDAFWLKVSFPLEKRERAELHRPQALVFSASGMIATNTRHAPHCSCSDLQSLFRGFAAAEFFHSNYDHFPKVPGGFSLLHMLFLHHAFQMDSCLPPLTGFLPKWAIIEEFTKNNSLIIPTIIATITLLNLYFYLRLIYSTSITLLPISNNVKIK

SEQ ID NO: 746963 - protein, 126 aa, Homo sapiens
MPEPSKSAPAPKKGSKKAITKAQKKDGKKRKRSRKESYSIYVYKVLKQVHPDTGISSKAMGIMNSFVNDIFERIAGEASRLAHYNKRSTITSREIQTAVRLLLPGELAKHAVSEGTKAVTKYTSSK

SEQ ID NO: 746964 - protein, 186 aa, Homo sapiens
  misc_feature (4)..(4): Xaa can be any naturally occurring amino acid
  misc_feature (24)..(24): Xaa can be any naturally occurring amino acid
KKAXGQAYWTFNRVEEKLLEVGSXPYQEEAARHTYQALNSLLVAELPQFNQLVMQWLGQILCTFVTLQRDLAKQVLQRAEGSMAQLPHHHVPEPAFRKLVEDALGRTSNQLRSFQETFEKVQPPPTTQPLLPGSERQVQALLSRYGPGKLYQVTSNISGTGTLDLTLPRGQIVAILQNKDTKGNSG

SEQ ID NO: 746965 - protein, 70 aa, Homo sapiens
MLVPALTGLFKHLCLSVLLLSQPLLPGSERQVQALLSRYGPGKLYQVTSNISGTGTLDLTLPRGQIVAIL

SEQ ID NO: 746966 - protein, 150 aa, Homo sapiens
RPHACFAPTAWVHPHDPPLARKSGHLPTSQMRQLKTRDGERAATGSSEEMWWAPWENLASTRESEPRPRSPLALTHFHAVVRPATRVAFATTQLGSQTGAASSHCRRVTQGPHCPIPAQIAGHSGSAALWPRSGSGEPGCGWGAWRMRAK

SEQ ID NO: 746967 - protein, 240 aa, Homo sapiens
MSKPSDHIKRPMNAFMVWSRGQRRKMAQENPKMHNSEISKRLGAEWKLLSEAEKRPYIDEAKRLRAQHMKEHPDYKYRPRRKPKNLLKKDRYVFPLPYLGDTDPLKAAGLPVGASDGLLSAPEKARAFLPPASAPYSLLDPAQFSSSAIQKMGEVPHTLATGALPYASTLGYQNGAFGSLSCPSQHTHTHPSPTNPGYVVPCNCTAWSASTLQPPVAYILFPGMTKTGIDPYSSAHATAM

SEQ ID NO: 746968 - protein, 466 aa, Homo sapiens
MNNSTNSSNNSLALTSPYKTFEVVFIVLVAGSLSLVTIIGNILVMVSIKVNRHLQTVNNYFLFSLACADLIIGVFSMNLYTLYTVIGYWPLGPVVCDLWLALDYVVSNASVMNLLIISFDRYFCVTKPLTYPVKRTTKMAGMMIAAAWVLSFILWAPAILFWQFIVGVRTVEDGECYIQFFSNAAVTFGTAIAAFYLPVIIMTVLYWHISRASKSRIKKDKKEPVANQDPVSPSLVQGRIVKPNNNNMPSSDDGLEHNKIQNGKAPRDPVTENCVQGEEKESSNDSTSVSAVASNMRDDEITQDENTVSTSLGHSKDENSKQTCIRIGTKTPKSDSCTPTNTTVEVVGSSGQNGDEKQNIVARKIVKMTKQPAKKKPPPSREKKVTRTILAILLAFIITWAPYNVMVLINTFCAPCIPNTVWTIGYWLCYINSTINPACYALCNATFKKTFKHLLMCHYKNIGATR

SEQ ID NO: 746969 - protein, 456 aa, Homo sapiens
MNNSTNSSNNSLALTSPYKTFEVVFIVLVAGSLSLVTIIGNILVMVSIKVNRHLQTVNNYFLFSLACADLIIGVFSMNLYTLYTVIGYWPLGPVVCDLWLALDYVVSNASVMNLLIISFDRYFCVTKPLTYPVKRTTKMAGMMIAAAWVLSFILWAPAILFWQFIVGVRTVEDGECYIQFFSNAAVTFGTAIAAFYLPVIIMTVLYWHISRASKSRIKKDKKEPVANQDPVSPSLVQGRIVKPNNNNMPSSDDGLEHNKIQNGKAPRDPVTENCVQGEEKESSNDSTSVSAVASNMRDDEITQDENTVSTSLGHSKDENSKQTCIRIGTKTPKSDSCTPTNTTVEVVGSSGQNGDEKQNIVARKIVKMTKQPAKKKPPPSREKKVTRTILAILLAFIITWAPYNVMVLINTFCAPCIPNTVWTIGYWLCYINSTINPACYALCNATFKKTFKHLLM

SEQ ID NO: 746970 - protein, 149 aa, Homo sapiens
LEDSFDGVWKEVKKTAEMNEKLSKMGESSLRNFTMDTESSVYNFEGEDYREKQKIAFTEWIEPPKRERKANYAVDAYFREALRVSEPKAPKAPRPPKQPNVQDFQFFPPRLFELLEKEILFYRKTIGYKVPRNPELPNAAQNTVEGVPS

SEQ ID NO: 746971 - protein, 51 aa, Homo sapiens
VQTLIPKAPRPPKQPNVQDFQFFPPRLFELLEKEILFYRKTIGYKVIGNYL

SEQ ID NO: 746972 - protein, 491 aa, Homo sapiens
DAWVDPRVRADVVILYDSDWNPQVDLQAMDRAHRIGQTKTVRVFRFITDNTVEERIVERAEMKLRLDSIVIQQGRLVDQNLNKIGKDEMLQMIRHGATHVFASKESEITDEDIDGILERGAKKTAEMNEKLSKMGESSLRNFTMDTESSVYNFEGEDYREKQKIAFTEWIEPPKRERKANYAVDAYFREALRVSEPKAPKAPRPPKQPNVQDFQFFPPRLFELLEKEILFYRKTIGYKVPRNPELPNAAQAQKEEQLKIDEAESLNDEELEEKEKLLTQGFTNWNKRDFNQFIKANEKWGRDDIENIAREVEGKTPEEVIEYSAVFWERCNELQDIEKIMAQIERGEARIQRRISIKKALDTKIGRYKAPFHQLRISYGTNKGKNYTEEEDRFLICMLHKLGFDKENVYDELRQCIRNSPQFRFDWFLKSRTAMELQRRCNTLITLIERENMELEEKEKAEKKKRGPKPSTQKRKMDGAPDGRGRKKKLKL

SEQ ID NO: 746973 - protein, 1052 aa, Homo sapiens
MSSAAEPPPPPPPESAPSKPAASIASGGSNSSNKGGPEGVAAQAVASAASAGPADAEMEEIFDDASPGKQKEIQEPDPTYEEKMQTDRANRFEYLLKQTELFAHFIQPAAQKTPTSPLKMKPGRPRIKKDEKQNLLSVGDYRHRRTEQEEDEELLTESSKATNVCTRFEDSPSYVKWGKLRDYQVRGLNWLISLYENGINGILADEMGLGKTLQTISLLGYMKHYRNIPGPHMVLVPKSTLHNWMSEFKRWVPTLRSVCLIGDKEQRAAFVRDVLLPGEWDVCVTSYEMLIKEKSVFKKFNWRYLVIDEAHRIKNEKSKLSEIVREFKTTNRLLLTGTPLQNNLHELWSLLNFLLPDVFNSADDFDSWFDTNNCLGDQKLVERLHMVLRPFLLRRIKADVEKSLPPKKEVKIYVGLSKMQREWYTRILMKDIDILNSAGKMDKMRLLNILMQLRKCCNHPYLFDGAEPGPPYTTDMHLVTNSGKMVVLDKLLPKLKEQGSRVLIFSQMTRVLDILEDYCMWRNYEYCRLDGQTPHDERQDSINAYNEPNSTKFVFMLSTRAGGLGINLATADVVILYDSDWNPQVDLQAMDRAHRIGQTKTVRVFRFITDNTVEERIVERAEMKLRLDSIVIQQGRLVDQNLNKIGKDEMLQMIRHGATHVFASKESEITDEDIDGILERGAKKTAEMNEKLSKMGESSLRNFTMDTESSVYNFEGEDYREKQKIAFTEWIEPPKRERKANYAVDAYFREALRVSEPKAPKAPRPPKQPNVQDFQFFPPRLFELLEKEILFYRKTIGYKVPRNPELPNAAQAQKEEQLKIDEAESLNDEELEEKEKLLTQGFTNWNKRDFNQFIKANEKWGRDDIENIAREVEGKTPEEVIEYSAVFWERCNELQDIEKIMAQIERGEARIQRRISIKKALDTKIGRYKAPFHQLRISYGTNKGKNYTEEEDRFLICMLHKLGFDKENVYDELRQCIRNSPQFRFDWFLKSRTAMELQRRCNTLITLIERENMELEEKEKAEKKKRGPKPSTQKRKMDGAPDGRGRKKKLKL

SEQ ID NO: 746974 - protein, 769 aa, Homo sapiens
MSSAAEPPPPPPPESAPSKPAASIASGGSNSSNKGGPEGVAAQAVASAASAGPADAEMEEIFDDASPGKQKEIQEPDPTYEEKMQTDRANRFEYLLKQTELFAHFIQPAAQKTPTSPLKMKPGRPRIKKDEKQNLLSVGDYRHRRTEQEEDEELLTESSKATNVCTRFEDSPSYVKWGKLRDYQVRGLNWLISLYENGINGILADEMGLGKTLQTISLLGYMKHYRNIPGPHMVLVPKSTLHNWMSEFKRWVPTLRSVCLIGDKEQRAAFVRDVLLPGEWDVCVTSYEMLIKEKSVFKKFNWRYLVIDEAHRIKNEKSKLSEIVREFKTTNRLLLTGTPLQNNLHELWSLLNFLLPDVFNSADDFDSWFDTNNCLGDQKLVERLHMVLRPFLLRRIKADVEKSLPPKKEVKIYVGLSKMQREWYTRILMKDIDILNSAGKMDKMRLLNILMQLRKCCNHPYLFDGAEPGPPYTTDMHLVTNSGKMVVLDKLLPKLKEQGSRVLIFSQMTRVLDILEDYCMWRNYEYCRLDGQTPHDERQDSINAYNEPNSTKFVFMLSTRAGGLGINLATADVVILYDSDWNPQVDLQAMDRAHRIGQTKTVRVFRFITDNTVEERIVERAEMKLRLDSIVIQQGRLVDQNLNKIGKDEMLQMIRHGATHVFASKESEITDEDIDGILERGAKKTAEMNEKLSKMGESSLRNFTMDTESSVYNFEGEDYREKQKIAFTEWIEPPKRERKANYAVDAYFREALRVSEPKAPKVLYFKTKR

SEQ ID NO: 746975 - protein, 691 aa, Homo sapiens
MSSAAEPPPPPPPESAPSKPAASIASGGSNSSNKGGPEGVAAQAVASAASAGPADAEMEEIFDDASPGKQKEIQEPDPTYEEKMQTDRANRFEYLLKQTELFAHFIQPAAQKTPTSPLKMKPGRPRIKKDEKQNLLSVGDYRHRRTEQEEDEELLTESSKATNVCTRFEDSPSYVKWGKLRDYQVRGLNWLISLYENGINGILADEMGLGKTLQTISLLGYMKHYRNIPGPHMVLVPKSTLHNWMSEFKRWVPTLRSVCLIGDKEQRAAFVRDVLLPGEWDVCVTSYEMLIKEKSVFKKFNWRYLVIDEAHRIKNEKSKLSEIVREFKTTNRLLLTGTPLQNNLHELWSLLNFLLPDVFNSADDFDSWFDTNNCLGDQKLVERLHMVLRPFLLRRIKADVEKSLPPKKEVKIYVGLSKMQREWYTRILMKDIDILNSAGKMDKMRLLNILMQLRKCCNHPYLFDGAEPGPPYTTDMHLVTNSGKMVVLDKLLPKLKEQGSRVLIFSQMTRVLDILEDYCMWRNYEYCRLDGQTPHDERQDSINAYNEPNSTKFVFMLSTRAGGLGINLATADVVILYDSDWNPQVDLQAMDRAHRIGQTKTVRVFRFITDNTVEERIVERAEMKLRLDSIVIQQGRLVDQNLNKIGKDEMLQMIRHGATHVFASKESEITDEDIDGILERGAKKVRCRLNN

SEQ ID NO: 746976 - protein, 1052 aa, Homo sapiens; identical to SEQ ID NO: 746973

SEQ ID NO: 746977 - protein, 1052 aa, Homo sapiens; identical to SEQ ID NO: 746973

SEQ ID NO: 746978 - protein, 1052 aa, Homo sapiens; identical to SEQ ID NO: 746973

SEQ ID NO: 746979 - protein, 931 aa, Homo sapiens
MSSAAEPPPPPPPESAPSKPAASIASGGSNSSNKGGPEGVAAQAVASAASAGPADAEMEEIFDDASPGKQKEIQEPDPTYEEKMQTDRANRFEYLLKQTELFAHFIQPAAQKTPTSPLKMKPGRPRIKKDEKQNLLSVGDYRHRRTEQEEDEELLTESSKATNVCTRFEDSPSYVKWGKLRDYQVRGLNWLISLYENGINGILADEMGLGKTLQTISLLGYMKHYRNIPGPHMVLVPKSTLHNWMSEFKRWVPTLRSVCLIGDKEQRAAFVRDVLLPGEWDVCVTSYEMLIKEKSVFKKFNWRYLVIDEAHRIKNEKSKLSEIVREFKTTNRLLLTGTPLQNNLHELWSLLNFLLPDVFNSADDFDSWFDTNNCLGDQKLVERLHMVLRPFLLRRIKADVEKSLPPKKEVKIYVGLSKMQREWYTRILMKDIDILNSAGKMDKMRLLNILMQLRKCCNHPYLFDGAEPGPPYTTDMHLVTNSGKMVVLDKLLPKLKEQGSRVLIFSQMTRVLDILEDYCMWRNYEYCRLDGQTPHDERQDSINAYNEPNSTKFVFMLSTRAGGLGINLATADVVILYDSDWNPQVDLQAMDRAHRIGQTKTVRVFRFITDNTVEERIVERAEMKLRLDSIVIQQGRLVDQNLNKIGKDEMLQMIRHGATHVFASKESEITDEDIDGILERGAKKTAEMNEKLSKMGESSLRNFTMDTESSVYNFEGEDYREKQKIAFTEWIEPPKRERKANYAVDAYFREALRVSEPKAPKAPRPPKQPNVQDFQFFPPRLFELLEKEILFYRKTIGYKVPRNPELPNAAQAQKEEQLKIDEAESLNDEELEEKEKLLTQGFTNWNKRDFNQFIKANEKWGRDDIENIAREVEGKTPEEVIEYSAVFWERCNELQDIEKIMAQIERGEARRGGRRGRGGRRGRGGRRGRVP

SEQ ID NO: 746980 - protein, 726 aa, Homo sapiens
MSSAAEPPPPPPPESAPSKPAASIASGGSNSSNKGGPEGVAAQAVASAASAGPADAEMEEIFDDASPGKQKEIQEPDPTYEEKMQTDRANRFEYLLKQTELFAHFIQPAAQKTPTSPLKMKPGRPRIKKDEKQNLLSVGDYRHRRTEQEEDEELLTESSKATNVCTRFEDSPSYVKWGKLRDYQVRGLNWLISLYENGINGILADEMGLGKTLQTISLLGYMKHYRNIPGPHMVLVPKSTLHNWMSEFKRWVPTLRSVCLIGDKEQRAAFVRDVLLPGEWDVCVTSYEMLIKEKSVFKKFNWRYLVIDEAHRIKNEKSKLSEIVREFKTTNRLLLTGTPLQNNLHELWSLLNFLLPDVFNSADDFDSWFDTNNCLGDQKLVERLHMVLRPFLLRRIKADVEKSLPPKKEVKIYVGLSKMQREWYTRILMKDIDILNSAGKMDKMRLLNILMQLRKCCNHPYLFDGAEPGPPYTTDMHLVTNSGKMVVLDKLLPKLKEQGSRVLIFSQMTRVLDILEDYCMWRNYEYCRLDGQTPHDERQDSINAYNEPNSTKFVFMLSTRAGGLGINLATADVVILYDSDWNPQVDLQAMDRAHRIGQTKTVRVFRFITDNTVEERIVERAEMKLRLDSIVIQQGRLVDQNLNKIGKDEMLQMIRHGATHVFASKESEITDEDIDGILERGAKKTAEMNEKLSKMGESSLRNFTMDTESSVYNFEGEDYREKQKVI

SEQ ID NO: 746981 - protein, 548 aa, Homo sapiens
GGASGHRSGQEQRPRRRRDQRAQARSGVLAAGTSPPGPGRPPAAGKMPEQSNDYRVVVFGAGGVGKSSLVLRFVKGTFRDTYIPTIEDTYRQVISCDKSVCTLQITDTTGSHQFPAMQRLSISKGHAFILVFSVTSKQSLEELGPIYKLIVQIKGSVEDIPVMLVGNKCDETQREVDTREAQAVAQEWKCAFMETSAKMNYNVKELFQELLTLETRRNMSLNIDGKRSGKQKRTDRVKGKCTLMGARNARRRGGERKVGEMTRWTRRHEEEPEGYERMTGDEVSRKTEQNDTQRQPKRKKNRTRRPAQKSRRETKKDNKKQKRQQNHPETQDQPQNTPTKRCAGDPAKHKTPKTSKEAPKEEKNDIENRKREEANDRTTNDQTKGDQKDKKRDREKPTAHTKNDTTGKDIKPEDSNTQQKSEHKNQRKTKGAHEPKSKERAGEGKTNRRKGPEARNESTRQKHTKQTRRERKRNRSEQNQTSNKTPTTRANNQEREGSTTEQRPPRQRTEKDANEKGKQPQQNRQAKKHRATRPNTAAPTNKQTTKTK

SEQ ID NO: 746982 - protein, 950 aa, Homo sapiens [sequence omitted]

SEQ ID NO: 746983 - protein, 848 aa, Homo sapiens
MGDTPLHRAAFTGRKELVMLLLEYNADTTIVNGSGQTAKEVTHAEEIRSMLEAVERTQQRKLEELLLAAAREGKTTELTALLNRPNPPDVNCSDQLGNTPLHCAAYRAHKQCALKLLRSGADPNLKNKNDQKPLDLAQGAEMKHILVGNKVIYKALKRYEGPLWKSSRFFGWRLFWVVLEHGVLSWYRKQPDAVHNIYRQGCKHLTQAVCTVKSTDSCLFFIKCFDDTIHGFRVPKNSLQQSREDWLEAIEEHSAYSTHYCSQDQLTDEEEEDTVSAADLKKSLEKAQSCQQRLDREISNFLKMIKECDMAKEMLPSFLQKVEVVSEASRETCVALTDCLNLFTKQEGVRNFKLEQEQEKNKILSEALETLATEHHELEQSLVKGSPPASILSEDEFYDALSDSESERSLSRLEAVTARSFEEEGEHLGSRKHRMSEEKDCGGGDALSNGIKKHRTSLPSPMFSRNDFSIWSILRKCIGMELSKITMPVIFNEPLSFLQRLTEYMEHTYLIHKASSLSDPVERMQCVAAFAVSAVASQWERTGKPLVSHHPPISAFHAEGLNNDFIFHGSIYPKLKFWGKSVEAEPKGTITLELLEHNEAYTWTNPTCCVHNIIVGKLWIEQYGNVEIINHKTGDKCVLNFKPCGLFGKELHKVEGYIQDKSKKKLCALYGKWTECLYSVDPATFDAYKKNDKKNTEEKKNSKQMSTPEELDEMPVPDSESVFIIPGSVLLWRIAPRPPNSAQMYNFTSFAMVLNEVDKDMESVIPKTDCRLRPDIRAMENGEIDQASEEKKRLEEKQRAARKNRSKSEEDWKTRWFHQGPNPYNGAQDWIYSGSYWDRNYFNLPDIY

SEQ ID NO: 746984 - protein, 927 aa, Homo sapiens
MNTEAEQQLLHHARNGNAEEVRQLLETMARNEVIADINCKGRSKSNLGWTPLHLACYFGHRQVVQDLLKAGAEVNVLNDMGDTPLHRAAFTGRKELVMLLLEYNADTTIVNGSGQTAKEVTHAEEIRSMLEAVERTQQRKLEELLLAAAREGKTTELTALLNRPNPPDVNCSDQLGNTPLHCAAYRAHKQCALKLLRSGADPNLKNKNDQKPLDLAQGAEMKHILVGNKVIYKALKRYEGPLWKSSRFFGWRLFWVVLEHGVLSWYRKQPDAVHNIYRQGCKHLTQAVCTVKSTDSCLFFIKCFDDTIHGFRVPKNSLQQSREDWLEAIEEHSAYSTHYCSQDQLTDEEEEDTVSAADLKKSLEKAQSCQQRLDREISNFLKMIKECDMAKEMLPSFLQKVEVVSEASRETCVALTDCLNLFTKQEGVRNFKLEQEQEKNKILSEALETLATEHHELEQSLVKGSPPASILSEDEFYDALSDSESERSLSRLEAVTARSFEEEGEHLGSRKHRMSEEKDCGGGDALSNGIKKHRTSLPSPMFSRNDFSIWSILRKCIGMELSKITMPVIFNEPLSFLQRLTEYMEHTYLIHKASSLSDPVERMQCVAAFAVSAVASQWERTGKPLVSHHPPISAFHAEGLNNDFIFHGSIYPKLKFWGKSVEAEPKGTITLELLEHNEAYTWTNPTCCVHNIIVGKLWIEQYGNVEIINHKTGDKCVLNFKPCGLFGKELHKVEGYIQDKSKKKLCALYGKWTECLYSVDPATFDAYKKNDKKNTEEKKNSKQMSTPEELDEMPVPDSESVFIIPGSVLLWRIAPRPPNSAQMYNFTSFAMVLNEVDKDMESVIPKTDCRLRPDIRAMENGEIDQASEEKKRLEEKQRAARKNRSKSEEDWKTRWFHQGPNPYNGAQDWIYSGSYWDRNYFNLPDIY

SEQ ID NO: 746985 - protein, 112 aa, Homo sapiens
KYLLYQNLLNDWSRGSQLGTVLAPQGKSGHVWRHFWLSQLGHCYWHLVGRGQGCYEMSYNTQASLLQQRITARGSPVLRSRVQDGSHSSQQDQPWRIVLFCFFSAPGVLPMF

SEQ ID NO: 746986 - protein, 1095 aa, Homo sapiens
TVPATTVKIVSLGGGCNMIQPVNAAVAQSPQTIPITTLLVNPTSFPCPLNQSLVASSVSPLIVSGNSVNLPIPSTPEDKAHVNVDIACAVADGENAFQGLEPKLEPQELSPLSATVFPKVEHSPGPPLADAECQEGLSENSACRWTVVKTEEGRQALEPLPQGIQESLNNPTPGDLEEIVKMEPEEAREEISGSPERDICDDIKVEHAVELDTGAPSEELSSAGEVTKQTVLQKEEERSQPTKTPSSSQEPPDEGTSGTDVNKGSSKNALSSMDPEVRLSSPPGKPEDSSSVDGQSVGTPVGPETGGEKNGPEEEEEEDFDDLTQDEEDEMSSASEESVLSVPELQETMEKLTWLASERRMSQEGESEEENSQEENSEPEEEEEEEAEGMESLQKEDEMTDEAVGDSAEKPPTFASPETAPEVETSRTPPGESIKAAGKGRNNHRARNKRGSRARASKDTSKLLLLYDEDILERDPLREQKDLAFAQAYLTRVREALQHIPGKYEDFLQVIYEFESSTQRRTAVDLYKSLQILLQDWPQLLKDFAAFLLPEQALACGLFEEQQAFEKSRKFLRQLEICFAENPSHHQKIIKVLQGCADCLPQEITELKTQMWQLLKGHDHLQDEFSIFFDHLRPAASRMGDFEEINWTEEKEYEFDGFEEVALPDVEEEEEPPKIPTASKNKRKKEIGVQNHDKETEWPDGAKDCACSCHEGGPDSKLKKSKRRSCSHCSSKVCDSKSYKSKEPHELVGSSPHREASPMPGAKEAGQGKDMMEEEAPEERESTEATQSRTVRTTRKGEMPVSGLAVGSTLPSPREVTVTERLLLDGPPPHSPETPQFPPTTGAVLYTVKRNQVGPEVRSCPKASPRLQKEREGQKAVSESEALMLVWDASETEKLPGTVEPPASFLSPVSSKTRDAGRRHVSGKPDTQERWLPSSRARVKTRDRTCPVHESPSGIDTSETSPKAPRGGLAKDSGTQAKGPEGEQQPKAAEATVCANNSKVSSTGEKVVLWTREADRVILTMCQEQGAQPQTFNIISQQLGNKTPAEVSHRFRELMQLFHTACEASSEDEDDATSTSNADQLSDHGDLLSEEELDE

SEQ ID NO: 746987 - protein, 147 aa, Homo sapiens
MWQLLKGHDHLQDEFSIFFDHLRPAASRMGDFEEINWTEEKEYEFDGFEEVALPDVEEEEEPPKIPTASKNKRKKEIGVQNHDKETEWPDGAKDCACSCHEGGPDSKLKKSKRRSCSHCSSKVRKVSRVPRVSELLGDCLLPRIVPY

SEQ ID NO: 746988 - protein, 1073 aa, Homo sapiens
TVPATTVKIVSLGGGCNMIQPVNAAVAQSPQTIPITTLLVNPTSFPCPLNQSLVASSVSPLIVSGNSVNLPIPSTPEDKAHVNVDIACAVADGENAFQGLEPKLEPQELSPLSATVFPKVEHSPGPPLADAECQEGLSENSACRWTVVKTEEGRQALEPLPQGIQESLNNPTPGDLEEIVKMEPEEAREEISGSPERDICDDIKVEHAVELDTGAPSEELSSAGEVTKQTVLQKEEERSQPTKTPSSSQEPPDEGTSGTDVNKGSSKNALSSMDPEVRLSSPPGKPEDSSSVDGQSVGTPVGPETGGEKNGPEEEEEEDFDDLTQDEEDEMSSASEESVLSVPELQETMEKLTWLASERRMSQEGESEEENSQEENSEPEEEEEEEAEGMESLQKEDEMTDEAVGDSAEKPPTFASPETAPEVETSRTPPGESIKAAGKGRNNHRARNKRGSRARASKDTSKLLLLYDEDILERDPLREQKDLAFAQAYLTRVREALQHIPGKYEDFLQVIYEFESSTQRRTAVDLYKSLQILLQDWPQLLKDFAAFLLPGASSGLWIKNPSHHQKIIKVLQGCADCLPQEITELKTQMWQLLKGHDHLQDEFSIFFDHLRPAASRMGDFEEINWTEEKEYEFDGFEEVALPDVEEEEEPPKIPTASKNKRKKEIGVQNHDKETEWPDGAKDCACSCHEGGPDSKLKKSKRRSCSHCSSKVCDSKSYKSKEPHELVGSSPHREASPMPGAKEAGQGKDMMEEEAPEERESTEATQSRTVRTTRKGEMPVSGLAVGSTLPSPREVTVTERLLLDGPPPHSPETPQFPPTTGAVLYTVKRNQVGPEVRSCPKASPRLQKEREGQKAVSESEALMLVWDASETEKLPGTVEPPASFLSPVSSKTRDAGRRHVSGKPDTQERWLPSSRARVKTRDRTCPVHESPSGIDTSETSPKAPRGGLAKDSGTQAKGPEGEQQPKAAEATVCANNSKVSSTGEKVVLWTREADRVILTMCQEQGAQPQTFNIISQQLGNKTPAEVSHRFRELMQLFHTACEASSEDEDDATSTSNADQLSDHGDLLSEEELDE

SEQ ID NO: 746989 - protein, 1012 aa, Homo sapiens
TVPATTVKIVSLGGGCNMIQPVNAAVAQSPQTIPITTLLVNPTSFPCPLNQSLVASSVSPLIVSGNSVNLPIPSTPEDKAHVNVDIACAVADGENAFQGLEPKLEPQELSPLSATVFPKVEHSPGPPLADAECQEGLSENSACRWTVVKTEEGRQALEPLPQGIQESLNNPTPGDLEEIVKMEPEEAREEISGSPERDICDDIKVEHAVELDTGAPSEELSSAGEVTKQTVLQKEEERSQPTKTPSSSQEPPDEGTSGTDVNKGSSKNALSSMDPEVRLSSPPGKPEDSSSVDGQSVGTPVGPETGGEKNGPEEEEEEDFDDLTQDEEDEMSSASEESVLSVPELQETMEKLTWLASERRMSQEGESEEENSQEENSEPEEEEEEEAEGMESLQKEDEMTDEAVGDSAEKPPTFASPETAPEVETSRTPPGESIKAAGKGRNNHRARNKRGSRARASKDTSKLLLLYDEDILERDPLREQKDLAFAQAYLTRVREALQHIPGKYEDFLQVIYEFESSTQRRTAVDLYKSLQILLQDWPQLLKDFAAFLLPEQALACGLFEEQQAFEKSRKFLRQLEICFAENPSHHQKIIKVLQGCADCLPQEITELKTQMWQLLKGHDHLQDEFSIFFDHLRPAASRMGDFEEINWTEEKEYEFDGFEEVALPDVEEEEEPPKIPTASKNKRKKEIGVQNHDKETEWPDGAKDCACSCHEGGPDSKLKKSKRRSCSHCSSKVCDSKSYKSKEPHELVGSSPHREASPMPGAKEAGQGKDMMEEEAPEERESTEATQSRTVRTTRKGEMPVSGLAVGSTLPSPREVTVTERLLLDGPPPHSPETPQFPPTTGAVLYTVKRNQVGPEVRSCPKASPRLQKEREGQKAVSESEALMLVWDASETEKLPGTVEPPASFLSPVSSKTRDAGRRHVSGKPDTQERWLPSSRARVKTRDRTCPVHESPSGIDTSETSPKAPRGGLAKDSGTQAKGPEGEQQPKAAEATVCANNSKVSSTGEKVVLWTR

SEQ ID NO: 746990 - protein, 212 aa, Homo sapiens [sequence omitted]

SEQ ID NO: 746991 - protein, 804 aa, Homo sapiens
TVPATTVKIVSLGGGCNMIQPVNAAVAQSPQTIPITTLLVNPTSFPCPLNQSLVASSVSPLIVSGNSVNLPIPSTPEDKAHVNVDIACAVADGENAFQGLEPKLEPQELSPLSATVFPKVEHSPGPPLADAECQEGLSENSACRWTVVKTEEGRQALEPLPQGIQESLNNPTPGDLEEIVKMEPEEAREEISGSPERDICDDIKVEHAVELDTGAPSEELSSAGEVTKQTVLQKEEERSQPTKTPSSSQEPPDEGTSGTDVNKGSSKNALSSMDPEVRLSSPPGKPEDSSSVDGQSVGTPVGPETGGEKNGPEEEEEEDFDDLTQDEEDEMSSASEESVLSVPELQETMEKLTWLASERRMSQEGESEEENSQEENSEPEEEEEEEAEGMESLQKEDEMTDEAVGDSAEKPPTFASPETAPEVETSRTPPGESIKAAGKGRNNHRARNKRGSRARASKDTSKLLLLYDEDILERDPLREQKDLAFAQAYLTRVREALQHIPGKYEDFLQVIYEFESSTQRRTAVDLYKSLQILLQDWPQLLKDFAAFLLPEQALACGLFEEQQAFEKSRKFLRQLEICFAENPSHHQKIIKVLQGCADCLPQEITELKTQMWQLLKGHDHLQDEFSIFFDHLRPAASRMGDFEEINWTEEKEYEFDGFEEVALPDVEEEEEPPKIPTASKNKRKKEIGVQNHDKETEWPDGAKDCACSCHEGGPDSKLKKSKRRSCSHCSSKVCDSKSYKSKEPHELVGSSPHREASPMPGAKEAGQGKDMMEEEAPEERESTEATQSRTVRTTRKGEMPVSGE

SEQ ID NO: 746992 - protein, 1095 aa, Homo sapiens; identical to SEQ ID NO: 746986

SEQ ID NO: 746993 - protein, 485 aa, Homo sapiens [sequence omitted]

SEQ ID NO: 746994 - protein, 354 aa, Homo sapiens
MLVWDASETEKLPGTVEPPASFLSPVSSKPEMQGEDMCPGNQTLKQGRTVRTTRKGEMPVSGLAVGSTLPSPREVTVTERLLLDGPPPHSPETPQFPPTTGAVLYTVKRNQVGPEVRSCPKASPRLQKEREGQKAVSESEALMLVWDASETEKLPGTVEPPASFLSPVSSKTRDAGRRHVSGKPDTQERWLPSSRARVKTRDRTCPVHESPSGIDTSETSPKAPRGGLAKDSGTQAKGPEGEQQPKAAEATVCANNSKVSSTGEKVVLWTREADRVILTMCQEQGAQPQTFNIISQQLGNKTPAEVSHRFRELMQLFHTACEASSEDEDDATSTSNADQLSDHGDLLSEEELDE

SEQ ID NO: 746995 - protein, 655 aa, Homo sapiens
TVPATTVKIVSLGGGCNMIQPVNAAVAQSPQTIPITTLLVNPTSFPCPLNQSLVASSVSPLIVSGNSVNLPIPSTPEDKAHVNVDIACAVADGENAFQGLEPKLEPQELSPLSATVFPKVEHSPGPPLADAECQEGLSENSACRWTVVKTEEGRQALEPLPQGIQESLNNPTPGDLEEIVKMEPEEAREEISGSPERDICDDIKVEHAVELDTGAPSEELSSAGEVTKQTVLQKEEERSQPTKTPSSSQEPPDEGTSGTDVNKGSSKNALSSMDPEVRLSSPPGKPEDSSSVDGQSVGTPVGPETGGEKNGPEEEEEEDFDDLTQDEEDEMSSASEESVLSVPELQETMEKLTWLASERRMSQEGESEEENSQEENSEPEEEEEEEAEGMESLQKEDEMTDEAVGDSAEKPPTFASPETAPEVETSRTPPGESIKAAGKGRNNHRARNKRGSRARASKDTSKLLLLYDEDILERDPLREQKDLAFAQAYLTRVREALQHIPGKYEDFLQVIYEFESSTQRRTAVDLYKSLQILLQDWPQLLKDFAAFLLPEQALACGLFEEQQAFEKSRKFLRQLEICFAENPSHHQKIIKVLQGCADCLPQEITELKTQMWQLLKGHDHLQDEFSIFFDHLRPAASRMGDFEEINWTEEKEYEV

SEQ ID NO: 746996 - protein, 284 aa, Homo sapiens
MYGSCLLEKEAGMYPGTLMSPGGDGTAGTGGTGGGGSPMPASNFAAAPAFSHYMGYPHMPSMDPHWPSLGVWGSPYSPPREDWSVYPGPSSTMGTVPVNDVTSSPAAFCSTDYSNLGPVGGGTSGSSLPGQAGGSLVPTDAGAAKASSPSRSRHSPYAWMRKTVQVTGKTRTKEKYRVVYTDHQRLELEKEFHCNRYITIQRKSELAVNLGLSERQVKIWFQNRRAKERKMIKKKISQFENSGGSVQSDSDSISPGELPNTFFTTPSAVRGFQPIEIQQVIVSE

SEQ ID NO: 746997 - protein, 79 aa, Homo sapiens
VLEVAAESHLSHVTISSHCRLTWHSGQAGRGHQCIAHAEDSDRNLFPCSQRMRLRMRTLKMIQSTEDGSCLQKLPFHPS

SEQ ID NO: 746998 - protein, 107 aa, Homo sapiens
EPVLIVSGLGFRLGPFRSGSESLYPSLSPEARLLGPAQKLANYAGGPEAPLGSRLPQVLSSGAASYPLPGSRCPVAPAGPSFPALSSLLLRPPTPPSHPFPWLSHCL

SEQ ID NO: 746999 - protein, 384 aa, Homo sapiens
MTSFHPRGLQAARAQKFKSKRPRSNSDCFQEEDLRQGFQWRKSLPFGAASSYLNLEKLGEGSYATVYKGISRINGQLVALKVISMNAEEGVPFTAIREASLLKGLKHANIVLLHDIIHTKETLTFVFEYMHTDLAQYMSQHPGGLHPHNVRLFMFQLLRGLAYIHHQHVLHRDLKPQNLLISHLGELKLADFGLARAKSIPSQTYSSEVVTLWYRPPDALLGATEYSSELDIWGAGCIFIEMFQGQPLFPGVSNILEQLEKIWEVLGVPTEDTWPGVSKLPNYNPEWFPLPTPRSLHVVWNRLGRVPEAEDLASQMLKGFPRDRVSAQEALVHDYFSALPSQLYQLPDEESLFTVSGVRLKPEMCDLLASYQKGHHPAQFSKCW

SEQ ID NO: 747000 - protein, 252 aa, Homo sapiens
MGQELCAKTVQPGCSCYHCSEGGEAHSCRRSQPETTEAAFKLTDLKEASCSMTSFHPRGLQAARAQKFKSKRPRSNSDCFQEEDLRQGFQWRKSLPFGAASSYLNLEKLGEGSYATVYKGISRINGQLVALKVISMNAEEGVPFTAIREASLLKGLKHANIVLLHDIIHTKETLTFVFEYMHTDLAQYMSQHPGGLHPHNVRLFMFQLLRGLAYIHHQHVLHRDLKPQNLLISHLGELKLADFGKSPLGSHS

SEQ ID NO: 747001 - protein, 255 aa, Homo sapiens
MHTDLAQYMSQHPGGLHPHNVRLFMFQLLRGLAYIHHQHVLHRDLKPQNLLISHLGELKLADFGLARAKSIPSQTYSSEVVTLWYRPPDALLGATEYSSELDIWGAGCIFIEMFQGQPLFPGVSNILEQLEKIWEVLGVPTEDTWPGVSKLPNYNPEWFPLPTPRSLHVVWNRLGRVPEAEDLASQMLKGFPRDRVSAQEALVHDYFSALPSQLYQLPDEESLFTVSGVRLKPEMCDLLASYQKGHHPAQFSKCW

SEQ ID NO: 747002 - protein, 121 aa, Homo sapiens
MYQPIQTYPWMNLSRRREFRCLSCSECLLVTCLGLSTVILGLIVVLQDPSDSVVFSTGLTMIAIGAFFVVLTGVTALCTVTVDENLQKTTRLRLGVIRKSGSLQGTTEPSMTHSIIASTSL

SEQ ID NO: 747003 - protein, 121 aa, Homo sapiens; identical to SEQ ID NO: 747002

SEQ ID NO: 747004 - protein, 121 aa, Homo sapiens; identical to SEQ ID NO: 747002

SEQ ID NO: 747005 - protein, 121 aa, Homo sapiens; identical to SEQ ID NO: 747002

SEQ ID NO: 747006 - protein, 121 aa, Homo sapiens; identical to SEQ ID NO: 747002

SEQ ID NO: 747007 - protein, 121 aa, Homo sapiens; identical to SEQ ID NO: 747002

SEQ ID NO: 747008 - protein, 121 aa, Homo sapiens; identical to SEQ ID NO: 747002

SEQ ID NO: 747009 - protein, 167 aa, Homo sapiens
AAASSALTALRAPTALTAMARSNLPLALGLALVAFCLLALPRDARARPQERMVGELRDLSPDDPQVQKAAQAAVASYNMGSNSIYYFRDTHIIKAQSQLVAGIKYFLTMEMGSTDCRKTRVTGDHVDLTTCPLAAGAQQEKLRCDFEVLVVPWQNSSQLLKHNCVQM

SEQ ID NO: 747010 - protein, 167 aa, Homo sapiens; identical to SEQ ID NO: 747009

SEQ ID NO: 747011 - protein, 529 aa, Homo sapiens
MRRNSSLSFQMERPLEEQVQSKWSSSQGRTGTGGSDVLQMQNSEHHGQSIKTQTDSISLEDVAVNFTLEEWALLDPGQRNIYRDVMRATFKNLACIGEKWKDQDIEDEHKNQGRNLRSPMVEALCENKEDCPCGKSTSQIPDLNTNLETPTGLKPCDCSVCGEVFMHQVSLNRHMRSHTEQKPNECHEYGEKPHKCKECGKTFTRSSSIRTHERIHTGEKPYECKECGKAFAFLFSFRNHIRIHTGETPYECKECGKAFRYLTALRRHEKNHTGEKPYKCKQCGKAFIYYQPFLTHERTHTGEKPYECKQCGKAFSCPTYLRSHEKTHTGEKPFVCRECGRAFFSHSSLRKHVKTHTGVQPYTCKKCGEAFKSSSSCEVHERTHFGEKPYECKQCGKAFNSSSYLQLHERVHTGEKTYECKECGKAFLYSTHFRIHERTHTREKPYECKQCGRVFIYFSHLRRHERSHTGVKPCECKQCGKAFTCLNSLKVHKRIHTGERPFQCRQCGKAFSYSKSLHVHERTHSRQKP

SEQ ID NO: 747012 - protein, 529 aa, Homo sapiens; identical to SEQ ID NO: 747011

SEQ ID NO: 747013 - protein, 529 aa, Homo sapiens; identical to SEQ ID NO: 747011

SEQ ID NO: 747014 - protein, 309 aa, Homo sapiens
MKKENQSFNLDFILLGVTSQQEQNNVFFVIFLCIYPITLTGNLLIILAICADIRLHNPMYFLLANLSLVDIIFSSVTIPKVLANHLLGSKFISFGGCLMQMYFMIALAKADSYTLAAMAYDRAVAISCPLHYTTIMSPRSCILLIAGSWVIGNTSALPHTLLTASLSFCGNQEVANFYCDIMPLLKLSCSDVHFNVKMMYLGVGVFSLPLLCIIVSYVQVFSTVFQVPSTKSLFKAFCTCGSHLTVVFLYYGTTMGMYFRPLTSYSPKDAVITVMYVAVTPALNPFIYSLRNWDMKAALQKLFSKRISS

SEQ ID NO: 747015 - protein, 123 aa, Homo sapiens
MVDPVGELAAKRSGLTVEDVRANVPEELSIWIDPFGVSYQIGEKGAVKVLYLDDSDGCGAPELDMKIKSSFTPDDQMLFLLGSQDSSLSNSPSLCFAHHPAPPSSSASPSPSPSPWTPLLPPN

SEQ ID NO: 747016 - protein, 63 aa, Homo sapiens
MPPPGKVPRKENLWLQCEWGSCSFVCSTMEKFFEHVTQHLQQHLHGSGEEEEEEEEDDPLGKR

SEQ ID NO: 747017 - protein, 302 aa, Homo sapiens
MVTEQEVDAIGQTLVDPKQPLQARFRALFTLRGLGGPGAIAWISQAFDDDSALLKHELAYCLGQMQDARAIPMLVDVLQDTRQEPMVRHEAGEALGAIGDPEVLEILKQYSSDPVIEVAETCQLAVRRLEWLQQHGGEPAAGPYLSVDPAPPAEERDVGRLREALLDESRPLFERYRAMFALRNAGGEEAALALAEGLHCGSALFRHEVGYVLGQLQHEAAVPQLAAALARCTENPMVRHECAEALGAIARPACLAALQAHADDPERVVRESCEVALDMYEHETGRAFQYADGLEQLRGAPS

SEQ ID NO: 747018 - protein, 302 aa, Homo sapiens; identical to SEQ ID NO: 747017

SEQ ID NO: 747019 - protein, 302 aa, Homo sapiens; identical to SEQ ID NO: 747017

SEQ ID NO: 747020 - protein, 232 aa, Homo sapiens
RRRAFSTHPPHQHELSGCFFPGEALGAIGDPEVLEILKQYSSDPVIEVAETCQLAVRRLEWLQQHGGEPAAGPYLSVDPAPPAEERDVGRLREALLDESRPLFERYRAMFALRNAGGEEAALALAEGLHCGSALFRHEVGYVLGQLQHEAAVPQLAAALARCTENPMVRHECAEALGAIARPACLAALQAHADDPERVVRESCEVALDMYEHETGRAFQYADGLEQLRGAPS

SEQ ID NO: 747021 - protein, 302 aa, Homo sapiens; identical to SEQ ID NO: 747017

SEQ ID NO: 747022 - protein, 232 aa, Homo sapiens; identical to SEQ ID NO: 747020

SEQ ID NO: 747023 - protein, 300 aa, Homo sapiens
VSAHPRTRASAGEGQLASGGRTPFPPTLSAQTRGAESRGGGGSVDSWNAYTEERGMRHQQTERQDPSQPLSRQHENFEGTYRQIFHPEQLITGKEDAANNYAWGHYTIGKEFIDLLLDRIRKLADQCTGLQGFLVFHSLGRGTGSDVTSFLMEWLSVNYGKKSKLGFSIYPAPQVSTAMVQPYNSILTTHTTLEHSDCAFMVDNKAIYDICHRNLDIERPTYTNLNRLISQIVSSITASLRFDGALNVDLTEFQTNLVSYLTSTSPWPPMHQSSLQKKYTTSSCRWQRLPMPALSLPTRW

SEQ ID NO: 747024 - protein, 227 aa, Homo sapiens
MMNFEGTYRQIFHPEQLITGKEDAANNYAWGHYTIGKEFIDLLLDRIRKLADQCTGLQGFLVFHSLGRGTGSDVTSFLMEWLSVNYGKKSKLGFSIYPAPQVSTAMVQPYNSILTTHTTLEHSDCAFMVDNKAIYDICHRNLDIERPTYTNLNRLISQIVSSITASLRFDGALNVDLTEFQTNLVSYLTSTSPWPPMHQSSLQKKYTTSSCRWQRLPMPALSLPTRW

SEQ ID NO: 747025 - protein, 120 aa, Homo sapiens
SLSGAGGGKLNPPPAPPARSPTTELSSKSQQATAWTPTQQPGGQLRNGSLHIIDDFESKFTFHSVEDFPPPDEYKPCQKIYPSKIPRSRTPGPWLQAEAVGQSSDDIKGRNSQLSLKTLR

SEQ ID NO: 747026 - protein, 130 aa, Homo sapiens
ATGNSPYLQNEEERSYHFNRYRKSICKCQNPFITSTLSKLGEEGKSLNLMRESLKSYQMTSCSMGSCWAFSSCDQEGAPALTTATQSHSTQSLSPVRNRDVGYTWRLGVAQAGRGASGNLAMFPFSLGAT

SEQ ID NO: 747027 - protein, 179 aa, Homo sapiens
RPQSVCIQVLIKTVCCSTPPRVVCWRALRVPTNARALGLALKPARGFRPRPQWTYHPSIWESRPQQPDKGSSSASSRLSVHAHRSLISPTGTDVFIGQTDPHKKLPPKWTGPYTVILSTPTAVRVRGLPNWIHRTRVKLTPKAASSSKTLTAKCLSGPISPTKFKLTNIFFLKPKHKED

SEQ ID NO: 747028 - protein, 320 aa, Homo sapiens
MLLCFRFGNQSMKRENFTLITDFVFQGFSSFHEQQITLFGVFLALYILTLAGNIIIVTIIRIDLHLHTPMYFFLSMLSTSETVYTLVILPRMLSSLVGMSQPMSLAGCATQMFFFVTFGITNCFLLTAMGYDRYVAICNPLRYMVIMNKRLRIQLVLGACSIGLIVAITQVTSVFRLPFCARKVPHFFCDIRPVMKLSCIDTTVNEILTLIISVLVLVVPMGLVFISYVLIISTILKIASVEGRKKAFATCASHLTVVIVHYSCASIAYLKPKSENTREHDQLISVTYTVITPLLNPVVYTLRNKEVKDALCRAVGGKFS

SEQ ID NO: 747029 - protein, 105 aa, Homo sapiens
GVPDMTWGQRVTAVVTLREGHSLSHRELKEWARLKEHPTKRRENSILNIGRKRNLASGMRALTGRMAARRAAVSSEVSSSDETDNSLKRHKLPRLTQTLKQTEQF

SEQ ID NO: 747030 - protein, 140 aa, Homo sapiens
MRSQPRTPPVLQEPWSQALAVQATCCTWPTATSPAALSPACCARLRLRLQCLSIHHERKKNRKGGRRKLKEHPTKRRENSILNIGRKRNLASGMRALTGRMAARRAAVSSEVSSSDETDNSLKRHKLPRLTQTLKQTEQF

SEQ ID NO: 747031 - protein, 103 aa, Homo sapiens
PPCLDNFFLFLVETGFHHVGHAGFELLTTCGPPTLASIMCILVYLLVFQHLVSLKNLKGQNASFYFSPFGQHLSGFVKCSIWCCGSLSGLEGHFLPPHSPPLH

SEQ ID NO: 747032 - protein, 96 aa, Homo sapiens
SRLHPQEPCLKDGKALFPTKTTESPLAKVNRDQCFTSEVVSKALKQEVANPVKITYRCSYGGLDMMQAPGPSKEEIIYKIMRLLWATSYCGPQPCG

SEQ ID NO: 747033 - protein, 119 aa, Homo sapiens
FLRQSLAVLPRVECSGVILAHCNLRLPGSSNPPVSASQVPGIIGTCYHTWQIFVFLVETGFHHVDQAGLKLLRLKSSACLCLPKCWDYRTEPLCPDVFYSLRITTSESAKYKQKTPEKL

SEQ ID NO: 747034 - protein, 113 aa, Homo sapiens
MAGPAAAFRRLGALSGAAALGFASYGAHGAQFPDAYGKELFDKANKHHFLHSLALLGVPHCRKPLWAGLLLASGTTLFCTSFYYQALSGDPSIQTLAPAGGTLLLLGWLALAL

SEQ ID NO: 747035 - protein, 123 aa, Homo sapiens
MAGPAAAFRRLGALSGAAALGFASYGAHGAQFPDAYGKELFDKANKHHFLHSLALLGVPHCRKPLWAGLLLASGTTLFCTSFYYQALSGDPSIQTLALEYSGATSAHCNLCLPGSSDSPASAS

SEQ ID NO: 747036 - protein, 52 aa, Homo sapiens
  misc_feature (29)..(31): Xaa can be any naturally occurring amino acid
  misc_feature (33)..(34): Xaa can be any naturally occurring amino acid
  misc_feature (37)..(37): Xaa can be any naturally occurring amino acid
MAGPAAAFRRLGALSGAAALGFASYGAAXXXGXXRGXGDEDGTVLGASSGVC

SEQ ID NO: 747037 - protein, 113 aa, Homo sapiens; identical to SEQ ID NO: 747034

SEQ ID NO: 747038 - protein, 104 aa, Homo sapiens
  misc_feature (18)..(18): Xaa can be any naturally occurring amino acid
GGRNFGPLCHQGISVPVXAYDIPSFLFFLQLFDKANKHHFLHSLALLGVPHCRKPLWAGLLLASGTTLFCTSFYYQALSGDPSIQTLAPAGGTLLLLGWLALAL

SEQ ID NO: 747039 - protein, 764 aa, Homo sapiens
MAGTSAPGSKRRSEPPAPRPGPPPGTGHPPSKRARGFSAAAAPDPDDPFGAHGDFTADDLEELDTLASQALSQCPAAARDVSSDHKVHRLLDGMSKNPSGKNRETVPIKDNFELEVLQAQYKELKEKMKVMEEEVLIKNGEIKILRDSLHQTESVLEEQRRSHFLLEQEKTQALSDKEKEFSKKLQSLQSELQFKDAEMNELRTKLQTSERANKLAAPSVSHVSPRKNPSVVIKPEACSPQFGKTSFPTKESFSANMSLPHPCQTESGYKPLVGREDSKPHSLRGDSIKQEEAQKSFVDSWRQRSNTQGSILINLLLKQPLIPGSSLSLCHLLSSSSESPAGTPLQPPGFGSTLAGMSGLRTTGSYDGSFSLSALREAQNLAFTGLNLVARNECSRDGDPAEGGRRAFPLCQLPGAVHFLPLVQFFIGLHCQALQDLAAAKRSGAPGDSPTHSSCVSSGVETNPEDSVCILEGFSVTALSILQHLVCHSGAVVSLLLSGVGADSAAGEGNRSLVHRLSDGDMTSALRGVADDQGQHPLLKMLLHLLAFSSAATGHLQASVLTQCLKVLVKLAENTSCDFLPRFQCVFQVLPKCLSPETPLPSVLLAVELLSLLADHDQLAPQLCSHSEGCLLLLLYMYITSRPDRVALETQWLQLEQEVVRALTVMLHRQWLTVRRAGGPPRTDQQRRTVRCLRDTVLLLHGLSQKDKLFMMHCVEVLHQFDQVMPGVSMLIRGLPDVTDCEEAALDDLCAAETDVEDPEVECG

SEQ ID NO: 747040 - protein, 764 aa, Homo sapiens; identical to SEQ ID NO: 747039

SEQ ID NO: 747041 - protein, 908 aa, Homo sapiens
MAGTSAPGSKRRSEPPAPRPGPPPGTGHPPSKRARGFSAAAAPDPDDPFGAHGDFTADDLEELDTLASQALSQCPAAARDVSSECSSRPFARRELSTAPDPLDGCGFGTSRPALPFRLFKIWEHPDLSSGCLPEGPLILGGNALARSNSRFETQKAKLTFYVIFYSLGHLVLGSKQRSLEHTYHHHQNHHYPCMGTHSCDKFELALDLMKPTVSLGQCEHEEEPDTGDHKVHRLLDGMSKNPSGKNRETVPIKDNFELEVLQAQYKELKEKMKVMEEEVLIKNGEIKILRDSLHQTESVLEEQRRSHFLLEQEKTQALSDKEKEFSKKLQSLQSELQFKDAEMNELRTKLQTSERANKLAAPSVSHVSPRKNPSVVIKPEACSPQFGKTSFPTKESFSANMSLPHPCQTESGYKPLVGREDSKPHSLRGDSIKQEEAQKSFVDSWRQRSNTQGSILINLLLKQPLIPGSSLSLCHLLSSSSESPAGTPLQPPGFGSTLAGMSGLRTTGSYDGSFSLSALREAQNLAFTGLNLVARNECSRDGDPAEGGRRAFPLCQLPGAVHFLPLVQFFIGLHCQALQDLAAAKRSGAPGDSPTHSSCVSSGVETNPEDSVCILEGFSVTALSILQHLVCHSGAVVSLLLSGVGADSAAGEGNRSLVHRLSDGDMTSALRGVADDQGQHPLLKMLLHLLAFSSAATGHLQASVLTQCLKVLVKLAENTSCDFLPRFQCVFQVLPKCLSPETPLPSVLLAVELLSLLADHDQLAPQLCSHSEGCLLLLLYMYITSRPDRVALETQWLQLEQEVVRALTVMLHRQWLTVRRAGGPPRTDQQRRTVRCLRDTVLLLHGLSQKDKLFMMHCVEVLHQFDQVMPGVSMLIRGLPDVTDCEEAALDDLCAAETDVEDPEVECG

SEQ ID NO: 747042 - protein, 703 aa, Homo sapiens
HSRRRQAAARGRLVQFSGLAAGDHKVHRLLDGMSKNPSGKNRETVPIKDNFELEVLQAQYKELKEKMKVMEEEVLIKNGEIKILRDSLHQTESVLEEQRRSHFLLEQEKTQALSDKEKEFSKKLQSLQSELQFKDAEMNELRTKLQTSERANKLAAPSVSHVSPRKNPSVVIKPEACSPQFGKTSFPTKESFSANMSLPHPCQTESGYKPLVGREDSKPHSLRGDSIKQEEAQKSFVDSWRQRSNTQGSILINLLLKQPLIPGSSLSLCHLLSSSSESPAGTPLQPPGFGSTLAGMSGLRTTGSYDGSFSLSALREAQNLAFTGLNLVARNECSRDGDPAEGGRRAFPLCQLPGAVHFLPLVQFFIGLHCQALQDLAAAKRSGAPGDSPTHSSCVSSGVETNPEDSVCILEGFSVTALSILQHLVCHSGAVVSLLLSGVGADSAAGEGNRSLVHRLSDGDMTSALRGVADDQGQHPLLKMLLHLLAFSSAATGHLQASVLTQCLKVLVKLAENTSCDFLPRFQCVFQVLPKCLSPETPLPSVLLAVELLSLLADHDQLAPQLCSHSEGCLLLLLYMYITSRPDRVALETQWLQLEQEVVRALTVMLHRQWLTVRRAGGPPRTDQQRRTVRCLRDTVLLLHGLSQKDKLFMMHCVEVLHQFDQVMPGVSMLIRGLPDVTDCEEAALDDLCAAETDVEDPEVECG

SEQ ID NO: 747043 - protein, 764 aa, Homo sapiens; identical to SEQ ID NO: 747039

SEQ ID NO: 747044 - protein, 791 aa, Homo sapiens
MAGTSAPGSKRRSEPPAPRPGPPPGTGHPPSKRARGFSAAAAPDPDDPFGAHGDFTADDLEELDTLASQALSQCPAAARDVSSDHKVHRLLDGMSKNPSGKNRETVPIKDNFELEVLQAQYKELKEKMKVMEEEVLIKNGEIKILRDSLHQTESVLEEQRRSHFLLEQEKTQALSDKEKEFSKKLQSLQSELQFKDAEMNELRTKLQTSERANKLAAPSVSHVSPRKNPSVVIKPEACSPQFGKTSFPTKESFSANMSLPHPCQTESGYKPLVGREDSKPHSLRGDSIKQEEAQKSFVDSWRQRSNTQGSILINLLLKQPLIPGSSLSLCHLLSSSSESPAGTPLQPPGFGSTLAGMSGLRTTGSYDGSFSLSALREAQNLAFTGLNLVARNECSRDGDPAEGGRRAFPLCQLPGAVHFLPLVQFFIGLHCQALQDLAAAKRSGAPGDSPTHSSCVSSGVETNPEDSVCILEGFSVTALSILQHLVCHSGAVVSLLLSGVGADSAAGEGNRSLVHRLSDGDMTSALRGVADDQGQHPLLKMLLHLLAFSSAATGHLQASVLTQCLKVLVKLAENTSCDFLPRFQCVFQVLPKCLSPETPLPSVLLAVELLSLLADHDQLAPQLCSHSEGCLLLLLYMYITSRPDRVALETQWLQLEQEVVWLLAKLGVQSPLPPVTGSNCQCNVEVVRALTVMLHRQWLTVRRAGGPPRTDQQRRTVRCLRDTVLLLHGLSQKDKLFMMHCVEVLHQFDQVMPGVSMLIRGLPDVTDCEEAALDDLCAAETDVEDPEVECG

SEQ ID NO: 747045 - protein, 464 aa, Homo sapiens
MAGTSAPGSKRRSEPPAPRPGPPPGTGHPPSKRARGFSAAAAPDPDDPFGAHGDFTADDLEELDTLASQALSQCPAAARDVSSDHKVHRLLDGMSKNPSGKNRETVPIKDNFELEVLQAQYKELKEKMKVMEEEVLIKNGEIKILRDSLHQTESVLEEQRRSHFLLEQEKTQALSDKEKEFSKKLQSLQSELQFKDAEMNELRTKLQTSERANKLAAPSVSHVSPRKNPSVVIKPEACSPQFGKTSFPTKESFSANMSLPHPCQTESGYKPLVGREDSKPHSLRGDSIKQEEAQKSFVDSWRQRSNTQGSILINLLLKQPLIPGSSLSLCHLLSSSSESPAGTPLQPPGFGSTLAGMSGLRTTGSYDGSFSLSALREAQNLAFTGLNLVARNECSRDGDPAEGGRRAFPLCQLPGAVHFLPLVQFFIGLHCQALQDLAAAKRSGAPGDSPTHSSCQQVTFKPVS

SEQ ID NO: 747046 - protein, 583 aa, Homo sapiens [sequence omitted]

SEQ ID NO: 747047 - protein, 764 aa, Homo sapiens; identical to SEQ ID NO: 747039

SEQ ID NO: 747048 - protein, 764 aa, Homo sapiens; identical to SEQ ID NO: 747039

SEQ ID NO: 747049 - protein, 764 aa, Homo sapiens; identical to SEQ ID NO: 747039

SEQ ID NO: 747050 - protein, 369 aa, Homo sapiens
MGPGARRQGRIVQGRPEMCFCPPPTPLPPLRILTLGTHTPTPCSSPGSAAGTYPTMGSQALPPGPMQTLIFFDMEATGLPFSQPKVTELCLLAVHRCALESPPTSQGPPPTVPPPPRVVDKLSLCVAPGKACSPAASEITGLSTAVLAAHGRQCFDDNLANLLLAFLRRQPQPWCLVAHNGDRYDFPLLQAELAMLGLTSALDGAFCVDSITALKALERASSPSEHGPRKSYSLGSIYTRLYGQSPPDSHTAEGDVLALLSICQWRPQALLRWVDAHARPFGTIRPMYGVTASARTKPRPSAVTTTAHLATTRNTSPSLGESRGTKDLPPVKDPGALSREGLLAPLGLLAILTLAVATLYGLSLATPGE

SEQ ID NO: 747051 - protein, 369 aa, Homo sapiens; identical to SEQ ID NO: 747050

SEQ ID NO: 747052 - protein, 369 aa, Homo sapiens; identical to SEQ ID NO: 747050

SEQ ID NO: 747053 - protein, 764 aa, Homo sapiens; identical to SEQ ID NO: 747039

SEQ ID NO: 747054 - protein, 834 aa, Homo sapiens [sequence omitted]

SEQ ID NO: 747055 - protein, 369 aa, Homo sapiens; identical to SEQ ID NO: 747050

SEQ ID NO: 747056 - protein, 764 aa, Homo sapiens; identical to SEQ ID NO: 747039

SEQ ID NO: 747057 - protein, 764 aa, Homo sapiens; identical to SEQ ID NO: 747039

SEQ ID NO: 747058 - protein, 764 aa, Homo sapiens; identical to SEQ ID NO: 747039

SEQ ID NO: 747059 - protein, 764 aa, Homo sapiens; identical to SEQ ID NO: 747039

SEQ ID NO: 747060 - protein, 369 aa, Homo sapiens; identical to SEQ ID NO: 747050

SEQ ID NO: 747061 - protein, 791 aa, Homo sapiens; identical to SEQ ID NO: 747044

SEQ ID NO: 747062 - protein, 583 aa, Homo sapiens [sequence omitted]

SEQ ID NO: 747063 - protein, 583 aa, Homo sapiens [sequence omitted]

SEQ ID NO: 747064 - protein, 224 aa, Homo sapiens
MAFYPLQIAGLVLGFLGMVGTLATTLLPQWRVSAFVGSNIIVFERLWEGLWMNCIRQARVRLQCKFYSSLLALPPALETARALMCVAVALSLIALLIGICGMKQVQCTGSNERAKAYLLGTSGVLFILTGIFVLIPVSWTANIIIRDFYNPAIHIGQKRELGAALFLGWASAAVLFIGGGLLCGFCCCNRKKQGYRYPVPGYRVPHTDKRRNTTMLSKTSTSYV

SEQ ID NO: 747065 - protein, 90 aa, Homo sapiens
MDGSLSRSGQLGVPSLEGQHTRLQVARVSKVPGDVSHTQPTPVQSRTDTLGFRANLLPRGVTTWSHRHPARTRSPHTPGTPDTVTCTRAR

SEQ ID NO: 747066 - protein, 126 aa, Homo sapiens
MPEPVKSAPVPKKGSKKAINKAQKKDGKKRKRSRKESYSVYVYKVLKQVHPDTGISSKAMGIMNSFVNDIFERIAGEASRLAHYNKRSTITSREIQTAVRLLLPGELAKHAVSEGTKAVTKYTSSK

SEQ ID NO: 747067 - protein, 388 aa, Homo sapiens
MSAPSTLPPGGEEGLGTAWPSAANASSAPAEAEEAVAGPGDARAAGMVAIQCIYALVCLVGLVGNALVIFVILRYAKMKTATNIYLLNLAVADELFMLSVPFVASSAALRHWPFGSVLCRAVLSVDGLNMFTSVFCLTVLSVDRYVAVVHPLRAATYRRPSVAKLINLGVWLASLLVTLPIAIFADTRPARGGQAVACNLQWPHPAWSAVFVVYTFLLGFLLPVLAIGLCYLLIVGKMRAVALRAGWQQRRRSEKKITRLVLMVVVVFVLCWMPFYVVQLLNLFVTSLDATVNHVSLILSYANSCANPILYGFLSDNFRRFFQRVLCLRCCLLEGAGGAEEEPLDYYATALKSKGGAGCMCPPLPCQQEALQPEPGRKRIPLTRTTTF

SEQ ID NO: 747068 - protein, 478 aa, Homo sapiens
MNPPSGPRVLPSPTQEPSCMATPAPPSWWDSSQSSISSLGRLPSISPTAPGTWAAAWVPLPTVDVPDHAHYTLGTVILLVGLTGMLGNLTVIYTFCRSRSLRTPANMFIINLAVSDFLMSFTQAPVFFTSSLYKQWLFGETGCEFYAFCGALFGISSMITLTAIALDRYLVITRPLATFGVASKRRAAFVLLGVWLYALAWSLPPFFGWSAYVPEGLLTSCSWDYMSFTPAVRAYTMLLCCFVFFLPLLIIIYCYIFIFRAIRETGRALQTFGACKGNGESLWQRQRLQSECKMAKIMLLVILLFVLSWAPYSAVALVAFAGYAHVLTPYMSSVPAVIAKASAIHNPIIYAITHPKYRVAIAQHLPCLGVLLGVSRRHSRPYPSYRSTHRSTLISHTSNLSWISIRRRQESLGSESEVGWTHMEAAAVWGAAQQANGRSLYGQGLEDLEAKAPPRPQGHEAETPGKTKGLIPSQDPRM

SEQ ID NO: 747069 - protein, 489 aa, Homo sapiens
MNPPSGPRVLPSPTQEPSCMATPAPPSWWDSSQSSISSLGRLPSISPTAPGTWAAAWVPLPTVDVPDHAHYTLGTVILLVGLTGMLGNLTVIYTFCRAVLRGVTVMMQSRSLRTPANMFIINLAVSDFLMSFTQAPVFFTSSLYKQWLFGETGCEFYAFCGALFGISSMITLTAIALDRYLVITRPLATFGVASKRRAAFVLLGVWLYALAWSLPPFFGWSAYVPEGLLTSCSWDYMSFTPAVRAYTMLLCCFVFFLPLLIIIYCYIFIFRAIRETGRALQTFGACKGNGESLWQRQRLQSECKMAKIMLLVILLFVLSWAPYSAVALVAFAGYAHVLTPYMSSVPAVIAKASAIHNPIIYAITHPKYRVAIAQHLPCLGVLLGVSRRHSRPYPSYRSTHRSTLISHTSNLSWISIRRRQESLGSESEVGWTHMEAAAVWGAAQQANGRSLYGQGLEDLEAKAPPRPQGHEAETPGKTKGLIPSQDPRM

SEQ ID NO: 747070 - protein, 202 aa, Homo sapiens
MDHFFIKRKRNSEVKYTEACSSSSVESGIVNSDNIEKNTDSNLQTSTSFEPHFKKKKVSARRYNEDYLKYGFIKCEKPFENDRPQCVICNNILANESLKPSKLKRHLETQHAELIDKPLEYFQRKKKDIKLSTQFLSCSTAVSEKALLSSYLVAYRVAKEKIANTAAEKIILPACLDMVRTIFDDKSADKLKTIPNDNTVSL

SEQ ID NO: 747071 - protein, 330 aa, Homo sapiens
IHREGLASREIPQNLMEVLKNAVKVVNFIKGSSLNSRLLETFCSEIGTNHTHLLYHTKIRWLSQGKILSRVYELRNEIHFFLIEKKSHLASIFEDDTWVTKLAYLTDIFSILNELSLKLQGKNSDVFQHVERIQGFRKTLLLWQVRLKSNRPSYYMFPRFLQHIEENIINENILKEIKLEILLHLTSLSQTFNHFFPEEKFETLRENSWVKDPFAFRNPESIIELNLVPEEENELLQLSSSYTLKNDYETLSLSAFWMKVKEDFPLLSRKSVLLLLPFTTTSLCELGFSILTQLKTKERNGLNCAAVMRVALSSCVPDWNELMNRQAHPS

SEQ ID NO: 747072 - protein, 236 aa, Homo sapiens
IHREGLASREIPQNLMEVLKNAVKVVNFIKGSSLNSRLLETFCSEIGTNHTHLLYHTKIRWLSQGKILSRVYELRNEIHFFLIEKKSHLASIFEDDTWVTKLAYLTDIFSILNELSLKLQGKNSDVFQHVERIQGFRKTLLLWQVRLKSNRPSYYMFPRFLQHIEENIINENILKEIKLEILLHLTSLSQTFNHFFPEEKFETLRENSWVKDPFAFRNPESIIELNLVPEEENELK

SEQ ID NO: 747073 - protein, 878 aa, Homo sapiens
MNLRPLGTPRGVSAVAGPHDIGASPGDKKSKNRSTRGKKKSIFETYMSKEDVSEGLKRGTLIQGVLRINPKKFHEAFIPSPDGDRDIFIDGVVARNRALNGDLVVVKLLPEEHWKVVKPESNDKETEAAYESDIPEELCGHHLPQQSLKSYNDSPDVIVEAQFDGSDSEDGHGITQNVLVDGVKKLSVCVSEKGREDGDAPVTKDETTCISQDTRALSEKSLQRSAKVVYILEKKHSRAATGFLKLLADKNSELFRKYALFSPSDHRVPRIYVPLKDCPQDFVARPKDYANTLFICRIVDWKEDCNFALGQLAKSLGQAGEIEPETEGILTEYGVDFSDFSSEVLECLPQGLPWTIPPEEFSKRRDLRKDCIFTIDPSTARDLDDALSCKPLADGNFKVGVHIADVSYFVPEGSDLDKVAAERATSVYLVQKVVPMLPRLLCEELCSLNPMSDKLTFSVIWTLTPEGKILDEWFGRTIIRSCTKLSYEHAQSMIESPTEKIPAKELPPISPEHSSEEVHQAVLNLHGIAKQLRQQRFVDGALRLDQLKLAFTLDHETGLPQGCHIYEYRESNKLVEEFMLLANMAVAHKIHRAFPEQALLRRHPPPQTRMLSDLVEFCDQMGLPVDFSSAGALNKSLTQTFGDDKYSLARKEVLTNMCSRPMQMALYFCSGLLQDPAQFRHYALNVPLYTHFTSPIRRFADVLVHRLLAAALGYRERLDMAPDTLQKQADHCNDRRMASKRVQELSTSLFFAVLVKESGPLESEAMVMGILKQAFDVLVLRYGVQKRIYCNALALRSHHFQKVGKKPELTLVWEPEDMEQEPAQQVITIFSLVEVVLQAESTALKYSAILKRPGTQGHLGPEKEEEESDGEPEDSSTS

SEQ ID NO: 747074 - protein, 995 aa, Homo sapiens
MSHPDYRMNLRPLGTPRGVSAVAGPHDIGASPGDKKSKNRSTRGKKKSIFETYMSKEDVSEGLKRGTLIQGVLRINPKKFHEAFIPSPDGDRDIFIDGVVARNRALNGDLVVVKLLPEEHWKVVKPESNDKETEAAYESDIPEELCGHHLPQQSLKSYNDSPDVIVEAQFDGSDSEDGHGITQNVLVDGVKKLSVCVSEKGREDGDAPVTKDETTCISQDTRALSEKSLQRSAKVVYILEKKHSRAATGFLKLLADKNSELFRKYALFSPSDHRVPRIYVPLKDCPQDFVARPKDYANTLFICRIVDWKEDCNFALGQLAKSLGQAGEIEPETEGILTEYGVDFSDFSSEVLECLPQGLPWTIPPEEFSKRRDLRKDCIFTIDPSTARDLDDALSCKPLADGNFKVGVHIADVSYFVPEGSDLDKVAAERATSVYLVQKVVPMLPRLLCEELCSLNPMSDKLTFSVIWTLTPEGKILDEWFGRTIIRSCTKLSYEHAQSMIESPTEKIPAKELPPISPEHSSEEVHQAVLNLHGIAKQLRQQRFVDGALRLDQLKLAFTLDHETGLPQGCHIYEYRESNKLVEEFMLLANMAVAHKIHRAFPEQALLRRHPPPQTRMLSDLVEFCDQMGLPVDFSSAGALNKSLTQTFGDDKYSLARKEVLTNMCSRPMQMALYFCSGLLQDPAQFRHYALNVPLYTHFTSPIRRFADVLVHRLLAAALGYRERLDMAPDTLQKQADHCNDRRMASKRVQELSTSLFFAVLVKESGPLESEAMVMGILKQAFDVLVLRYGVQKRIYCNALALRSHHFQKVGKKPELTLVWEPEDMEQEPAQQGPLENLMKAMSLHPRNCLEPFSPTVCPERRTQALRLCFISLGSAQDASDFPNSALTQGILPGGGPHYRQASRGFQRPKEGPGVLLQGWRQSCASTSGPAILVPSRLGSAQVITIFSLVEVVLQAESTALKYSAILKRPGTQGHLGPEKEEEESDGEPEDSSTS

SEQ ID NO: 747075 - protein, 709 aa, Homo sapiens
MLVRGLVLILAEGVTKLSVCVSEKGREDGDAPVTKDETTCISQDTRALSEKSLQRSAKVVYILEKKHSRAATGFLKLLADKNSELFRKYALFSPSDHRVPRIYVPLKDCPQDFVARPKDYANTLFICRIVDWKEDCNFALGQLAKSLGQAGEIEPETEGILTEYGVDFSDFSSEVLECLPQGLPWTIPPEEFSKRRDLRKDCIFTIDPSTARDLDDALSCKPLADGNFKVGVHIADVSYFVPEGSDLDKVAAERATSVYLVQKVVPMLPRLLCEELCSLNPMSDKLTFSVIWTLTPEGKILDEWFGRTIIRSCTKLSYEHAQSMIESPTEKIPAKELPPISPEHSSEEVHQAVLNLHGIAKQLRQQRFVDGALRLDQLKLAFTLDHETGLPQGCHIYEYRESNKLVEEFMLLANMAVAHKIHRAFPEQALLRRHPPPQTRMLSDLVEFCDQMGLPVDFSSAGALNKSLTQTFGDDKYSLARKEVLTNMCSRPMQMALYFCSGLLQDPAQFRHYALNVPLYTHFTSPIRRFADVLVHRLLAAALGYRERLDMAPDTLQKQADHCNDRRMASKRVQELSTSLFFAVLVKESGPLESEAMVMGILKQAFDVLVLRYGVQKRIYCNALALRSHHFQKVGKKPELTLVWEPEDMEQEPAQQVITIFSLVEVVLQAESTALKYSAILKRPGTQGHLGPEKEEEESDGEPEDSSTS

SEQ ID NO: 747076 - protein, 242 aa, Homo sapiens
MNLRPLGTPRGVSAVAGPHDIGASPGDKKSKNRSTRGKKKSIFETYMSKEDVSEGLKRGTLIQGVLRINPKKFHEAFIPSPDGDRDIFIDGVVARNRALNGDLVVVKLLPEEHWKVVKPESNDKETEAAYESDIPEELCGHHLPQQSLKSYNDSPDVIVEAQFDGSDSEDGHGITQNVLVDGVKKLSVCVSEKGREDGDAPVTKDETTCISQDTRALSEKSLQRSAKVIAYRFSPRVQMAFT

SEQ ID NO: 747077 - protein, 196 aa, Homo sapiens
MNLRPLGTPRGVSAVAGPHDIGASPGDKKSKNRSTRGKKKSIFETYMSKEDVSEGLKRGTLIQGVLRINPKKFHEAFIPSPDGDRDIFIDGVVARNRALNGDLVVVKLLPEEHWKVVKPESNDKETEAAYESDIPEELCGHHLPQQSLKSYNDSPDVIVEAQFDGSDSEDGHGITQNVLVDGVKKLSVCVSEKGEY

SEQ ID NO: 747078 - protein, 138 aa, Homo sapiens
LDMAPDTLQKQADHCNDRRMASKRVQELSTSLFFAVLVKVSPPAWCPSPPSGSRPSWAPAHQEAIEEPRAVPGGAMAAALSLQESGPLESEAMVMGILKQAFDVLVLRYGVQKRIYCNVSALGEPGGGQGSPSHPALE

SEQ ID NO: 747079 - protein, 124 aa, Homo sapiens
SLSAPFGPPGGVSAVAGPHDIGASPGDKKSKNRSTRGKKKSIFETYMSKEDVSEGLKRGTLIQGVLRINPKKFHEAFIPSPDGDRDIFIDGVVARNRALNGDLVVVKLLPEEHWKVVKPGKHLS

SEQ ID NO: 747080 - protein, 878 aa, Homo sapiens; identical to SEQ ID NO: 747073

SEQ ID NO: 747081 - protein, 782 aa, Homo sapiens
MSHPDYRMNLRPLGTPRGVSAVAGPHDIGASPGDKKSKNRSTRGKKKSIFETYMSKEDVSEGLKRGTLIQGVLRINPKKFHEAFIPSPDGDRDIFIDGVVARNRALNGDLVVVKLLPEEHWKVVKPESNDKETEAAYESDIPEELCGHHLPQQSLKSYNDSPDVIVEAQFDGSDSEDGHGITQNVLVDGVKKLSVCVSEKGREDGDAPVTKDETTCISQDTRALSEKSLQRSAKVVYILEKKHSRAATGFLKLLADKNSELFRKYALFSPSDHRVPRIYVPLKDCPQDFVARPKDYANTLFICRIVDWKEDCNFALGQLAKSLGQAGEIEPETEGILTEYGVDFSDFSSEVLECLPQGLPWTIPPEEFSKRRDLRKDCIFTIDPSTARDLDDALSCKPLADGNFKVGVHIADVSYFVPEGSDLDKVAAERATSVYLVQKVVPMLPRLLCEELCSLNPMSDKLTFSVIWTLTPEGKILDEWFGRTIIRSCTKLSYEHAQSMIESPTEKIPAKELPPISPEHSSEEVHQAVLNLHGIAKQLRQQRFVDGALRLDQLKLAFTLDHETGLPQGCHIYEYRESNKLVEEFMLLANMAVAHKIHRAFPEQALLRRHPPPQTRMLSDLVEFCDQMGLPVDFSSAGALNKSLTQTFGDDKYSLARKEVLTNMCSRPMQMALYFCSGLLQDPAQFRHYALNVPLYTHFTSPIRRFADVLVHRLLAAALGYRERLDMAPDTLQKQADHCNDRRMASKRVQELSTSLFFAVLVKVSPPAWCPSPPSGSRPSWA

SEQ ID NO: 747082 - protein, 209 aa, Homo sapiens
MFEPGHGLVQFETRSDTISEASSGARRCEQGVLRINPKKFHEAFIPSPDGDRDIFIDGVVARNRALNGDLVVVKLLPEEHWKVVKPESNDKETEAAYESDIPEELCGHHLPQQSLKSYNDSPDVIVEAQFDGSDSEDGHGITQNVLVDGVKKLSVCVSEKGREDGDAPVTKDETTCISQDTRALSEKSLQRSAKVIAYRFSPRVQMAFT

SEQ ID NO: 747083 - protein, 123 aa, Homo sapiens
  misc_feature (6)..(6): Xaa can be any naturally occurring amino acid
  misc_feature (13)..(13): Xaa can be any naturally occurring amino acid
PGLDTXTSVPDDXEAHSSSCRIGHQRHELKSYNDSPDVIVEAQFDGSDSEDGHGITQNVLVDGVKKLSVCVSEKGREDGDAPVTKDETTCISQDTRALSEKSLQRSAKVIAYRFSPRVQMAFT

SEQ ID NO: 747084 - protein, 204 aa, Homo sapiens
MSGAGVAAGTRPPSSPTPGSRRRRQRPSVGVQSLRPQSPQLRQSDPQKRNLDLEKSLQFLQQQHSEMLAKLHEEIEHLKRENKGEPARGPRPALPPQAHSTLPLPQHRNTAINSSTRLGSGGTQDDLHYKLIMNQTSQKKDSLSMSSFQSVKSISNSGKARPQPGSFNKQDSKADVSQKADLEEEPLLHNSKLDKVPGVQGQAR

SEQ ID NO: 747085 - protein, 378 aa, Homo sapiens
MSGAGVAAGTRPPSSPTPGSRRRRQRPSVGVQSLRPQSPQLRQSDPQKRNLDLEKSLQFLQQQHSEMLAKLHEEIEHLKRENKDLHYKLIMNQTSQKKDGPSGNHLSRASAPLGARWVCINGVWVEPGGPSPARLKEGSSRTHRPGGKRGRLAGGSADTVRSPADSLSMSSFQSVKSISNSGKARPQPGSFNKQDSKADVSQKADLEEEPLLHNSKLDKVPGVQGQARKEKAEASNAGAACMGNSQHQGRQMGAGAHPPMILPLPLRKPTTLRQCEVLIRELWNTNLLQTQELRHLKSLLEGSQRPQAAPEEASFPRDQEATHFPKVSTKSLSKKCLSPPVAERAILPALKQTPKNNFAERQKRLQAMQKRRLHRSVL

SEQ ID NO: 747086 - protein, 288 aa, Homo sapiens
MNQTSQKKDGPSGNHLSRASAPLGARWVCINGVWVEPGGPSPARLKEGSSRTHRPGGKRGRLAGGSADTVRSPADSLSMSSFQSVKSISNSGKARPQPGSFNKQDSKADVSQKADLEEEPLLHNSKLDKVPGVQGQARKEKAEASNAGAACMGNSQHQGRQMGAGAHPPMILPLPLRKPTTLRQCEVLIRELWNTNLLQTQELRHLKSLLEGSQRPQAAPEEASFPRDQEATHFPKVSTKSLSKKCLSPPVAERAILPALKQTPKNNFAERQKRLQAMQKRRLHRSVL

SEQ ID NO: 747087 - protein, 222 aa, Homo sapiens
RPPTTTKLSAARRDRPQSQRPPPGAQSTLLSGRGEPGPLPHIGLGAAWGGMLGGWLDAPGQVTSGCCNDCFRKEKAEASNAGAACMGNSQHQGRQMGAGAHPPMILPLPLRKPTTLRQCEVLIRELWNTNLLQTQELRHLKSLLEGSQRPQAAPEEASFPRDQEATHFPKVSTKSLSKKCLSPPVAERAILPALKQTPKNNFAERQKRLQAMQKRRLHRSVL

SEQ ID NO: 747088 - protein, 135 aa, Homo sapiens
MSGAGVAAGTRPPSSPTPGSRRRRQRPSVGVQSLRPQSPQLRQSDPQKRNLDLEKSLQFLQQQHSEMLAKLHEEIEHLKRENKGEPARGPRPALPPQAHSTLPLPQHRNTAINSSTRLGSGGTQDGSDTPLLKTL

SEQ ID NO: 747089 - protein, 312 aa, Homo sapiens
MSGAGVAAGTRPPSSPTPGSRRRRQRPSVGVQSLRPQSPQLRQSDPQKRNLDLEKSLQFLQQQHSEMLAKLHEEIEHLKRENKDLHYKLIMNQTSQKKDSLSMSSFQSVKSISNSGKARPQPGSFNKQDSKADVSQKADLEEEPLLHNSKLDKVPGVQGQARKEKAEASNAGAACMGNSQHQGRQMGAGAHPPMILPLPLRKPTTLRQCEVLIRELWNTNLLQTQELRHLKSLLEGSQRPQAAPEEASFPRDQEATHFPKVSTKSLSKKCLSPPVAERAILPALKQTPKNNFAERQKRLQAMQKRRLHRSVL

SEQ ID NO: 747090 - protein, 288 aa, Homo sapiens; identical to SEQ ID NO: 747086

SEQ ID NO: 747091 - protein, 230 aa, Homo sapiens
MSGAGVAAGTRPPSSPTPGSRRRRQRPSVGVQSLRPQSPQLRQSDPQKRNLDLEKSLQFLQQQHSEMLAKLHEEIEHLKRENKDLHYKLIMNQTSQKKDSLSMSSFQSVKSISNSGKARPQPGSFNKQDSKADVSQKADLEEEPLLHNSKLDKVPGVQGQASPPHLGSAKCSSASCGIPTSCRPKSCGTSSPSWKGARGPRQPRRKLAFPGTKKPRISPRSPPRASPRNA

SEQ ID NO: 747092 - protein, 137 aa, Homo sapiens
WGGMLGGWLDAPGQVTSGCCNDCFRKEKAEASNAGAACMGNSQHQGRQMGAGAHPPMILPLPLRKPTTLRQCEVLIRELWNTNLLQTQEVRPWVVGVALGSLAPPQAPPCPCPCLSAAAPQVPPGREPEAPGSPGGS

SEQ ID NO: 747093 - protein, 307 aa, Homo sapiens
MGGFQRGKYGTMAEGRSEDNLSATPPALRIILVGKTGCGKSATGNSILGQPVFESKLRAQSVTRTCQVKTGTWNGRKVLVVDTPSIFESQADTQELYKNIGDCYLLSAPGPHVLLLVIQLGRFTAQDTVAIRKVKEVFGTGAMRHVVILFTHKEDLGGQALDDYVANTDNCSLKDLVRECERRYCAFNNWGSVEEQRQQQAELLAVIERLGREREGSFHSNDLFLDAQLLQRTGAGACQEDYRQYQAKVEWQVEKHKQELRENESNWAYKALLRVKHLMLLHYEIFVFLLLCSILFFIIFLFIFHYI

SEQ ID NO: 747094 - protein, 333 aa, Homo sapiens
LHSQPKGKQQVGASCGQLQSLSPGKVSMGGRKMATDEENVYGLEENAQSRQESTRRLILVGRTGAGKSATGNSILGQRRFFSRLGATSVTRACTTGSRRWDKCHVEVVDTPDIFSSQVSKTDPGCEERGHCYLLSAPGPHALLLVTQLGRFTAQDQQAVRQVRDMFGEDVLKWMVIVFTRKEDLAGGSLHDYVSNTENRALRELVAECGGRVCAFDNRATGREQEAQVEQLLGMVEGLVLEHKGAHYSNEVYELAQVLRWAGPEERLRRVAERVAARVQRRPWGAWLSARLWKWLKSPRSWRLGLALLLGGALLFWVLLHRRWSEAVAEVGPD

SEQ ID NO: 747095 - protein, 307 aa, Homo sapiens; identical to SEQ ID NO: 747093

SEQ ID NO: 747096 - protein, 466 aa, Homo sapiens
MKKMSIRFFSRLGATSVTRACTTGSRRWDKCHVEVVDTPDIFSSQVSKTDPGCEERGHCYLLSAPGPHALLLVTQLGRFTAQDQQAVRQLSHGAFSPSTWLLLNCVCSTSLSPVNSIPAHRRRAGLSLLPLHLPERGPAARASVTATLEDRAQQPFLERMGGFQRGKYGTMAEGRSEDNLSATPPALRIILVGKTGCGKSATGNSILGQPVFESKLRAQSVTRTCQVKTGTWNGRKVLVVDTPSIFESQADTQELYKNIGDCYLLSAPGPHVLLLVIQLGRFTAQDTVAIRKVKEVFGTGAMRHVVILFTHKEDLGGQALDDYVANTDNCSLKDLVRECERRYCAFNNWGSVEEQRQQQAELLAVIERLGREREGSFHSNDLFLDAQLLQRTGAGACQEDYRQYQAKVEWQVEKHKQELRENESNWAYKALLRVKHLMLLHYEIFVFLLLCSILFFIIFLFIFHYI

SEQ ID NO: 747097 - protein, 307 aa, Homo sapiens; identical to SEQ ID NO: 747093

SEQ ID NO: 747098 - protein, 386 aa, Homo sapiens
PSGWESGHTGPPIPFPLTSVLRVPDPHFHPPTGQYLVISSPPLECPFDTKTFWDWKFPLLQINQSYLQQGNFFFSILERMGGFQRGKYGTMAEGRSEDNLSATPPALRIILVGKTGCGKSATGNSILGQPVFESKLRAQSVTRTCQVKTGTWNGRKVLVVDTPSIFESQADTQELYKNIGDCYLLSAPGPHVLLLVIQLGRFTAQDTVAIRKVKEVFGTGAMRHVVILFTHKEDLGGQALDDYVANTDNCSLKDLVRECERRYCAFNNWGSVEEQRQQQAELLAVIERLGREREGSFHSNDLFLDAQLLQRTGAGACQEDYRQYQAKVEWQVEKHKQELRENESNWAYKALLRVKHLMLLHYEIFVFLLLCSILFFIIFLFIFHYI

SEQ ID NO: 747099 - protein, 170 aa, Homo sapiens
MGGFQRGKYGTMAEGRSEDNLSATPPALRIILVGKTGCGKSATGNSILGQPVFESKLRAQSVTRTCQVKTGTWNGRKVLVVDTPSIFESQADTQELYKNIGDCYLLSAPGPHVLLLVIQLGRFTAQDTVAIRKVKEVFGTGAMRHVVILFTLSHQPCSLPYLRISSCISQ

SEQ ID NO: 747100 - protein, 307 aa, Homo sapiens; identical to SEQ ID NO: 747093

SEQ ID NO: 747101 - protein, 204 aa, Homo sapiens
LHSQPKGKQQVGASCGQLQSLSPGKVSMGGRKMATDEENVYGLEENAQSRQESTRRLILVGRTGAGKSATGNSILGQRRFFSRLGATSVTRACTTGSRRWDKCHVEVVDTPDIFSSQVSKTDPGCEERGHCYLLSAPGPHALLLVTQLGRFTAQDQQAVRQVRDMFGEDVLKWMVIVFTRKEDLAGGSLHDYVSNTENRVPRAA

SEQ ID NO: 747102 - protein, 479 aa, Homo sapiens
MKKMSIGKSATGNSILGQRRFFSRLGATSVTRACTTGSRRWDKCHVEVVDTPDIFSSQVSKTDPGCEERGHCYLLSAPGPHALLLVTQLGRFTAQDQQAVRQLSHGAFSPSTWLLLNCVCSTSLSPVNSIPAHRRRAGLSLLPLHLPERGPAARASVTATLEDRAQQPFLERMGGFQRGKYGTMAEGRSEDNLSATPPALRIILVGKTGCGKSATGNSILGQPVFESKLRAQSVTRTCQVKTGTWNGRKVLVVDTPSIFESQADTQELYKNIGDCYLLSAPGPHVLLLVIQLGRFTAQDTVAIRKVKEVFGTGAMRHVVILFTHKEDLGGQALDDYVANTDNCSLKDLVRECERRYCAFNNWGSVEEQRQQQAELLAVIERLGREREGSFHSNDLFLDAQLLQRTGAGACQEDYRQYQAKVEWQVEKHKQELRENESNWAYKALLRVKHLMLLHYEIFVFLLLCSILFFIIFLFIFHYI

SEQ ID NO: 747103 - protein, 289 aa, Homo sapiens
MGGFQRGKYGTMAEGRSEDNLSATPPALRIILVGKTGCGKSATGNSILGQPVFESKLRAQSVTRTCQVFESQADTQELYKNIGDCYLLSAPGPHVLLLVIQLGRFTAQDTVAIRKVKEVFGTGAMRHVVILFTHKEDLGGQALDDYVANTDNCSLKDLVRECERRYCAFNNWGSVEEQRQQQAELLAVIERLGREREGSFHSNDLFLDAQLLQRTGAGACQEDYRQYQAKVEWQVEKHKQELRENESNWAYKALLRVKHLMLLHYEIFVFLLLCSILFFIIFLFIFHYI

SEQ ID NO: 747104 - protein, 117 aa, Homo sapiens [sequence omitted]

SEQ ID NO: 747105 - protein, 178 aa, Homo sapiens
MGGFQRGKYGTMAEGRSEDNLSATPPALRIILVGKTGCGKSATGNSILGQPVFESKLRAQSVTRTCQVKTGTWNGRKVLVVDTPSIFESQADTQELYKNIGDCYLLSAPGPHVLLLVIQLGRFTAQDTVAIRKVKEVFGTGAMRHVVILFTHKEDLGGQALDDYVANTDNCSSFVLPT

SEQ ID NO: 747106 - protein, 109 aa, Homo sapiens
MDSSPAGSRSSWGEWSEPLWCRGGAYLVAFSLRVEAPTTLGDNTAANNVRFRCSDGEELQGPGLSWGDFGDWSDHCPKGACGLQTKIQGPRGLGDDTALNDARLFCCRS

SEQ ID NO: 747107 - protein, 152 aa, Homo sapiens
GRPFRNRSPHRGQTDINLLRRPDVTDATGWSGAQEPSCCRCCCFCGRLVSHVHSWGEWSEPLWCRGGAYLVAFSLRVEAPTTLGDNTAANNVRFRCSDGEELQGPGLSWGDFGDWSDHCPKGACGLQTKIQGPRGLGDDTALNDARLFCCRS

SEQ ID NO: 747108 - protein, 237 aa, Homo sapiens
MERGAGAKLLPLLLLLRATGFTCAQADGRNGYTAVIEVTSGGPWGDWAWPEMCPDGFFASGFSLKVGAQAVGPGEGGDAWDHRAKDDNSVTRPAPLLDTQVEPPQGIPGDDTALNGIRLHCARGNVLGNTHVVESQSGSWGEWSEPLWCRGGAYLVAFSLRVEAPTTLGDNTAANNVRFRCSDGEELQGPGLSWGDFGDWSDHCPKGACGLQTKIQGPRGLGDDTALNDARLFCCRS

SEQ ID NO: 747109 - protein, 202 aa, Homo sapiens [sequence omitted]

SEQ ID NO: 747110 - protein, 121 aa, Homo sapiens
LESLKGLVNGGPAEATHLPLPCSWGEWSEPLWCRGGAYLVAFSLRVEAPTTLGDNTAANNVRFRCSDGEELQGPGLSWGDFGDWSDHCPKGACGLQTKIQGPRGLGDDTALNDARLFCCRS

SEQ ID NO: 747111 - protein, 102 aa, Homo sapiens
MERGAGAKLLPLLLLLRATGFTCAQADGRNGYTAVIEVTSGGPWGDWAWPEMCPDGFFASGFSLKVEPPQGIPGDDTALNGIRLHCARGNVLGNTHVLGRME

SEQ ID NO: 747112 - protein, 312 aa, Homo sapiens
MDGVNDSSLQGFVLMSISDHPQLEMIFFIAILFSYLLTLLGNSTIILLSRLEARLHTPMYFFLSNLSSLDLAFATSSVPQMLINLWGPGKTISYGGCITQLYVFLWLGATECILLVVMAFDRYVAVCRPLRYTAIMNPQLCWLLAVIAWLGGLGNSVIQSTFTLQLPLCGHRRVEGFLCEVPAMIKLACGDTSLNQAVLNGVCTFFTAVPLSIIVISYCLIAQAVLKIHSAEGRRKAFNTCLSHLLVVFLFYGSASYGYLLPAKNSKQDQGKFISLFYSLVTPMVNPLIYTLRNMEVKGALRRLLGKGREVG

SEQ ID NO: 747113 - protein, 67 aa, Homo sapiens
MQRGATTSGLQESQELRRPSSCDFMLPSAALTCWAWAERQPRKSIKASQDDLCSVTQRFPNKSCFQG

SEQ ID NO: 747114 - protein, 557 aa, Homo sapiens
MRHRFHSGERRRTQTQYTVGRGTSMSAAREPFQNLTQKMASILRKSTYAYDVQTAEGVLSTIVKGVSRWPQAAQMKRPVWAAERSLEVGSKGHEPVWAAGGGPGKEGSRGSTCGGLLPDPRELEASLPPGPPSQAEPAARGTEQCPPCAQCGQSFGQKELSAPHQRVHRGPRPFAGAQCPKSFTQRTTPASHRRAHVAECTYTRAQCGKTFLQQIDAHTHYCAHIREKPYECAKLFGRLSTLLEHRHMHTGERPFQCTQCGCCFSRLSTLLEHRHTHISEKPFQCAQCDKRFTRLANLTVHQRVHLGERSFQCAQYSRRFMQKPGFLRHLCGHSQEKHYPCSPCGESFTCPSWLVRHQDSHASQASPSCLVCERDSSTDEPPTGLRGAVWGSTPSNPSAALRFEGTGTELGLRRCPGDRQRGSGDQEGLGWGSLAQFSFSREDGEMWVAPRELPKGALRAQGQLVPLKSEQPLLGATSWPGQSILAMVLASRGRAVLPGTEIAHGPSRCREAAGIEASPKHLSLTEGKAWAWRWGAQEWLALPCSIRRVIFRDKGPS

SEQ ID NO: 747115 - protein, 557 aa, Homo sapiens; identical to SEQ ID NO: 747114

SEQ ID NO: 747116 - protein, 350 aa, Homo sapiens
MRHRFHSGERRRTQTQYTVGRGTSMSAAREPFQNLTQKMASILRKSTYAYDVQTAEGVLSTIVKGVSRWPQAAQMKRPVWAAERSLEVGSKGHEPVWAAGGGPGKEGSRGSTCGGLLPDPRELEASLPPGPPSQAEPAARGTEQCPPCAQCGQSFGQKELSAPHQRVHRGPRPFAGAQCPKSFTQRTTPASHRRAHVAECTYTRAQCGKTFLQQIDAHTHYCAHIREKPYECAKLFGRLSTLLEHRHMHTGERPFQCTQCGCCFSRLSTLLEHRHTHISEKPFQCAQCDKRFTRLANLTVHQRVHLGERSFQCAQYSRRFMQKPGFLRHLCGHSQEKHYPCSPCGSHDQW

SEQ ID NO: 747117 - protein, 102 aa, Homo sapiens
PKKLWKKCTQYAHLCPFSVSLQTECCLTKLKSCGREREVVQDTWLLTVRKTASLRQAQWLTPVIPTIWEAEAGGSPEVRSSRPAWPTRRNPISAKNTKISRA

SEQ ID NO: 747118 - protein, 112 aa, Homo sapiens
MVRISDVIAHANLATSLKKNTCNCQADLLSWRSWVNGISCHCPNLRPLSKSIFRDSTSLCSLSQQRLCPLHSKPEACWGLFVSVHAHFRVQSGGRGNRVGKKTRVSRNDETL

SEQ ID NO: 747119 - protein, 685 aa, Homo sapiens
MGVANPEVAGGRAPFPECTAAAAFRNRFSFGPGRPGGEDWCGLAMDGLQASAGPLRRGRPRRRRKPQPHSGSVLALPLRSRKIRKQLRSVVSRMAALRTQTLPSENSEESRVESTADDLGDALPGGAAVAAVPDAARREPYGHLGPAELLEASPAARSLQTPSARLVPASAPPARLVEVPAAPVRVVETSALLCTAQHLAAVQSSGAPATASGPQVDNTGGEPAWDSPLRRVLAELNRIPSSRRRAARLFEWLIAPMPPDHFYRRLWEREAVLVRRQDHTYYQGLFSTADLDSMLRNEEVQFGQHLDAARYINGRRETLNPPGRALPAAAWSLYQAGCSLRLLCPQAFSTTVWQFLAVLQEQFGSMAGSNVYLTPPNSQGFAPHYDDIEAFVLQLEGRKLWRVYRPRAPTEELALTSSPNFSQDDLGEPVLQTVLEPGDLLYFPRGFIHQAECQDGVHSLHLTLSTYQRNTWGDFLEAILPLAVQAAMEENVEFRRGLPRDFMDYMGAQHSDSKDPRRTAFMEKVRVLVARLGHFAPVDAVADQRAKDFIHDSLPPVLTDRERALSVYGLPIRWEAGEPVNVGAQLTTETEVHMLQDGIARLVGEGGHLFLYYTVENSRVYHLEEPKCLEIYPQQADAMELLLGSYPEFVRVGDLPCDSVEDQLSLATTLYDKGLLLTKMPLALN

SEQ ID NO: 747120 - protein, 80 aa, Homo sapiens
YGTFPTFPETSPILTEKQAKQLLRSRRQDRPSKPGFPDEPMREYMHHLLALEHRAEEQFLEHWLNPHCKPHCDRNRIHPV

SEQ ID NO: 747121 - protein, 313 aa, Homo sapiens
MGQNQTSISDFLLLGLPIQPEQQNLCYALFLAMYLTTLLGNLLIIVLIRLDSHLHTPMYLFLSNLSFSDLCFSSVTIPKLLQNMQNQDPSIPYADCLTQMYFFLLFGDLESFLLVAMAYDRYVAICFPLHYTAIMSPMLCLTLVALSWVLTTFHAMLHTLLMARLCFCADNVIPHFFCDMSALLKLAFSDTRVNEWVIFIMGGLILVIPFLLILGSYARIVSSILKVPSSKGICKAFSTCGSHLSVVSLFYGTVIGLYLCSSANSSTLKDTVMAMMYTVVTPMLNPFIYSLRNRDMKGALSRVIHQKKTFFSL

SEQ ID NO: 747122 - protein, 223 aa, Homo sapiens [sequence omitted]

SEQ ID NO: 747123 - protein, 223 aa, Homo sapiens [sequence omitted]

SEQ ID NO: 747124 - protein, 209 aa, Homo sapiens
MSDEEARQSGGSSQAGAVTVSDVQELMRRKEEIEAQIKANYDVLESQKGIGMNEPLVDCEGYPRSDVDLYQVRTARHNIICLQNDHKAVMKQVEEALHQLHARDKEKQARDMAEAHKEAMSRKLGQSESQGPPRAFAKVNSISPGSPASIAGLQVDDEIVEFGSVNTQNFQSLHNIGSVVQHSEGALAPTILLSVSMNLTTPGTSSRSP

SEQ ID NO: 747125 - protein, 234 aa, Homo sapiens
MSDEEARQSGGSSQAGAVTVSDVQELMRRKEEIEAQIKANYDVLESQKGIGMNEPLVDCEGYPRSDVDLYQVRTARHNIICLQNDHKAVMKQVEEALHQLHARDKEKQARDMAEAHKEAMSRKLGQSESQGPPRAFAKVNSISPGSPASIAGLQVDDEIVEFGSVNTQNFQSLHNIGSVVQHSEGKPLNVTVIRRGEKHQLRLVPTRWAGKGLLGEYSLKMCPGTVRRHLCLIG

SEQ ID NO: 747126 - protein, 223 aa, Homo sapiens [sequence omitted]

SEQ ID NO: 747127 - protein, 82 aa, Homo sapiens
LFSRSRTAVVFWRMGGAVVTVDWGVVPSPGAGSLESRPGVHDVRRGSEAERRLLAGRRRDCQRRPGADAAQGGDRSADQGQL

SEQ ID NO: 747128 - protein, 100 aa, Homo sapiens
HAVGFGEGPPRAFAKVNSISPGSPASIAGLQVDDEIVEFGSVNTQNFQSLHNIGSVVQHSEGKPLNVTVIRRGEKHQLRLVPTRWAGKGLLGCNIIPLQR

SEQ ID NO: 747129 - protein, 169 aa, Homo sapiens
MSDEEARQSGGSSQAGAVTVSDVQELMRRKEEIEAQIKANYDVLESQKGIGMNEPLVDCEGYPRSDVDLYQVRTARHNIICLQNDHKAVMKQVEEALHQLHARDKEKQARDMAEAHKEAMSRKLGQSESQGPPRAFAKVNSISPGSPASIAVIQGLATQVHAQGTRWVR

SEQ ID NO: 747130 - protein, 683 aa, Homo sapiens
AISAIFWATKYSQDNKEESLFLLLQYLPPGVIALVNFLGPLLFTFLVQLENYPPNTEVNLTLIWCVVLKLASLGMFSVSLGQTILCIGRDKSSCESYGYNVCDYQVAGSPAGPVPPFLLPKKLTSNCAEPCSCPFVTFERSCEQGCLHRRTPPGGATAATWCSVAALAVGLPALIPSSRPGFQPNDSIRHQARHLHHRNPHRRLREGRAGVAVSGDGSPSPAPQCWENSVGEELYKLSIFNFLLTVAFAFLVTLPRRLLVDRFSGRFWAWLEREEFLVPKNVLDIVAGQTVTWMGLFYCPLLPLLNSVFLFLTFYIKKYTLLKNSRASSRPFRASSSTFFFQLVLLLGLLLAAVPLGYVVSSPTWPSLASIHSSWDCGLFTNYSAPWQVVPELVALGLPPIGQRALHYLGSHAFSFPLLIMLRFSGQRGHGRGHLEGEVLPSMGVVSLCTPNQEPDAESQGKQGPLKSRNLLGPPSGLPWGLQDHWGSTVSGWLQLLSYWYCCARGEGMRGSARKERRVPSSDTAVCSEKTPVPRIVEIEVGREEVRERRLWPQGQLTTNPLPTQSLVLTVCVSQTQANARAIHRLRKQLVWVQEKWHLVEDLSRLLPEPGPSDSPGPKYPASQASRPQSFCPGCPCPGSPGHQAPRPGPSVVDAAGLRSPCPGQHGAPASARRFRFPSGAEL

SEQ ID NO: 747131 - protein, 540 aa, Homo sapiens
AISAIFWATKYSQDNKEESLFLLLQYLPPGVIALVNFLGPLLFTFLVQLENYPPNTEVNLTLIWCVVLKLASLGMFSVSLGQTILCIGRDKSSCESYGYNVCDYQVAGSPAGPVPPFLLPKKLTSNCAEPCSCPFVTFERSCEQGCLHRRTPPGGATAATWCSVAALAVGLPALIPSSRPGFQPNDSIRHQARHLHHRNPHRRLREGRAGVAVSGDGSPSPAPQCWENSVGEELYKLSIFNFLLTVAFAFLVTLPRRLLVDRFSGRFWAWLEREEFLVPKNVLDIVAGQTVTWMGLFYCPLLPLLNSVFLFLTFYIKKYTLLKNSRASSRPFRASSSTFFFQLVLLLGLLLAAVPLGYVVSSPTWPSLASIHSSWDCGLFTNYSAPWQVVPELVALGLPPIGQRALHYLGSHAFSFPLLIMLSLVLTVCVSQTQANARAIHRLRKQLVWVQEKWHLVEDLSRLLPEPGPSDSPGPKYPASQASRPQSFCPGCPCPGSPGHQAPRPGPSVVDAAGLRSPCPGQHGAPASARRFRFPSGAEL

SEQ ID NO: 747132 - protein, 515 aa, Homo sapiens
AISAIFWATKYSQDNKEESLFLLLQYLPPGVIALVNFLGPLLFTFLVQLENYPPNTEVNLISDLCWENSVGEELYKLSIFNFLLTVAFAFLVTLPRRLLVDRFSGRFWAWLEREEFLVPKNVLDIVAGQTVTWMGLFYCPLLPLLNSVFLFLTFYIKKYTLLKNSRASSRPFRASSSTFFFQLVLLLGLLLAAVPLGYVVSSIHSSWDCGLFTNYSAPWQVVPELVALGLPPIGQRALHYLGSHAFSFPLLIMLRFSGQQGPWEGTPGGGGPSFHGGGEPVHPQPGARRRKQGKQGPLKSRNLLGPPSGLPWGLQDHWGSTVSGWLQLLSYWYCCARGEGMRGSARKERRVPSSDTAVCSEKTPVPRIVEIEVGREEVRERRLWPQGQLTTNPLPTQSLVLTVCVSQTQANARAIHRLRKQLVWVQEKWHLVEDLSRLLPEPGPSDSPGPKYPASQASRPQSFCPGCPCPGSPGHQAPRPGPSVVDAAGLRSPCPGQHGAPASARRFRFPSGAEL

SEQ ID NO: 747133 - protein, 564 aa, Homo sapiens
AISAIFWATKYSQDNKEESLFLLLQYLPPGVIALVNFLGPLLFTFLVQLENYPPNTEVNLTLIWCVVLKLASLGMFSVSLGQTILCIGRDKSSCESYGYNVCDYQCWENSVGEELYKLSIFNFLLTVAFAFLVTLPRRLLVDRFSGRFWAWLEREEFLVPKNVLDIVAGQTVTWMGLFYCPLLPLLNSVFLFLTFYIKKYTLLKNSRASSRPFRASSSTFFFQLVLLLGLLLAAVPLGYVVSSPTWPSLASIHSSWDCGLFTNYSAPWQVVPELVALGLPPIGQRALHYLGSHAFSFPLLIMLRFSGQRGHGRGHLEGEVLPSMGVVSLCTPNQEPDAESQGKQGPLKSRNLLGPPSGLPWGLQDHWGSTVSGWLQLLSYWYCCARGEGMRGSARKERRVPSSDTAVCSEKTPVPRIVEIEVGREEVRERRLWPQGQLTTNPLPTQSLVLTVCVSQTQANARAIHRLRKQLVWVQEKWHLVEDLSRLLPEPGPSDSPGPKYPASQASRPQSFCPGCPCPGSPGHQAPRPGPSVVDAAGLRSPCPGQHGAPASARRFRFPSGAEL

SEQ ID NO: 747134 - protein, 123 aa, Homo sapiens [sequence omitted]

SEQ ID NO: 747135 - protein, 123 aa, Homo sapiens [sequence omitted]

SEQ ID NO: 747136 - protein, 683 aa, Homo sapiens; identical to SEQ ID NO: 747130

SEQ ID NO: 747137 - protein, 528 aa, Homo sapiens
AISAIFWATKYSQDNKEESLFLLLQYLPPGVIALVNFLGPLLFTFLVQLENYPPNTEVNLTLIWCVVLKLASLGMFSVSLGQTILCIGRDKSSCESYGYNVCDYQVAGSPAGPVPPFLLPKKLTSNCAEPCSCPFVTFERSCEQGCLHRRTPPGGATAATWCSVAALAVGLPALIPSSRPGFQPNDSIRHQARHLHHRNPHRRLREGRAGVAVSGDGSPSPAPQCWENSVGEELYKLSIFNFLLTVAFAFLVTLPRRLLVDRFSGRFWAWLEREEFLVPKNVLDIVAGQTVTWMGLFYCPLLPLLNSVFLFLTFYIKKYTLLKNSRASSRPFRASSSTFFFQLVLLLGLLLAAVPLGYVVSSPTWPSLASIHSSWDCGLFTNYSAPWQVVPELVALGLPPIGQRALHYLGSHAFSFPLLIMLRFSGQQGPWEGTPGGGGPSFHGGGEPVHPQPGARRRKPREAGASEKQEPPGPTLWAAMGIAGSLGKHRVWVAAAAELLVLLCQRGGDEGLCEEGEEGPILRYSSVQ

SEQ ID NO: 747138 - protein, 114 aa, Homo sapiens
MLLPRSVSSERAPGVPEPEELWEAEMERLRGSGTPVRGLPYAMMDKRLIWQLREPAGVQTLRWQRWQRRRQTVERRLREAAQAAGPGALGSGRGRSTRSGASSAQEFGPTSPSS

SEQ ID NO: 747139 - protein, 121 aa, Homo sapiens
PDIVGTTSNLLKGIILSLSPRAKFGTRLLISGLGPKVAPGPVASASPGKRLEMNIPRPHLSLLNQSIPLANHTEKQPRASPSAVKKASFETLKESSNSGPRCAHPGRDKDAMLLQVASKIK

SEQ ID NO: 747140 - protein, 256 aa, Homo sapiens
AISAIFWATKYSQDNKEESLFLLLQYLPPGVIALVNFLGPLLFTFLVQLENYPPNTEVNLTLIWCVVLKLASLGMFSVSLGQTILCIGRDKSSCESYGYNVCDYQCWENSVGEELYKLSIFNFLLTVAFAFLVTLPRRLLVDRFSGRFGEGQEETRAWWDWLQAHRRRARGLDTKPPSYLGSSFFSFAFFCFCCMISESLCLRAAAESPSSRRFPLTESLCFFIFFWRASSRWYRRSWRRQRLQPASSCPSQGSSS

SEQ ID NO: 747141 - protein, 155 aa, Homo sapiens
LHRSGSNASDRISCPSFSFPPRYYRGAVGALLVFDLTKHQTYAVVERWLKELYDHAEATIVVMLVGNKSDLSQAREVPTEEARMFAENNGLLFLETSALDSTNVELAFETVLKEIFAKVSKQRQNSIRTNAITLGSAQAGQEPGPGEKRACCISL

SEQ ID NO: 747142 - protein, 213 aa, Homo sapiens
MGNGTEEDYNFVFKVVLIGESGVGKTNLLSRFTRNEFSHDSRTTIGVEFSTRTVMLGTAAVKAQIWDTAGLERYRAITSAYYRGAVGALLVFDLTKHQTYAVVERWLKELYDHAEATIVVMLVGNKSDLSQAREVPTEEARMFAENNGLLFLETSALDSTNVELAFETVLKEIFAKVSKQRQNSIRTNAITLGSAQAGQEPGPGEKRACCISL

SEQ ID NO: 747143 - protein, 184 aa, Homo sapiens
MGNGTEEDYNFVFKVVLIGESGVGKTNLLSRFTRNEFSHDSRTTIGVEFSTRTVMLGTAAVKAQIWDTAGLERYRAITSAYYRGAVGALLVFDLTKHQTYAVVERWLKELYDHAEATIVVMLVGNKSDLSQAREVPTEEARMFAENNGLLFLETSALDSTQLVLPASGLPGLLDASFNAHTAMR

SEQ ID NO: 747144 - protein, 86 aa, Homo sapiens
KHRRAPTVTTEEARMFAENNGLLFLETSALDSTNVELAFETVLKEIFAKVSKQRQNSIRTNAITLGSAQAGQEPGPGEKRACCISL

SEQ ID NO: 747145 - protein, 173 aa, Homo sapiens
MIIFQDLISHNEMFSDIYKIWEITNGLCLEVEQKMLSKTTGNTDDSLIGRNSSSESTEDEVTESTIITSVDIVTNHHLQESIFTKEAYKKYIKDYMKSINEKLEEQRPERVKLFITGNEEQIKHIFANFQNYQFFIGENLNPPGMVALLNYRKDGQYDPIYDFLRNGLEIKRC

SEQ ID NO: 747146 - protein, 285 aa, Homo sapiens
MPREDRATWKSNYFLKIIQLLDDYPKCFIVGADNVGSKQMQQIRMSLRGKAVVLMGKNTMMRKAIRGHLENNPALEKLLPHIRGNVGFVFTKEDLTEIRDMLLANKVPAAARAGAIAPCEVTVPAQNTGLGPEKTSFFQALGITTKISRGTIEILSDVQLIKTGDKVGASEATLLNMLNISPFSFGLVIQQVFDNGSIYNPEVLDITEETLHSRFLEGVRNVASVCLADWYPTVASVPHSIINGYKRVLACLWRRITPSHLLKRSRLSWLIHLPLWLLPLWLLPP

SEQ ID NO: 747147 - protein, 158 aa, Homo sapiens
MPREDRATWKSNYFLKIIQLLDDYPKCFIVGADNVGSKQMQQIRMSLRGKAVVLMGKNTMMRKAIRGHLENNPALEKLLPHIRGNVGFVFTKEDLTEIRDMLLANKVPAAARAGAIAPCEVTVPAQNTGLGPEKTSFFQALGITTKISRGTIEILCAS

SEQ ID NO: 747148 - protein, 285 aa, Homo sapiens; identical to SEQ ID NO: 747146

SEQ ID NO: 747149 - protein, 285 aa, Homo sapiens; identical to SEQ ID NO: 747146

SEQ ID NO: 747150 - protein, 223 aa, Homo sapiens
MPREDRATWKSNYFLKIIQLLDDYPKCFIVGADNVGSKQMQQIRMSLRGKAVVLMGKNTMMRKAIRGHLENNPALEKLLPHIRGNVGFVFTKEDLTEIRDMLLANKVPAAARAGAIAPCEVTVPAQNTGLGPEKTSFFQALGITTKISRGTIEILGVRNVASVCLADWYPTVASVPHSIINGYKRVLACLWRRITPSHLLKRSRLSWLIHLPLWLLPLWLLPP

SEQ ID NO: 747151 - protein, 178 aa, Homo sapiens
MPREDRATWKSNYFLKIIQLLDDYPEYVSLDGEAETNVGSNVKDASNESGHVLISSVDMGLLGIDDLQFGGQHESTSMYAAMARSRGAPAKYQHQSLGGELLPHIRGNVGFVFTKEDLTEIRDMLLANKVPAAARAGAIAPCEVTVPAQNTGLGPEKTSFFQALGITTKISRGTIEIL

SEQ ID NO: 747152 - protein, 385 aa, Homo sapiens
MKDEPRSTNLFMKLDSVFIWKEPFGLVLIIAPWNYPLNLTLVLLVGALAAGSCVVLKPSEISQGTEKVLAEVLPQYLDQSCFAVVLGGPQETGQLLEHKLDYIFFTGSPRVGKIVMTAATKHLTPVTLELGGKNPCYVDDNCDPQTVANRVAWFCYFNAGQTCVAPDYVLCSPEMQERLLPALQSTITRFYGDDPQSSPNLGRIINQKQFQRLRALLGCGRVAIGGQSNESDRYIAPTVLVDVQETEPVMQEEIFGPILPIVNVQSVDEAIKFINRQEKPLALYAFSNSSQVVNQMLERTSSGSFGGNEGFTYISLLSVPFGGVGHSGMGRYHGKFTFDTFSHHRTCLLAPSGLEKLKEIRYPPYTDWNQQLLRWGMGSQSCTLL

SEQ ID NO: 747153 - protein, 385 aa, Homo sapiens; identical to SEQ ID NO: 747152

SEQ ID NO: 747154 - protein, 141 aa, Homo sapiens
IARRGHGSWFGSCQSPGRIAVSRAGLRPGGRSRACASGGSMSKKGSGGAAKDPGAEPTLGWTPSRTRCGGCVRPSTEGARGRPSSGLRSSRAWATSFKKTSSFCATCWPRTCISQLSRQTYLSSSFARTRLTTLSRTCRPG

SEQ ID NO: 747155 - protein, 357 aa, Homo sapiens
MKDEPRSTNLFMKLDSVFIWKEPFGLVLIIAPWNYPLNLTLVLLVGALAAGSCVVLKPSEISQGTEKVLAEVLPQYLDQSCFAVVLGGPQETGQLLEHKLDYIFFTGSPRVGKIVMTAATKHLTPVTLELGGKNPCYVDDNCDPQTVANRVAWFCYFNAGQTCVAPDYVLCSPEMQERLLPALQSTITRFYGDDPQSSPNLGRIINQKQFQRLRALLGCGRVAIGGQSNESDRYIAPTVLVDVQETEPVMQEEIFGPILPIVNVQSVDEAIKFINRQEKPLALPQWDGPVPRQVHLRHLLPPPHLPARPLRPGEIKGDPLPTLYRLEPAAVTLGHGLPELHPPVSVPPASNGSHRET

SEQ ID NO: 747156 - protein, 385 aa, Homo sapiens; identical to SEQ ID NO: 747152

SEQ ID NO: 747157 - protein, 385 aa, Homo sapiens; identical to SEQ ID NO: 747152

SEQ ID NO: 747158 - protein, 385 aa, Homo sapiens; identical to SEQ ID NO: 747152

SEQ ID NO: 747159 - protein, 223 aa, Homo sapiens
MKDEPRSTNLFMKLDSVFIWKEPFGLVLIIAPWNYPLNLTLVLLVGALAAGSCVVLKPSEISQGTEKVLAEVLPQYLDQSCFAVVLGGPQETGQLLEHKLDYIFFTGSPRVGKIVMTAATKHLTPVTLELGGKNPCYVDDNCDPQTVANRVAWFCYFNAGQTCVAPDYVLCSPEMQERLLPALQSTITLYRLEPAAVTLGHGLPELHPPVSVPPASNGSHRET

SEQ ID NO: 747160 - protein, 107 aa, Homo sapiens
MTRAQTHLLTPWQVVNQMLERTSSGSFGGNEGFTYISLLSVPFGGVGHSGMGRYHGKFTFDTFSHHRTCLLAPSGLEKLKEIRYPPYTDWNQQLLRWGMGSQSCTLL

SEQ ID NO: 747161 - protein, 385 aa, Homo sapiens; identical to SEQ ID NO: 747152

SEQ ID NO: 747162 - protein, 268 aa, Homo sapiens
MKDEPRSTNLFMKLDSVFIWKEPFGLVLIIAPWNYPLNLTLVLLVGALAAGSCVVLKPSEISQGTEKVLAEVLPQYLDQSCFAVVLGGPQETGQLLEHKLDYIFFTGSPRVGKIVMTAATKHLTPVTLELGGKNPCYVDDNCDPQTVANRVAWFCYFNAGQTCVAPDYVLCSPEMQERLLPALQSTITRFYGDDPQSSPNLGRIINQKQFQVNLSEKGRQVDAEEYLGFILDGLHEEMLTLKKLLSPSNERLTISNRPKNHSVNEEEQ

SEQ ID NO: 747163 - protein, 267 aa, Homo sapiens
  misc_feature (247)..(248): Xaa can be any naturally occurring amino acid
  misc_feature (266)..(266): Xaa can be any naturally occurring amino acid
MSKKGSGGAAKDPGAEPTLGSPRVGKIVMTAATKHLTPVTLELGGKNPCYVDDNCDPQTVANRVAWFCYFNAGQTCVAPDYVLCSPEMQERLLPALQSTITRFYGDDPQSSPNLGRIINQKQFQRLRALLGCGRVAIGGQSNESDRYIAPTVLVDVQETEPVMQEEIFGPILPIVNVQSVDEAIKFINRQEKPLALYAFSNSSQVVNQMLERTSSGSFGGNEGFTYISLLSVPFGGVESASGWPYTXXTHTLHTTAVASAENKESXT

SEQ ID NO: 747164 - protein, 82 aa, Homo sapiens
LTPWQVVNQMLERTSSGSFGGNEGFTYISLLSVPFGGVAVGPCPFPPLGKLGFGTPDPGSPFTHCSTLIHTLGLSRPQFPYL

SEQ ID NO: 747165 - protein, 104 aa, Homo sapiens
SLNFPFSLLILGVQDIFLSHQSALPQQAPGPLPCSRWARQESTLHERQGLGPAPAPICFLIRQADAAGSVIISPSTRCAHVRTGDDCPERAGVPLPHLPHLGKL

SEQ ID NO: 747166 - protein, 161 aa, Homo sapiens
GEVILQIANEPVLPFNALDIALEVQNNLKGDQPNTHQLLAMASRLRESAELFQSDEMRPANDPKERAPIRIRMLNDILQDMEKSFLVKQAPPGFYRNILYHLDEKTSRFSILIEAWEHCKPLASNETLQEALSEVLNSINSAQVYFKAGLDVFKSVLDGKN

SEQ ID NO: 747167 - protein, 161 aa, Homo sapiens; identical to SEQ ID NO: 747166

SEQ ID NO: 747168 - protein, 236 aa, Homo sapiens
MTGYEARLITFGTWMYSVNKEQLARAGFYAIGQEDKVQCFHCGGGLANWKPKEDPWEQHAKWYPGCKYLLEEKGHEYINNIHLTRSLEGALVQTTKKTPSLTKRISDTIFPNPMLQEAIRMGFDFKDVKKIMEERIQTSGSNYKTLEVLVADLVSAQKDTTENELNQTSLQREISPEEPLRRLQEEKLCKICMDRHIAVVFIPCGHLVTCKQCAEAVDRCPMCSAVIDFKQRVFMS

SEQ ID NO: 747169 - protein, 706 aa, Homo sapiens
SHSSLVGDWRCSLMWPQPYLPPHPMMLEESRQNKLAAAKKKLKEYQQRKSPGIPAGAKTKKKKTDSSPETTTSGGCHSPGDSQYQELAVALESSSVTINQLNENIESLKQQKKQVEHQLEEAKKTNNEIHKAQMEQLETINILTLEKADLKTTLYHTKRAARHFEEESKDLAGRLQYSLQRIQELERALCAVSTQQQEEDRSSSCREAVLQRRLQQTIKERALLNAHVTQVTESLKQVQLERDEYAKHIKGERARWQERMWKMSVEARTLKEEKKRDIHRIQELERSLSELKNQMAEPPSLAPPAVTSVVEQLQDEAKHLRQEVEGLEGKLQSQVENNQALSLLSKEQKQRLQEQEEMLREQEAQRVREQERLCEQNERLREQQKTLQEQGERLRKQEQRLRKQEERLRKEEERLQKQEKRLWDQEERLWKKEERLQKQEERLALSQNHKLDKQLAEPQCSFEDLNNEKKSALQLEQQVKELQEKLDEEHLEAASHQNQQLETQLSLVALPGEGDGGQHLDSEEEEAPRPTPNIPEDLESREATSSFMDLPKEKADGTEQVERRELGFVQPSGVTDGMRESFTVYESQGAVPNTRHQEMEDVIRLAQKEEEMKVKLLELQELVLPLVGNHEGHGKFLIAAQNPADEPTPGAPAPQELGAAGEQDVFYEVSLDNNVEPAPGAAREGSPHDNPTVQQIVQLSPVMQDT

SEQ ID NO: 747170 - protein, 833 aa, Homo sapiens
RVARGWGGCGACGGSGIVGQGKGEPSRRRGRAAGRPQSMERGKMAEAESLETAAEHERILREIESTDTACIGPTLRSVYDGEEHGRFMEKLETRIRNHDREIEKMCNFHYQGFVDSITELLKVRGEAQKLKLVIAMEELKQCRLQQRNISATVDKLMLCLPVLEMYSKLRDQMKTKRHYPALKTLEHLEHTYLPQVSHYRFCKVMVDNIPKLREEIKDVSMSDLKDFLESIRKHSDKIGETAMKQAQQQRNLDNIVLQQPRIGSKRKSKKDAYIIFDTEIESTSPKSEQDSGILDVEDEEDDEEVPGAQDLVDFSPVYRCLHIYSVLGARETFENYYRKQRRKQARLVLQPPSNMHETLDGYRKYFNQIVGFFVVEDHILHTTQGLVNRAYIDELWEMALSKTIAALRTHSSYCSDPNLVLDLKNLIVLFADTLQVYGFPVNQLFDMLLEIRDQYSETLLKKWAGIFRNILDSDNYSPIPVTSEEMYKKVVGQFPFQDIELEKQPFPKKFPFSEFVPKVYNQIKEFIYACLKFSEDLHLSSTEVDDMIRKSTNLLLTRTLSNSLQNVIKRKNIGLTELVQIIINTTHLEKSCKYLEEFITNITNVLPETVHTTKLYGTTTFKDARHAAEEEIYTNLNQKIDQFLQLADYDWMTGDLGNKASDYLVDLIAFLRSTFAVFTHLPGKVAQTACMSACKHLATSLMQLLLEAEVRQLTLGALQQFNLDVRECEQFARSGPVPGFQEDTLQLAFIDLRQLLDLFIQWDWSTYLADYGQPNCKYLRVNPVTALTLLEKMKDTSRKNNMFAQFRKNERDKQKLIDTVAKQLRGLISSHHS

SEQ ID NO: 747171 - protein, 790 aa, Homo sapiens
  misc_feature (10)..(10): Xaa can be any naturally occurring amino acid
LASTLSAGDXRVWAHAQSVYDGEEHGRFMEKLETRIRNHDREIEKMCNFHYQGFVDSITELLKVRGEAQKLKNQVTDTNRKLQHEGKELVIAMEELKQCRLQQRNISATVDKLMLCLPVLEMYSKLRDQMKTKRHYPALKTLEHLEHTYLPQVSHYRFCKVMVDNIPKLREEIKDVSMSDLKDFLESIRKHSDKIGETAMKQAQQQRNLDNIVLQQPRIGSKRKSKKDAYIIFDTEIESTSPKSEQDSGILDVEDEEDDEEVPGAQDLVDFSPVYRCLHIYSVLGARETFENYYRKQRRKQARLVLQPPSNMHETLDGYRKYFNQIVGFFVVEDHILHTTQGLVNRAYIDELWEMALSKTIAALRTHSSYCSDPNLVLDLKNLIVLFADTLQVYGFPVNQLFDMLLEIRDQYSETLLKKWAGIFRNILDSDNYSPIPVTSEEMYKKVVGQFPFQDIELEKQPFPKKFPFSEFVPKVYNQIKEFIYACLKFSEDLHLSSTEVDDMIRKSTNLLLTRTLSNSLQNVIKRKNIGLTELVQIIINTTHLEKSCKYLEEFITNITNVLPETVHTTKLYGTTTFKDARHAAEEEIYTNLNQKIDQFLQLADYDWMTGDLGNKASDYLVDLIAFLRSTFAVFTHLPGKVAQTACMSACKHLATSLMQLLLEAEVRQLTLGALQQFNLDVRECEQFARSGPVPGFQEDTLQLAFIDLRQLLDLFIQWDWSTYLADYGQPNCKYLRVNPVTALTLLEKMKDTSRKNNMFAQFRKNERDKQKLIDTVAKQLRGLISSHHS

SEQ ID NO: 747172 - protein, 833 aa, Homo sapiens; identical to SEQ ID NO: 747170

SEQ ID NO: 747173 - protein, 833 aa, Homo sapiens; identical to SEQ ID NO: 747170

SEQ ID NO: 747174 - protein, 734 aa, Homo sapiens
RVARGWGGCGACGGSGIVGQGKGEPSRRRGRAAGRPQSMERGKMAEAESLETAAEHERILREIESTDTACIGPTLRSVYDGEEHGRFMEKLETRIRNHDREIEKMCNFHYQGFVDSITELLKVRGEAQKLKLVIAMEELKQCRLQQRNISATVDKLMLCLPVLEMYSKLRDQMKTKRHYPALKTLEHLEHTYLPQVSHYRFCKVMVDNIPKLREEIKDVSMSDLKDFLESIRKHSDKIGETAMKQAQQQRNLDNIVLQQPRIGSKRKSKKDAYIIFDTEIESTSPKSEQDSGILDVEDEEDDEEVPGAQDLVDFSPVYRCLHIYSVLGARETFENYYRKQRRKQARLVLQPPSNMHETLDGYRKYFNQIVGFFVVEDHILHTTQGLVNRAYIDELWEMALSKTIAALRTHSSYCSDPNLVLDLKNLIVLFADTLQVYGFPVNQLFDMLLEIRDQYSETLLKKWAGIFRNILDSDNYSPIPVTSEEMYKKVVGQFPFQDIELEKQPFPKKFPFSEFVPKVYNQIKEFIYACLKFSEDLHLSSTEVDDMIRKSTNLLLTRTLSNSLQNVIKRKNIGLTELVQIIINTTHLEKSCKYLEEFITNITNVLPETVHTTKLYGTTTFKDARHAAEEEIYTNLNQKIDQFLQLADYDWMTGDLGNKASDYLVDLIAFLRSTFAVFTHLPTSYSKTLKQDPEVLMKKECIKSELKFKMLNFMLHLFYHNNEGDFKKSKEKKT

SEQ ID NO: 747175 - protein, 710 aa, Homo sapiens
RVARGWGGCGACGGSGIVGQGKGEPSRRRGRAAGRPQSMERGKMAEAESLETAAEHERILREIESTDTACIGPTLRSVYDGEEHGRFMEKLETRIRNHDREIEKMCNFHYQGFVDSITELLKVRGEAQKLKNQVTDTNRKLQHEGKELVIAMEELKQCRLQQRNISATVDKLMLCLPVLEMYSKLRDQMKTKRHYPALKTLEHLEHTYLPQVSHYRFCKVMVDNIPKLREEIKDVSMSDLKDFLESIRKHSDKIGETAMKQAQQQRNLDNIVLQQPRIGSKRKSKKDAYIIFDTEIESTSPKSEQDSGILDVEDEEDDEEVPGAQDLVDFSPVYRCLHIYSVLGARETFENYYRKQRRKQARLVLQPPSNMHETLDGYRKYFNQIVGFFVVEDHILHTTQGLVNRAYIDELWEMALSKTIAALRTHSSYCSDPNLVLDLKNLIVLFADTLQVYGFPVNQLFDMLLEIRDQYSETLLKKWAGIFRNILDSDNYSPIPVTSEEMYKKVVGQFPFQDIELEKQPFPKKFPFSEFVPKVYNQIKEFIYACLKFSEDLHLSSTEVDDMIRKSTNLLLTRTLSNSLQNVIKRKNIGLTELVQIIINTTHLEKSCKYLEEFITNITNVLPETVHTTKLYGTTTFKDARHAAEEEIYTNLNQKIDQFLQLADYDWMTGDLGNKASDYLVDLIAFLRSTFAVFTHLPVSGSCSYFVLYI

SEQ ID NO: 747176 - protein, 282 aa, Homo sapiens
CDLIQGKKYHLLRKVIPGQTIGAYIELVQIIINTTHLEKSCKYLEEFITNITNVLPETVHTTKLYGTTTFKDARHAAEEEIYTNLNQKIDQFLQLADYDWMTGDLGNKASDYLVDLIAFLRSTFAVFTHLPGKVAQTACMSACKHLATSLMQLLLEAEVRQLTLGALQQFNLDVRECEQFARSGPVPGFQEDTLQLAFIDLRQLLDLFIQWDWSTYLADYGQPNCKYLRVNPVTALTLLEKMKDTSRKNNMFAQFRKNERDKQKLIDTVAKQLRGLISSHHS

SEQ ID NO: 747177 - protein, 770 aa, Homo sapiens
RVARGWGGCGACGGSGIVGQGKGEPSRRRGRAAGRPQSMERGKMAEAESLETAAEHERILREIESTDTACIGPTLRSVYDGEEHGRFMEKLETRIRNHDREIEKMCNFHYQGFVDSITELLKVRGEAQKLKLVIAMEELKQCRLQQRNISATVDKLMLCLPVLEMYSKLRDQMKTKRHYPALKTLEHLEHTYLPQVSHYRFCKVMVDNIPKLREEIKDVSMSDLKDFLESIRKHSDKIGETAMKQAQQQRNLDNIVLQQPRIGSKRKSKKDAYIIFDTEIESTSPKSEQDSGILDVEDEEDDEEVPGAQDLVDFSPVYRCLHIYSVLGARETFENYYRKQRRKQARLVLQPPSNMHETLDGYRKYFNQIVGFFVVEDHILHTTQGLVNRAYIDELWEMALSKTIAALRTHSSYCSDPNLVLDLKNLIVLFADTLQVYGFPVNQLFDMLLEIRDQYSETLLKKWAGIFRNILDSDNYSPIPVTSEEMYKKVVGQFPFQDIELEKQPFPKKFPFSEFVPKVYNQIKEFIYACLKFSEDLHLSSTEVDDMIRKSTNLLLTRTLSNSLQNVIKRKNIGLTELVQIIINTTHLEKSCKYLEEFITNITNVLPETVHTTKLYGTTTFKDARHAAEEEIYTNLNQKIDQFLQLADYDWMTGDLGNKASDYLVDLIAFLRSTFAVFTHLPGKVAQTACMSACKHLATSLMQLLLEAEVRQLTLGALQQFNLDVRECEQFARSGPVPGFQEDTLQLAFIDLRQVSLCVFVFCFSFKMCD

SEQ ID NO: 747178 - protein, 100 aa, Homo sapiens
CGAGRKLSWTGHRVARTIGRRGTGWGDLPEAVPPFPSRACAPDLVPLDMQSLGATCRNHVGCAPALGWVWTWSPWGYWKGLWEIFRAQPGHLYHALANIQ

SEQ ID NO: 747179 - protein, 455 aa, Homo sapiens
MVDFPGYNLSGAVASFLFILLTMKQSEDFRVIGPAHPILAGVGEDALLTCQLLPKRTTMHVEVRWYRSEPSTPVFVHRDGVEVTEMQMEEYRGWVEWIENGIAKGNVALKIHNIQPSDNGQYWCHFQDGNYCGETSLLLKVAGLGSAPSIHMEGPGESGVQLVCTARGWFPEPQVYWEDIRGEKLLAVSEHRIQDKDGLFYAEATLVVRNASAESVSCLVHNPVLTEEKGSVISLPEKLQTELASLKVNGPSQPILVRVGEDIQLTCYLSPKANAQSMEVRWDRSHRYPAVHVYMDGDHVAGEQMAEYRGRTVLVSDAIDEGRLTLQILSARPSDDGQYRCLFEKDDVYQEASLDLKVVSLGSSPLITVEGQEDGEMQPMCSSDGWFPQPHVPWRDMEGKTIPSSSQALTQGSHGLFHVQTLLRVTNISAVDVTCSISIPFLGEEKIATFSLSGW

SEQ ID NO: 747180 - protein, 208 aa, Homo sapiens
MAGTARHDREMAIQAKKKLTTATDPIERLRLQCLARGSAGIKGLGRVFRIMDDDNNRTLDFKEFMKGLNDYAVVMEKEEVEELFRRFDKDGNGTIDFNEFLLTLRPPMSRARKEVIMQAFRKLDKTGDGVITIEDLREVYNAKHHPKYQNGEWSEEQVFRKFLDNFDSPYDKDGLVTPEEFMNYYAGVSASIDTDVYFIIMMRTAWKL

SEQ ID NO: 747181 - protein, 208 aa, Homo sapiens; identical to SEQ ID NO: 747180

SEQ ID NO: 747182 - protein, 208 aa, Homo sapiens; identical to SEQ ID NO: 747180

SEQ ID NO: 747183 - protein, 180 aa, Homo sapiens
MAGTARHDREMAIQAKKKLTTATDPIERLRLQCLARGSAGIKGLGRVFRIMDDDNNRTLDFKEFMKGLNDYAVVMEKEEVEELFRRFDKDGNGTIDFNEFLLTLRPPMSRARKEVIMQAFRKLDKTGDGVITIEDLREVYNAKHHPKYQNGEWSEEQVFRKFLDNFDSPYDKDGLVSKRA

SEQ ID NO: 747184 - protein, 208 aa, Homo sapiens; identical to SEQ ID NO: 747180

SEQ ID NO: 747185 - protein, 78 aa, Homo sapiens
KQVQEIPCGCLLPGFPAMIPESHSSNMIAKDSLLIFPQHAQRCPVSVATRQSRIYSRTQSTHLLILPREECLKPIAGN

SEQ ID NO: 747186 - protein, 359 aa, Homo sapiens
MAPMGIRLSPLGVAVFCLLGLGVLYHLYSGFLAGRFSLFGLGGEPGGGAAGPAAAADGGTVDLREMLAVSVLAAVRGGDEVRRVRESNVLHEKSKGKTREGAEDKMTSGDVLSNRKMFYLLKTAFPSVQINTEEHVDAADQEVILWDHKIPEDILKEVTTPKEVPAESVTVWIDPLDATQEYTEDLRKYVTTMVCVAVNGKPMLGVIHKPFSEYTAWAMVDGGSNVKARSSYNEKTPRIVVSRSHSGMVKQVALQTFGNQTTIIPAGGAGYKVLALLDVPDKSQEKADLYIHVTYIKKWDICAGNAILKALGGHMTTLSGEEISYTGSDGIEGGLLASIRMNHQALVRKLPDLEKTGHK

SEQ ID NO: 747187 - protein, 359 aa, Homo sapiens; identical to SEQ ID NO: 747186

SEQ ID NO: 747188 - protein, 284 aa, Homo sapiens
MAPMGIRLSPLGVAVFCLLGLGVLYHLYSGFLAGRFSLFGLGGEPGGGAAGPAAAADGGTVDLREMLAVSVLAAVRGGDEVRRVRESNVLHEKSKGKTREGAEDKMTSGDVLSNRKMFYLLKTAFPSVQINTEEHVDAADQEVILWDHKIPEDILKEVTTPKEVPAESVTVWIDPLDATQEYTEDLRKYVTTMVCVAVNGKPMLGVIHKPFSEYTAWAMVDGGSNVKARSSYNEKTPRIVVSRSHSGMVKQVALQTFGNQTTIIPAGGAGYKVFALLTAIVRGS

SEQ ID NO: 747189 - protein, 110 aa, Homo sapiens
AAAADGGTVDLREMLAVSVLAAVRGGDEVRRVRESNVLHEKSKGKTREGAEDKMTSGDVLSNRKMFYLLKTAFPSVQVGAHGRSAHSSRVARLGPSTLNSMGCGASGSIL

SEQ ID NO: 747190 - protein, 124 aa, Homo sapiens [sequence omitted]

SEQ ID NO: 747191 - protein, 51 aa, Homo sapiens
MAEGSQSAPEAGNDMGNDDAIGGNVSKYIVLPTGYCGQPKKGHLIFDACFE

SEQ ID NO: 747192 - protein, 42 aa, Homo sapiens
MGIMRTQETRLLDYSQEEVRSKAYAVADTCNPSTLGGQGESI

SEQ ID NO: 747193 - protein, 737 aa, Homo sapiens
MCESYSRSLLRVSVAQICQALGWDSVQLSACHLLTDVLQRYLQQLGRGCHRYSELYGRTDPILDDVGEAFQLMGVSLHELEDYIHNIEPVTFPHQIPSFPVSKNNVLQFPQPGSKDAEERKEYIPDYLPPIVSSQEEEEEEQVPTDGGTSAEAMQVPLEEDDELEEEEIINDENFLGKRPLDSPEAEELPAMKRPRLLSTKGDTLDVVLLEAREPLSSINTQKIPPMLSPVHVQDSTDLAPPSPEPPMLAPVAKSQMPTAKPLETKSFTPKTKTKTSSPGQKTKSPKTAQSPAMVGSPIRSPKTVSKEKKSPGRSKSPKSPKSPKVTTHIPQTPVRPETPNRTPSATLSEKISKETIQVKQIQTPPDAGKLNSENQPKKAVVADKTIEASIDAVIARACAEREPDPFEFSSGSESEGDIFTSPKRISGPECTTPKASTSANNFTKSGSTPLPLSGGTSSSDNSWTMDASIDEVVRKAKLGTPSNMPPNFPYISSPSVSPPTPEPLHKVYEEKTKLPSSVEVKKKLKKELKTKMKKKEKQRDREREKDKNKDKSKEKDKVKEKEKDKETGRETKYPWKEFLKEEEADPYKFKIKEFEDVDPKVKLKDGLVRKEKEKHKDKKKDREKGKKDKDKREKEKVKDKGREDKMKAPAPPLVLPPKELALPLFSPATASRVPAMLPSLLPVLPEKLFEEKEKVKEKEKKKDKKEKKKKKEKEKEKKEKEREKEKREREKREKEK

SEQ ID NO: 747194 - protein, 551 aa, Homo sapiens
MCESYSRSLLRVSVAQICQALGWDSVQLSACHLLTDVLQRYLQQLGRGCHRYSELYGRTDPILDDVGEAFQLMGVSLHELEDYIHNIEPVTFPHQIPSFPVSKNNVLQFPQPGSKDAEERKEYIPDYLPPIVSSQEEEEEEQVPTDGGTSAEAMQVPLEEDDELEEEEIINDENFLGKRPLDSPEAEELPAMKRPRLLSTKGDTLDVVLLEAREPLSSINTQKIPPMLSPVHVQDSTDLAPPSPEPPMLAPVAKSQMPTAKPLETKSFTPKTKTKTSSPGQKTKSPKTAQSPAMVGSPIRSPKTVSKEKKSPGRSKSPKSPKSPKVTTHIPQTPVRPETPNRTPSATLSEKISKETIQVKQIQTPPDAGKLNSENQPKKAVVADKTIEASIDAVIARACAEREPDPFEFSSGSESEGDIFTSPKRISGPECTTPKASTSANNFTKSGSTPLPLSGGTSSSDNSWTMDASIDEVVRKAKLGTPSNMPPNFPYISSPSVSPPTPEPLQHRLYRIRPLSTHPSLILEEKTHRHDPSLSNTHSQTHTPRYLNHQK

SEQ ID NO: 747195 - protein, 103 aa, Homo sapiens
MHVSCPGDVVCRSHRTLKYSGVCSMCLAPRNPCIFLSGKLQGGLQLYKKEWCIKKAMQCWDYRPKALHLAQIFFNGGTIQPITASVCVCICAYVSENYGDACS

SEQ ID NO: 747196 - protein, 106 aa, Homo sapiens
MNQKLTKRQAEVHTGRKGTAHRKKVVHTTAEDKKFQFSLKKLGVNNIPGIEEVNMFTHQGTVIHFNNPEVQASLAANTFTMTGHAETKQLTEMLLSIDHKPVLQMV

SEQ ID NO: 747197 - protein, 476 aa, Homo sapiens
MANSAKAEEYEKMSLEQAKASVNSETESSFNINENTTASGTGLSEKTSVCRQVDIARKRKEFEDDLVKESSSCGKDTPSKKRKLDPEIVPEEKDCGDAEGNSKKRKRETEDVPKDKSSTGDGTQNKRKIALEDVPEKQKNLEEGHSSTVAAHYNELQEVGLEKRSQSRIFYLRNFNNWMKSVLIGEFLEKVRQKKKRDITVLDLGCGKGGDLLKWKKGRINKLVCTDIADVSVKQCQQRYEDMKNRRDSEYIFSAEFITADSSKELLIDKFRDPQMCFDICSCQFVCHYSFESYEQADMMLRNACERLSPGGYFIGTTPNSFELIRRLEASETESFGNEIYTVKFQKKGDYPLFGCKYDFNLEGVVDVPEFLVYFPLLNEMAKKYNMKLVYKKTFLEFYEEKIKNNENKMLLKRMQALEPYPANESSKLVSEKVDDYEHAAKYMKNSQVRLPLGTLSKSEWEATSIYLVFAFEKQQ

SEQ ID NO: 747198 - protein, 504 aa, Homo sapiens
MANSAKAEEYEKMSLEQAKASVNSETESSFNINENTTASGTGLSEKTSVCRQVDIARKRKEFEDDLVKESSSCGKDTPSKKRKLDPEIVPEEKDCGDAEGNSKKRKRETEDVPKDKSSTGDGTQNKRKIALEDVPEKQKNLEEGHSSTVAAHYNELQEVGLEKRSQSRIFYLRNFNNWMKSVLIGEFLEKVRQKKKRDITVLDLGCGKGGDLLKWKKGRINKLVCTDIADVSVKQCQQRYEDMKNRRDSEYIFSAEFITADSSKELLIDKFRDPQMCFDICSCQFVCHYSFESYEQADMMLRNACERLSPGGYFIGTTPNSFELIRRLEASETESFGNEIYTVKFQKKGDYPLFGCKYDFNLEGVVDVPEFLVYFPLLNEMAKKYNMKLVYKKTFLEFYEEKIKNNENKMLLKRMQALEPYPANESSKLVSEKVDDYEHAAKYMKNSQVRLPLGTLSKSEWEATRLTVTIMREAWLSTVGPGRAPVAASSVKWGTPRPAMQFIL

SEQ ID NO: 747199 - protein, 476 aa, Homo sapiens; identical to SEQ ID NO: 747197

SEQ ID NO: 747200 - protein, 476 aa, Homo sapiens; identical to SEQ ID NO: 747197

SEQ ID NO: 747201 - protein, 356 aa, Homo sapiens
RHAWRGPPFPQTESRLAVLNLEEGHSSTVAAHYNELQEVGLEKRSQSRIFYLRNFNNWMKSVLIGEFLEKVRQKKKRDITVLDLGCGKGGDLLKWKKGRINKLVCTDIADVSVKQCQQRYEDMKNRRDSEYIFSAEFITADSSKELLIDKFRDPQMCFDICSCQFVCHYSFESYEQADMMLRNACERLSPGGYFIGTTPNSFELIRRLEASETESFGNEIYTVKFQKKGDYPLFGCKYDFNLEGVVDVPEFLVYFPLLNEMAKKYNMKLVYKKTFLEFYEEKIKNNENKMLLKRMQALEPYPANESSKLVSEKVDDYEHAAKYMKNSQVRLPLGTLSKSEWEATSIYLVFAFEKQQ

SEQ ID NO: 747202 - protein, 476 aa, Homo sapiens; identical to SEQ ID NO: 747197

SEQ ID NO: 747203 - protein, 476 aa, Homo sapiens; identical to SEQ ID NO: 747197

SEQ ID NO: 747204 - protein, 504 aa, Homo sapiens; identical to SEQ ID NO: 747198

SEQ ID NO: 747205 - protein, 476 aa, Homo sapiens; identical to SEQ ID NO: 747197

SEQ ID NO: 747206 - protein, 476 aa, Homo sapiens; identical to SEQ ID NO: 747197

SEQ ID NO: 747207 - protein, 111 aa, Homo sapiens
NRARYLWRLQCKGYYTCVMIFSRCIQDWIPGHCQFFPPSRAAQFVLCSHVGLKSPHSLVPAPHHDIEEAQDIQGYSPVWLWRLEQALKSPAPWTSPGLCFFGGNIPWTKLS

SEQ ID NO: 747208 - protein, 476 aa, Homo sapiens; identical to SEQ ID NO: 747197

SEQ ID NO: 747209 - protein, 174 aa, Homo sapiens
LGVNEESISSLFDFTPECRTTDQDQKIKKANECASRLMYGMELDDMDEVEFLRIKYWDRRRRAAPHSYSAQRGRIRYGPWYFEPKLGKKLRSDEPLIDPKPVLEKPDEPDILDGLYGPIAFKDFILSKGYRMPGVIEKLFAKKGWTYDSVKTPIQRAVQVYKYKEDVTDASKED

SEQ ID NO: 747210 - protein, 75 aa, Homo sapiens
FSLLKTQHQTEMPSAHPRPQTLRLDPNSEPGVERGRWGQCSGPSPVGTDSFQCPRSISTSSPGTSGPSLGVIPTQ

SEQ ID NO: 747211 - protein, 481 aa, Homo sapiens
MARLTESEARRQQQQLLQPRPSPVGSSGPEPPGGQPDGMKDLDAIKLFVGQIPRHLDEKDLKPLFEQFGRIYELTVLKDPYTGMHKGCAFLTYCARDSAIKAQTALHEQKTLPGMARPIQVKPADSESRGGRDRKLFVGMLNKQQSEEDVLRLFQPFGVIDECTVLRGPDGSSKGCAFVKFSSHTEAQAAIHALHGSQTMPGASSSLVVKFADTDKERTLRRMQQMVGQLGILTPSLTLPFSPYSAYAQALMQQQTTVLSTSGSYLSPGVAFSPCHIQQIGAVSLNGLPATPIAPASGLHSPPLLGTTAVPGLVAPITNGFAGVVPFPGGHPALETVYANGLVPYPAQSPTVAETLHPAFSGVQQYTAMYPTAAITPIAHSVPQPPPLLQQQQREGPEGCNLFIYHLPQEFGDTELTQMFLPFGNIISSKVFMDRATNQSKCFGFVSFDNPASAQAAIQAMNGFQIGMKRLKVQLKRPKDP

SEQ ID NO: 747212 - protein, 387 aa, Homo sapiens
GGGTWMPAWRASPGRWMARPIQVKPADSESRGGRDRKLFVGMLNKQQSEEDVLRLFQPFGVIDECTVLRGPDGSSKGCAFVKFSSHTEAQAAIHALHGSQTMPGASSSLVVKFADTDKERTLRRMQQMVGQLGILTPSLTLPFSPYSAYAQALMQQQTTVLSTSGSYLSPGVAFSPCHIQQIGAVSLNGLPATPIAPASGLHSPPLLGTTAVPGLVAPITNGFAGVVPFPGGHPALETVYANGLVPYPAQSPTVAETLHPAFSGVQQYTAMYPTAAITPIAHSVPQPPPLLQQQQREGPEGCNLFIYHLPQEFGDTELTQMFLPFGNIISSKVFMDRATNQSKCFGFVSFDNPASAQAAIQAMNGFQIGMKRLKVQLKRPKDPGHPY

SEQ ID NO: 747213 - protein, 171 aa, Homo sapiens
PGPTEGLAQRRSWAGCLLLSLRLLRIGGGWKTSAAPAPLSPSVCPQLRARLWPRHCILPSPESSSTQPCTPPRPSRPSRTASPSRRPSCSSSSEKEFGDTELTQMFLPFGNIISSKVFMDRATNQSKCFGFVSFDNPASAQAAIQAMNGFQIGMKRLKVQLKRPKDPGHPY

SEQ ID NO: 747214 - protein, 85 aa, Homo sapiens
GLNCKDGYQLLGPPHTEGYPLHVPSHCQELFCCSITFFSAFLTLWCPRTSLFLVTGQKPRTRQTVGTKNGCNTHLAGSWSCGQWA

SEQ ID NO: 747215 - protein, 319 aa, Homo sapiens
MERGNQTEVGNFLLLGFAEDSDMQLLLHGLFLSMYLVTIIGNLLIILTISSDSHLHTPMYFFLSNLSFADICFTSTTVPKMLVNIQTQSKMITFAGCLTQIFFFIAFGCLDNLLLTMTAYDRFVAICYPLHYTVIMNPRLCGLLVLGSWCISVMGSLLETLTILRLSFCTNMEIPHFFCDPSEVLKLACSDTFINNIVMYFVTIVLGVFPLCGILFSYSQIFSSVLRVSARGQHKAFSTCGSHLSVVSLFYGTGLGVYLSSAVTPPSRTSLAASVMYTMVTPMLNPFIYSLRNKDMKGSLGRLLLRATSLKEGTIAKLS

SEQ ID NO: 747216 - protein, 258 aa, Homo sapiens
MDGIIEQKSMLVHSKISDAGKRNGLINTRNLMAESRDGLVSVYPAPQYQSHRVGASTVPASLDSSRSEPMQQLLDPNTLQQSVESRYRPNIILYSEGVLRSWGDGVAADCCETTFIEDRSPTKDSLEYPDGKFIDLSADDIKIHTLSYDVEEEEEFQELESDYSSDTESEDNFLMMPPRDHLGLSVFSMLCCFWPLGIAAFYLSHETNKAVAKGDLHQASTSSRRALFLAVLSITIGTGVYVGVAVALIAYLSKNNHL

SEQ ID NO: 747217 - protein, 91 aa, Homo sapiens
AFSASTMPFSESGAVDEPSTHCLFRLAYNDFLFSSPTLQTNKAVAKGDLHQASTSSRRALFLAVLSITIGTGVYVGVAVALIAYLSKNNHL

SEQ ID NO: 747218 - protein, 160 aa, Homo sapiens
MLPEMKRESRMAEESPAQETPRLGQSSSRRGQGLSVYYSKQASPRDVVWEGPKPTRQAHPVGKRLPIPVWPASLTSASQSSADLRGAGWPLLIWVREMPETHPGLNHRLVVQSHSPCAFRKPRGPKYEWEESWEKLNQTLPMAIKEKIQQRLPLSLTLRS

SEQ ID NO: 747219 - protein, 160 aa, Homo sapiens; identical to SEQ ID NO: 747218

SEQ ID NO: 747220 - protein, 623 aa, Homo sapiens
MERPEEGKQSPPPQPWGRLLRLGAEEGEPHVLLRKREWTIGRRRGCDLSFPSNKLVSGDHCRIVVDEKSGQVTLEDTSTSGTVINKLKVVKKQTCPLQTGDVIYLVYRKNEPEHNVAYLYESLSEKQGMTQESFEMVPCCVAQAGLKLLGSSDPPTLASQSIVITGSGGGGISPKGSGPSVASDEVSSFASALPDRKTASFSSLEPQDQEDLEPVKKKMRGDGDLDLNGQLLVAQPRRNAQTVHEDVRAAAGKPDKMEETLTCIICQDLLHDCVSLQPCMHTFCAACYSGWMERSSLCPTCRCPVERICKNHILNNLVEAYLIQHPDKSRSEEDVQSMDARNKITQDMLQPKVRRSFSDEEGSSEDLLELSDVDSESSDISQPYVVCRQCPEYRRQAAQPPHCPAPEGEPGAPQALGDAPSTSVSLTTAVQDYVCPLQGSHALCTCCFQPMPDRRAEREQDPRVAPQQCAVCLQPFCHLYWGCTRTGCYGCLAPFCELNLGDKCLDGVLNNNSYESDILKNYLATRGLTWKNMLTESLVALQRGVFLLSDYRVTGDTVLCYCCGLRSFRELTYQYRQNIPASELPVAVTSRPDCYWGRNCRTQVKAHHAMKFNHICEQTRFKN

SEQ ID NO: 747221 - protein, 652 aa, Homo sapiens
MERPEEGKQSPPPQPWGRLLRLGAEEGEPHVLLRKREWTIGRRRGCDLSFPSNKLVSGDHCRIVVDEKSGQVTLEDTSTSGTVINKLKVVKKQTCPLQTGDVIYLVYRKNEPEHNVAYLYESLSEKQGMTQESFDTSGAGAGRGADPRVPPSSPATQVCFEEPQPSTSTSDLFPTASASSTEPSPAGRERSSSCGSGGGGISPKGSGPSVASDEVSSFASALPDRKTASFSSLEPQDQEDLEPVKKKMRGDGDLDLNGQLLVAQPRRNAQTVHEDVRAAAGKPDKMEETLTCIICQDLLHDCVSLQPCMHTFCAACYSGWMERSSLCPTCRCPVERICKNHILNNLVEAYLIQHPDKSRSEEDVQSMDARNKITQDMLQPKVRRSFSDEEGSSEDLLELSDVDSESSDISQPYVVCRQCPEYRRQAAQPPHCPAPEGEPGAPQALGDAPSTSVSLTTAVQDYVCPLQGSHALCTCCFQPMPDRRAEREQDPRVAPQQCAVCLQPFCHLYWGCTRTGCYGCLAPFCELNLGDKCLDGVLNNNSYESDILKNYLATRGLTWKNMLTESLVALQRGVFLLSDYRVTGDTVLCYCCGLRSFRELTYQYRQNIPASELPVAVTSRPDCYWGRNCRTQVKAHHAMKFNHICEQTRFKN

SEQ ID NO: 747222 - protein, 652 aa, Homo sapiens; identical to SEQ ID NO: 747221

SEQ ID NO: 747223 - protein, 664 aa, Homo sapiens
MERPEEGKQSPPPQPWGRLLRLGAEEGEPHVLLRKREWTIGRRRGCDLSFPSNKLVSGDHCRIVVDEKSGQVTLEDTSTSGTVINKLKVVKKQTCPLQTGDVIYLVYRKNEPEHNVAYLYESLSEKQGMTQESFEANKENVFHGTKDTSGAGAGRGADPRVPPSSPATQVCFEEPQPSTSTSDLFPTASASSTEPSPAGRERSSSCGSGGGGISPKGSGPSVASDEVSSFASALPDRKTASFSSLEPQDQEDLEPVKKKMRGDGDLDLNGQLLVAQPRRNAQTVHEDVRAAAGKPDKMEETLTCIICQDLLHDCVSLQPCMHTFCAACYSGWMERSSLCPTCRCPVERICKNHILNNLVEAYLIQHPDKSRSEEDVQSMDARNKITQDMLQPKVRRSFSDEEGSSEDLLELSDVDSESSDISQPYVVCRQCPEYRRQAAQPPHCPAPEGEPGAPQALGDAPSTSVSLTTAVQDYVCPLQGSHALCTCCFQPMPDRRAEREQDPRVAPQQCAVCLQPFCHLYWGCTRTGCYGCLAPFCELNLGDKCLDGVLNNNSYESDILKNYLATRGLTWKNMLTESLVALQRGVFLLSDYRVTGDTVLCYCCGLRSFRELTYQYRQNIPASELPVAVTSRPDCYWGRNCRTQVKAHHAMKFNHICEQTRFKN

SEQ ID NO: 747224 - protein, 652 aa, Homo sapiens; identical to SEQ ID NO: 747221

SEQ ID NO: 747225 - protein, 592 aa, Homo sapiens
MERPEEGKQSPPPQPWGRLLRLGAEEGEPHVLLRKREWTIGRRRGCDLSFPSNKLVSGDHCRIVVDEKSGQVTLEDTSTSGTVINKLKVVKKQTCPLQTGDVIYLVYRKNEPEHNVAYLYESLSEKQGMTQESFGSGGGGISPKGSGPSVASDEVSSFASALPDRKTASFSSLEPQDQEDLEPVKKKMRGDGDLDLNGQLLVAQPRRNAQTVHEDVRAAAGKPDKMEETLTCIICQDLLHDCVSLQPCMHTFCAACYSGWMERSSLCPTCRCPVERICKNHILNNLVEAYLIQHPDKSRSEEDVQSMDARNKITQDMLQPKVRRSFSDEEGSSEDLLELSDVDSESSDISQPYVVCRQCPEYRRQAAQPPHCPAPEGEPGAPQALGDAPSTSVSLTTAVQDYVCPLQGSHALCTCCFQPMPDRRAEREQDPRVAPQQCAVCLQPFCHLYWGCTRTGCYGCLAPFCELNLGDKCLDGVLNNNSYESDILKNYLATRGLTWKNMLTESLVALQRGVFLLSDYRVTGDTVLCYCCGLRSFRELTYQYRQNIPASELPVAVTSRPDCYWGRNCRTQVKAHHAMKFNHICEQTRFKN

SEQ ID NO: 747226 - protein, 572 aa, Homo sapiens
MERPEEGKQSPPPQPWGRLLRLGAEEGEPHVLLRKREWTIGRRRGCDLSFPSNKLVSGDHCRIVVDEKSGQVTLEDTSTSGTVINKLKVVKKQTCPLQTGDVIYLVYRKNEPEHRSGGGGISPKGSGPSVASDEVSSFASALPDRKTASFSSLEPQDQEDLEPVKKKMRGDGDLDLNGQLLVAQPRRNAQTVHEDVRAAAGKPDKMEETLTCIICQDLLHDCVSLQPCMHTFCAACYSGWMERSSLCPTCRCPVERICKNHILNNLVEAYLIQHPDKSRSEEDVQSMDARNKITQDMLQPKVRRSFSDEEGSSEDLLELSDVDSESSDISQPYVVCRQCPEYRRQAAQPPHCPAPEGEPGAPQALGDAPSTSVSLTTAVQDYVCPLQGSHALCTCCFQPMPDRRAEREQDPRVAPQQCAVCLQPFCHLYWGCTRTGCYGCLAPFCELNLGDKCLDGVLNNNSYESDILKNYLATRGLTWKNMLTESLVALQRGVFLLSDYRVTGDTVLCYCCGLRSFRELTYQYRQNIPASELPVAVTSRPDCYWGRNCRTQVKAHHAMKFNHICEQTRFKN

SEQ ID NO: 747227 - protein, 464 aa, Homo sapiens
MTQESFGSGGGGISPKGSGPSVASDEVSSFASALPDRKTASFSSLEPQDQEDLEPVKKKMRGDGDLDLNGQLLVAQPRRNAQTVHEDVRAAAGKPDKMEETLTCIICQDLLHDCVSLQPCMHTFCAACYSGWMERSSLCPTCRCPVERICKNHILNNLVEAYLIQHPDKSRSEEDVQSMDARNKITQDMLQPKVRRSFSDEEGSSEDLLELSDVDSESSDISQPYVVCRQCPEYRRQAAQPPHCPAPEGEPGAPQALGDAPSTSVSLTTAVQDYVCPLQGSHALCTCCFQPMPDRRAEREQDPRVAPQQCAVCLQPFCHLYWGCTRTGCYGCLAPFCELNLGDKCLDGVLNNNSYESDILKNYLATRGLTWKNMLTESLVALQRGVFLLSDYRVTGDTVLCYCCGLRSFRELTYQYRQNIPASELPVAVTSRPDCYWGRNCRTQVKAHHAMKFNHICEQTRFKN

SEQ ID NO: 747228 - protein, 341 aa, Homo sapiens
MERPEEGKQSPPPQPWGRLLRLGAEEGEPHVLLRKREWTIGRRRGCDLSFPSNKLVSGDHCRIVVDEKSGQVTLEDTSTSGTVINKLKVVKKQTCPLQTGDVIYLVYRKNEPEHNVAYLYESLSEKQGMTQESFDTSGAGAGRGADPRVPPSSPATQVCFEEPQPSTSTSDLFPTASASSTEPSPAGRERSSSCGSGGGGISPKGSGPSVASDEVSSFASALPDRKTASFSSLEPQDQEDLEPVKKKMRGDGDLDLNGQLLVAQPRRNAQTVHEDVRAAAGKPDKMEETLTCIICQDPTGPGGCTLHVRQPDDRCGLPAAFLPPVLGLHPDRLLRLPGPVL

SEQ ID NO: 747229 - protein, 246 aa, Homo sapiens
MIPIPGWTAEVCQIRVSSKSSLNRIIRGDTPRTESLQRGSAVTIPRPGAGETRRADLFKEGVEWKSFLLVLCLKLSFIIELLILSRICNEKKYVYPQCRADSAFLRHHYKQVTLPLHLAELNLGDKCLDGVLNNNSYESDILKNYLATRGLTWKNMLTESLVALQRGVFLLSDYRVTGDTVLCYCCGLRSFRELTYQYRQNIPASELPVAVTSRPDCYWGRNCRTQVKAHHAMKFNHICEQTRFKN

SEQ ID NO: 747230 - protein, 246 aa, Homo sapiens; identical to SEQ ID NO: 747229

SEQ ID NO: 747231 - protein, 669 aa, Homo sapiens
MERPEEGKQSPPPQPWGRLLRLGAEEGEPHVLLRKREWTIGRRRGCDLSFPSNKLVSGDHCRIVVDEKSGQVTLEDTSTSGTVINKLKVVKKQTCPLQTGDVIYLVYRKNEPEHNVAYLYESLSEKQGMTQESFDTSGAGAGRGADPRVPPSSPATQVCFEEPQPSTSTSDLFPTASASSTEPSPAGRERSSSCGSGGGGISPKGSGPSVASDEVSSFASALPDRKTASFSSLEPQDQEDLEPVKKKMRGDGDLDLNGQLLVAQPRRNAQTVHEDVRAAAGKPDKMEETLTCIICQDLLHDCVSLQPCMHTFCAACYSGWMERSSLCPTCRCPVERICKNHILNNLVEAYLIQHPDKSRSEEDVQSMDARNKITQDMLQPKVRRSFSDEEGSSEDLLELSDVDSESSDISQPYVVCRQCPEYRRQAAQPPHCPAPEGEPGAPQALGDAPSTSVSLTTAVQDYVCPLQGSHALCTCCFQPMPDRRAEREQDPRVAPQQCAVCLQPFCHLYWGCTRTGCYGCLAPFCELNLGDKCLDGVLNNNSYESDILKNYLATRGLTWKNMLTESLVALQRGVFLLSDYRVTGDTVLCYCCGLRSFRELTYQYRQNIPASELPVAVTSRPDCYWGRNCRTQVKAHHAMKFNHICEQTRSQDAPLPHAARALPPRPYRA

SEQ ID NO: 747232 - protein, 448 aa, Homo sapiens
MERPEEGKQSPPPQPWGRLLRLGAEEGEPHVLLRKREWTIGRRRGCDLSFPSNKLVSGDHCRIVVDEKSGQVTLEDTSTSGTVINKLKVVKKQTCPLQTGDVIYLVYRKNEPEHNVAYLYESLSEKQGMTQESFDTSGAGAGRGADPRVPPSSPATQVCFEEPQPSTSTSDLFPTASASSTEPSPAGRERSSSCGSGGGGISPKGSGPSVASDEVSSFASALPDRKTASFSSLEPQDQEDLEPVKKKMRGDGDLDLNGQLLVAQPRRNAQTVHEDVRAAAGKPDKMEETLTCIICQDLLHDCVSLQPCMHTFCAACYSGWMERSSLCPTCRCPVERICKNHILNNLVEAYLIQHPDKSRSEEDVQSMDARNKITQDMLQPKVRRSFSDEEGSSEDLLELSDVDSESSDISQPYVVCRQCPEYRRQAAQPPHCPAPWLPPVLALPCHLE

SEQ ID NO: 747233 - protein, 410 aa, Homo sapiens
MERPEEGKQSPPPQPWGRLLRLGAEEGEPHVLLRKREWTIGRRRGCDLSFPSNKLVSGDHCRIVVDEKSGQVTLEDTSTSGTVINKLKVVKKQTCPLQTGDVIYLVYRKNEPEHNVAYLYESLSEKQGMTQESFDTSGAGAGRGADPRVPPSSPATQVCFEEPQPSTSTSDLFPTASASSTEPSPAGRERSSSCGSGGGGISPKGSGPSVASDEVSSFASALPDRKTASFSSLEPQDQEDLEPVKKKMRGDGDLDLNGQLLVAQPRRNAQTVHEDVRAAAGKPDKMEETLTCIICQDLLHDCVSLQPCMHTFCAACYSGWMERSSLCPTCRCPVERICKNHILNNLVEAYLIQHPDKSRSEEDVQSMDARNKITQDMLQPKVRRSFSDEEGSSEDLLELSDVDSESSDIR

SEQ ID NO: 747234 - protein, 112 aa, Homo sapiens
RPEEGKQSPPPQPWGRLLRLGAEEGEPHVLLRKREWTIGRRRGAGLRPGPGAGAGQSHRVAGRPHGRRCSVRSRFFRGVKCHVRTGIYSVFCPPILAHDSRTSFSLRYNCIS

SEQ ID NO: 747235 - protein, 321 aa, Homo sapiens
MERPEEGKQSPPPQPWGRLLRLGAEEGEPHVLLRKREWTIGRRRGCDLSFPSNKLVSGDHCRIVVDEKSGQVTLEDTSTSGTVINKLKVVKKQTCPLQTGDVIYLVYRKNEPEHNVAYLYESLSEKQGMTQESFGSGGGGISPKGSGPSVASDEVSSFASALPDRKTASFSSLEPQDQEDLEPVKKKMRGDGDLDLNGQLLVAQPRRNAQTVHEDVRAAAGKPDKMEETLTCIICQDPTGPGGCTLHVRQPDDSSPGLRVPSARKPRPVHLLLPAHARPESGARAGPACRPSAVCGLPAAFLPPVLGLHPDRLLRLPGPVL

SEQ ID NO: 747236 - protein, 652 aa, Homo sapiens; identical to SEQ ID NO: 747221

SEQ ID NO: 747237 - protein, 664 aa, Homo sapiens; identical to SEQ ID NO: 747223

SEQ ID NO: 747238 - protein, 161 aa, Homo sapiens
MERPEEGKQSPPPQPWGRLLRLGAEEGEPHVLLRKREWTIGRRRGCDLSFPSNKLVSGDHCRIVVDEKSGQVTLEDTRRSLALWLRLKCCCSEPIPRHCTPAWATDQVSKKKRKENMPDLNSHLNAEVLPALLGCVPFIVSSRFLKTYPWAQLGCALALHS

SEQ ID NO: 747239 - protein, 222 aa, Homo sapiens
MERPEEGKQSPPPQPWGRLLRLGAEEGEPHVLLRKREWTIGRRRGCDLSFPSNKLVSGDHCRIVVDEKSGQVTLEDTSTSGTVINKLKVVKKQTCPLQTGDVIYLVYRKNEPEHNVAYLYESLSEKQGMTQESFDTSGAGAGRGADPRVPPSSPATQVCFEEPQPSTSTSDLFPTASASSTEPSPAGRERSSSCGEVTSHEVLVLVAWFLFTTLYLCCYRGR

SEQ ID NO: 747240 - protein, 74 aa, Homo sapiens
MKTEAVVPVAARWWGWSLAASCSPLDSRLSSAAFYLLCSKWTCHPHSCVNKAAIYRAGAGSRDRLKTYTGLHGL

SEQ ID NO: 747241 - protein, 113 aa, Homo sapiens
VLIDVSPPEAEKRGSYGSTAHASEPGGQQAAACRAGSPAKPRIDFVLVWEEDLKLDRQQDSAARDRTDMHRTWRETFLDNLRAAGLCVDQVRGGCHGQGPRPCIHSVTHDLAA

SEQ ID NO: 747242 - protein, 173 aa, Homo sapiens
VSLQARCTLDSQGGCELMETVNEPETGEVSKDAVIVKQEKNNEYCLQDIDDKLSESAEDDGEDDTNDEDDDEDSNPKKNTQAPLELMAEFLRAEMAREYQLAKKLCQMILIYEPENPEAKEFFTLIEEMLLMEKTQNHEQDGENSDEDSSGESKGESDEELSDESSDEGEDGS

SEQ ID NO: 747243 - protein, 97 aa, Homo sapiens
VSLQARCTLDSQGGCELMETVNEPETGEVSKDAVIVKQEKNNEYCLQDIDDKLSESAEDDGEDDTNDEDDDEDSNPKKNTQAPLELMAEVSFTCAYN

SEQ ID NO: 747244 - protein, 520 aa, Homo sapiens [sequence omitted]

SEQ ID NO: 747245 - protein, 77 aa, Homo sapiens
PAGGGADAGGGVSGEGPGRSQKVASFAARGLQVQVERPGWPGFGLRRREMAAGGRMEDLRKWKINCKTWFLGYHPEY

SEQ ID NO: 747246 - protein, 320 aa, Homo sapiens
PAGGGADAGGGVSGEGPGRSQKVASFAARGLQVQVERPGWPGFGLRRREMAAGGRMEDGSLDITQSIEDDPLLDAQLLPHHSLQAHFRPRFHPLPTVIIVNLLWFIHLVFVVLAFLTGVLCSYPNPNEDKCPGNYTNPLKVQTVIILGKVILWILHLLLECYIQYHHSKIRNRGYNLIYRSTRHLKRLALMIQSSGNTVLLLILCMQHSFPEPGRLYLDLILAILALELICSLICLLIYTVKIRRFNKAKPEPDILEEEKIYAYPSNITSETGFRTISSLEEIVEKQGDTIEYLKRHNALLSKRLLALTSSDLGCQPSRT

SEQ ID NO: 747247 - protein, 116 aa, Homo sapiens
MRIEPIPENPKFSVPPITPHPEKKKKKKKKKNLVGRVKIRRFNKAKPEPDILEEEKIYAYPSNITSETGFRTISSLEEIVEKQGDTIEYLKRHNALLSKRLLALTSSDLGCQPSRT

SEQ ID NO: 747248 - protein, 320 aa, Homo sapiens; identical to SEQ ID NO: 747246

SEQ ID NO: 747249 - protein, 320 aa, Homo sapiens; identical to SEQ ID NO: 747246

SEQ ID NO: 747250 - protein, 167 aa, Homo sapiens
TPSGRWSEVGEELKRPGADRRVKAMPPPGKVPRKENLWLQCEWGSCSFVCSTMEKFFEHVTQHLQQHLHGSGEEEEEEEEDDPLEEEFSCLWQECGFCSLDSSADLIRHVYFHCYHTKLKQWGLQALQSQADLGPCILDFQSRNVIPDIPDHFLCLWEHCEVSRQCQ

SEQ ID NO: 747251 - protein, 517 aa, Homo sapiens
MPPPGKVPRKENLWLQCEWGSCSFVCSTMEKFFEHVTQHLQQHLHGSGEEEEEEEEDDPLEEEFSCLWQECGFCSLDSSADLIRHVYFHCYHTKLKQWGLQALQSQADLGPCILDFQSRNVIPDIPDHFLCLWEHCENSFDNPEWFYRHVEAHSLCCEYEAVGKDNPVVLCGWKGCTCTFKDRSKLREHLRSHTQEKVVACPTCGGMFANNTKFLDHIRRQTSLDQQHFQCSHCSKRFATERLLRDHMRNHVNHYKCPLCDMTCPLPSSLRNHMRFRHSEDRPFKCDCCDYSCKNLIDLQKHLDTHSEEPAYRCDFENCTFSARSLCSIKSHYRKVHEGDSEPRYKCHVCDKCFTRGNNLTVHLRKKHQFKWPSGHPRFRYKEHEDGYMRLQLVRYESVELTQQLLRQPQEGSGLGTSLNESSLQGIILETVPGEPGRKEEEEEGKGSEGTALSASQDNPSSVIHVVNQTNAQGQQEIVYYVLSEAPGEPPPVPEPPSGGIMEKLQGIAEEPEIQMV

SEQ ID NO: 747252 - protein, 540 aa, Homo sapiens
MPPPGKVPRKENLWLQCEWGSCSFVCSTMEKFFEHVTQHLQQHLHGSGEEEEEEEEDDPLVLQVEGDLSLGKCQTLPFKPLSTEEEFSCLWQECGFCSLDSSADLIRHVYFHCYHTKLKQWGLQALQSQADLGPCILDFQSRNVIPDIPDHFLCLWEHCENSFDNPEWFYRHVEAHSLCCEYEAVGKDNPVVLCGWKGCTCTFKDRSKLREHLRSHTQEKVVACPTCGGMFANNTKFLDHIRRQTSLDQQHFQCSHCSKRFATERLLRDHMRNHVNHYKCPLCDMTCPLPSSLRNHMRFRHSEDRPFKCDCCDYSCKNLIDLQKHLDTHSEEPAYRCDFENCTFSARSLCSIKSHYRKVHEGDSEPRYKCHVCDKCFTRGNNLTVHLRKKHQFKWPSGHPRFRYKEHEDGYMRLQLVRYESVELTQQLLRQPQEGSGLGTSLNESSLQGIILETVPGEPGRKEEEEEGKGSEGTALSASQDNPSSVIHVVNQTNAQGQQEIVYYVLSEAPGEPPPVPEPPSGGIMEKLQGIAEEPEIQMV

SEQ ID NO: 747253 - protein, 202 aa, Homo sapiens
DESTGTIRYDPTAIQPHGDPTDYKTCSAADELSRDSHINDRGNNLTVHLRKKHQFKWPSGHPRFRYKEHEDGYMRLQLVRYESVELTQQLLRQPQEGSGLGTSLNESSLQGIILETVPGEPGRKEEEEEGKGSEGTALSASQDNPSSVIHVVNQTNAQGQQEIVYYVLSEAPGEPPPVPEPPSGGIMEKLQGIAEEPEIQMV

SEQ ID NO: 747254 - protein, 541 aa, Homo sapiens
TPSGRWSEVGEELKRPGADRRVKAMPPPGKVPRKENLWLQCEWGSCSFVCSTMEKFFEHVTQHLQQHLHGSGEEEEEEEEDDPLEEEFSCLWQECGFCSLDSSADLIRHVYFHCYHTKLKQWGLQALQSQADLGPCILDFQSRNVIPDIPDHFLCLWEHCENSFDNPEWFYRHVEAHSLCCEYEAVGKDNPVVLCGWKGCTCTFKDRSKLREHLRSHTQEKVVACPTCGGMFANNTKFLDHIRRQTSLDQQHFQCSHCSKRFATERLLRDHMRNHVNHYKCPLCDMTCPLPSSLRNHMRFRHSEDRPFKCDCCDYSCKNLIDLQKHLDTHSEEPAYRCDFENCTFSARSLCSIKSHYRKVHEGDSEPRYKCHVCDKCFTRGNNLTVHLRKKHQFKWPSGHPRFRYKEHEDGYMRLQLVRYESVELTQQLLRQPQEGSGLGTSLNESSLQGIILETVPGEPGRKEEEEEGKGSEGTALSASQDNPSSVIHVVNQTNAQGQQEIVYYVLSEAPGEPPPVPEPPSGGIMEKLQGIAEEPEIQMV

SEQ ID NO: 747255 - protein, 413 aa, Homo sapiens
TPSGRWSEVGEELKRPGADRRVKAMPPPGKVPRKENLWLQCEWGSCSFVCSTMEKFFEHVTQHLQQHLHGSGEEEEEEEEDDPLEEEFSCLWQECGFCSLDSSADLIRHVYFHCYHTKLKQWGLQALQSQADLGPCILDFQSRNVIPDIPDHFLCLWEHCENSFDNPEWFYRHVEAHSLCCEYEAVGKDNPVVLCGWKGCTCTFKDRSKLREHLRSHTQEKVVACPTCGGMFANNTKFLDHIRRQTSLDQQHFQCSHCSKRFATERLLRDHMRNHVNHYKCPLCDMTCPLPSSLRNHMRFRHSEDRPFKCDCCDYSCKNLIDLQKHLDTHSEEPAYRCDFENCTFSARSLCSIKSHYRKVHEGDSEPRYKCHVCDKCFTRGNNLTVHLRKKHQFKWPSGHPRFRYVSQPSFPD

SEQ ID NO: 747256 - protein, 560 aa, Homo sapiens
TPSGRWSEVGEELKRPGADRRVKAMPPPGKVPRKENLWLQCEWGSCSFVCSTMEKFFEHVTQHLQQHLHGSGEEEEEEEEDDPLEEEFSCLWQECGFCSLDSSADLIRHVYFHCYHTKLKQWGLQALQSQADLGPCILDFQSRNVIPDIPDHFLCLWEHCENSFDNPEWFYRHVEAHSLCCEYEAVGKDNPVVLCGWKGCTCTFKDRSKLREHLRSHTQEKVVACPTCGGMFANNTKFLDHIRRQTSLDHEETEAQRGLNHLPEITQLKQHFQCSHCSKRFATERLLRDHMRNHVNHYKCPLCDMTCPLPSSLRNHMRFRHSEDRPFKCDCCDYSCKNLIDLQKHLDTHSEEPAYRCDFENCTFSARSLCSIKSHYRKVHEGDSEPRYKCHVCDKCFTRGNNLTVHLRKKHQFKWPSGHPRFRYKEHEDGYMRLQLVRYESVELTQQLLRQPQEGSGLGTSLNESSLQGIILETVPGEPGRKEEEEEGKGSEGTALSASQDNPSSVIHVVNQTNAQGQQEIVYYVLSEAPGEPPPVPEPPSGGIMEKLQGIAEEPEIQMV

SEQ ID NO: 747257 - protein, 203 aa, Homo sapiens
TPSGRWSEVGEELKRPGADRRVKAMPPPGKVPRKENLWLQCEWGSCSFVCSTMEKFFEHVTQHLQQHLHGSGEEEEEEEEDDPLEEEFSCLWQECGFCSLDSSADLIRHVYFHCYHTKLKQWGLQALQSQADLGPCILDFQSRNVIPDIPDHFLCLWEHCENSFDNPEWFYRHVEAHSLCCEYEAVGKDNPVVLCGWKGRAAS

SEQ ID NO: 747258 - protein, 96 aa, Homo sapiens
PGSWLRGDGWVTAPHSAGQGGASRQGGDRPLRPSAPAAAAPNEARKGEPRWQRRGPREQEFVKRRCEGRACFPSEGQRWGAETVASVPALLVMNQK

SEQ ID NO: 747259 - protein, 117 aa, Homo sapiens
QAGRVSWKETFDVSLLMSPWPLCLHGWPRPSGAYAPGSMWPVNECTPGCLLLFHGSPEDATWELSVLVSRKVSGASSAAPFGTAGAKPLNGGPLDFYEKLLMSFQTFISGIYSPMDT

SEQ ID NO: 747260 - protein, 82 aa, Homo sapiens
FLLGAEVARSGVKSGTPSLARAGAGGLCDGLGAPGAGGGRSWAGVPVNEKGLSNLPKCSPGLVPQSSAPNCAGHTPGDAGEA

SEQ ID NO: 747261 - protein, 171 aa, Homo sapiens
MASERPEPEVEEAGQVFLLMKKDYRISRNVRLAWFLSHLHQTVQATPQEMLSEQELEVLSVLPPGWQPDEPVVPRPFLLVPSTRVTFLAWQYRFVIELDLSPSTGIVDDSTGEILFDEVFHALSRCLGGLLRPFRVPGSCIDFQPEIYVTIQAYSSIIGLQSHQVLHHLSK

SEQ ID NO: 747262 - protein, 364 aa, Homo sapiens
MEPLFPASTPSWNASSPGAASGGGDNRTLVGPAPSAGARAVLVPVLYLLVCAAGLGGNTLVIYVVLRFAKMKTVTNIYILNLAVADVLYMLGLPFLATQNAASFWPFGPVLCRLVMTLDGVNQFTSVFCLTVMSVDRYLAVVHPLSSARWRRPRVAKLASAAAWVLSLCMSLPLLVFADVQEGGTCNASWPEPVGLWGAVFIIYTAVLGFFAPLLVICLCYLLIVVKVRAAGVRVGCVRRRSERKVTRMVLVVVLVFAGCWLPFFTVNIVNLAVALPQEPASAGLYFFVVILSYANSCANPVLYGFLSDNFRQSFQKVLCLRKGSGAKDADATELRPDRIRQQQEATPPAHRAAANGLMQTSKL

SEQ ID NO: 747263 - protein, 319 aa, Homo sapiens
MLFWVLGLLILCGFLWTRKGKLKIEDITDKYIFITGCDSGFGNLAARTFDKKGFHVIAACLTESGSTALKAETSERLRTVLLDVTDPENVKRTAQWVKNQVGEKGLWGLINNAGVPGVLAPTDWLTLEDYREPIEVNLFGLISVTLNMLPLVKKAQGRVINVSSVGGRLAIVGGGYTPSKYAVEGFNDSLRRDMKAFGVHVSCIEPGLFKTNLADPVKVIEKKLAIWEQLSPDIKQQYGEGYIEKSLDKLKGNKSYVNMDLSPVVECMDHALTSLFPKTHYAAGKDAKIFWIPLSHMPAALQDFLLLKQKAELANPKAV

SEQ ID NO: 747264 - protein, 323 aa, Homo sapiens
MLFWVLGLLILCGFLWTRKGKLKIEDITDKYIFITGCDSGFGNLAARTFDKKGFHVIAACLTESGSTALKAETSERLRTVLLDVTDPENVKRTAQWVKNQVGEKGLWGLINNAGVPGVLAPTDWLTLEDYREPIEVNLFGLISVTLNMLPRPQEDQPGQGGTTLPSPCTAGKLAIVGGGYTPSKYAVEGFNDSLRRDMKAFGVHVSCIEPGLFKTNLADPVKVIEKKLAIWEQLSPDIKQQYGEGYIEKSLDKLKGNKSYVNMDLSPVVECMDHALTSLFPKTHYAAGKDAKIFWIPLSHMPAALQDFLLLKQKAELANPKAV

SEQ ID NO: 747265 - protein, 323 aa, Homo sapiens; identical to SEQ ID NO: 747264

SEQ ID NO: 747266 - protein, 279 aa, Homo sapiens
MLFWVLGLLILCGFLWTRKGKLKIEDITDKYIFITGCDSGFGNLAARTFDKKGFHVIAACLTESGSTALKAETSERLRTVLLDVTDPENVKRTAQWVKNQVGEKGLWGLINNAGVPGVLAPTDWLTLEDYREPIEVNLFGLISVTLNMLPLVKKAQGRVINVSSVGGRLAIVGGGYTPSKYAVEGFNDSLRRDMKAFGVHVSCIERLDKLKGNKSYVNMDLSPVVECMDHALTSLFPKTHYAAGKDAKIFWIPLSHMPAALQDFLLLKQKAELANPKAV

SEQ ID NO: 747267 - protein, 198 aa, Homo sapiens
MLFWVLGLLILCGFLWTRKGKLKIEDITDKYIFITGCDSGFGNLAARTFDKKGFHVIAACLTESGSTALKAETSERLRTVLLDVTDPENVKRTAQWVKNQVGEKGLWGLINNAGVPGVLAPTDWLTLEDYREPIEVNLFGLISVTLNMLPLVKKAQGRVINVSSVGGRLAIVGGGYTPSKYAVEGFNDSLRSRQTERQ

SEQ ID NO: 747268 - protein, 323 aa, Homo sapiens; identical to SEQ ID NO: 747264

SEQ ID NO: 747269 - protein, 272 aa, Homo sapiens
MLFWVLGLLILCGFLWTRKGKLKIEDITDKYIFITGCDDPENVKRTAQWVKNQVGEKGLWGLINNAGVPGVLAPTDWLTLEDYREPIEVNLFGLISVTLNMLPLVKKAQGRVINVSSVGGRLAIVGGGYTPSKYAVEGFNDSLRRDMKAFGVHVSCIEPGLFKTNLADPVKVIEKKLAIWEQLSPDIKQQYGEGYIEKSLDKLKGNKSYVNMDLSPVVECMDHALTSLFPKTHYAAGKDAKIFWIPLSHMPAALQDFLLLKQKAELANPKAV

SEQ ID NO: 747270 - protein, 219 aa, Homo sapiens
MLFWVLGLLILCGFLWTRKGKLKIEDITDKYIFITGCDSGFGNLAARTFDKKGFHVIAACLTESGSTALKAETSERLRTVLLDVTDPENVKRTAQWVKNQVGEKGLWGLINNAGVPGVLAPTDWLTLEDYREPIEVNLFGLISVTLNMLPLVKKAQGRVINVSSVGGRLAIVGGGYTPSKYAVEGFNDSLRRDMKAFGVHVSCIEPGLFKTNLADPVKV

SEQ ID NO: 747271 - protein, 235 aa, Homo sapiens
HQRWQISTVLPHLFSFLSVLGLWGLINNAGVPGVLAPTDWLTLEDYREPIEVNLFGLISVTLNMLPLVKKAQGRVINVSSVGGRLAIVGGGYTPSKYAVEGFNDSLRRDMKAFGVHVSCIEPGLFKTNLADPVKVIEKKLAIWEQLSPDIKQQYGEGYIEKSLDKLKGNKSYVNMDLSPVVECMDHALTSLFPKTHYAAGKDAKIFWIPLSHMPAALQDFLLLKQKAELANPKAV

SEQ ID NO: 747272 - protein, 135 aa, Homo sapiens
MRAFLRNQKYEDMHNIIHILQIRKLRHRLSNFPRLPGILAPETVLLPFCYKVFRKKEKVKRSQKATEFIDYSIEQSHHAILTPLQTHLTMKGSSMKCSSLSSEAILFTLTLQLTQTLGLECCLLYLSKTIHPQII

SEQ ID NO: 747273 - protein, 135 aa, Homo sapiens; identical to SEQ ID NO: 747272

SEQ ID NO: 747274 - protein, 113 aa, Homo sapiens
MEKLLRLCCWYSWLLLFYYNFQVRGVYSRSQDHPGFQVLASASHYWPLENVDGIHELQDTTGDIVEGKVNKGIYLKEEKGVTLLYYGRYNSSCISKPEQCGPEDFQFFLINLS

SEQ ID NO: 747275 - protein, 145 aa, Homo sapiens
MEKLLRLCCWYSWLLLFYYNFQVRGVYSRSQDHPGFQVLASASHYWPLENVDGIHELQDTTGASRTHKLTVLPSRNATFVYSNDSAYSNLSATVDIVEGKVNKGIYLKEEKGVTLLYYGRYNSSCISKPEQCGPEDFQFFLINLS

SEQ ID NO: 747276 - protein, 384 aa, Homo sapiens
ASSRIWDDGDDFCIFSESRRPSRPSNSNISKGESRPKWKPKAKVPLQTLHMTSENQEKVKALLRDLQEQDADAGSERGLSGEEEDDEPDCCNDERYWPAGQEPSLVPDLDPLEYAGLASVEPYVPEFTVSPFAVQKLSRYGFNTERCQAVLRMCDGDVGASLEHLLTQCFSETFGERMKISEAVNQISLDECMEQRQEEAFALKSICGEKFIERIQNRVWTIGLELEYLTSRFRKSKPKESTKNVQENSLEICKFYLKGNCKFGSKCRFKHEVPPNQIVGRIERSVDDSHLNAIEDASFLYELEIRFSKDHKYPYQAPLVAFYSTNENLPLACRLHISEFLYDKALTFAETSEPVVYSLITLLEEESEIVKLLTNTHHKYSDLL

SEQ ID NO: 747277 - protein, 819 aa, Homo sapiens
MTGCGKTTQIPQFILDDSLNGPPEKVANIICTQPRRISAISVAERVAKERAERVGLTVGYQIRLESVKSSATRLLYCTTGVLLRRLEGDTALQGVSHIIVDEVHERTEESDFLLLVLKDIVSQRPGLQVILMSATLNAELFSDYFNSCPVITIPGRTFPVDQFFLEDAIAVTRYVLQDGSPYMRSMKQISKEKLKARRNRTAFEEVEEDLRLSLHLQDQDSVKDAVPDQQLDFKQLLARYKGVSKSVIKTMSIMDFEKVNLELIEALLEWIVDGKHSYPPGAILVFLPGLAEIKMLYEQLQSNSLFNNRRSNRCVIHPLHSSLSSEEQQAVFVKPPAGVTKIIISTNIAETSITIDDVVYVIDSGKMKEKRYDASKGMESLEDTFVSQANALQRKGRAGRVASGVCFHLFTSHHYNHQLLKQQLPEIQRVPLEQLCLRIKILEMFSAHNLQSVFSRLIEPPHTDSLRASKIRLRDLGALTPDERLTPLGYHLASLPVDVRIGKLMLFGSIFRCLDPALTIAASLAFKSPFVSPWDKKEEANQKKLEFAFANSDYLALLQAYKGWQLSTKEGVRASYNYCRQNFLSGRVLQEMASLKRQFTELLSDIGFAREGLRAREIEKRAQGGDGVLDATGEEANSNAENPKLISAMLCAALYPNVVQVKSPEGKFQKTSTGAVRMQPKSAELKFVTKNDGYVHIHPSSVNYQVRHFDSPYLLYHEKIKTSRVFIRDCSMVSVYPLVLFGGGQVNVQLQRGEFVVSLDDGWIRFVAASHQVAELVKELRCELDQLLQDKIKNPSIDLCTCPRGSRIISTIVKLVTTQ

SEQ ID NO: 747278 - protein, 869 aa, Homo sapiens
NGKICKQFRMKQASRQFQSILQERQSLPAWEERETILNLLRKHQVVVISGMTGCGKTTQIPQFILDDSLNGPPEKVANIICTQPRRISAISVAERVAKERAERVGLTVGYQIRLESVKSSATRLLYCTTGVLLRRLEGDTALQGVSHIIVDEVHERTEESDFLLLVLKDIVSQRPGLQVILMSATLNAELFSDYFNSCPVITIPGRTFPVDQFFLEDAIAVTRYVLQDGSPYMRSMKQISKEKLKARRNRTAFEEVEEDLRLSLHLQDQDSVKDAVPDQQLDFKQLLARYKGVSKSVIKTMSIMDFEKVNLELIEALLEWIVDGKHSYPPGAILVFLPGLAEIKMLYEQLQSNSLFNNRRSNRCVIHPLHSSLSSEEQQAVFVKPPAGVTKIIISTNIAETSITIDDVVYVIDSGKMKEKRYDASKGMESLEDTFVSQANALQRKGRAGRVASGVCFHLFTSHHYNHQLLKQQLPEIQRVPLEQLCLRIKILEMFSAHNLQSVFSRLIEPPHTDSLRASKIRLRDLGALTPDERLTPLGYHLASLPVDVRIGKLMLFGSIFRCLDPALTIAASLAFKSPFVSPWDKKEEANQKKLEFAFANSDYLALLQAYKGWQLSTKEGVRASYNYCRQNFLSGRVLQEMASLKRQFTELLSDIGFAREGLRAREIEKRAQGGDGVLDATGEEANSNAENPKLISAMLCAALYPNVVQVKSPEGKFQKTSTGAVRMQPKSAELKFVTKNDGYVHIHPSSVNYQVRHFDSPYLLYHEKIKTSRVFIRDCSMVSVYPLVLFGGGQVNVQLQRGEFVVSLDDGWIRFVAASHQVAELVKELRCELDQLLQDKIKNPSIDLCTCPRGSRIISTIVKLVTTQ

SEQ ID NO: 747279 - protein, 735 aa, Homo sapiens
MTGCGKTTQIPQFILDDSLNGPPEKVANIICTQPRRISAISVAERVAKERAERVGLTVGYQIRLESVKSSATRLLYCTTGVLLRRLEGDTALQGVSHIIVDEVHERTEESDFLLLVLKDIVSQRPGLQVILMSATLNAELFSDYFNSCPVITIPGRTFPVDQFFLEDAIAVTRYVLQDGSPYMRSMKQISKEKLKARRNRTAFEEVEEDLRLSLHLQDQDSVKDAVPDQQLDFKQLLARYKGVSKSVIKTMSIMDFEKVNLELIEALLEWIVDGKHSYPPGAILVFLPGLAEIKMLYEQLQSNSLFNNRRSNRCVIHPLHSSLSSEEQQAVFVKPPAGVTKIIISTNIAETSITIDDVVYVIDSGKMKEKRYDASKGMESLEDTFVSQANALQRKGRAGRVASGVCFHLFTSHHYNHQLLKQQLPEIQRVPLEQLCLRIKILEMFSAHNLQSVFSRLIEPPHTDSLRASKIRLRDLGALTPDERLTPLGYHLASLPVDVRIGKLMLFGSIFRCLDPALTIAASLAFKSPFVSPWDKKEEANQKKLEFAFANSDYLALLQAYKGWQLSTKEGVRASYNYCRQNFLSGRVLQEMASLKRQFTELLSDIGFAREGLRAREIEKRAQGGDGVLDATGEEANSNAENPKLISAMLCAALYPNVVQVKSPEGKFQKTSTGAVRMQPKSAELKFVTKNDGYVHIHPSSVNYQVAELVKELRCELDQLLQDKIKNPACLSLSL

SEQ ID NO: 747280 - protein, 593 aa, Homo sapiens
MTGCGKTTQIPQFILDDSLNGPPEKVANIICTQPRRISAISVAERVAKERAERVGLTVGYQIRLESVKSSATRLLYCTTGVLLRRLEGDTALQGVSHIIVDEVHERTEESDFLLLVLKDIVSQRPGLQVILMSATLNAELFSDYFNSCPVITIPGRTFPVDQFFLEDAIAVTRYVLQDGSPYMRSMKQISKEKLKARRNRTAFEEVEEDLRLSLHLQDQDSVKDAVPDQQLDFKQLLARYKGVSKSVIKTMSIMDFEKVNLELIEALLEWIVDGKHSYPPGAILVFLPGLAEIKMLYEQLQSNSLFNNRRSNRCVIHPLHSSLSSEEQQAVFVKPPAGVTKIIISTNIAETSITIDDVVYVIDSGKMKEKRYDASKGMESLEDTFVSQANALQRKGRAGRVASGVCFHLFTSHHYNHQLLKQQLPEIQRVPLEQLCLRIKILEMFSAHNLQSVFSRLIEPPHTDSLRASKIRLRDLGALTPDERLTPLGYHLASLPVDVRIGKLMLFGSIFRCLDPALTIAASLAFKSPFVSPWDKKEEANQKKLEFAFANSDYLALLQAYKGWQLSTKEGVRASYNYCRQNFLSGRVLQEKR

SEQ ID NO: 747281 - protein, 124 aa, Homo sapiens
MQPKSAELKFVTKNDGYVHIHPSSVNYQVRHFDSPYLLYHEKIVLFGGGQVNVQLQRGEFVVSLDDGWIRFVAASHQVAELVKELRCELDQLLQDKIKNPSIDLCTCPRGSRIISTIVKLVTTQ

SEQ ID NO: 747282 - protein, 408 aa, Homo sapiens
MTSENQEKVKALLRDLQEQDADAGSERGLSGEEEDDEPDCCNDERYWPAGQEPSLVPDLDPLEYAGLASVEPYVPEFTVSPFAVQKLSRYGFNTERCQAVLRMCDGDVGASLEHLLTQCFSETFGERMKISEAVNQISLDECMEQRQEEAFALKSICGEKFIERIQNRVWTIGLELEYLTSRFRKSKPKESTKNVQENSLEICKFYLKGNCKFGSKCRFKHEVPPNQIVGRIERSVDDSHLNAIEDASFLYELEIRFSKDHKYPYQAPLVAFYSTNENLPLACRLHISEFLYDKALTFAETSEPVVYSLITLLEEESEIVKLLTNTHHKYSDPPVNFLPVPSRTRINNPACHKTVIPNNSFVSNQIPEVEKASESEESDEDDGPAPVIVENESYVNLKKKISKRYDWQ

SEQ ID NO: 747283 - protein, 158 aa, Homo sapiens
MTSENQEKVKALLRDLQEQDADAGSERGLSGEEEDDEPDCCNDERYWPAGQEPSLVPDLDPLEYAGLASVEPYVPEFTVSPFAVQKLSRYGFNTERCQAVLRMCDGDVGASLEHLLTQCFSETFGERMKISEAVNQISLDECMEQRQEEAFALKSICG

SEQ ID NO: 747284 - protein, 122 aa, Homo sapiens
ASSRIWDDGDDFCIFSESRRPSRPSNSNISKGESRPKWKPKAKVPLQTLHMTSENQEKVKALLRDLQEQDADAGSERGLSGEEEDDEPDCCNDERYWPAGQEPSLVPERSQNREGEKKPKIM

SEQ ID NO: 747285 - protein, 1217 aa, Homo sapiens
MFLYNLTLQRATGISFAIHGNFSGTKQQEIVVSRGKILELLRPDPNTGKVHTLLTVEVFGVIRSLMAFRLTGGTKDYIVVGSDSGRIVILEYQPSKNMFEKIHQETFGKSGCRRIVPGQFLAVDPKGRAVMISAIEKQKLVYILNRDAAARLTISSPLEAHKANTLVYHVVGVDVGFENPMFACLEMDYEEADNDPTGEAAANTQQTLTFYELDLGLNHVVRKYSEPLEEHGNFLITVPGGSDGPSGVLICSENYITYKNFGDQPDIRCPIPRRRNDLDDPERGMIFVCSATHKTKSMFFFLAQTEQGDIFKITLETDEDMVTEIRLKYFDTVPVAAAMCVLKTGFLFVASEFGNHYLYQIAHLGDDDEEPEFSSAMPLEEGDTFFFQPRPLKNLVLVDELDSLSPILFCQIADLANEDTPQLYVACGRGPRSSLRVLRHGLEVSEMAVSELPGNPNAVWTVRRHIEDEFDAYIIVSFVNATLVLSIGETVEEVTDSGFLGTTPTLSCSLLGDDALVQVYPDGIRHIRADKRVNEWKTPGKKTIVKCAVNQRQVVIALTGGELVYFEMDPSGQLNEYTERKEMSADVVCMSLANVPPGEQRSRFLAVGLVDNTVRIISLDPSDCLQPLSMQALPAQPESLCIVEMGGTEKQDELGERGSIGFLYLNIGLQNGVLLRTVLDPVTGDLSDTRTRYLGSRPVKLFRVRMQGQEAVLAMSSRSWLSYSYQSRFHLTPLSYETLEFASGFASEQCPEGIVAISTNTLRILALEKLGAVFNQVAFPLQYTPRKFVIHPESNNLIIIETDHNAYTEATKAQRKQQMAEEMVEAAGEDERELAAEMAAAFLNENLPESIFGAPKAGNGQWASVIRVMNPIQGNTLDLVQLEQNEAAFSVAVCRFSNTGEDWYVLVGVAKDLILNPRSVAGGFVYTYKLVNNGEKLEFLHKTPVEEVPAAIAPFQGRVLIGVGKLLRVYDLGKKKLLRKCENKHIANYISGIQTIGHRVIVSDVQESFIWVRYKRNENQLIIFADDTYPRWVTTASLLDYDTVAGADKFGNICVVRLPPNTNDEVDEDPTGNKALWDRGLLNGASQKAEVIMNYHVGETVLSLQKTTLIPGGSESLVYTTLSGGIGILVPFTSHEDHDFFQHVEMHLRSEHPPLCGRDHLSFRSYYFPVKNVIDGDLCEQFNSMEPNKQKNVSEELDRTPPEVSKKLEDIRTRYAF

SEQ ID NO: 747286 - protein, 1217 aa, Homo sapiens; identical to SEQ ID NO: 747285

SEQ ID NO: 747287 - protein, 255 aa, Homo sapiens
MFLYNLTLQRATGISFAIHGNFSGTKQQEIVVSRGKILELLRPDPNTGKVHTLLTVEVFGVIRSLMAFRLTGGTKDYIVVGSDSGRIVILEYQPSKNMFEKIHQETFGKSGCRRIVPGQFLAVDPKGRAVMISAIEKQKLVYILNRDAAARLTISSPLEAHKANTLVYHVVGVDVGFENPMFACLEMDYEEADNDPTGEAAANTQQTLTFYELDLGLNHVVRKYSEPLEEHGNFLITVPGGSDGPSGVLTKPSLH

SEQ ID NO: 747288 - protein, 214 aa, Homo sapiens
MFLYNLTLQRATGISFAIHGNFSGTKQQEIVVSRGKILELLRPDPNTGKVHTLLTVEVFGVIRSLMAFRLTGGTKDYIVVGSDSGRIVILEYQPSKNMFEKIHQETFGKSGCRRIVPGQFLAVDPKGRAVMISAIEKQKLVYILNRDAAARLTISSPLEAHKANTLVYHVVGVDVGFENPMFACLEMDYEEADNDPTGEAAANTQQSHPCIDMS

SEQ ID NO: 747289 - protein, 1072 aa, Homo sapiens
MAPPTGVLSSLLLLVTIAGCARKQCSEGRTYSNAVISPNLETTRIMRVSHTFPVVDCTAACCDLSSCDLAWWFEGRCYLVSCPHKENCEPKKMGPIRSYLTFVLRPVQRPAQLLDYGDMMLNRGSPSGIWGDSPEDIRKDLPFLGKDWGLEEMSEYADDYRELEKDLLQPSGKQEPRGSAEYTDWGLLPGSEGAFNSSVGDSPAVPAETQQDPELHYLNESASTPAPKLPERSVLLPLPTTPSSGEVLEKEKASQLQEQSSNSSGKEVLMPSHSLPPASLELSSVTVEKSPVLTVTPGSTEHSIPTPPTSAAPSESTPSELPISPTTAPRTVKELTVSAGDNLIITLPDNEVELKAFVAPAPPVETTYNYEWNLISHPTDYQGEIKQGHKQTLNLSQLSVGLYVFKVTVSSENAFGEGFVNVTVKPARRVNLPPVAVVSPQLQELTLPLTSALIDGSQSTDDTEIVSYHWEEINGPFIEEKTSVDSPVLRLSNLDPGNYSFRLTVTDSDGATNSTTAALIVNNAVDYPPVANAGPNHTITLPQNSITLNGNQSSDDHQIVLYEWSLGPGSEGKHVVMQGVQTPYLHLSAMQEGDYTFQLKVTDSSRQQSTAVVTVIVQPENNRPPVAVAGPDKELIFPVESATLDGSSSSDDHGIVFYHWEHVRGPSAVEMENIDKAIATVTGLQVGTYHFRLTVKDQQGLSSTSTLTVAVKKENNSPPRARAGGRHVLVLPNNSITLDGSRSTDDQRIVSYLWIRDGQSPAAGDVIDGSDHSVALQLTNLVEGVYTFHLRVTDSQGASDTDTATVEVQPDPRKSGLVELTLQVGVGQLTEQRKDTLVRQLAVLLNVLDSDIKVQKIRAHSDLSTVIVFYVQSRPPFKVLKAAEVARNLHMRLSKEKADFLLFKVLRVDTAGCLLKCSGHGHCDPLTKRCICSHLWMENLIQRYIWDGESNCEWSIFYVTVLAFTLIVLTGGFTWLCICCCKRQKRTKIRKKTKYTILDNMDEQERMELRPKYGIKHRSTEHNSSLMVSESEFDSDQDTIFSREKMERGNPKVSMNGSIRNGASFSYCSKDR

SEQ ID NO: 747290 - protein, 1072 aa, Homo sapiens; identical to SEQ ID NO: 747289

SEQ ID NO: 747291 - protein, 317 aa, Homo sapiens
MGTDNQTWVSEFILLGLSSDWDTRVSLFVLFLVMYVVTVLGNCLIVLLIRLDSRLHTPMYFFLTNLSLVDVSYATSVVPQLLAHFLAEHKAIPFQSCAAQLFFSLALGGIEFVLLAVMAYDRYVAVCDALRYSAIMHGGLCARLAITSWVSGFISSPVQTAITFQLPMCRNKFIDHISCELLAVVRLACVDTSSNEVTIMVSSIVLLMTPFCLVLLSYIQIISTILKIQSREGRKKAFHTCASHLTVVALCYGVAIFTYIQPHSSPSVLQEKLFSVFYAILTPMLNPMIYSLRNKEVKGAWQKLLWKFSGLTSKLAT

SEQ ID NO: 747292 - protein, 757 aa, Homo sapiens
MTSGSVFFYILIFGKYFSHGGGQDVKCSLGYFPCGNITKCLPQLLHCNGVDDCGNQADEDNCGDNNGWSMQFDKYFASYYKMTSQYPFEAETPECLVGSVPVQCLCQGLELDCDETNLRAVPSVSSNVTAMSLQWNLIRKLPPDCFKNYHDLQKLYLQNNKITSISIYAFRGLNSLTKLYLSHNRITFLKPGVFEDLHRLEWLIIEDNHLSRISPPTFYGLNSLILLVLMNNVLTRLPDKPLCQHMPRLHWLDLEGNHIHNLRNLTFISCSNLTVLVMRKNKINHLNENTFAPLQKLDELDLGSNKIENLPPLIFKDLKELSQLNLSYNPIQKIQANQFDYLVKLKSLSLEGIEISNIQQRMFRPLMNLSHIYFKKFQYCGYAPHVRSCKPNTDGISSLENLLASIIQRVFVWVVSAVTCFGNIFVICMRPYIRSENKLYAMSIISLCCADCLMGIYLFVIGGFDLKFRGEYNKHAQLWMESTHCQLVGSLAILSTEVSVLLLTFLTLEKYICIVYPFRCVRPGKCRTITVLILIWITGFIVAFIPLSNKEFFKNYYGTNGVCFPLHSEDTESIGAQIYSVAIFLGINLAAFIIIVFSYGSMFYSVHQSAITATEIRNQVKKEMILAKRFFFIVFTDALCWIPIFVVKFLSLLQVEIPGTITSWVVIFILPINSALNPILYTLTTRPFKEMIHRFWYNYRQRKSMDSKGQKTYAPSFIWVEMWPLQEMPPELMKPDLFTYPCEMSLISQSTRLNSYS

SEQ ID NO: 747293 - protein, 484 aa, Homo sapiens
MSRSTQELLGYHCRLQDKLQEQEGSLAAEGRHSLASAADHMKVVPSLLLSVLLAQVWLVPGLAPSPQSPETPAPQNQTSRVVQAPKEEEEDEQEASEEKASEEEKAWLMASRQQLAKETSNFGFSLLRKISMRHDGNMVFSPFGMSLAMTGLMLGATGPTETQIKRGLHLQALKPTKPGLLPSLFKGLRETLSRNLELGLTQGSFAFIHKDFDVKETFFNLSKRYFDTECVPMNFRNASQAKRLMNHYINKETRGKIPKLFDEINPETKLILVDYILFKGKWLTPFDPVFTEVDTFHLDKYKTIKVPMMYGAGKFASTFDKNFRCHVLKLPYQGNATMLVVLMEKMGDHLALEDYLTTDLVETWLRNMKTRNMEVFFPKFKLDQKYEMHELLRQMGIRRIFSPFADLSELSATGRNLQVSRVLQRTVIEVDERGTEAVAGILSEITAYSMPPVIKVDRPFHFMIYEETSGMLLFLGRVVNPTLL

SEQ ID NO: 747294 - protein, 160 aa, Homo sapiens
MYGAGKFASTFDKNFRCHVLKLPYQGNATMLVVLMEKMGDHLALEDYLTTDLVETWLRNMKKEMHELLRQMGIRRIFSPFADLSELSATGRNLQVSRVLQRTVIEVDERGTEAVAGILSEITAYSMPPVIKVDRPFHFMIYEETSGMLLFLGRVVNPTLL

SEQ ID NO: 747295 - protein, 160 aa, Homo sapiens; identical to SEQ ID NO: 747294

SEQ ID NO: 747296 - protein, 488 aa, Homo sapiens
LKVLGCKAEALVSALNEGLFQDPRPHTGSLAAEGRHSLASAADHMKVVPSLLLSVLLAQVWLVPGLAPSPQSPETPAPQNQTSRVVQAPKEEEEDEQEASEEKASEEEKAWLMASRQQLAKETSNFGFSLLRKISMRHDGNMVFSPFGMSLAMTGLMLGATGPTETQIKRGLHLQALKPTKPGLLPSLFKGLRETLSRNLELGLTQGSFAFIHKDFDVKETFFNLSKRYFDTECVPMNFRNASQAKRLMNHYINKETRGKIPKLFDEINPETKLILVDYILFKGKWLTPFDPVFTEVDTFHLDKYKTIKVPMMYGAGKFASTFDKNFRCHVLKLPYQGNATMLVVLMEKMGDHLALEDYLTTDLVETWLRNMKTRNMEVFFPKFKLDQKYEMHELLRQMGIRRIFSPFADLSELSATGRNLQVSRVLQRTVIEVDERGTEAVAGILSEITAYSMPPVIKVDRPFHFMIYEETSGMLLFLGRVVNPTLL

SEQ ID NO: 747297 - protein, 110 aa, Homo sapiens
SRNLELGLTQGSFAFIHKDFDVKETFFNLSKRYFDTECVPMNFRNASQAKRLMNHYINKETRGKIPKLFDEINPETKLILVDYILFKGTLIMFCSPKATGPYDCLSLSFR

SEQ ID NO: 747298 - protein, 333 aa, Homo sapiens [sequence omitted]

SEQ ID NO: 747299 - protein, 270 aa, Homo sapiens
MSWIKEGELSLWERFCANIIKAGPMPKHIAFIMDGNRRYAKKCQVERQEGHSQGFNKLAETLRWCLNLGILEVTVYAFSIENFKRSKSEVDGLMDLARQKFSRLMEEKEKLQKHGVCIRVLGDLHLLPLDLQELIAQAVQATKNYNKCFLNVCFAYTSRHEISNAVREMAWGVEQGLLDPRYPELFCMVIVKENRPGPAWQLTPVILAHWEAEVGSPLEAGQEFKTSLANMAKLPLFNNNNKKAGLYQTIKPLCAMYLARGLIRGACGKI

SEQ ID NO: 747300 - protein, 93 aa, Homo sapiens
AAAYYYYYYYQNSRLCLPMLWIIEGKLGLGERVWGYEENAGPMPKHIAFIMDGNRRYAKKCQVERQEGHSQGFNKLAEVGVYGRAQSEQSVER

SEQ ID NO: 747301 - protein, 333 aa, Homo sapiens [sequence omitted]

SEQ ID NO: 747302 - protein, 333 aa, Homo sapiens [sequence omitted]

SEQ ID NO: 747303 - protein, 294 aa, Homo sapiens [sequence omitted]

SEQ ID NO: 747304 - protein, 333 aa, Homo sapiens [sequence omitted]

SEQ ID NO: 747305 - protein, 333 aa, Homo sapiens [sequence omitted]

SEQ ID NO: 747306 - protein, 333 aa, Homo sapiens [sequence omitted]

SEQ ID NO: 747307 - protein, 299 aa, Homo sapiens [sequence omitted]

SEQ ID NO: 747308 - protein, 333 aa, Homo sapiens [sequence omitted]

SEQ ID NO: 747309 - protein, 234 aa, Homo sapiens
RGSPSAHQREKLQKHGVCIRVLGDLHLLPLDLQELIAQAVQATKNYNKCFLNVCFAYTSRHEISNAVREMAWGVEQGLLDPSDISESLLDKCLYTNRSPHPDILIRTSGEVRLSDFLLWQTSHSCLVFQPVLWPEYTFWNLFEAILQFQMNHSMLQKARDMYAEERKRQQLERDQATVTEQLLREGLQASGDAQLRRTRLHKLSARREERVQGFLQALELKRADWLARLGTASA

SEQ ID NO: 747310 - protein, 270 aa, Homo sapiens; identical to SEQ ID NO: 747299

SEQ ID NO: 747311 - protein, 301 aa, Homo sapiens
  misc_feature (301)..(301): Xaa can be any naturally occurring amino acid
MSWIKEGELSLWERFCANIIKAGPMPKHIAFIMDGNRRYAKKCQVERQEGHSQGFNKLAETLRWCLNLGILEVTVYAFSIENFKRSKSEVDGLMDLARQKFSRLMEEKEKLQKHGVCIRVLGDLHLLPLDLQELIAQAVQATKNYNKCFLNVCFAYTSRHEISNAVREMAWGVEQGLLDPSDISESLLDKCLYTNRSPHPDILIRTSGEVRLSDFLLWQTLNPAGVHPVLCQSIHLELSRHRRSNDIVVKADSSRRSHWRRTDTPRRATWPADAKTSEDPNTKAGEKRRALSSGPGSAPEX

SEQ ID NO: 747312 - protein, 522 aa, Homo sapiens
MDFLLLGLCLYWLLRRPSGVVLCLLGACFQMLPAAPSGCPQLCRCEGRLLYCEALNLTEAPHNLSGLLGLSLRYNSLSELRAGQFTGLMQLTWLYLDHNHICSVQGDAFQKLRRVKELTLSSNQITQLPNTTFRPMPNLRSVDLSYNKLQALAPDLFHGLRKLTTLHMRANAIQFVPVRIFQDCRSLKFLDIGYNQLKSLARNSFAGLFKLTELHLEHNDLVKVNFAHFPRLISLHSLCLRRNKVAIVVSSLDWVWNLEKMDLSGNEIEYMEPHVFETVPHLQSLQLDSNRLTYIEPRILNSWKSLTSITLAGNLWDCGRNVCALASWLNNFQGRYDGNLQCASPEYAQGEDVLDAVYAFHLCEDGAEPTSGHLLSAVTNRSDLGPPASSATTLADGGEGQHDGTFEPATVALPGGEHAENAVQIHKVVTGTMALIFSFLIVVLVLYVSWKCFPASLRQLRQCFVTQRRKQKQKQTMHQMAAMSAQEYYVDYKPNHIEGALVIINEYGSCTCHQQPARECEV

SEQ ID NO: 747313 - protein, 102 aa, Homo sapiens
ACARLWISRAGATFTSSPRGPIFLYQYVVSLMRSAWKPVAWCGPGRLLRGGCCWTLKVGEKITDGIWEHAEQRYCFTLACPFLHGLDSPFIWIPPLYFLLQP

SEQ ID NO: 747314 - protein, 122 aa, Homo sapiens
YGSEGRTMGGCPVRKRRRNGSKEGNHHSTQPKRNKRNPIFQDSQDTEFSWSDNERSSSRINIPERASGPEGNLNQIVTEPDANFPQFLHEGYVPCQGLYSHINQTLKEAHFNSLQQRGQAPT

SEQ ID NO: 747315 - protein, 114 aa, Homo sapiens
MLVLWLKRRRNGSKEGNHHSTQPKRNKRNPIFQDSQDTEFSWSDNERSSSRINIPERASGPEGNLNQIVTEPDANFPQFLHEGYVPCQGLYSHINQTLKEAHFNSLQQRGQAPT

SEQ ID NO: 747316 - protein, 151 aa, Homo sapiens
SELWSPRSSRFAFSAKISGLRAETQRICIFFRGWWRSALMTCRKRRRNGSKEGNHHSTQPKRNKRNPIFQDSQDTEFSWSDNERSSSRINIPERASGPEGNLNQIVTEPDANFPQFLHEGYVPCQGLYSHINQTLKEAHFNSLQQRGQAPT

SEQ ID NO: 747317 - protein, 122 aa, Homo sapiens; identical to SEQ ID NO: 747314

SEQ ID NO: 747318 - protein, 122 aa, Homo sapiens; identical to SEQ ID NO: 747314

SEQ ID NO: 747319 - protein, 122 aa, Homo sapiens
YGSEGRTMGGCPVRKRRRNGSKEGNHHSTQPKRNKRNPIFQDSQDTEFSWSDNERSSSRINIPERASGPEGNLNQIVTEPDANFPQFLHEGLSKPVYVINWFMSFGPEIKLNTSQQGRNQAV

SEQ ID NO: 747320 - protein, 122 aa, Homo sapiens; identical to SEQ ID NO: 747314

SEQ ID NO: 747321 - protein, 136 aa, Homo sapiens
VRALVPTVITLCFLSQDLGAQGGNAADMYFLPGLVALGSHDLQVTVLAGARPCLPRAPPFVLEKKSREAFSERTCWFFGCQCLTSPGGGGEVGMWSLAKTQSVDNSILFFKLAFPRKHEEGHMAGRRRRKPIDSYR

SEQ ID NO: 747322 - protein, 286 aa, Homo sapiens
MSGALDVLQMKEEDVLKFLAAGTHLGGTNLDFQMEQYIYKRKSDGIYIINLKRTWEKLLLAARAIVAIENPADVSVISSRNTGQRAVLKFAAATGATPIAGRFTPGTFTNQIQAAFREPRLLVVTDPRADHQPLTEASYVNLPTIALCNTDSPLRYVDIAIPCNNKGAHSVGLMWWMLAREVLRMRGTISREHPWEVMPDLYFYRDPEEIEKEEQAAAEKAVTKEEFRVNGLLRSEFTVLSLRLQTGLKVYRCPLCLFSNSLLKTGALSLPRKTGLQLPLLRPLNG

SEQ ID NO: 747323 - protein, 37 aa, Homo sapiens
MITLTIINFPLGTREGLGDPHLGTQTAHWVAKDHRTG

SEQ ID NO: 747324 - protein, 108 aa, Homo sapiens
GQGPPRKQLGRRGGLLGSCPAPITQRPVPRAPHPRGLSPGRQQAVLSKEASGHWEVAGKSLQRSPPGALWAPGPLLLQGQKHGFPEASCLAALTLSEEGFKSQELKEN

SEQ ID NO: 747325 - protein, 497 aa, Homo sapiens
MDPLGAPSQFVDVDTLPSWGDSCQDELNSSDTTAEIFQEDTVRSPFLYNKDVNGKVVLWKGDVALLNCTAIVNTSNESLTDKNPVSESIFMLAGPDLKEDLQKLKGCRTGEAKLTKGFNLAARFIIHTVGPKYKSRYRTAAESSLYSCYRNVLQLAKEQSMSSVGFCVINSAKRGYPLEDATHIALRTVRRFLEIHGETIEKVVFAVSDLEEGTYQKLLPLYFPRSLKEENRSLPYLPADIGNAEGEPVVPERQIRISEKPGAPEDNQEEEDEGLGVDLSFIGSHAFARMEGDIDKQRKLILQGQLSEAALQKQHQRNYNRWLCQARSEDLSDIASLKALYQTGVDNCGRTVMVVVGRNIPVTLIDMDKALLYFIHVMDHIAVKEYVLVYFHTLTSEYNHLDSDFLKKLYDVVDVKYKRNLKAVYFVHPTFRSKVSTWFFTTFSVSGLKDKIHHVDSLHQLFSAISPEQIDFPPFVLEYDARENGPYYTSYPPSPDL

SEQ ID NO: 747326 - protein, 318 aa, Homo sapiens [sequence omitted]

SEQ ID NO: 747327 - protein, 496 aa, Homo sapiens
MDPLGAPSQFVDVDTLPSWGDSCQDELNSSDTTAEIFQEDTVRSPFLYNKDVNGKVVLWKGDVALLNCTAIVNTSNESLTDKNPVSESIFMLAGPDLKEDLQKLKGCRTGEAKLTKGFNLAARFIIHTVGPKYKSRYRTAAESSLYSCYRNVLQLAKEQSMSSVGFCVINSAKRGYPLEDATHIALRTVRRFLEIHGETIEKVVFAVSDLEEGTYQKLLPLYFPRSLKEENRSLPYLPADIGNAEGEPVVPERQIRISEKPGAPEDNQEEEDEGLGVDLSFIGSHAFARMEGDIDKQRKLILQGQLSEAALQKQHQRNYNRWLCQARSEDLSDIASLKALYQTGVDNCGRTVMVVVGRNIPVTLIDMDKALLYFIHVMDHIAVKEYVLVYFHTLTSEYNHLDSDFLKKLYDVVDVKYKRNLKAVYFVHPTFRSKVSTWFFTTFSVSGLKDKIHHVDSLHQLFSAISPEQIDFPPFVLEYDARVRSTRSSPSPGMVY

SEQ ID NO: 747328 - protein, 740 aa, Homo sapiens
QRDWCFCEAVRPKVTFIKRMELGKGKLLRTGLNALHQAVHPIHGLAWTDGNQVVLTDLRLHSGEVKFGDSKVIGQFECVCGLSWAPPVADDTPVLLAVQHEKHVTVWQLCPSPMESSKWLTSQTCEIRGSLPILPQGCVWHPKCAILTVLTAQDVSIFPNVHSDDSQVKADINTQGRIHCACWTQDGLRLVVAVGSSLHSYIWDSAQKTLHRCSSCLVFDVDSHVCSITATVDSQVAIATELPLDKICGLNASETFNIPPNSKDMTPYALPVIGEVRSMDKEATDSETNSEVSVSSSYLEPLDLTHIHFNQHKSEGNSLICLRKKDYLTGTGQDSSHLVLVTFKKAVTMTRKVTIPGILVPDLIAFNLKAHVVAVASNTCNIILIYSVIPSSVPNIQQIRLENTERPKGICFLTDQLLLILVGKQKLTDTTFLPSSKSDQYAISLIVREIMLEEEPSITSGESQTTYSTFSAPLNKANRKKLIESLSPDFCHQNKGLLLTVNTSSQNGRPGRTLIKEIQSPLSSICDGSIALDAEPVTQPASLPRHSSTPDHTSTLEPPRLPQRKNLQSEKETYQLSKEVEILSRNLVEMQRCLSELTNRLHNGKKSSSVYPLSQDLPYVHIIYQKPYYLGPVVEKRAVLLCDGKLRLSTVQQTFGLSLIEMLHDSHWILLSADSEGFIPLTFTATQEIIIRDGSLSRSDVFRDSFSHSPGAVSSLKVFTGLAAPSLDTTGCCNHVDGMA

SEQ ID NO: 747329 - protein, 740 aa, Homo sapiens; identical to SEQ ID NO: 747328

SEQ ID NO: 747330 - protein, 230 aa, Homo sapiens
RLGTRPVVESAEASICDGSIALDAEPVTQPASLPRHSSTPDHTSTLEPPRLPQRKNLQSEKETYQLSKEVEILSRNLVEMQRCLSELTNRLHNGKKSSSVYPLSQDLPYVHIIYQKPYYLGPVVEKRAVLLCDGKLRLSTVQQTFGLSLIEMLHDSHWILLSADSEGFIPLTFTATQEIIIRDGSLSRSDVFRDSFSHSPGAVSSLKVFTGLAAPSLDTTGCCNHVDGMA

SEQ ID NO: 747331 - protein, 740 aa, Homo sapiens; identical to SEQ ID NO: 747328

SEQ ID NO: 747332 - protein, 637 aa, Homo sapiens
QRDWCFCEAVRPKVTFIKRMELGKGKLLRTGLNALHQAVHPIHGLAWTDGNQVVLTDLRLHSGEVKADINTQGRIHCACWTQDGLRLVVAVGSSLHSYIWDSAQKTLHRCSSCLVFDVDSHVCSITATVDSQVAIATELPLDKICGLNASETFNIPPNSKDMTPYALPVIGEVRSMDKEATDSETNSEVSVSSSYLEPLDLTHIHFNQHKSEGNSLICLRKKDYLTGTGQDSSHLVLVTFKKAVTMTRKVTIPGILVPDLIAFNLKAHVVAVASNTCNIILIYSVIPSSVPNIQQIRLENTERPKGICFLTDQLLLILVGKQKLTDTTFLPSSKSDQYAISLIVREIMLEEEPSITSGESQTTYSTFSAPLNKANRKKLIESLSPDFCHQNKGLLLTVNTSSQNGRPGRTLIKEIQSPLSSICDGSIALDAEPVTQPASLPRHSSTPDHTSTLEPPRLPQRKNLQSEKETYQLSKEVEILSRNLVEMQRCLSELTNRLHNGKKSSSVYPLSQDLPYVHIIYQKPYYLGPVVEKRAVLLCDGKLRLSTVQQTFGLSLIEMLHDSHWILLSADSEGFIPLTFTATQEIIIRDGSLSRSDVFRDSFSHSPGAVSSLKVFTGLAAPSLDTTGCCNHVDGMA

SEQ ID NO: 747333 - protein, 740 aa, Homo sapiens; identical to SEQ ID NO: 747328

SEQ ID NO: 747334 - protein, 510 aa, Homo sapiens
PSPENCRQFAGASQWPFRQGYGGLDWASEAFSQLYNPSFDCHVSEPNVILDISNYTPQKVKQQTAVSETFSESSSDSTQFNQPVGGGGFRRANSEASSSEGQSSLSSLEKLMMDWNEASSAPGYNWNQSVLFQSSSKPGRGRRKKVDLFEASHLGFPTSASAAASGYPSKRSTGPRQPRGGRGGGACSAKKERGGAAAKAKFIPKPQPVNPLFQDSPDLGLDYYSGDSSMSPLPSQSRAFGVGERDPCDFIGPYSMNPSTPSDGTFGQGFHCDSPSLGAPELDGKHFPPLAHPPTVFDAGLQKAYSPTCSPTLGFKEELRPPPTKLAACEPLKHGLQGASLGHAAAAQAHLSCRDLPLGQPHYDSPSCKGTAYWYPPGSAARSPPYEGKVGTGLLADFLGRTEAACLSAPHLASPPATPKADKEPLEMARPPGPPRGPAAAAAGYGCPLLSDLTLSPVPRDSLLPLQDTAYRYPGFMPQAHPGLGGGPKSGFLGPMAEPHPEDTFTVTSL

SEQ ID NO: 747335 - protein, 110 aa, Homo sapiens
QASNDVRGHGGTSPRGHIHRHIPVVPTEVPTGPRGFVPGFQKTNAKIPPSVHIVLWQELLPLCLPPCPLHPLQTHLPPPPPTHLLHAEAEGEPFLHKTSNCKYFLKMYKT

SEQ ID NO: 747336 - protein, 510 aa, Homo sapiens; identical to SEQ ID NO: 747334

SEQ ID NO: 747337 - protein, 52 aa, Homo sapiens
LTLLNPGRSWVGVSLFTSLISEHSRCVPLTPASSLVFLCSFQKTNAKIPPSV

SEQ ID NO: 747338 - protein, 1080 aa, Homo sapiens
MPAKGRYFLNEGEEGPDQDALYEKYQLTSQHGPLLLTLLLVAATACVALIIIAFSQGDPSRHQAILGMAFLVLAVFAALSVLMYVECLLRRWLRALALLTWACLVALGYVLVFDAWTKAACAWEQVPFFLFIVFVVYTLLPFSMRGAVAVGAVSTASHLLVLGSLMGGFTTPSVRVGLQLLANAVIFLCGNLTGAFHKHQMQDASRDLFTYTVKCIQIRRKLRIEKRQQENLLLSVLPAHISMGMKLAIIERLKEHGDRRCMPDNNFHSLYVKRHQNVSILYADIVGFTQLASDCSPKELVVVLNELFGKFDQIAKANECMRIKILGDCYYCVSGLPVSLPTHARNCVKMGLDMCQAIKQVREATGVDINMRVGIHSGNVLCGVIGLRKWQYDVWSHDVSLANRMEAAGVPGRVHITEATLKHLDKAYEVEDGHGQQRDPYLKEMNIRTYLVIDPRSQQPPPPSQHLPRPKGDAALKMRASVRMTRYLESWGAARPFAHLNHRESVSSGETHVPNGRRPKSVPQRHRRTPDRSMSPKGRSEDDSYDDEMLSAIEGLSSTRPCCSKSDDFYTFGSIFLEKGFEREYRLAPIPRARHDFACASLIFVCILLVHVLLMPRTAALGVSFGLVACVLGLVLGLCFATKFSRCCPARGTLCTISERVETQPLLRLTLAVLTIGSLLTVAIINLPLMPFQVPELPVGNETGLLAASSKTRALCEPLPYYTCSCVLGFIACSVFLRMSLEPKVVLLTVALVAYLVLFNLSPCWQWDCCGQGLGNLTKPNGTTSGTPSCSWKDLKTMTNFYLVLFYITLLTLSRQIDYYCRLDCLWKKKFKKEHEEFETMENVNRLLLENVLPAHVAAHFIGDKLNEDWYHQSYDCVCVMFASVPDFKVFYTECDVNKEGLECLRLLNEIIADFDELLLKPKFSGVEKIKTIGSTYMAAAGLSVASGHENQELERQHAHIGVMVEFSIALMSKLDGINRHSFNSFRLRVGINHGPVIAGVIGARKPQYDIWGNTVNVASRMESTGELGKIQVTEETCTILQGLGYSCECRGLINVKGKGELRTYFVCTDTAKFQGLGLN

SEQ ID NO: 747339 - protein, 68 aa, Homo sapiens
IHYCCSSQTPLHITCTSSCSSRVWSILPSSPAVCLEERLSAAMERNHNRRWHKEAIFSSSVIVPRSVF

SEQ ID NO: 747340 - protein, 113 aa, Homo sapiens
MVWLKEWPEPWDSFAAFSLVPVVFRFSRLLLLLLNSIFQPGMVVHTSNPCTLGGRGRRITWDWEFETSLSNMANLVSSESTKISWVWWHMPVVPAAREAEAGELLGPGRWRLR

SEQ ID NO: 747341 - protein, 106 aa, Homo sapiens
MQKIVQTDEITNTQAFRKGKRKRTETMDSENANSDMDKGQRDPYSGNAFLPGESSSEDEEPLAELSKEELCAKIKSLKEKLTNTRKENSRLRQSLVMLQAWSRELP

SEQ ID NO: 747342 - protein, 279 aa, Homo sapiens
MQKIVQTDEITNTQAFRKGKRKRTETMDSENANSDMDKGQRDPYSGNAFLPGESSSEDEEPLAELSKEELCAKIKSLKEKLTNTRKENSRLRQSLVMLQVLPQAVTQFEELVGMAEALLKGGGTMSTSASTLWRATNNSSPDSFASTCSNSNSNSSSPVSLKPEEEHQTDEKQFQIEKWQIARCNKSKPQKFINDLMQVLYTNEYMATHSLTGAKSSTSRDKAVKPAMNQNEVQEIIGVTKQLFPNTDDVSIRRMIGQKLNNCTKKPNLSKNLNSQDIK

SEQ ID NO: 747343 - protein, 181 aa, Homo sapiens
MLLPQAVTQFEELVGMAEALLKGGGTMSTSASTLWRATNNSSPDSFASTCSNSNSNSSSPVSLKPEEEHQTDEKQFQIEKWQIARCNKSKPQKFINDLMQVLYTNEYMATHSLTGAKSSTSRDKAVKPAMNQNEVQEIIGVTKQLFPNTDDVSIRRMIGQKLNNCTKKPNLSKNLNSQDIK

SEQ ID NO: 747344 - protein, 129 aa, Homo sapiens
MQKIVQTDEITNTQAFRKGKRKRTETMDSENANSDMDKGQRDPYSGNAFLPGESSSEDEEPLAELSKEELCAKIKSLKEKLTNTRKENSRLRQSLVMLQGNKLDITTEKTILHGGMKTLNVVTTSSHPV

SEQ ID NO: 747345 - protein, 175 aa, Homo sapiens
MQKIVQTDEITNTQAFRKGKRKRTETMDSENANSDMDKGQRDPYSGNAFLPGESSSEDEEPLAELSKEELCAKIKSLKEKLTNTRKENSRLRQSLVMLQVLPQAVTQFEELVGMAEALLKGGGTMSTSASTLWRATNNSSPDSFASTCSNSNSNSSSPVSLKPEEEHQTDEKQFR

SEQ ID NO: 747346 - protein, 213 aa, Homo sapiens
MDPLQKRNPASPSKSSPMTAAETSQEGPAPSQPSYSEQPMMGLSNLSPGPGPSQAVPLPEGLLRQRYREEKTLEERRWERLEFLQRKKAFLRHVRRRHRDHMAPYAVGREARISPLGDRSQNRFRCECRYCQSHRPNLSGIPGESNRAPHPSSWETLVQGLSGLTLSLGTNQPGPLPEAALQPQETEEKRQRERQQESKIMFQRLLKQWLEEN

SEQ ID NO: 747347 - protein, 213 aa, Homo sapiens; identical to SEQ ID NO: 747346

SEQ ID NO: 747348 - protein, 213 aa, Homo sapiens; identical to SEQ ID NO: 747346

SEQ ID NO: 747349 - protein, 213 aa, Homo sapiens; identical to SEQ ID NO: 747346

SEQ ID NO: 747350 - protein, 213 aa, Homo sapiens; identical to SEQ ID NO: 747346

SEQ ID NO: 747351 - protein, 213 aa, Homo sapiens; identical to SEQ ID NO: 747346

SEQ ID NO: 747352 - protein, 213 aa, Homo sapiens; identical to SEQ ID NO: 747346

SEQ ID NO: 747353 - protein, 213 aa, Homo sapiens; identical to SEQ ID NO: 747346

SEQ ID NO: 747354 - protein, 213 aa, Homo sapiens; identical to SEQ ID NO: 747346

SEQ ID NO: 747355 - protein, 213 aa, Homo sapiens; identical to SEQ ID NO: 747346

SEQ ID NO: 747356 - protein, 213 aa, Homo sapiens; identical to SEQ ID NO: 747346

SEQ ID NO: 747357 - protein, 159 aa, Homo sapiens
MDPLQKRNPASPSKSSPMTAAETSQEGPAPSQPSYSEQPMMGLSNLSPGPGPSQAVPLPEGLLRQRYREEKTLEERRWERLEFLQRKKAFLRHVRRRHRDHMAPYAVGREARISPLGDRSQNRFRCECRYCQSHTAEQLWESMTRSTADTTLPVALVEL

SEQ ID NO: 747358 - protein, 124 aa, Homo sapiens [sequence omitted]

SEQ ID NO: 747359 - protein, 124 aa, Homo sapiens [sequence omitted]

SEQ ID NO: 747360 - protein, 80 aa, Homo sapiens
RTGTTIAELKFRQRERGGCVAFDTVEFFGYSPTDSPKGAGDATPAKFALVICFTPSRQREQLEKSRRLSRSNMAQMPQGH

SEQ ID NO: 747361 - protein, 213 aa, Homo sapiens; identical to SEQ ID NO: 747346

SEQ ID NO: 747362 - protein, 213 aa, Homo sapiens; identical to SEQ ID NO: 747346

SEQ ID NO: 747363 - protein, 213 aa, Homo sapiens; identical to SEQ ID NO: 747346

SEQ ID NO: 747364 - protein, 213 aa, Homo sapiens; identical to SEQ ID NO: 747346

SEQ ID NO: 747365 - protein, 213 aa, Homo sapiens; identical to SEQ ID NO: 747346

SEQ ID NO: 747366 - protein, 213 aa, Homo sapiens; identical to SEQ ID NO: 747346

SEQ ID NO: 747367 - protein, 213 aa, Homo sapiens; identical to SEQ ID NO: 747346

SEQ ID NO: 747368 - protein, 102 aa, Homo sapiens [sequence omitted]

SEQ ID NO: 747369 - protein, 126 aa, Homo sapiens
TLANLHKKTIFIFIVTKKARIISFNPYTIIMKWVILYSQKEVNHFLFSTDTTSSGGCISVSYWRHFLFLQILFLTVKVACYSYKQSIKPKRAFINHLHLHFFLTVDGFKKPFQDEILQVFFMSSEG

SEQ ID NO: 747370 - protein, 45 aa, Homo sapiens
QRRDMIKVMYQIVRRRRRNSSSGIIILSSVIHHIDIDMTRAGFLN

SEQ ID NO: 747371 - protein, 111 aa, Homo sapiens
PGYAGRTELPENLKALFRPCAMVAPDIELICEILLVAEGFVDARALARKFITLYTLCKELLSKQDHYDWGLRAIKSVLVVAGSLKRGDKNRPEDQVLHESIKGFQYAQNSD

SEQ ID NO: 747372 - protein, 71 aa, Homo sapiens
VLILVPISQDWLSLSQDTTWHSATSAKEMRNLRGNKCEEEDDSRGPEIQGKDRGPRMVHCREDRLKDLGTG

SEQ ID NO: 747373 - protein, 107 aa, Homo sapiens
MCLCCLLQKSKNGSNVVDALSLESSESSPSLVIGSRSTTGSRMHRQYAGPYSQDRDCSAWATERDSVSKKKKKIIRENGSSSLLIEALSNSSHKCQADIRHILNKNG

SEQ ID NO: 747374 - protein, 297 aa, Homo sapiens
MSAWAAASLSRAAARCLLARGPGVRAAPPRDPRPSHPEPRGCGAAPGRTLHFTAAVPAGHNKWSKVRHIKGPKDVERSRIFSKLCLNIRLAVKEGGPNPEHNSNLANILEVCRSKHMPKSTIETALKMEKSKDTYLLYEGRGPGGSSLLIEALSNSSHKCQADIRHILNKNGGVMAVGARHSFDKKGVIVVEVEDREKKAVNLERALEMAIEAGAEDVKETEDEEERNVFKFICDASSLHQVRKKLDSLGLCSVSCALEFIPNSKVQLAEPDLEQAAHLIQALSNHEDVIHVYDNIE

SEQ ID NO: 747375 - protein, 130 aa, Homo sapiens
MNKNGGVMAVGARHSFDKKGVIVVEVEDREKKAVNLERALEMAIEAGAEDVKETEDEEERNVFKFICDASSLHQVRKKLDSLGLCSVSCALEFIPNSKVQLAEPDLEQAAHLIQALSNHEDVIHVYDNIE

SEQ ID NO: 747376 - protein, 124 aa, Homo sapiens
MSAWAAASLSRAAARCLLARGPGVRAAPPRDPRPSHPEPRGCGAAPGRTLHFTAAVPAGHNKWSKVRHIKGPKDVERSRIFSKLCLNIRLAVKACQLCCCLRAIWMSVPTPSRMQGRTTQLVRL

SEQ ID NO: 747377 - protein, 130 aa, Homo sapiens
MLAGTRPRGQGGSSARPPALPPRAPGLRCRSGQDAALYRGCPRRAQQVVQSQAHQGSEGRRKESHLLQTLFEHPPGSESRRPKDRTCDLEAKGISLVGPPCQLCCCLRAIWMSVPTPSRMQGRTTQLVRL

SEQ ID NO: 747378 - protein, 145 aa, Homo sapiens
MELHFLSDGYMLLGGGWVSGPMSAWAAASLSRAAARCLLARGPGVRAAPPRDPRPSHPEPRGCGAAPGRTLHFTAAVPAGHNKWSKVRHIKGPKDVERSRIFSKLCLNIRLAVKACQLCCCLRAIWMSVPTPSRMQGRTTQLVRL

SEQ ID NO: 747379 - protein, 303 aa, Homo sapiens
RAPSPGCRGDSVGSLAVEPPRAGPSLWISGDRHRRPRGPELLVPAVEETRRRWPLLHFTAAVPAGHNKWSKVRHIKGPKDVERSRIFSKLCLNIRLAVKEGGPNPEHNSNLANILEVCRSKHMPKSTIETALKMEKSKDTYLLYEGRGPGGSSLLIEALSNSSHKCQADIRHILNKNGGVMAVGARHSFDKKGVIVVEVEDREKKAVNLERALEMAIEAGAEDVKETEDEEERNVFKFICDASSLHQVRKKLDSLGLCSVSCALEFIPNSKVQLAEPDLEQAAHLIQALSNHEDVIHVYDNIE

SEQ ID NO: 747380 - protein, 181 aa, Homo sapiens
MPKSTIETALKMEKSKDTYLLYEGRGPGGSSLLIEALSNSSHKCQADIRHILNKNGGVMAVGARHSFDKKGVIVVEVEDREKKAVNLERALEMAIEAGAEDVKETEDEEERNVFKFICDASSLHQVRKKLDSLGLCSVSCALEFIPNSKVQLAEPDLEQAAHLIQALSNHEDVIHVYDNIE

SEQ ID NO: 747381 - protein, 232 aa, Homo sapiens
MCLCCLLQKSKNGSNVVDALSLESSESSPSLVIGSRSTTGSRMHRQYAGPYSQDRDCSAWATERDSVSKKKKKIIRENGSSSLLIEALSNSSHKCQADIRHILNKNGGVMAVGARHSFDKKGVIVVEVEDREKKAVNLERALEMAIEAGAEDVKETEDEEERNVFKFICDASSLHQVRKKLDSLGLCSVSCALEFIPNSKVQLAEPDLEQAAHLIQALSNHEDVIHVYDNIE

SEQ ID NO: 747382 - protein, 166 aa, Homo sapiens
MSAWAAASLSRAAARCLLARGPGVRAAPPRDPRPSHPEPRGCGAAPGRTLHFTAAVPAGHNKWSKVRHIKGPKDVERSRIFSKLCLNIRLAVKEGGPNPEHNSNLANILEVCRSKHMPKSTIETALKMEKSKDTYLLYEGRGPGGSSLLIEALSNSSHKCQADLRP

SEQ ID NO: 747383 - protein, 172 aa, Homo sapiens
RAPSPGCRGDSVGSLAVEPPRAGPSLWISGDRHRRPRGPELLVPAVEETRRRWPLLHFTAAVPAGHNKWSKVRHIKGPKDVERSRIFSKLCLNIRLAVKEGGPNPEHNSNLANILEVCRSKHMPKSTIETALKMEKSKDTYLLYEGRGPGGSSLLIEALSNSSHKCQADLRP

SEQ ID NO: 747384 - protein, 134 aa, Homo sapiens
MKSLTWILGLWALAACFTPGESQRGPRGPYPPGPLAPPPPPCFPFGTGFVPPPHPPPYGPGRFPPPLSPPYGPGRIPPSPPPPYGPGRIQSHSLPPPYGPGYPQPPSQPRPYPPGPPFFPVNSPTDPALPTPAP

SEQ ID NO: 747385 - protein, 333 aa, Homo sapiens
MESSGNPESTTFFYYDLQSQPCENQAWVFATLATTVLYCLVFLLSLVGNSLVLWVLVKYESLESLTNIFILNLCLSDLVFACLLPVWISPYHWGWVLGDFLCKLLNMIFSISLYSSIFFLTIMTIHRYLSVVSPLSTLRVPTLRCRVLVTMAVWVASILSSILDTIFHKVLSSGCDYSELTWYLTSVYQHNLFFLLSLGIILFCYVEILRTLFRSRSKRRHRTVKLIFAIVVAYFLSWGPYNFTLFLQTLFRTQIIRSCEAKQQLEYALLICRNLAFSHCCFNPVLYVFVGVKFRTHLKHVLRQFWFCRLQAPSPASIPHSPGAFAYEGASFY

SEQ ID NO: 747386 - protein, 139 aa, Homo sapiens [sequence omitted]

SEQ ID NO: 747387 - protein, 139 aa, Homo sapiens
RIEPVPPTSPTVRVRLHPFHVIRINKMLSCAGADRLQTGMRGAFGKPQGTVARVHIGQVIMSIRTKLQNKEHVIEALRRAKFKFPGRQKIHISKKWGFTKFNADEFEDMVAEKRLIPDGCGVKYIPSRGPLDKWRALHS

SEQ ID NO: 747388 - protein, 128 aa, Homo sapiens
SRKGKLKRTLKREFKMLSCAGADRLQTGMRGAFGKPQGTVARVHIGQVIMSIRTKLQNKEHVIEALRRAKFKFPGRQKIHISKKWGFTKFNADEFEDMVAEKRLIPDGCGVKYIPSRGPLDKWRALHS

SEQ ID NO: 747389 - protein, 105 aa, Homo sapiens
MKSKCRIFFFLKDICALSLRCATEDPGVAMGRRPACCYRYCKNKPYPKSRFCRGVPDAKIRIFDLGRKKAKVDEFPLCGHMVSDEYEQLSSEAWRLPEFVPISTW

SEQ ID NO: 747390 - protein, 105 aa, Homo sapiens; identical to SEQ ID NO: 747389

SEQ ID NO: 747391 - protein, 412 aa, Homo sapiens
MGSPWNGSDGPEGAREPPWPALPPCDERRCSPFPLGALVPVTAVCLCLFVVGVSGNVVTVMLIGRYRDMRTTTNLYLGSMAVSDLLILLGLPFDLYRLWRSRPWVFGPLLCRLSLYVGEGCTYATLLHMTALSVERYLAICRPLRARVLVTRRRVRALIAVLWAVALLSAGPFLFLVGVEQDPGISVVPGLNGTARIASSPLASSPPLWLSRAPPPSPPSGPETAEAAALFSRECRPSPAQLGALRVMLWVTTAYFFLPFLCLSILYGLIGRELWSSRRPLRGPAASGRERGHRQTVRVLLVVVLAFIICWLPFHVGRIIYINTEDSRMMYFSQYFNIVALQLFYLSASINPILYNLISKKYRAAAFKLLLARKSRPRGFHRSRDTAGEVAGDTGGDTVGYTETSANVKTMG

SEQ ID NO: 747392 - protein, 373 aa, Homo sapiens [sequence omitted]

SEQ ID NO: 747393 - protein, 309 aa, Homo sapiens
MGFVLLRLSAHPELEKTFFVLILLMYLVILLGNGVLILVTILDSRLHTPMYFFLGNLSFLDICFTTSSVPLVLDSFLTPQETISFSACAVQMALSFAMAGTECLLLSMMAFDRYVAICNPLRYSVIMSKAAYMPMAASSWAIGGAASVVHTSLAIQLPFCGDNVINHFTCEILAVLKLACADISINVISMEVTNVIFLGVPVLFISFSYVFIITTILRIPSAEGRKKVFSTCSAHLTVVIVFYGTLFFMYGKPKSKDSMGADKEDLSDKLIPLFYGVVTPMLNPIIYSLRNKDVKAAVRRLLRPKGFTQ

SEQ ID NO: 747394 - protein, 505 aa, Homo sapiens
GLTLFFVVLGSLSVQVFSFRWFVHDFSTEDSATAAAASSCPQPGADCKTVVGGGSAAGEGEARPSTPQRQASNASKSNIAAANSGSNSSGATRASGKHRSASCSFCIWLLQSLIHILQLGQIWRYFHTIYLGIRSRQSGENDRWRFYWKMVYEYADVSMLHLLATFLESAPQLVLQLCIIVQTHSLQALQGFTAAASLVSLAWALASYQKALRDSRDDKKPISYMAVIIQFCWHFFTIAARVITFALFASVFQLYFGIFIVLHWCIMTFWIVHCETEFCITKWEEIVFDMVVGIIYIFSWFNVKEGRTRCRLFIYYFVILLENTALSALWYLYKAPQIADAFAIPALCVVFSSFLTGVVFMLMYYAFFHPNGPRFGQSPSCACEDPAAAFTLPPDVATSTLRSISNNRSVVSDRDQKFAERDGCVPVFQVRPTAPSTPSSRPPRIEESVIKIDLFRNRYPAWERHVLDRSLRKAILAFECSPSPPRLQYKDDALIQERLEYETTL

SEQ ID NO: 747395 - protein, 439 aa, Homo sapiens
MPAPQRKHRRGGFSHRCFPTPQTAMTPQPAGPPDGGWGWVVAAAAFAINGLSYGLLRSLGLAFPDLAEHFDRSAQDTAWISALALAVQQAASPVGSALSTRWGARPVVMVGGVLASLGFVFSAFASDLLHLYLGLGLLAGFGWALVFAPALGTLSRYFSRRRVLAVGLALTGNGASSLLLAPALQLLLDTFGWRGALLLLGAITLHLTPCGALLLPLVLPGDPPAPPRSPLAALGLSLFTRRAFSIFALGTALVGGGYFVPYVHLAPHALDRGLGGYGAALVVAVAAMGDAGARLVCGWLADQGWVPLPRLLAVFGALTGLGLWVVGLVPVVGGEESWGGPLLAAAVAYGLSAGSYAPLVFGVLPGLVGVGGVVQATGLVMMLMSLGGLLGPPLSGFLRDETGDFTASFLLSGSLILSGSFIYIGLPRALPSCGPASPP

SEQ ID NO: 747396 - protein, 83 aa, Homo sapiens
GQGEEPLVRGRQTANEKCWREFGGPGACLPLTPPLSGPVGSALSTRWGARPVVMVGGVLASLGFVFSAFASDLLHLYLGLGLL

SEQ ID NO: 747397 - protein, 152 aa, Homo sapiens
LDSILKVAKKERTMSSLPVPYKLPVSLSVGSCVIIKGTPIHSFINDPQLQVDFYTDMDEDSDIAFRFRVHFGNHVVMNRREFGIWMLEETTDYVPFEDGKQFELCIYVHYNEYEIKVNGIRIYGFVHRIPPSFVKMVQVSRDISLTSVCVCN

SEQ ID NO: 747398 - protein, 126 aa, Homo sapiens
LDSILKVAKKEEQCLLYPNDPQLQVDFYTDMDEDSDIAFRFRVHFGNHVVMNRREFGIWMLEETTDYVPFEDGKQFELCIYVHYNEYEIKVNGIRIYGFVHRIPPSFVKMVQVSRDISLTSVCVCN

SEQ ID NO: 747399 - protein, 93 aa, Homo sapiens
YTQVPNTILNTGTTHRYHSTTHKYSLSAVPTQALPTGTTHSAKHRYCTQVPSTVLHTSTAHSTKQYCTQVSCTVPNTVLHTVHKQSTAHRYSL

SEQ ID NO: 747400 - protein, 104 aa, Homo sapiens
ELLGELWAGRTRVPPQGLELADREGQDPGRWPRTTPPVLEATSQVMWKPVLLPEALKLAPGVSMWNRSTQVLLSSGVPEQEDKEGSTFPPVEQHPIQTGAPKPR

SEQ ID NO: 747401 - protein, 681 aa, Homo sapiens
RLPAGRWIPADPRAESTAHRAEPGQTEPRRASQRASARGRADRSEPSGAGRGAPCRALRGVPRRPRAPAPGHEPLRDSALSPPPVQRPRTRRRLPACRSPLRIPSTRMELKAEEEEVGGVQPVSIQAFASSSTLHGLAHIFSYERLSLKRALWALCFLGSLAVLLCVCTERVQYYFHYHHVTKLDEVAASQLTFPAVTLCNLNEFRFSQVSKNDLYHAGELLALLNNRYEIPDTQMADEKQLEILQDKANFRSFKPKPFNMREFYDRAGHDIRDMLLSCHFRGEVCSAEDFKVVFTRYGKCYTFNSGRDGRPRLKTMKGGTGNGLEIMLDIQQDEYLPVWGETDETSFEAGIKVQIHSQDEPPFIDQLGFGVAPGFQTFVACQEQRLIYLPPPWGTCKAVTMDSDLDFFDSYSITACRIDCETRYLVENCNCRMVHMPGDAPYCTPEQYKECADPALDFLVEKDQEYCVCEMPCNLTRYGKELSMVKIPSKASAKYLAKKFNKSEQYIGENILVLDIFFEVLNYETIEQKKAYEIAGLLGELLMTPVPFSCHGHGVAPYHPKAGCSLLSHEGPPPQRPFPKPCCLGDIGGQMGLFIGASILTVLELFDYAYEVIKHKLCRRGKCQKEAKRSSADKGVALSLDDVKRHNPCESLRGHPAGMTYAANILPHHPARGTFEDFTC

SEQ ID NO: 747402 - protein, 635 aa, Homo sapiens
RLPAGRWIPADPRAESTAHRAEPGQTEPRRASQRASARGRADRSEPSGAGRGAPCRALRGVPRRPRAPAPGHEPLRDSALSPPPVQRPRTRRRLPACRSPLRIPSTRMELKAEEEEVGGVQPVSIQAFASSSTLHGLAHIFSYERLSLKRALWALCFLGSLAVLLCVCTERVQYYFHYHHVTKLDEVAASQLTFPAVTLCNLNEFRFSQVSKNDLYHAGELLALLNNRYEIPDTQMADEKQLEILQDKANFRSFKPKPFNMREFYDRAGHDIRDMLLSCHFRGEVCSAEDFKVVFTRYGKCYTFNSGRDGRPRLKTMKGGTGNGLEIMLDIQQDEYLPVWGETDETSFEAGIKVQIHSQDEPPFIDQLGFGVAPGFQTFVACQEQRLIYLPPPWGTCKAVTMDSDLDFFDSYSITACRIDCETRYLVENCNCRMVHMPGDAPYCTPEQYKECADPALDFLVEKDQEYCVCEMPCNLTRYGKELSMVKIPSKASAKYLAKKFNKSEQYIGENILVLDIFFEVLNYETIEQKKAYEIAGLLGDIGGQMGLFIGASILTVLELFDYAYEVIKHKLCRRGKCQKEAKRSSADKGVALSLDDVKRHNPCESLRGHPAGMTYAANILPHHPARGTFEDFTC

SEQ ID NO: 747403 - protein, 681 aa, Homo sapiens; identical to SEQ ID NO: 747401

SEQ ID NO: 747404 - protein, 635 aa, Homo sapiens; identical to SEQ ID NO: 747402

SEQ ID NO: 747405 - protein, 349 aa, Homo sapiens
RLPAGRWIPADPRAESTAHRAEPGQTEPRRASQRASARGRADRSEPSGAGRGAPCRALRGVPRRPRAPAPGHEPLRDSALSPPPVQRPRTRRRLPACRSPLRIPSTRMELKAEEEEVGGVQPVSIQAFASSSTLHGLAHIFSYERLSLKRALWALCFLGSLAVLLCVCTERVQYYFHYHHVTKLDEVAASQLTFPAVTLCNLNEFRFSQVSKNDLYHAGELLALLNNRYEIPDTQMADEKQLEILQDKANFRSFKPKPFNMREFYDRAGHDIRDMLLSCHFRGEVCSAEDFKVLHTLWKVLHVLGHHNGSSPGRVVSVVSMQPFLAKFLDLIDSNELLEDIVIKASDFK

SEQ ID NO: 747406 - protein, 129 aa, Homo sapiens
VIKHKLCRRGKCQKEAKRSSADKGVALSLDDVKRHVRERARAPSSPPVPPPPQEPRPPPPTRLCHHLLSFASRMPQHYLKPFRGITRPCPVPFPQNPCESLRGHPAGMTYAANILPHHPARGTFEDFTC

SEQ ID NO: 747407 - protein, 77 aa, Homo sapiens
MDSDLDFFDSYSITACRIDCETRYLVENCNCRMVHMPGQAWGSEHTPGVPGPLLPFTSSPSISISQPQFQPTPSHTH

SEQ ID NO: 747408 - protein, 319 aa, Homo sapiens
MKGGTGNGLEIMLDIQQDEYLPVWGETDETSFEAGIKVQIHSQDEPPFIDQLGFGVAPGFQTFVACQEQRLIYLPPPWGTCKAVTMDSDLDFFDSYSITACRIDCETRYLVENCNCRMVHMPGDAPYCTPEQYKECADPALDFLVEKDQEYCVCEMPCNLTRYGKELSMVKIPSKASAKYLAKKFNKSEQYIGENILVLDIFFEVLNYETIEQKKAYEIAGLLGDIGGQMGLFIGASILTVLELFDYAYEVIKHKLCRRGKCQKEAKRSSADKGVALSLDDVKRHNPCESLRGHPAGMTYAANILPHHPARGTFEDFTC

SEQ ID NO: 747409 - protein, 210 aa, Homo sapiens
RLPAGRWIPADPRAESTAHRAEPGQTEPRRASQRASARGRADRSEPSGAGRGAPCRALRGVPRRPRAPAPGHEPLRDSALSPPPVQRPRTRRRLPACRSPLRIPSTRMELKAEEEEVGGVQPVSIQAFASSSTLHGLAHIFSYERLSLKRALWALCFLGSLAVLLCVCTERVQYYFHYHHVTKLDEVAASQLTFPAVTLCNLNEFREPKA

SEQ ID NO: 747410 - protein, 76 aa, Homo sapiens
LVLDIFFEVLNYETIEQKKAYEIAGLLGELLMTPVPFSCHGHGVAPYHPKAGCSLLSHEGPPPQRPFPKPCCLGKW

SEQ ID NO: 747411 - protein, 407 aa, Homo sapiens
LNSSAQERLIPLGHASKSAPMNGHCFAENGPSQKSSLPPLLIPPSENLGPHEEDQVVCGFKKLTVNGVCASTPPLTPIKNSPSLFPCAPLCERGSRPLPPLPISEALSLDDTDCEVEFLTSSDTDFLLEDSTLSDFKYDVPGRRSFRGCGQINYAYFDTPAVSAADLSYVSDQNGGVPDPNPPPPQTHRRLRRSHSGPAGSFNKPAIRISNCCIHRASPNSDEDKPEVPPRVPIPPRPVKPDYRRWSAEVTSSTYSDEDRPPKVPPREPLSPSNSRTPSPKSLPSYLNGVMPPTQSFAPDPKYVSSKALQRQNSEGSASKVPCILPIIENGKKVSSTHYYLLPERPPYLDKYEKFFREAEETNGGAQIQPLPADCGISSATEKPDSKTKMDLGGHVKRKHLSYVVSP

SEQ ID NO: 747412 - protein, 271 aa, Homo sapiens
TKGITGFLVFVSFFFGDGVSLCHPGWRSVVARSWLTTSSAPQVHTILPPQTHRRLRRSHSGPAGSFNKPAIRISNCCIHRASPNSDEDKPEVPPRVPIPPRPVKPDYRRWSAEVTSSTYSDEDRPPKVPPREPLSPSNSRTPSPKSLPSYLNGVMPPTQSFAPDPKYVSSKALQRQNSEGSASKVPCILPIIENGKKVSSTHYYLLPERPPYLDKYEKFFREAEETNGGAQIQPLPADCGISSATEKPDSKTKMDLGGHVKRKHLSYVVSP

SEQ ID NO: 747413 - protein, 360 aa, Homo sapiens [sequence omitted]

SEQ ID NO: 747414 - protein, 310 aa, Homo sapiens
  misc_feature (281)..(281): Xaa can be any naturally occurring amino acid
  misc_feature (285)..(286): Xaa can be any naturally occurring amino acid
  misc_feature (300)..(300): Xaa can be any naturally occurring amino acid
ETIFVRRGSRCFLGSGYARKDIGSNRGVPQGSWELEEPRTPPSSGFELLCPWVKRPCSACELLPGRAAMALRNVPFRSEVLGWDPDSLADYFKKLNYKDCEKAVKKYHIDGARFLNLTENDIQKFPKLRVPILSKLSQEINKNEERRSIFTRKPQVPRFPEETESHEEDNGGWSSFEEDDYESPNDDQDGEDDGDYESPNEEEEAPVEDDADYEPPPSNDEEALQNSILPAKPFPNSNSMYIDRPPSGKTPQQPPVPPQRPMAALPPPPAGRNHSPLPHPXQPRXXSRSRTTNGKPPAPXKDRARNPPER

SEQ ID NO: 747415 - protein, 301 aa, Homo sapiens
  misc_feature (8)..(8): Xaa can be any naturally occurring amino acid
  misc_feature (17)..(17): Xaa can be any naturally occurring amino acid
  misc_feature (272)..(272): Xaa can be any naturally occurring amino acid
  misc_feature (276)..(277): Xaa can be any naturally occurring amino acid
  misc_feature (291)..(291): Xaa can be any naturally occurring amino acid
ALLRAEHXNLETQRLWXVKLKRVRRSEDEATPPSSGFELLCPWVKRPCSACELLPGRAAMALRNVPFRSEVLGWDPDSLADYFKKLNYKDCEKAVKKYHIDGARFLNLTENDIQKFPKLRVPILSKLSQEINKNEERRSIFTRKPQVPRFPEETESHEEDNGGWSSFEEDDYESPNDDQDGEDDGDYESPNEEEEAPVEDDADYEPPPSNDEEALQNSILPAKPFPNSNSMYIDRPPSGKTPQQPPVPPQRPMAALPPPPAGRNHSPLPHPXQPRXXSRSRTTNGKPPAPXKDRARNPPER

SEQ ID NO: 747416 - protein, 363 aa, Homo sapiens
VLSTTVNVDGHVLAVSDNMFVHNNSKHGRRARRLDPSEATPCIKAISPSEGWTTGGAMVIIIGDNFFDGLQVVFGTMLVWSELITPHAIRVQTPPRHIPGVVEVTLSYKSKQFCKGAPGRFIYTALNEPTIDYGFQRLQKVIPRHPGDPERLAKEMLLKRAADLVEALYGTPHNNQDIILKRAADIAEALYSVPRNPSQLPALSSSPAHSGMMGINSYGSQLGVSISESTQGNNQGYIRNTSSISPRGYSSSSTPQQSNYSTSSNSMNGYSNVPMANLGVPGSPGFLNGSPTGSPYGIMSLSPTVGSSSTSSILPFSSSVFPAVKQKSAFAPVIRPQGSPSPACSSGNGNGFRAMTGLVVPPM

SEQ ID NO: 747417 - protein, 135 aa, Homo sapiens
VLSTTVNVDGHVLAVSDNMFVHNNSKHGRRARRLDPSEGRAACAQHSRHMKFSTNFLVRTSNLCLGVRAEKVHRTMWVFFFLNEVVNTDSSLLHCKAHTSTSPCQVLMPPTLFHPVLCFPFCETGISGKHRPMTS

SEQ ID NO: 747418 - protein, 80 aa, Homo sapiens
HIEVSLLGRTGSHDYEQKSHNRLLASWGKTEARSVTQSKSKSLKTREADCVGLGLRMKPCNPPGGRWCKSQSPKAKDQEV

SEQ ID NO: 747419 - protein, 424 aa, Homo sapiens
MASMPPTPEAQGPILFEDLAVYFSQEECVTLHPAQRSLSKDGTKESLEDAALMGEEGKPEINQQLSLESMELDELALEKYPIAAPLVPYPEKSSEDGVGNPEAKILSGTPTYKRRVISLLVTIENHTPLVELSEYLGTNTLSEILDSPWEGAKNVYKCPECDQNFSDHSYLVLHQKIHSGEKKHKCGDCGKIFNHRANLRTHRRIHTGEKPYKCAKCSASFRQHSHLSRHMNSHVKEKPYTCSICGRGFMWLPGLAQHQKSHSAENTYESTNCDKHFNEKPNLALPEETFVSGPQYQHTKCMKSFRQSLYPALSEKSHDEDSERCSDDGDNFFSFSKFKPLQCPDCDMTFPCFSELISHQNIHTEERPHKCKTCEESFALDSELACHQKSHMLAEPFKCTVCGKTFKSNLHLITHKRTHIKNTT

SEQ ID NO: 747420 - protein, 435 aa, Homo sapiens
MGDWSFLGRLLENAQEHSTVIGKVWLTVLFIFRILVLGAAAEDVWGDEQSDFTCNTQQPGCENVCYDRAFPISHIRFWALQIIFVSTPTLIYLGHVLHIVRMEEKKKEREEEEQLKRESPSPKEPPQDNPSSRDDRGRVRMAGALLRTYVFNIIFKTLFEVGFIAGQYFLYGFELKPLYRCDRWPCPNTVDCFISRPTEKTIFIIFMLAVACASLLLNMLEIYHLGWKKLKQGVTSRLGPDASEAPLGTADPPPLPPSSRPPAVAIGFPPYYAHTAAPLGQARAVGYPGAPPPAADFKLLALTEARGKGQSAKLYNGHHHLLMTEQNWANQAAERQPPALKAYPAASTPAAPSPVGSSSPPLAHEAEAGAAPLLLDGSGSSLEGSALAGTPEEEEQAVTTAAQMHQPPLPLGDPGRASKASRASSGRARPEDLAI

SEQ ID NO: 747421 - protein, 321 aa, Homo sapiens
MSLQKLMEPEAGTNRTAVAEFILLGLVQTEEMQPVVFVLLLFAYLVTIGGNLSILAAVLVEPKLHAPMYFFLGNLSVLDVGCITVTVPAMLGRLLSHKSTISYDACLSQLFFFHLLAGMDCFLLTAMAYDRLLAICQPLTYSTRMSQTVQRMLVAASWACAFTNALTHTVAMSTLNFCGPNEVNHFYCDLPQLFQLSCSSTQLNELLLFVAAAFMAVAPLVFISVSYAHVVAAVLQIRSAEGRKKAFSTCGSHLTVVGIFYGTGVFSYMRLGSVESSDKDKGVGVFMTVINPMLNPLIYSLRNTDVQGALCQLLVGERSLT

SEQ ID NO: 747422 - protein, 129 aa, Homo sapiens
LKLLNKLGSLFSKEIMFSVRPPKKSWKKIFNLSGGEKTLSSLALVFALHHYKPTPLYFMDEIDAALDFKNVSIVAFYIYEQTKNAQFIIISLRNNMFEISDRLIGIYKTYNITKSVAVNPKEIASKGLC

SEQ ID NO: 747423 - protein, 1288 aa, Homo sapiens
MPRKGTQPSTARRREEGPPPPSPDGASSDAEPEPPSGRTESPATAAETASEELDNRSLEEILNSIPPPPPPAMTNEAGAPRLMITHIVNQNFKSYAGEKILGPFHKRFSCIIGPNGSGKSNVIDSMLFVFGYRAQKIRSKKLSVLIHNSDEHKDIQSCTVEVHFQKIIDKEGDDYEVIPNSNFYVSRTACRDNTSVYHISGKKKTFKDVGNLLRSHGIDLDHNRFLILQGEVEQIAMMKPKGQTEHDEGMLEYLEDIIGCGRLNEPIKVLCRRVEILNEHRGEKLNRVKMVEKEKDALEGEKNIAIEFLTLENEIFRKKNHVCQYYIYELQKRIAEMETQKEKIHEDTKEINEKSNILSNEMKAKNKDVKDTEKKLNKITKFIEENKEKFTQLDLEDVQVREKLKHATSKAKKLEKQLQKDKEKVEEFKSIPAKSNNIINETTTRNNALEKEKEKEEKKLKEVMDSLKQETQGLQKEKESREKELMGFSKSVNEARSKMDVAQSELDIYLSRHNTAVSQLTKAKEALIAASETLKERKAAIRDIEGKLPQTEQELKEKEKELQKLTQEETNFKSLVHDLFQKVEEAKSSLAMNRSRGKVLDAIIQEKKSGRIPGIYGRLGDLGAIDEKYDVAISSCCHALDYIVVDSIDIAQECVNFLKRQNIGVATFIGLDKMAVWAKKMTEIQTPENTPRLFDLVKVKDEKIRQAFYFALRDTLVADNLDQATRVAYQKDRRWRVVTLQGQIIEQSGTMTGGGSKVMKGRMGSSLVIEISEEEVNKMESQLQNDSKKAMQIQEQKVQLEERVVKLRHSEREMRNTLEKFTASIQRLIEQEEYLNVQVKELEANVLATAPDKKKQKLLEENVSAFKTEYDAVAEKAGKVEAEVKRLHNTIVEINNHKLKAQQDKLDKINKQLDECASAITKAQVAIKTADRNLQKAQDSVLRTEKEIKDTEKEVDDLTAELKSLEDKAAEVVKNTNAAEESLPEIQKEHRNLLQELKVIQENEHALQKDALSIKLKLEQIDGHIAEHNSKIKYWHKEISKISLHPIEDNPIEEISVLSPEDLEAIKNPDSITNQIALLEARCHEMKPNLGAIAEYKKKEELYLQRVAELDKITYERDSFRQAYEDLRKQRLNEFMAGFYIITNKLKENYQMLTLGGDAELELVDSLDPFSEGIMFSVRPPKKSWKKIFNLSGGEKTLSSLALVFALHHYKPTPLYFMDEIDAALDFKNVSIVAFYIYEQTKNAQFIIISLRNNMFEISDRLIGIYKTYNITKSVAVNPKEIASKGLC

SEQ ID NO: 747424 - protein, 1288 aa, Homo sapiens; identical to SEQ ID NO: 747423

SEQ ID NO: 747425 - protein, 1288 aa, Homo sapiens; identical to SEQ ID NO: 747423

SEQ ID NO: 747426 - protein, 1288 aa, Homo sapiens; identical to SEQ ID NO: 747423

SEQ ID NO: 747427 - protein, 1216 aa, Homo sapiens
MTNEAGAPRLMITHIVNQNFKSYAGEKILGPFHKRFSCIIGPNGSGKSNVIDSMLFVFGYRAQKIRSKKLSVLIHNSDEHKDIQSCTVEVHFQKIIDKEGDDYEVIPNSNFYVSRTACRDNTSVYHISGKKKTFKDVGNLLRSHGIDLDHNRFLILQGEVEQIAMMKPKGQTEHDEGMLEYLEDIIGCGRLNEPIKVLCRRVEILNEHRGEKLNRVKMVEKEKDALEGEKNIAIEFLTLENEIFRKKNHVCQYYIYELQKRIAEMETQKEKIHEDTKEINEKSNILSNEMKAKNKDVKDTEKKLNKITKFIEENKEKFTQLDLEDVQVREKLKHATSKAKKLEKQLQKDKEKVEEFKSIPAKSNNIINETTTRNNALEKEKEKEEKKLKEVMDSLKQETQGLQKEKESREKELMGFSKSVNEARSKMDVAQSELDIYLSRHNTAVSQLTKAKEALIAASETLKERKAAIRDIEGKLPQTEQELKEKEKELQKLTQEETNFKSLVHDLFQKVEEAKSSLAMNRSRGKVLDAIIQEKKSGRIPGIYGRLGDLGAIDEKYDVAISSCCHALDYIVVDSIDIAQECVNFLKRQNIGVATFIGLDKMAVWAKKMTEIQTPENTPRLFDLVKVKDEKIRQAFYFALRDTLVADNLDQATRVAYQKDRRWRVVTLQGQIIEQSGTMTGGGSKVMKGRMGSSLVIEISEEEVNKMESQLQNDSKKAMQIQEQKVQLEERVVKLRHSEREMRNTLEKFTASIQRLIEQEEYLNVQVKELEANVLATAPDKKKQKLLEENVSAFKTEYDAVAEKAGKVEAEVKRLHNTIVEINNHKLKAQQDKLDKINKQLDECASAITKAQVAIKTADRNLQKAQDSVLRTEKEIKDTEKEVDDLTAELKSLEDKAAEVVKNTNAAEESLPEIQKEHRNLLQELKVIQENEHALQKDALSIKLKLEQIDGHIAEHNSKIKYWHKEISKISLHPIEDNPIEEISVLSPEDLEAIKNPDSITNQIALLEARCHEMKPNLGAIAEYKKKEELYLQRVAELDKITYERDSFRQAYEDLRKQRLNEFMAGFYIITNKLKENYQMLTLGGDAELELVDSLDPFSEGIMFSVRPPKKSWKKIFNLSGGEKTLSSLALVFALHHYKPTPLYFMDEIDAALDFKNVSIVAFYIYEQTKNAQFIIISLRNNMFEISDRLIGIYKTYNITKSVAVNPKEIASKGLC

SEQ ID NO: 747428 - protein, 1288 aa, Homo sapiens; identical to SEQ ID NO: 747423

SEQ ID NO: 747429 - protein, 1216 aa, Homo sapiens; identical to SEQ ID NO: 747427

SEQ ID NO: 747430 - protein, 952 aa, Homo sapiens
METQKEKIHEDTKEINEKSNILSNEMKAKNKDVKDTEKKLNKITKFIEENKEKFTQLDLEDVQVREKLKHATSKAKKLEKQLQKDKEKVEEFKSIPAKSNNIINETTTRNNALEKEKEKEEKKLKEVMDSLKQETQGLQKEKESREKELMGFSKSVNEARSKMDVAQSELDIYLSRHNTAVSQLTKAKEALIAASETLKERKAAIRDIEGKLPQTEQELKEKEKELQKLTQEETNFKSLVHDLFQKVEEAKSSLAMNRSRGKVLDAIIQEKKSGRIPGIYGRLGDLGAIDEKYDVAISSCCHALDYIVVDSIDIAQECVNFLKRQNIGVATFIGLDKMAVWAKKMTEIQTPENTPRLFDLVKVKDEKIRQAFYFALRDTLVADNLDQATRVAYQKDRRWRVVTLQGQIIEQSGTMTGGGSKVMKGRMGSSLVIEISEEEVNKMESQLQNDSKKAMQIQEQKVQLEERVVKLRHSEREMRNTLEKFTASIQRLIEQEEYLNVQVKELEANVLATAPDKKKQKLLEENVSAFKTEYDAVAEKAGKVEAEVKRLHNTIVEINNHKLKAQQDKLDKINKQLDECASAITKAQVAIKTADRNLQKAQDSVLRTEKEIKDTEKEVDDLTAELKSLEDKAAEVVKNTNAAEESLPEIQKEHRNLLQELKVIQENEHALQKDALSIKLKLEQIDGHIAEHNSKIKYWHKEISKISLHPIEDNPIEEISVLSPEDLEAIKNPDSITNQIALLEARCHEMKPNLGAIAEYKKKEELYLQRVAELDKITYERDSFRQAYEDLRKQRLNEFMAGFYIITNKLKENYQMLTLGGDAELELVDSLDPFSEGIMFSVRPPKKSWKKIFNLSGGEKTLSSLALVFALHHYKPTPLYFMDEIDAALDFKNVSIVAFYIYEQTKNAQFIIISLRNNMFEISDRLIGIYKTYNITKSVAVNPKEIASKGLC

SEQ ID NO: 747431 - protein, 1029 aa, Homo sapiens
MPRKGTQPSTARRREEGPPPPSPDGASSDAEPEPPSGRTESPATAAETASEELDNRSLEEILNSIPPPPPPAMTNEAGAPRLMITHIVNQNFKSYAGEKILGPFHKRFSCIIGPNGSGKSNVIDSMLFVFGYRAQKIRSKKLSVLIHNSDEHKDIQSCTVEVHFQKIIDKEGDDYEVIPNSNFYVSRTACRDNTSVYHISGKKKTFKDVGNLLRSHGIDLDHNRFLILQGEVEQIAMMKPKGQTEHDEGMLEYLEDIIGCGRLNEPIKVLCRRVEILNEHRGEKLNRVKMVEKEKDALEGEKNIAIEFLTLENEIFRKKNHVCQYYIYELQKRIAEMETQKEKIHEDTKEINEKSNILSNEMKAKNKDVKDTEKKLNKITKFIEENKEKFTQLDLEDVQVREKLKHATSKAKKLEKQLQKDKEKVEEFKSIPAKSNNIINETTTRNNALEKEKEKEEKKLKEVMDSLKQETQGLQKEKESREKELMGFSKSVNEARSKMDVAQSELDIYLSRHNTAVSQLTKAKEALIAASETLKERKAAIRDIEGKLPQTEQELKEKEKELQKLTQEETNFKSLVHDLFQKVEEAKSSLAMNRSRGKVLDAIIQEKKSGRIPGIYGRLGDLGAIDEKYDVAISSCCHALDYIVVDSIDIAQECVNFLKRQNIGVATFIGLDKMAVWAKKMTEIQTPENTPRLFDLVKVKDEKIRQAFYFALRDTLVADNLDQATRVAYQKDRRWRVVTLQGQIIEQSGTMTGGGSKVMKGRMGSSLVIEISEEEVNKMESQLQNDSKKAMQIQEQKVQLEERVVKLRHSEREMRNTLEKFTASIQRLIEQEEYLNVQVKELEANVLATAPDKKKQKLLEENVSAFKTEYDAVAEKAGKVEAEVKRLHNTIVEINNHKLKAQQDKLDKINKQLDECASAITKAQVAIKTADRNLQKAQDSVLRTEKEIKDTEKEVDDLTAELKSLEDKAAEVVKNTNAAEESLPEIQKEHRNLLQELKVIQENEHALQKDALSIKLKLKSNCTFGSPVS

SEQ ID NO: 747432 - protein, 1288 aa, Homo sapiens; identical to SEQ ID NO: 747423

SEQ ID NO: 747433 - protein, 1288 aa, Homo sapiens; identical to SEQ ID NO: 747423

SEQ ID NO: 747434 - protein, 1288 aa, Homo sapiens; identical to SEQ ID NO: 747423

SEQ ID NO: 747435 - protein, 1052 aa, Homo sapiens [sequence omitted]

SEQ ID NO: 747436 - protein, 1163 aa, Homo sapiens
MLFVFGYRAQKIRSKKLSVLIHNSDEHKDIQSCTVEVHFQKIIDKEGDDYEVIPNSNFYVSRTACRDNTSVYHISGKKKTFKDVGNLLRSHGIDLDHNRFLILQGEVEQIAMMKPKGQTEHDEGMLEYLEDIIGCGRLNEPIKVLCRRVEILNEHRGEKLNRVKMVEKEKDALEGEKNIAIEFLTLENEIFRKKNHVCQYYIYELQKRIAEMETQKEKIHEDTKEINEKSNILSNEMKAKNKDVKDTEKKLNKITKFIEENKEKFTQLDLEDVQVREKLKHATSKAKKLEKQLQKDKEKVEEFKSIPAKSNNIINETTTRNNALEKEKEKEEKKLKEVMDSLKQETQGLQKEKESREKELMGFSKSVNEARSKMDVAQSELDIYLSRHNTAVSQLTKAKEALIAASETLKERKAAIRDIEGKLPQTEQELKEKEKELQKLTQEETNFKSLVHDLFQKVEEAKSSLAMNRSRGKVLDAIIQEKKSGRIPGIYGRLGDLGAIDEKYDVAISSCCHALDYIVVDSIDIAQECVNFLKRQNIGVATFIGLDKMAVWAKKMTEIQTPENTPRLFDLVKVKDEKIRQAFYFALRDTLVADNLDQATRVAYQKDRRWRVVTLQGQIIEQSGTMTGGGSKVMKGRMGSSLVIEISEEEVNKMESQLQNDSKKAMQIQEQKVQLEERVVKLRHSEREMRNTLEKFTASIQRLIEQEEYLNVQVKELEANVLATAPDKKKQKLLEENVSAFKTEYDAVAEKAGKVEAEVKRLHNTIVEINNHKLKAQQDKLDKINKQLDECASAITKAQVAIKTADRNLQKAQDSVLRTEKEIKDTEKEVDDLTAELKSLEDKAAEVVKNTNAAEESLPEIQKEHRNLLQELKVIQENEHALQKDALSIKLKLEQIDGHIAEHNSKIKYWHKEISKISLHPIEDNPIEEISVLSPEDLEAIKNPDSITNQIALLEARCHEMKPNLGAIAEYKKKEELYLQRVAELDKITYERDSFRQAYEDLRKQRLNEFMAGFYIITNKLKENYQMLTLGGDAELELVDSLDPFSEGIMFSVRPPKKSWKKIFNLSGGEKTLSSLALVFALHHYKPTPLYFMDEIDAALDFKNVSIVAFYIYEQTKNAQFIIISLRNNMFEISDRLIGIYKTYNITKSVAVNPKEIASKGLC

SEQ ID NO: 747437 - protein, 1006 aa, Homo sapiens
MRLNRVKMVEKEKDALEGEKNIAIEFLTLENEIFRKKNHVCQYYIYELQKRIAEMETQKEKIHEDTKEINEKSNILSNEMKAKNKDVKDTEKKLNKITKFIEENKEKFTQLDLEDVQVREKLKHATSKAKKLEKQLQKDKEKVEEFKSIPAKSNNIINETTTRNNALEKEKEKEEKKLKEVMDSLKQETQGLQKEKESREKELMGFSKSVNEARSKMDVAQSELDIYLSRHNTAVSQLTKAKEALIAASETLKERKAAIRDIEGKLPQTEQELKEKEKELQKLTQEETNFKSLVHDLFQKVEEAKSSLAMNRSRGKVLDAIIQEKKSGRIPGIYGRLGDLGAIDEKYDVAISSCCHALDYIVVDSIDIAQECVNFLKRQNIGVATFIGLDKMAVWAKKMTEIQTPENTPRLFDLVKVKDEKIRQAFYFALRDTLVADNLDQATRVAYQKDRRWRVVTLQGQIIEQSGTMTGGGSKVMKGRMGSSLVIEISEEEVNKMESQLQNDSKKAMQIQEQKVQLEERVVKLRHSEREMRNTLEKFTASIQRLIEQEEYLNVQVKELEANVLATAPDKKKQKLLEENVSAFKTEYDAVAEKAGKVEAEVKRLHNTIVEINNHKLKAQQDKLDKINKQLDECASAITKAQVAIKTADRNLQKAQDSVLRTEKEIKDTEKEVDDLTAELKSLEDKAAEVVKNTNAAEESLPEIQKEHRNLLQELKVIQENEHALQKDALSIKLKLEQIDGHIAEHNSKIKYWHKEISKISLHPIEDNPIEEISVLSPEDLEAIKNPDSITNQIALLEARCHEMKPNLGAIAEYKKKEELYLQRVAELDKITYERDSFRQAYEDLRKQRLNEFMAGFYIITNKLKENYQMLTLGGDAELELVDSLDPFSEGIMFSVRPPKKSWKKIFNLSGGEKTLSSLALVFALHHYKPTPLYFMDEIDAALDFKNVSIVAFYIYEQTKNAQFIIISLRNNMFEISDRLIGIYKTYNITKSVAVNPKEIASKGLC

SEQ ID NO: 747438 - protein, 1052 aa, Homo sapiens [sequence omitted]

SEQ ID NO: 747439 - protein, 1090 aa, Homo sapiens
VKICVKSYDRDQMDKLAFFEESNTTELLASLGEVEQIAMMKPKGQTEHDEGMLEYLEDIIGCGRLNEPIKVLCRRVEILNEHRGEKLNRVKMVEKEKDALEGEKNIAIEFLTLENEIFRKKNHVCQYYIYELQKRIAEMETQKEKIHEDTKEINEKSNILSNEMKAKNKDVKDTEKKLNKITKFIEENKEKFTQLDLEDVQVREKLKHATSKAKKLEKQLQKDKEKVEEFKSIPAKSNNIINETTTRNNALEKEKEKEEKKLKEVMDSLKQETQGLQKEKESREKELMGFSKSVNEARSKMDVAQSELDIYLSRHNTAVSQLTKAKEALIAASETLKERKAAIRDIEGKLPQTEQELKEKEKELQKLTQEETNFKSLVHDLFQKVEEAKSSLAMNRSRGKVLDAIIQEKKSGRIPGIYGRLGDLGAIDEKYDVAISSCCHALDYIVVDSIDIAQECVNFLKRQNIGVATFIGLDKMAVWAKKMTEIQTPENTPRLFDLVKVKDEKIRQAFYFALRDTLVADNLDQATRVAYQKDRRWRVVTLQGQIIEQSGTMTGGGSKVMKGRMGSSLVIEISEEEVNKMESQLQNDSKKAMQIQEQKVQLEERVVKLRHSEREMRNTLEKFTASIQRLIEQEEYLNVQVKELEANVLATAPDKKKQKLLEENVSAFKTEYDAVAEKAGKVEAEVKRLHNTIVEINNHKLKAQQDKLDKINKQLDECASAITKAQVAIKTADRNLQKAQDSVLRTEKEIKDTEKEVDDLTAELKSLEDKAAEVVKNTNAAEESLPEIQKEHRNLLQELKVIQENEHALQKDALSIKLKLEQIDGHIAEHNSKIKYWHKEISKISLHPIEDNPIEEISVLSPEDLEAIKNPDSITNQIALLEARCHEMKPNLGAIAEYKKKEELYLQRVAELDKITYERDSFRQAYEDLRKQRLNEFMAGFYIITNKLKENYQMLTLGGDAELELVDSLDPFSEGIMFSVRPPKKSWKKIFNLSGGEKTLSSLALVFALHHYKPTPLYFMDEIDAALDFKNVSIVAFYIYEQTKNAQFIIISLRNNMFEISDRLIGIYKTYNITKSVAVNPKEIASKGLC

SEQ ID NO: 747440 - protein, 1095 aa, Homo sapiens
MGFSKSVNEARSKMDVAQSELDIYLSRHNTAVSQLTKAKEALIAASETLKERKAAIRDIEGKLPQTEQELKEKEKELQKLTQEETNFKSLVHDLFQKVEEAKSSLAMNRSRGKVLDAIIQEKKSGRIPGIYGRCYELQKRIAEMETQKEKIHEDTKEINEKSNILSNEMKAKNKDVKDTEKKLNKITKFIEENKEKFTQLDLEDVQVREKLKHATSKAKKLEKQLQKDKEKVEEFKSIPAKSNNIINETTTRNNALEKEKEKEEKKLKEVMDSLKQETQGLQKEKESREKELMGFSKSVNEARSKMDVAQSELDIYLSRHNTAVSQLTKAKEALIAASETLKERKAAIRDIEGKLPQTEQELKEKEKELQKLTQEETNFKSLVHDLFQKVEEAKSSLAMNRSRGKVLDAIIQEKKSGRIPGIYGRLGDLGAIDEKYDVAISSCCHALDYIVVDSIDIAQECVNFLKRQNIGVATFIGLDKMAVWAKKMTEIQTPENTPRLFDLVKVKDEKIRQAFYFALRDTLVADNLDQATRVAYQKDRRWRVVTLQGQIIEQSGTMTGGGSKVMKGRMGSSLVIEISEEEVNKMESQLQNDSKKAMQIQEQKVQLEERVVKLRHSEREMRNTLEKFTASIQRLIEQEEYLNVQVKELEANVLATAPDKKKQKLLEENVSAFKTEYDAVAEKAGKVEAEVKRLHNTIVEINNHKLKAQQDKLDKINKQLDECASAITKAQVAIKTADRNLQKAQDSVLRTEKEIKDTEKEVDDLTAELKSLEDKAAEVVKNTNAAEESLPEIQKEHRNLLQELKVIQENEHALQKDALSIKLKLEQIDGHIAEHNSKIKYWHKEISKISLHPIEDNPIEEISVLSPEDLEAIKNPDSITNQIALLEARCHEMKPNLGAIAEYKKKEELYLQRVAELDKITYERDSFRQAYEDLRKQRLNEFMAGFYIITNKLKENYQMLTLGGDAELELVDSLDPFSEGIMFSVRPPKKSWKKIFNLSGGEKTLSSLALVFALHHYKPTPLYFMDEIDAALDFKNVSIVAFYIYEQTKNAQFIIISLRNNMFEISDRLIGIYKTYNITKSVAVNPKEIASKGLC

SEQ ID NO: 747441 - protein, 991 aa, Homo sapiens [sequence omitted]

SEQ ID NO: 747442 - protein, 940 aa, Homo sapiens
GTIQRRLAWPLRKDDSKFVKRSIFLKKLNKITKFIEENKEKFTQLDLEDVQVREKLKHATSKAKKLEKQLQKDKEKVEEFKSIPAKSNNIINETTTRNNALEKEKEKEEKKLKEVMDSLKQETQGLQKEKESREKELMGFSKSVNEARSKMDVAQSELDIYLSRHNTAVSQLTKAKEALIAASETLKERKAAIRDIEGKLPQTEQELKEKEKELQKLTQEETNFKSLVHDLFQKVEEAKSSLAMNRSRGKVLDAIIQEKKSGRIPGIYGRLGDLGAIDEKYDVAISSCCHALDYIVVDSIDIAQECVNFLKRQNIGVATFIGLDKMAVWAKKMTEIQTPENTPRLFDLVKVKDEKIRQAFYFALRDTLVADNLDQATRVAYQKDRRWRVVTLQGQIIEQSGTMTGGGSKVMKGRMGSSLVIEISEEEVNKMESQLQNDSKKAMQIQEQKVQLEERVVKLRHSEREMRNTLEKFTASIQRLIEQEEYLNVQVKELEANVLATAPDKKKQKLLEENVSAFKTEYDAVAEKAGKVEAEVKRLHNTIVEINNHKLKAQQDKLDKINKQLDECASAITKAQVAIKTADRNLQKAQDSVLRTEKEIKDTEKEVDDLTAELKSLEDKAAEVVKNTNAAEESLPEIQKEHRNLLQELKVIQENEHALQKDALSIKLKLEQIDGHIAEHNSKIKYWHKEISKISLHPIEDNPIEEISVLSPEDLEAIKNPDSITNQIALLEARCHEMKPNLGAIAEYKKKEELYLQRVAELDKITYERDSFRQAYEDLRKQRLNEFMAGFYIITNKLKENYQMLTLGGDAELELVDSLDPFSEGIMFSVRPPKKSWKKIFNLSGGEKTLSSLALVFALHHYKPTPLYFMDEIDAALDFKNVSIVAFYIYEQTKNAQFIIISLRNNMFEISDRLIGIYKTYNITKSVAVNPKEIASKGLC

SEQ ID NO: 747443 - protein, 825 aa, Homo sapiens [sequence omitted]

SEQ ID NO: 747444 - protein, 875 aa, Homo sapiens
MGFSKSVNEARVEEFKSIPAKSNNIINETTTRNNALEKEKEKEEKKLKEVMDSLKQETQGLQKEKESREKELMGFSKSVNEARSKMDVAQSELDIYLSRHNTAVSQLTKAKEALIAASETLKERKAAIRDIEGKLPQTEQELKEKEKELQKLTQEETNFKSLVHDLFQKVEEAKSSLAMNRSRGKVLDAIIQEKKSGRIPGIYGRLGDLGAIDEKYDVAISSCCHALDYIVVDSIDIAQECVNFLKRQNIGVATFIGLDKMAVWAKKMTEIQTPENTPRLFDLVKVKDEKIRQAFYFALRDTLVADNLDQATRVAYQKDRRWRVVTLQGQIIEQSGTMTGGGSKVMKGRMGSSLVIEISEEEVNKMESQLQNDSKKAMQIQEQKVQLEERVVKLRHSEREMRNTLEKFTASIQRLIEQEEYLNVQVKELEANVLATAPDKKKQKLLEENVSAFKTEYDAVAEKAGKVEAEVKRLHNTIVEINNHKLKAQQDKLDKINKQLDECASAITKAQVAIKTADRNLQKAQDSVLRTEKEIKDTEKEVDDLTAELKSLEDKAAEVVKNTNAAEESLPEIQKEHRNLLQELKVIQENEHALQKDALSIKLKLEQIDGHIAEHNSKIKYWHKEISKISLHPIEDNPIEEISVLSPEDLEAIKNPDSITNQIALLEARCHEMKPNLGAIAEYKKKEELYLQRVAELDKITYERDSFRQAYEDLRKQRLNEFMAGFYIITNKLKENYQMLTLGGDAELELVDSLDPFSEGIMFSVRPPKKSWKKIFNLSGGEKTLSSLALVFALHHYKPTPLYFMDEIDAALDFKNVSIVAFYIYEQTKNAQFIIISLRNNMFEISDRLIGIYKTYNITKSVAVNPKEIASKGLC

SEQ ID NO: 747445 - protein, 879 aa, Homo sapiens
YRGSERKESREKELMGFSKSVNEARSNNIINETTTRNNALEKEKEKEEKKLKEVMDSLKQETQGLQKEKESREKELMGFSKSVNEARSKMDVAQSELDIYLSRHNTAVSQLTKAKEALIAASETLKERKAAIRDIEGKLPQTEQELKEKEKELQKLTQEETNFKSLVHDLFQKVEEAKSSLAMNRSRGKVLDAIIQEKKSGRIPGIYGRLGDLGAIDEKYDVAISSCCHALDYIVVDSIDIAQECVNFLKRQNIGVATFIGLDKMAVWAKKMTEIQTPENTPRLFDLVKVKDEKIRQAFYFALRDTLVADNLDQATRVAYQKDRRWRVVTLQGQIIEQSGTMTGGGSKVMKGRMGSSLVIEISEEEVNKMESQLQNDSKKAMQIQEQKVQLEERVVKLRHSEREMRNTLEKFTASIQRLIEQEEYLNVQVKELEANVLATAPDKKKQKLLEENVSAFKTEYDAVAEKAGKVEAEVKRLHNTIVEINNHKLKAQQDKLDKINKQLDECASAITKAQVAIKTADRNLQKAQDSVLRTEKEIKDTEKEVDDLTAELKSLEDKAAEVVKNTNAAEESLPEIQKEHRNLLQELKVIQENEHALQKDALSIKLKLEQIDGHIAEHNSKIKYWHKEISKISLHPIEDNPIEEISVLSPEDLEAIKNPDSITNQIALLEARCHEMKPNLGAIAEYKKKEELYLQRVAELDKITYERDSFRQAYEDLRKQRLNEFMAGFYIITNKLKENYQMLTLGGDAELELVDSLDPFSEGIMFSVRPPKKSWKKIFNLSGGEKTLSSLALVFALHHYKPTPLYFMDEIDAALDFKNVSIVAFYIYEQTKNAQFIIISLRNNMFEISDRLIGIYKTYNITKSVAVNPKEIASKGLC

SEQ ID NO: 747446 - protein, 621 aa, Homo sapiens
MPRKGTQPSTARRREEGPPPPSPDGASSDAEPEPPSGRTESPATAAETASEELDNRSLEEILNSIPPPPPPAMTNEAGAPRLMITHIVNQNFKSYAGEKILGPFHKRFSCIIGPNGSGKSNVIDSMLFVFGYRAQKIRSKKLSVLIHNSDEHKDIQSCTVEVHFQKIIDKEGDDYEVIPNSNFYVSRTACRDNTSVYHISGKKKTFKDVGNLLRSHGIDLDHNRFLILQGEVEQIAMMKPKGQTEHDEGMLEYLEDIIGCGRLNEPIKVLCRRVEILNEHRGEKLNRVKMVEKEKDALEGEKNIAIEFLTLENEIFRKKNHVCQYYIYELQKRIAEMETQKEKIHEDTKEINEKSNILSNEMKAKNKDVKDTEKKLNKITKFIEENKEKFTQLDLEDVQVREKLKHATSKAKKLEKQLQKDKEKVEEFKSIPAKSNNIINETTTRNNALEKEKEKEEKKLKEVMDSLKQETQGLQKEKESREKELMGFSKSVNEARSKMDVAQSELDIYLSRHNTAVSQLTKAKEALIAASETLKERKAAIRDIEGKLPQTEQELKEKEKELQKLTQEETNFKSLVHDLFQKVEEAKSSLAMNRSRGKVLDAIIQEKKSGRIPGIYGRLVK

SEQ ID NO: 747447 - protein, 568 aa, Homo sapiens
MPRKGTQPSTARRREEGPPPPSPDGASSDAEPEPPSGRTESPATAAETASEELDNRSLEEILNSIPPPPPPAMTNEAGAPRLMITHIVNQNFKSYAGEKILGPFHKRFSCIIGPNGSGKSNVIDSMLFVFGYRAQKIRSKKLSVLIHNSDEHKDIQSCTVEVHFQKIIDKEGDDYEVIPNSNFYVSRTACRDNTSVYHISGKKKTFKDVGNLLRSHGIDLDHNRFLILQGEVEQIAMMKPKGQTEHDEGMLEYLEDIIGCGRLNEPIKVLCRRVEILNEHRGEKLNRVKMVEKEKDALEGEKNIAIEFLTLENEIFRKKNHVCQYYIYELQKRIAEMETQKEKIHEDTKEINEKSNILSNEMKAKNKDVKDTEKKLNKITKFIEENKEKFTQLDLEDVQVREKLKHATSKAKKLEKQLQKDKEKVEEFKSIPAKSNNIINETTTRNNALEKEKEKEEKKLKEVMDSLKQETQGLQKEKESREKELMGFSKSVNEARSKMDVAQSELDIYLSRHNTAVSQLTKAKEALIAASETLKERKAAIRDIEGKLPQTEQELKEKEKQKIKGSYG

SEQ ID NO: 747448 - protein, 497 aa, Homo sapiens
MPRKGTQPSTARRREEGPPPPSPDGASSDAEPEPPSGRTESPATAAETASEELDNRSLEEILNSIPPPPPPAMTNEAGAPRLMITHIVNQNFKSYAGEKILGPFHKRFSCIIGPNGSGKSNVIDSMLFVFGYRAQKIRSKKLSVLIHNSDEHKDIQSCTVEVHFQKIIDKEGDDYEVIPNSNFYVSRTACRDNTSVYHISGKKKTFKDVGNLLRSHGIDLDHNRFLILQGEVEQIAMMKPKGQTEHDEGMLEYLEDIIGCGRLNEPIKVLCRRVEILNEHRGEKLNRVKMVEKEKDALEGEKNIAIEFLTLENEIFRKKNHVCQYYIYELQKRIAEMETQKEKIHEDTKEINEKSNILSNEMKAKNKDVKDTEKKLNKITKFIEENKEKFTQLDLEDVQVREKLKHATSKAKKLEKQLQKDKEKVEEFKSIPAKSNNIINETTTRNNALEKEKEKEEKKLKEVMDSLKQETQGLQKEKEVSFFFLSVFILVAFFFLT

SEQ ID NO: 747449 - protein, 575 aa, Homo sapiens
MPRKGTQPSTARRREEGPPPPSPDGASSDAEPEPPSGRTESPATAAETASEELDNRSLEEILNSIPPPPPPAMTNEAGAPRLMITHIVNQNFKSYAGEKILGPFHKRFSCIIGPNGSGKSNVIDSMLFVFGYRAQKIRSKKLSVLIHNSDEHKDIQSCTVEVHFQKIIDKEGDDYEVIPNSNFYVSRTACRDNTSVYHISGKKKTFKDVGNLLRSHGIDLDHNRFLILQGEVEQIAMMKPKGQTEHDEGMLEYLEDIIGCGRLNEPIKVLCRRVEILNEHRGEKLNRVKMVEKEKDALEGEKNIAIEFLTLENEIFRKKNHVCQYYIYELQKRIAEMETQKEKIHEDTKEINEKSNILSNEMKAKNKDVKDTEKKLNKITKFIEENKEKFTQLDLEDVQVREKLKHATSKAKKLEKQLQKDKEKVEEFKSIPAKSNNIINETTTRNNALEKEKEKEEKKKIFGGAWALRKRFCKPHMVGERGAQEGVGTQGKGGPKRERGQNTRRVGSLPSKKRRGETERLVTKLESDISGRAKNEGTTTKEGISRGRPISKNSPGRGESRQQQQELDTQHEQKH

SEQ ID NO: 747450 - protein, 458 aa, Homo sapiens
MPRKGTQPSTARRREEGPPPPSPDGASSDAEPEPPSGRTESPATAAETASEELDNRSLEEILNSIPPPPPPAMTNEAGAPRLMITHIVNQNFKSYAGEKILGPFHKRFSCIIGPNGSGKSNVIDSMLFVFGYRAQKIRSKKLSVLIHNSDEHKDIQSCTVEVHFQKIIDKEGDDYEVIPNSNFYVSRTACRDNTSVYHISGKKKTFKDVGNLLRSHGIDLDHNRFLILQGEVEQIAMMKPKGQTEHDEGMLEYLEDIIGCGRLNEPIKVLCRRVEILNEHRGEKLNRVKMVEKEKDALEGEKNIAIEFLTLENEIFRKKNHVCQYYIYELQKRIAEMETQKEKIHEDTKEINEKSNILSNEMKAKNKDVKDTEKKLNKITKFIEENKEKFTQLDLEDVQVREKLKHATSKAKKLEKQLQKDKEKLRFKLLPEYNSYEPTEKPSEERKGTIRSWCLRTG

SEQ ID NO: 747451 - protein, 374 aa, Homo sapiens [sequence omitted]

SEQ ID NO: 747452 - protein, 242 aa, Homo sapiens
MPRKGTQPSTARRREEGPPPPSPDGASSDAEPEPPSGRTESPATAAETASEELDNRSLEEILNSIPPPPPPAMTNEAGAPRLMITHIVNQNFKSYAGEKILGPFHKRFSCIIGPNGSGKSNVIDSMLFVFGYRAQKIRSKKLSVLIHNSDEHKDIQSCTVEVHFQKIIDKEGDDYEVIPNSNFYVSRTACRDNTSVYHISGKKKTFKDVGNLLRSHGIDLDHNRFLILQEQMLMNKADDKRL

SEQ ID NO: 747453 - protein, 204 aa, Homo sapiens
MPRKGTQPSTARRREEGPPPPSPDGASSDAEPEPPSGRTESPATAAETASEELDNRSLEEILNSIPPPPPPAMTNEAGAPRLMITHIVNQNFKSYAGEKILGPFHKRFSCIIGPNGSGKSNVIDSMLFVFGYRAQKIRSKKLSVLIHNSDEHKDIQSCTVEVHFQKIIDKEGDDYEVIPNSNFYVSRTACRDNTSVYHISGKRP

SEQ ID NO: 747454 - protein, 72 aa, Homo sapiens
SSQSTHARSREHAACTAGDVMLGSNSPGWPATDASACNHGNVSGGGHPREPTAMGSLLVTDGRVSTSQTESA

SEQ ID NO: 747455 - protein, 326 aa, Homo sapiens
MSCAEVMYHPQPYGASQYLPNPMAATTCPTAYYQPAPQPGQQKKLAVFSKMQDSLEVTLPSKQEEEDEEEEEEEKDQPAEMEYLNSRCVLFTYFQGDIGSVVDEHFSRALGQAITLHPESAISKSKMGLTPLWRDSSALSSQRNSFPTSFWTSSYQPPPAPCLGGVHPDFQVTGPPGTFSAADPSPWPGHNLHQTGPAPPPAVSESWPYPLTSQVSPSYSHMHDVYMRHHHPHAHMHHRHRHHHHHHHPPAGSALDPSYGPLLMPSVHAARIPAPQCDITKTEPTTVTSATSAWAGAFHGTVDIVPSVGFDTGLQHQDKSKESPWY

SEQ ID NO: 747456 - protein, 273 aa, Homo sapiens
MSCAEVMYHPQPYGASQYLPNPMAATTCPTAYYQPAPQPGQQGDIGSVVDEHFSRALGQAITLHPESAISKSKMGLTPLWRDSSALSSQRNSFPTSFWTSSYQPPPAPCLGGVHPDFQVTGPPGTFSAADPSPWPGHNLHQTGPAPPPAVSESWPYPLTSQVSPSYSHMHDVYMRHHHPHAHMHHRHRHHHHHHHPPAGSALDPSYGPLLMPSVHAARIPAPQCDITKTEPTTVTSATSAWAGAFHGTVDIVPSVGFDTGLQHQDKSKESPWY

SEQ ID NO: 747457 - protein, 326 aa, Homo sapiens; identical to SEQ ID NO: 747455

SEQ ID NO: 747458 - protein, 97 aa, Homo sapiens
MVHSRKWGESGQRCPGGLCLHHLERHRPFSLHSLFRKEAYSQMNAPRLRDKANPWDAEGTWITSARERSPNSASRRPEVWPPVDTQLRDEQVGLSGG

SEQ ID NO: 747459 - protein, 302 aa, Homo sapiens
MNSMKTEENKSFSAMEDDQRTRPEVSKDTVMKQTHADTPVDHCLSGIRKCSSTFKLKSEVNKHETALEMQNPNLNNKECCFTFTLNGNSRKLDRSVFTAYGKPSESIYSALSANDYFSERIKNQFNKNIIVYEEKTIDGHINLGMPLKCLPSDSHFKITFGQRKSSKEDGHILRQCENPNMECILFHVVAIGRTRKKIVKINELHEKGSKLCIYALKGETIEGALCKDGRFRSDIGEFEWKLKEGHKKIYGKQSMVDEVSGKVLEMDISKKKALQQKDIHKKIKQNESATDEINHQSLIQSK

SEQ ID NO: 747460 - protein, 272 aa, Homo sapiens
MKQTHADTPVDHCLSGIRKCSSTFKLKSEVNKHETALEMQNPNLNNKECCFTFTLNGNSRKLDRSVFTAYGKPSESIYSALSANDYFSERIKNQFNKNIIVYEEKTIDGHINLGMPLKCLPSDSHFKITFGQRKSSKEDGHILRQCENPNMECILFHVVAIGRTRKKIVKINELHEKGSKLCIYALKGETIEGALCKDGRFRSDIGEFEWKLKEGHKKIYGKQSMVDEVSGKVLEMDISKKKALQQKDIHKKIKQNESATDEINHQSLIQSK

SEQ ID NO: 747461 - protein, 80 aa, Homo sapiens
RPPLGPGAPRRRHHVLGSRPRDKGINRVTRVKNAEKAKEDAKSDERGDLEQICVWRCLSSWEWLGAHVTLQDARLSITAP

SEQ ID NO: 747462 - protein, 134 aa, Homo sapiens
GRPSAPEPLGGATMYSGAGPALAPPAPPPPIQGYAFKPPPRPDFGTSGRTIKLQANFFEMDIPKIDIYHYELDIKPEKCPRRVNREIVEHMVQHFKTQIFGDRKPVFDGRKNLYTAMPLPIGRDKVQTRISRTC

SEQ ID NO: 747463 - protein, 111 aa, Homo sapiens
MFCNSAATLFCADRPQEAWAPVGVPLPAGPGYRLLGSAGLALGCQNLVQVFRGDTAQPLAPRLSHGSCSTQIHRKLPARASPECCAGPSHHLRVCENLLRSERTEDSWCFC

SEQ ID NO: 747464 - protein, 142 aa, Homo sapiens
GRPSAPEPLGGATMYSGAGPALAPPAPPPPIQGYAFKPPPRPDFGTSGRTIKLQANFFEMDIPKIDIYHYELDIKPEKCPRRVNREIVEHMVQHFKTQIFGDRKPVFDGRKNLYTAMPLPIGRDKVDLQPWKLSFRSSAPDL

SEQ ID NO: 747465 - protein, 152 aa, Homo sapiens
LHPTGQFSCTAAVTVPFSPGPWASSEASEQALAPPAPPPPIQGYAFKPPPRPDFGTSGRTIKLQANFFEMDIPKIDIYHYELDIKPEKCPRRVNREIVEHMVQHFKTQIFGDRKPVFDGRKNLYTAMPLPIGRDKVDLQPWKLSFRSSAPDL

SEQ ID NO: 747466 - protein, 872 aa, Homo sapiens
GRPSAPEPLGGATMYSGAGPALAPPAPPPPIQGYAFKPPPRPDFGTSGRTIKLQANFFEMDIPKIDIYHYELDIKPEKCPRRVNREIVEHMVQHFKTQIFGDRKPVFDGRKNLYTAMPLPIGRDKVELEVTLPGEGKDRIFKVSIKWVSCVSLQALHDALSGRLPSVPFETIQALDVVMRHLPSMRYTPVGRSFFTASEGCSNPLGGGREVWFGFHQSVRPSLWKMMLNIDVSATAFYKAQPVIEFVCEVLDFKSIEEQQKPLTDSQRVKFTKEIKGLKVEITHCGQMKRKYRVCNVTRRPASHQTFPLQQESGQTVECTVAQYFKDRHKLVLRYPHLPCLQVGQEQKHTYLPLEVCNIVAGQRCIKKLTDNQTSTMIRATARSAPDRQEEISKLMRSASFNTDPYVREFGIMVKDEMTDVTGRVLQPPSILYGGRNKAIATPVQGVWDMRNKQFHTGIEIKVWAIACFAPQRQCTEVHLKSFTEQLRKISRDAGMPIQGQPCFCKYAQGADSVEPMFRHLKNTYAGLQLVVVILPGKTPVYAEVKRVGDTVLGMATQCVQMKNVQRTTPQTLSNLCLKINVKLGGVNNILLPQGRPPVFQQPVIFLGADVTHPPAGDGKKPSIAAVVGSMDAHPNRYCATVRVQQHRQEIIQDLAAMVRELLIQFYKSTRFKPTRIIFYRDGVSEGQFQQVLHHELLAIREACIKLEKDYQPGITFIVVQKRHHTRLFCTDKNERVGKSGNIPAGTTVDTKITHPTEFDFYLCSHAGIQGTSRPSHYHVLWDDNRFSSDELQILTYQLCHTYVRCTRSVSIPAPAYYAHLVAFRARYHLVDKEHDSAEGSHTSGQSNGRDHQALAKAVQVHQDTLRTMYFA

SEQ ID NO: 747467 - protein, 872 aa, Homo sapiens; identical to SEQ ID NO: 747466

SEQ ID NO: 747468 - protein, 872 aa, Homo sapiens; identical to SEQ ID NO: 747466

SEQ ID NO: 747469 - protein, 837 aa, Homo sapiens
GRPSAPEPLGGATMYSGAGPALAPPAPPPPIQGYAFKPPPRPDFGTSGRTIKLQANFFEMDIPKIDIYHYELDIKPEKCPRRVNREIVEHMVQHFKTQIFGDRKPVFDGRKNLYTAMPLPIGRDKVELEVTLPGEGKDRIFKVSIKWVSCVSLQALHDALSGRLPSVPFETIQALDVVMRHLPSMRYTPVGRSFFTASEGCSNPLGGGREVWFGFHQSVRPSLWKMMLNIDVSATAFYKAQPVIEFVCEVLDFKSIEEQQKPLTDSQRVKFTKEIKGLKVEITHCGQMKRKYRVCNVTRRPASHQTFPLQQESGQTVECTVAQYFKDRHKLVLRYPHLPCLQVGQEQKHTYLPLEVCNIVAGQRCIKKLTDNQTSTMIRATARSAPDRQEEISKLMRSASFNTDPYVREFGIMVKDEMTDVTGRVLQPPSILYGGRNKAIATPVQGVWDMRNKQFHTGIEIKVWAIACFAPQRQCTEVHLKSFTEQLRKISRDAGMPIQGQPCFCKYAQGADSVEPMFRHLKNTYAGLQLVVVILPGKTPVYAEVKRVGDTVLGMATQCVQMKNVQRTTPQTLSNLCLKINVKLGGVNNILLPQGRPPVFQQPVIFLGADVTHPPAGDGKKPSIAAVVGSMDAHPNRYCATVRVQQHRQEIIQDLAAMVRELLIQFYKSTRFKPTRIIFYRDGVSEGQFQQVLHHELLAIREACIKLEKDYQPGITFIVVQKRHHTRLFCTDKNERVGKSGNIPAGTTVDTKITHPTEFDFYLCSHAGIQGTSRPSHYHVLWDDNRFSSDELQILTYQLCHTYVRCTRSVSIPAPAYYAHLVAFRARYHLVDKEHDR

SEQ ID NO: 747470 - protein, 279 aa, Homo sapiens
GTLLVPIFPRVQAHAQERKVLGTPDHTHCLFLQVVGSMDAHPNRYCATVRVQQHRQEIIQDLAAMVRELLIQFYKSTRFKPTRIIFYRDGVSEGQFQQVLHHELLAIREACIKLEKDYQPGITFIVVQKRHHTRLFCTDKNERVGKSGNIPAGTTVDTKITHPTEFDFYLCSHAGIQGTSRPSHYHVLWDDNRFSSDELQILTYQLCHTYVRCTRSVSIPAPAYYAHLVAFRARYHLVDKEHDSAEGSHTSGQSNGRDHQALAKAVQVHQDTLRTMYFA

SEQ ID NO: 747471 - protein, 185 aa, Homo sapiens
MDFIRFSVFQNAIREACIKLEKDYQPGITFIVVQKRHHTRLFCTDKNERVGKSGNIPAGTTVDTKITHPTEFDFYLCSHAGIQGTSRPSHYHVLWDDNRFSSDELQILTYQLCHTYVRCTRSVSIPAPAYYAHLVAFRARYHLVDKEHDSAEGSHTSGQSNGRDHQALAKAVQVHQDTLRTMYFA

SEQ ID NO: 747472 - protein, 279 aa, Homo sapiens
GTLLVPIFPRVQAHAQERKVLGTPDHTHCLFLQVVGSMDAHPNRYCATVRVQQHRQEIIQDLAAMVRELLIQFYKSTRFKPTRIIFYRDGVSEGQFQQVLHHELLAIREACIKLEKEYQPGITFIVVQKRHHTRLFCTDKNERVGKSGNIPAGTTVDTKITHPTEFDFYLCSHAGIQGTSRPSHYHVLWDDNRFSSDELQILTYQLCHTYVRCTRSVSIPAPAYYAHLVAFRARYHLVDKEHDSAEGSHTSGQSNGRDHQALAKAVQVHQDTLRTMYFA

SEQ ID NO: 747473 - protein, 375 aa, Homo sapiens
GTLLVPIFPRVQAHAQERKVLGTPDHTHCLFLQVVGSMDAHPNRYCATVRVQQHRQEIIQDLAAMVRELLIQFYKSTRFKPTRIIFYRDGVSEGQFQQVLHHELLAIREACIKLEKEYQPGITFIVVQKRHHTRLFCTDKNERVGKSGNIPAGTTVDTKITHPTEFDFYLCSHAGIQGTSRPSHYHVLWDDNRFSSDELQILTYQLCHTYGAAHECVQMKNVQRTTPQTLSNLCLKINVKLGGVNNILLPQGRPPVFQQPVIFLGADVTHPPAGDGKKPSIAAVVGSMDAHPNRYCATVRVQQHRQEIIQDLAAMHTTLTWWPSGPGTTWWIRNMTVLKEAIPLGRVTGETTKHWPRRSRFTKTLCAPCTLLDMF

SEQ ID NO: 747474 - protein, 573 aa, Homo sapiens
GRPSAPEPLGGATMYSGAGPALAPPAPPPPIQGYAFKPPPRPDFGTSGRTIKLQANFFEMDIPKIDIYHYELDIKPEKCPRRVNREIVEHMVQHFKTQIFGDRKPVFDGRKNLYTAMPLPIGRDKVELEVTLPGEGKDRIFKVSIKWVSCVSLQALHDALSGRLPSVPFETIQALDVVMRHLPSMRYTPVGRSFFTASEGCSNPLGGGREVWFGFHQSVRPSLWKMMLNIDVSATAFYKAQPVIEFVCEVLDFKSIEEQQKPLTDSQRVKFTKEIKGLKVEITHCGQMKRKYRVCNVTRRPASHQTFPLQQESGQTVECTVAQYFKDRHKLVLRYPHLPCLQVGQEQKHTYLPLEVCNIVAGQRCIKKLTDNQTSTMIRATARSAPDRQEEISKLMRSASFNTDPYVREFGIMVKDEMTDVTGRVLQPPSILYGGRNKAIATPVQGVWDMRNKQFHTGIEIKVWAIACFAPQRQCTEVHLKSFTEQLRKISRDAGMPIQGQPCFCKYAQGADSVEPMFRHLKNTYAGLQLVVVILPGKTPVYGRCGRSRWLWGAVVVSVGVCSCLSPSVFLLH

SEQ ID NO: 747475 - protein, 342 aa, Homo sapiens
GRPSAPEPLGGATMYSGAGPALAPPAPPPPIQGYAFKPPPRPDFGTSGRTIKLQANFFEMDIPKIDIYHYELDIKPEKCPRRVNREIVEHMVQHFKTQIFGDRKPVFDGRKNLYTAMPLPIGRDKVELEVTLPGEGKDRIFKVSIKWVSCVSLQALHDALSGRLPSVPFETIQALDVVMRHLPSMRYTPVGRSFFTASEGCSNPLGGGREVWFGFHQSVRPSLWKMMLNIDVSATAFYKAQPVIEFVCEVLDFKSIEEQQKPLTDSQRVKFTKEIKGLKVEITHCGQMKRKYRVCNVTRRPASHQTFRCSRTTANGGAVAIFKTGQVGLEPTRIYVAGGNYF

SEQ ID NO: 747476 - protein, 279 aa, Homo sapiens; identical to SEQ ID NO: 747472

SEQ ID NO: 747477 - protein, 71 aa, Homo sapiens
AHTCCKVCHACSHTRNYFTEEERAVHCHMLRPEIHKNYLLCVVAFSDGGLTCLGPDTDIENLLKPPNFKYK

SEQ ID NO: 747478 - protein, 267 aa, Homo sapiens [sequence omitted]

SEQ ID NO: 747479 - protein, 250 aa, Homo sapiens [sequence omitted]

SEQ ID NO: 747480 - protein, 257 aa, Homo sapiens
PSICSSIMQVQLGQVEIKCPITECFEFLEETTVVYNLTHEDSIKYKYFLELGRIDSSTKPCPQCKHFTTFKKKGHIPTPSRSESKYKIQCPTCQFVWCFKCHSPWHEGVNCKEYKKGDKLLRHWASEIEHGQRNAQKCPKCKIHIQRTEGCDHMTCSQCNTNFCYRCGERYRQLRFFGDHTSNLSIFGCKYRYLPERPHLRRLVRGSVCAGKLFIAPLIMVLGLALGAIAVVIGLFVFPIYCLCKKQRKRSRTGMHW

SEQ ID NO: 747481 - protein, 232 aa, Homo sapiens
MGRRIHSELRNRAPSDVKELALDNSRSNEGKLEALTDEFEELEFLSKINGGLTSISDLPKLKLRKLELRVSGGLEVLAEKCPNLTHLYLSGNKIKDLSTIEPLKQLENLKSLDLFNCEVTNLNDYGENVFKLLLQLTYLDSCYWDHKEAPYSDIEDHVEGLDDEEEGEHEEEYDEDAQVVEDEEGEEEEEEGEEEDVSGGDEEDEEGYNDGEVDGEEDEEELGEEERGQKRK

SEQ ID NO: 747482 - protein, 109 aa, Homo sapiens
PYMLRLYPGPMVTEAEGKGGPEMASLSSSVVPVSFISTLRESVLDPGVGGEGASDKQRSKLSLSHSMIPAAKIHTELCLPAFFSPAGTQRRFQQPQHHLTLSIIHTAAR

SEQ ID NO: 747483 - protein, 108 aa, Homo sapiens
WPATTHSRVLRQIAYYLSSTLQQGDSAKTYLLKSQLELLISINVKPKILRRTEGVPHNLDWSPSLQLPQLSTGLSSHLRPHCATWNFPTWADSSRHHQLDASSALCSW

SEQ ID NO: 747484 - protein, 116 aa, Homo sapiens
  misc_feature (26)..(26): Xaa can be any naturally occurring amino acid
RQHHCTPTYPPPFYRHLPPTVSPLNXQTCDLGDSAKTYLLKSQLELLISINVKPKILRRTEGVPHNLDWSPSLQLPQLSTGLSSHLRPHCATWNFPTWADSSRHHQLDASSALCSW

SEQ ID NO: 747485 - protein, 747 aa, Homo sapiens
MEIPNPPTSKCITYWKRKVKSEYMRLRQLKRLQANMGAKALYVANFAKVQEKTQILNEEWKKLRVQPVQSMKPVSGHPFLKKCTIESIFPGFASQHMLMRSLNTVALVPIMYSWSPLQQNFMVEDETVLCNIPYMGDEVKEEDETFIEELINNYDGKVHGEEEMIPGSVLISDAVFLELVDALNQYSDEEEEGHNDTSDGKQDDSKEDLPVTRKRKRHAIEGNKKSSKKQFPNDMIFSAIASMFPENGVPDDMKERYRELTEMSDPNALPPQCTPNIDGPNAKSVQREQSLHSFHTLFCRRCFKYDCFLHPFHATPNVYKRKNKEIKIEPEPCGTDCFLLLEGAKEYAMLHNPRSKCSGRRRRRHHIVSASCSNASASAVAETKEGDSDRDTGNDWASSSSEANSRCQTPTKQKASPAPPQLCVVEAPSEPVEWTGAEESLFRVFHGTYFNNFCSIARLLGTKTCKQVFQFAVKESLILKLPTDELMNPSQKKKRKHRLWAAHCRKIQLKKDNSSTQVYNYQPCDHPDRPCDSTCPCIMTQNFCEKFCQCNPDCQNRFPGCRCKTQCNTKQCPCYLAVRECDPDLCLTCGASEHWDCKVVSCKNCSIQRGLKKHLLLAPSDVAGWGTFIKESVQKNEFISEYCGELISQDEADRRGKVYDKYMSSFLFNLNNDFVVDATRKGNKIRFANHSVNPNCYAKVVMVNGDHRIGIFAKRAIQAGEELFFDYRYSQADALKYVGIERETDVL

SEQ ID NO: 747486 - protein, 747 aa, Homo sapiens; identical to SEQ ID NO: 747485

SEQ ID NO: 747487 - protein, 703 aa, Homo sapiens [sequence omitted]

SEQ ID NO: 747488 - protein, 747 aa, Homo sapiens; identical to SEQ ID NO: 747485

SEQ ID NO: 747489 - protein, 399 aa, Homo sapiens [sequence omitted]

SEQ ID NO: 747490 - protein, 399 aa, Homo sapiens [sequence omitted]

SEQ ID NO: 747491 - protein, 399 aa, Homo sapiens [sequence omitted]

SEQ ID NO: 747492 - protein, 399 aa, Homo sapiens [sequence omitted]

SEQ ID NO: 747493 - protein, 399 aa, Homo sapiens [sequence omitted]

SEQ ID NO: 747494 - protein, 747 aa, Homo sapiens; identical to SEQ ID NO: 747485

SEQ ID NO: 747495 - protein, 68 aa, Homo sapiens
KQRYGVSESYRESQRGICQKMVMVNGDHRIGIFAKRAIQAGEELFFDYRYSQADALKYVGIERETDVL

SEQ ID NO: 747496 - protein, 83 aa, Homo sapiens
CIIMSEHRGSTCCYTASCMHIAKVEFRYMLRNEPMYTAVYLSCGVHLIISTCMHQQRYATRISFNNVLELEKPLRTKVSRVPA

SEQ ID NO: 747497 - protein, 161 aa, Homo sapiens
MAAVETFRWRKRWRWRRYAGGHDTTAAAINWSLYLLGSNPEVQKKVDHELDDVFGKSDRPATVEDLKKLRYLECVIKETLRLFPSVPLFARSVSEDCEVAGYRVLKGTEAVIIPYALHRDPRYFPNPEEFQPERFFPENAQGRHPYAYVPFSAGPRNCIVI

SEQ ID NO: 747498 - protein, 161 aa, Homo sapiens; identical to SEQ ID NO: 747497

SEQ ID NO: 747499 - protein, 161 aa, Homo sapiens; identical to SEQ ID NO: 747497

SEQ ID NO: 747500 - protein, 161 aa, Homo sapiens; identical to SEQ ID NO: 747497

SEQ ID NO: 747501 - protein, 575 aa, Homo sapiens
GRDLELRAGASGRGSGWVPEGETYGWAELGAALAWLFRRRGRSGGAEPRGVGRGVILVLGADSGTGLRAREAGSAVEAEELVKGSPAWEPPANDTREEAGPPAAGEDEASWTAPGGELAGPEEVLQESAAVTGTAWLEADSPGLGGVTAEAGSGDAQALPATLQAPHEVLGQSIMPPAIPEATEASGPPSPTPGDKLSPASELPKESPLEVWLNLGGSTPDPQVPELTYPFQGTLEPQPASDIIDIDYFEGLDGEGRGADLGSFPGSPGTSENHPDTEGETPSWSLLDLYDDFTPFDESDFYPTTSFYDDLDEEEEEEEDDKDAVGGGDLEDENELLVPTGKPGLGPGTGQPTSRWHAVPPQHTLGSVPGSSIALRPRPGEPGRDLASSENGTECRSGFVRHNGSCRSVCDLFPSYCHNGGQCYLVENIGAFCRCNTQDYIWHKGMRCESIITDFQVMCVAVGSAALVLLLLFMMTVFFAKKLYLLKTENTKLRRTNKFRTPSELHNDNFSLSTIAEGSHPNDDPSAPHKIQEVLKSCLKEEESFNIQNSMSPKLEGGKGDQADLDVNCLQNNLT

SEQ ID NO: 747502 - protein, 539 aa, Homo sapiens
MGRAGGGGPGRGPPPLLLFLGAALVLASGAVPAREAGSAVEAEELVKGSPAWEPPANDTREEAGPPAAGEDEASWTAPGGELAGPEEVLQESAAVTGTAWLEADSPGLGGVTAEAGSGDAQALPATLQAPHEVLGQSIMPPAIPEATEASGPPSPTPGDKLSPASELPKESPLEVWLNLGGSTPDPQVPELTYPFQGTLEPQPASDIIDIDYFEGLDGEGRGADLGSFPGSPGTSENHPDTEGETPSWSLLDLYDDFTPFDESDFYPTTSFYDDLDEEEEEEEDDKDAVGGGDLEDENELLVPTGKPGLGPGTGQPTSRWHAVPPQHTLGSVPGSSIALRPRPGEPGRDLASSENGTECRSGFVRHNGSCRSVCDLFPSYCHNGGQCYLVENIGAFCRCNTQDYIWHKGMRCESIITDFQVMCVAVGSAALVLLLLFMMTVFFAKKLYLLKTENTKLRRTNKFRTPSELHNDNFSLSTIAEGSHPNDDPSAPHKIQEVLKSCLKEEESFNIQNSMSPKLEGGKGDQADLDVNCLQNNLT

SEQ ID NO: 747503 - protein, 260 aa, Homo sapiens
MAAFLLLPLPLQAVLNLVTKTSCLEEKSAHGPPLLKTFLTLQPTLYSGFQDPATGPCTRTRPRPGEPGRDLASSENGTECRSGFVRHNGSCRSVCDLFPSYCHNGGQCYLVENIGAFCRCNTQDYIWHKGMRCESIITDFQVMCVAVGSAALVLLLLFMMTVFFAKKLYLLKTENTKLRRTNKFRTPSELHNDNFSLSTIAEGSHPNDDPSAPHKIQEVLKSCLKEEESFNIQNSMSPKLEGGKGDQADLDVNCLQNNLT

SEQ ID NO: 747504 - protein, 380 aa, Homo sapiens
MNPCGWLGAVGPTLPNFPKWAASLLEPRVLPWQAQVAHPVSGGPSPWISRPDTAQLDGTMAPAFLLLLLLWPQGCVSGPSADSVYTKVRLLEGETLSVQCSYKGYKNRVEGKVWCKIRKKKCEPGFARVWVKGPRYLLQDDAQAKVVNITMVALKLQDSGRYWCMRNTSGILYPLMGFQLDVSPAPQTERNIPFTHLDNILKGGTVTTGQAPTSGPDAPFTTGVMVFTPGLITLPRLLASTRPASKTGYSFTATSTTSQGPRRTMGSQTVTASPSNARDSSAGPESISTKSGDLSTRSPTTGLCLTSRSLLNRLPSMPSIRHQDVYSTVLGVVLTLLVLMLIMVYGFWKKRHMASYSMCSDPSTRDPPGRPEPYVEVYLI

SEQ ID NO: 747505 - protein, 135 aa, Homo sapiens
  misc_feature (130)..(130): Xaa can be any naturally occurring amino acid
MRPSLPNSTVPTTRTTPPVPQKQCQQPRHGFHVMQKWSFHVLWPPDSAESVGILDCPATPCVCLRIGAPQPTGSSERDHTIAWSPLTGHRNSCAKLKSGPYIDKTQTTSSTGAQGGPGSEMEQLDHDMIXEPRDS

SEQ ID NO: 747506 - protein, 125 aa, Homo sapiens
GAAHAPRPTGGRARRVLRFLGGREEPRAPTAGAGEKAPRRGPHPWKGGVHPPERHGAPRARRLKARRLLQLLGAEECQPGGSRTRRLVLELHTQGRMREPEARVCVPEARVWVPMVFVLGVGAER

SEQ ID NO: 747507 - protein, 101 aa, Homo sapiens
ASYTCTREERRGSASRFTSFSFVSAFFSHFLATLALERQKGEAKAGPRNGEGTWPSHKWSFCSARRDALERPLPSATVFLCQLVGGDWTSEEGVGAPRTHS

SEQ ID NO: 747508 - protein, 119 aa, Homo sapiens
MTGDFFRVWLLQHTGLRQHPAPAAWAAPVTAGARSLQSVSSAAASVNLNQRHLAAFSATLFRSGSKPRDQETSCLSAGTQARRQEARLTPCLRLPEERAMRKAGLSSQDTREKPQATAP

SEQ ID NO: 747509 - protein, 204 aa, Homo sapiens
ASYTCTREERRGSASRFTSFSFVSAFFSHFLATLALERQKGEAKAGPRNGEGTWPSHKWSFCSARRDALERPLPSATVFLCQLVGEGRKAAGRGARAGETLFYASWVPLLPIPWRGVELAGKCPRVRGAEPPAAILCLRVALAGRGKRDTDLAGVPRSLTSCFVHELLLGVRGPTARRDLEQGGSGSFPYPRILSHSLHASTRR

SEQ ID NO: 747510 - protein, 101 aa, Homo sapiens; identical to SEQ ID NO: 747507

SEQ ID NO: 747511 - protein, 110 aa, Homo sapiens
ASYTCTREERRGSASRFTSFSFVSAFFSHFLATLALERQKGEAKAGPRNGEGTWPSHKWSFCSARRDALERPLPSATVFLCQLVDLDIYSVQPLLWHSNSIGKQLDVASP

SEQ ID NO: 747512 - protein, 101 aa, Homo sapiens; identical to SEQ ID NO: 747507

SEQ ID NO: 747513 - protein, 101 aa, Homo sapiens; identical to SEQ ID NO: 747507

SEQ ID NO: 747514 - protein, 112 aa, Homo sapiens
SRWEDCLGPGVRVQPGQHREISSLQKIFKFSWVCGVHLWPQLTTWEAEAGGSLEPRRMKLTSEFKVFGELCRCNLSVTNKKSNQLLLAKGRWKTNRCRYTPVWVTKLDRISK

SEQ ID NO: 747515 - protein, 179 aa, Homo sapiens
MLSLDFLDDVRRMNKRQLYYQVLNFGMIVSSALMIWKGLMVITGSESPIVVVLSGSMEPAFHRGDLLFLTNRVEDPIRVGEIVVFRIEGREIPIVHRVLKIHEKQNGHIKFLTKGDNNAVDDRGLYKQGQHWLEKKDVVGRARGFVPYIGIVTILMNDYPKFKYAVLFLLGLFVLVHRE

SEQ ID NO: 747516 - protein, 153 aa, Homo sapiens
MIVSSALMIWKGLMVITGSESPIVVVLSGSMEPAFHRGDLLFLTNRVEDPIRVGEIVVFRIEGREIPIVHRVLKIHEKQNGHIKFLTKGDNNAVDDRGLYKQGQHWLEKKDVVGRARGFVPYIGIVTILMNDYPKFKYAVLFLLGLFVLVHRE

SEQ ID NO: 747517 - protein, 161 aa, Homo sapiens
MLSLDFLDDVRRMNKRQLYYQVLNFGMIVSSALMIWKGLMVITGSESPIVVVLSGSMEPAFHRGDLLFLTNRVEDPIRVGEIVVFRIEGREIPIVHRVLKIHEKQNGHIKFLTKGDNNAVDDRGLYKQGQHWLEKILMNDYPKFKYAVLFLLGLFVLVHRE

SEQ ID NO: 747518 - protein, 194 aa, Homo sapiens
YYYFAALDVLLAVPAMLSLDFLDDVRRMNKRQLYYQVLNFGMIVSSALMIWKGLMVITGSESPIVVVLSGSMEPAFHRGDLLFLTNRVEDPIRVGEIVVFRIEGREIPIVHRVLKIHEKQNGHIKFLTKGDNNAVDDRGLYKQGQHWLEKKDVVGRARGFVPYIGIVTILMNDYPKFKYAVLFLLGLFVLVHRE

SEQ ID NO: 747519 - protein, 117 aa, Homo sapiens
MLSLDFLDDVRRMNKRQLYYQVLNFGMIVSSALMIWKGLMVITGSESPIVVVLSGSMEPAFHRGDLLFLTNRVEDPIRVGEIVVFRIEGREIPIVHRVLKIHEKICSLYWNCDDPHE

SEQ ID NO: 747520 - protein, 112 aa, Homo sapiens
MLSLDFLDDVRRMNKRQLYYQVLNFGMIVSSALMIWKGLMVITGSESPIVVVLSGSMEPAFHRGDLLFLTNRVEDPIRVGEIVVFRIEGREIPIVHRVLKIHEKARPLSRTL

SEQ ID NO: 747521 - protein, 135 aa, Homo sapiens
  misc_feature (5)..(5): Xaa can be any naturally occurring amino acid
  misc_feature (12)..(12): Xaa can be any naturally occurring amino acid
  misc_feature (15)..(15): Xaa can be any naturally occurring amino acid
LRGLXVAMAPGXGIXRPLLEDRGDSDHSLWLGRETEAAAAQGKRGCSGGSRKMSGEDEQQEQTIAEDLVVTKYKMGGDIANRVLRSLVEASSSGVSVLSLCEKGDAMIMEETGKIFKKEQGNEERYCFSHQHFGK

SEQ ID NO: 747522 - protein, 136 aa, Homo sapiens
REKGANYRLGTRLGVARPLLEDRGDSDHSLWLGRETEAAAAQGKRGCSGGSRKMSGEDEQQEQTIAEDLVVTKYKMGGDIANRVLRSLVEASSSGVSVLSLCEKGDAMIMEETGKIFKKEQGNEERYCFSHQHFGK

SEQ ID NO: 747523 - protein, 210 aa, Homo sapiens
MLSHQLKQHVIDGEKTIIQNPTDQQKKDHEKAEFEVHEVYAVDVLVSSGEGKAKDAGQRTTIYKRDPSKQYGLKMKTSRAFFSEVERRFDAMPFTLRAFEDEKKARMGVVECAKHELLQPFNVLYEKEGEFVAQFKFTVLLMPNGPMRITSGPFEPDLYKSEMEVQDAELKALLQSSASRKTQKKKKKKASKTAENATSGETLEENEAGD

SEQ ID NO: 747524 - protein, 210 aa, Homo sapiens; identical to SEQ ID NO: 747523

SEQ ID NO: 747525 - protein, 210 aa, Homo sapiens; identical to SEQ ID NO: 747523

SEQ ID NO: 747526 - protein, 210 aa, Homo sapiens; identical to SEQ ID NO: 747523

SEQ ID NO: 747527 - protein, 210 aa, Homo sapiens; identical to SEQ ID NO: 747523

SEQ ID NO: 747528 - protein, 210 aa, Homo sapiens; identical to SEQ ID NO: 747523

SEQ ID NO: 747529 - protein, 210 aa, Homo sapiens; identical to SEQ ID NO: 747523

SEQ ID NO: 747530 - protein, 291 aa, Homo sapiens
PLLVNSKPTGLNRQPISFTVVAVVDVAQGTQVTGRKADVIKAAHLCAEAALRLVKPGNQNTQVTEAWNKVAHSFNCTPIEGMLSHQLKQHVIDGEKTIIQNPTDQQKKDHEKAEFEVHEVYAVDVLVSSGEGKAKDAGQRTTIYKRDPSKQYGLKMKTSRAFFSEVERRFDAMPFTLRAFEDEKKARMGVVECAKHELLQPFNVLYEKEGEFVAQFKFTVLLMPNGPMRITSGPFEPDLYKSEMEVQDAELKALLQSSASRKTQKKKKKKASKTAENATSGETLEENEAGD

SEQ ID NO: 747531 - protein, 210 aa, Homo sapiens; identical to SEQ ID NO: 747523

SEQ ID NO: 747532 - protein, 127 aa, Homo sapiens
  misc_feature (11)..(11): Xaa can be any naturally occurring amino acid
PSVHLQKRELXTGGTSVDHSLWLGRETEAAAAQGKRGCSGGSRKMSGEDEQQEQTIAEDLVVTKYKMGGDIANRVLRSLVEASSSGVSVLSLCEKGDAMIMEETGKIFKKEQGNEERYCFSHQHFGK

SEQ ID NO: 747533 - protein, 168 aa, Homo sapiens
DAWVDPRVGKAKDAGQRTTIYKRDPSKQYGLKMKTSRAFFSEVERRFDAMPFTLRAFEDEKKARMGVVECAKHELLQPFNVLYEKEGEFVAQFKFTVLLMPNGPMRITSGPFEPDLYKSEMEVQDAELKALLQSSASRKTQKKKKKKASKTAENATSGETLEENEAGD

SEQ ID NO: 747534 - protein, 229 aa, Homo sapiens
MLSHQLKQHVIDGEKTIIQNPTDQQKKDHEKAEFEVHEVYAVDVLVSSGEGKPRMQDREPLFTNETPLDSLAKDAGQRTTIYKRDPSKQYGLKMKTSRAFFSEVERRFDAMPFTLRAFEDEKKARMGVVECAKHELLQPFNVLYEKEGEFVAQFKFTVLLMPNGPMRITSGPFEPDLYKSEMEVQDAELKALLQSSASRKTQKKKKKKASKTAENATSGETLEENEAGD

SEQ ID NO: 747535 - protein, 127 aa, Homo sapiens; identical to SEQ ID NO: 747532
  misc_feature (11)..(11): Xaa can be any naturally occurring amino acid

SEQ ID NO: 747536 - protein, 127 aa, Homo sapiens; identical to SEQ ID NO: 747532
  misc_feature (11)..(11): Xaa can be any naturally occurring amino acid

SEQ ID NO: 747537 - protein, 129 aa, Homo sapiens
PPPPPPRAPSSARYEAGWCACLPAPLLARAFARPLLEDRGDSDHSLWLGRETEAAAAQGKRGCSGGSRKMSGEDEQQEQTIAEDLVVTKYKMGGDIANSECGLGGRGIRLIGKGNRLARKGLERRGHAD

SEQ ID NO: 747538 - protein, 309 aa, Homo sapiens
YAWSTWKSEQGTQVTGRKADVIKAAHLCAEAALRLVKPGNQNTQVTEAWNKVAHSFNCTPIEGMLSHQLKQHVIDGEKTIIQNPTDQQKKDHEKAEFEVHEVYAVDVLVSSGEGKAKDAGQRTTIYKRDPSKQYGLKMKTSRAFFSEVERRFDAMPFTLRAFEDEKKARMGVVECAKHELLQPFNVLYEKEGEFVAQFKFTVLLMPNGPMRITSGPFEPDLYKSEMEVQDAELKALLQSSASRKTQKKKKKKLQDCENAPGEHLENATGLGVHLQVVFDYPSQTKLEGVFPKRPKGFGPHPTFKTRLRG

SEQ ID NO: 747539 - protein, 210 aa, Homo sapiens; identical to SEQ ID NO: 747523

SEQ ID NO: 747540 - protein, 210 aa, Homo sapiens; identical to SEQ ID NO: 747523

SEQ ID NO: 747541 - protein, 210 aa, Homo sapiens; identical to SEQ ID NO: 747523

SEQ ID NO: 747542 - protein, 210 aa, Homo sapiens; identical to SEQ ID NO: 747523

SEQ ID NO: 747543 - protein, 210 aa, Homo sapiens; identical to SEQ ID NO: 747523

SEQ ID NO: 747544 - protein, 210 aa, Homo sapiens; identical to SEQ ID NO: 747523

SEQ ID NO: 747545 - protein, 210 aa, Homo sapiens; identical to SEQ ID NO: 747523

SEQ ID NO: 747546 - protein, 127 aa, Homo sapiens; identical to SEQ ID NO: 747532
  misc_feature (11)..(11): Xaa can be any naturally occurring amino acid

SEQ ID NO: 747547 - protein, 191 aa, Homo sapiens
MLSHQLKQHVIDGEKTIIQNPTDQQKKDHEKAEFEVHEVYAVDVLVSSGEGKAKDAGQRTTIYKRDPSKQYGLKMKTSRAFFSEVERRFDAMPFTLRAFEDEKKARMGVVECAKHELLQPFNVLYEKEGEFVAQFKFTVLLMPNGPMRITSGPFEPDLYKSEMEVQDAELKAPQSRSENRKKKRGQRDAWT

SEQ ID NO: 747548 - protein, 152 aa, Homo sapiens
  misc_feature (11)..(11): Xaa can be any naturally occurring amino acid
PSVHLQKRELXTGGTSVDHSLWLGRETEAAAAQGKRGCSGGSRKMSGEDEQQEQTIAEDLVVTKYKMGGDIANRVLRSLVEASSSGVSVLSLCEKGDAMIMEETGKIFKKEQGNEESDLGVHVDGFIANVAHTFVVDVAQGDPSNREESRCY

SEQ ID NO: 747549 - protein, 233 aa, Homo sapiens
FGTRQRTTIYKRDPSKQYGLKMKTSRAFFSEVERRFDAMPFTLRAFEDEKKARMGVVECAKHELLQPFNVLYEKRAKDAGQRTTIYKRDPSKQYGLKMKTSRAFFSEVERRFDAMPFTLRAFEDEKKARMGVVECAKHELLQPFNVLYEKEGEFVAQFKFTVLLMPNGPMRITSGPFEPDLYKSEMEVQDAELKALLQSSASRKTQKKKKKKASKTAENATSGETLEENEAGD

SEQ ID NO: 747550 - protein, 127 aa, Homo sapiens; identical to SEQ ID NO: 747532
  misc_feature (11)..(11): Xaa can be any naturally occurring amino acid

SEQ ID NO: 747551 - protein, 127 aa, Homo sapiens; identical to SEQ ID NO: 747532
  misc_feature (11)..(11): Xaa can be any naturally occurring amino acid

SEQ ID NO: 747552 - protein, 919 aa, Homo sapiens
MGTTAPGPIHLLELCDQKLMEFLCNMDNKDLVWLEEIQEEAERMFTREFSKEPELMPKTPSQKNRRKKRRISYVQDENRDPIRRRLSRRKSRSSQLSSRRLRSKDSVEKLATVVGENGSVLRRVTRAAAAAAAATMALAAPSSPTPESPTMLTKKPEDNHTQCQLVPVVEIGISERQNAEQHVTQLMSTEPLPRTLSPTPASATAPTSQGIPTSDEESTPKKSKARILESITVSSLMATPQDPKGQGVGTGRSASKLRIAQVSPGPRDSPAFPDSPWRERVLAPILPDNFSTPTGSRTDSQSVRHSPIAPSSPSPQVLAQKYSLVAKQESVVRRASRRLAKKTAEEPAASGRIICHSYLERLLNVEVPQKVGSEQKEPPEEAEPVAAAEPEVPENNGNNSWPHNDTEIANSTPNPKPAASSPETPSAGQQEAKTDQADGPREPPQSARRKRSYKQAVSELDEEQHLEDEELQPPRSKTPSSPCPASKVVRPLRTFLHTVQRNQMLMTPTSAPRSVMKSFIKRNTPLRMDPKEKERQRLENLRRKEEAEQLRRQKVEEDKRRRLEEVKLKREERLRKVLQARERVEQMKEEKKKQIEQKFAQIDEKTEKAKEERLAEEKAKKKAAAKKMEEVEARRKQEEDARRLRWLQQEEEERRHQELLQKKKEEEQERLRKAAEAKRLAEQREQERREQERREQERREQERREQERREQERREQERQLAEQERRREQERLQAERELQEREKALRLQKEQLQRELEEKKKKEEQQRLAERQLQEEQEKKAKEAAGASKALNVTVDVQSPACTSSPITPQGHKAPPQINPHNYGMDLNSDDSTDDEAHPRKPIPTWARGTPLSQAIIHQYYQPPNLLELFGTILPLDLEDIFKKSKPRYHKRTSSAVWNSPPLQGARVPSSLAYSLKKH

SEQ ID NO: 747553 - protein, 525 aa, Homo sapiens
MGTTAPGPIHLLELCDQKLMEFLCNMDNKDLVWLEEIQEEAERMFTREFSKEPELMPKTPSQKNRRKKRRISYVQDENRDPIRRRLSRRKSRSSQLSSRRLRSKDSVEKLATVVGENGSVLRRVTRAAAAAAAATMALAAPSSPTPESPTMLTKKPEDNHTQCQLVPVVEIGISERQNAEQHVTQLMSTEPLPRTLSPTPASATAPTSQGIPTSDEESTPKKSKARILESITVSSLMATPQDPKGQGVGTGRSASKLRIAQVSPGPRDSPAFPDSPWRERVLAPILPDNFSTPTGSRTDSQSVRHSPIAPSSPSPQVLAQKYSLVAKQESVVRRASRRLAKKTAEEPAASGRIICHSYLERLLNVEVPQKVGSEQKEPPEEAEPVAAAEPEVPENNGNNSWPHNDTEIANSRKLQRELDEATESNEAMGREVNALKSKLRRGNETSFAPSRRSGGHRIITNADASEEHTYTRDADFTGSKSSFIINIFTNLHHNKFILLLYPPLAMTQRRPQSTLLLPSHRYRLE

SEQ ID NO: 747554 - protein, 81 aa, Homo sapiens
PKVAAAGAYARGRTHGGVSGELSRSLQPALLYLRVPCLPPPLKSVAQSESRGCACALHLVRCGCERRAFSDTARLLCFRAL

SEQ ID NO: 747555 - protein, 323 aa, Homo sapiens
LFARSPLGGALEARRMRPEGSLTYRVPERLRQGSCGVGRAAQALVCASAKEGTAFRMEAVQEGAAGVESEQAALGEEAVLLLDDIMAEVEVVAEEEGLVERREEAQRAQQAVPGPGPMTPESALEELLAVQVELEPVNAQARKAFSRQREKMERRRKPHLDRRGAVIQSVPGFWANVIANHPQMSALITDEDEDMLSYMVSLEVEEEKHRVHLCKIMLFFRSNPYFQNKVITKEYLVNITEYRASHSTPIEWYPDYEVEAYRRRHHNSSLNFFNWFSDHNFAGSNKIAEILCKDLWRNPLQYYKRMKPPEEGTETSGDSQLLS

SEQ ID NO: 747556 - protein, 406 aa, Homo sapiens
MAAAVRQDLAQLMNSSGSHKDLAGKYRQILEKAIQLSGAEQLEALKAFVEAMVNENVSLVISRQLLTDFCTHLPNLPDSTAKEIYHFTLEKIQPRVISFEEQVASIRQHLASIYEKEEDWRNAAQVLVGIPLETGQKQYNVDYKLETYLKIARLYLEDDDPVQAEAYINRASLLQNESTNEQLQIHYKVCYARVLDYRRKFIEAAQRYNELSYKTIVHESERLEALKHALHCTILASAGQQRSRMLATLFKDERCQQLAAYGILEKMYLDRIIRGNQLQEFAAMLMPHQKATTADGSSILDRAVIEHNLLSASKLYNNITFEELGALLEIPAAKAEKIASQMITEGRMNGFIDQIDGIVHFETREALPTWDKQIQSLCFQVNNLLEKISQTAPEWTAQAMEAQMAQ

SEQ ID NO: 747557 - protein, 406 aa, Homo sapiens; identical to SEQ ID NO: 747556

SEQ ID NO: 747558 - protein, 394 aa, Homo sapiens
MNSSGSHKDLAGKYRQILEKAIQLSGAEQLEALKAFVEAMVNENVSLVISRQLLTDFCTHLPNLPDSTAKEIYHFTLEKIQPRVISFEEQVASIRQHLASIYEKEEDWRNAAQVLVGIPLETGQKQYNVDYKLETYLKIARLYLEDDDPVQAEAYINRASLLQNESTNEQLQIHYKVCYARVLDYRRKFIEAAQRYNELSYKTIVHESERLEALKHALHCTILASAGQQRSRMLATLFKDERCQQLAAYGILEKMYLDRIIRGNQLQEFAAMLMPHQKATTADGSSILDRAVIEHNLLSASKLYNNITFEELGALLEIPAAKAEKIASQMITEGRMNGFIDQIDGIVHFETREALPTWDKQIQSLCFQVNNLLEKISQTAPEWTAQAMEAQMAQ

SEQ ID NO: 747559 - protein, 398 aa, Homo sapiens
MCDVPVLQAVVNSIKHRYRQILEKAIQLSGAEQLEALKAFVEAMVNENVSLVISRQLLTDFCTHLPNLPDSTAKEIYHFTLEKIQPRVISFEEQVASIRQHLASIYEKEEDWRNAAQVLVGIPLETGQKQYNVDYKLETYLKIARLYLEDDDPVQAEAYINRASLLQNESTNEQLQIHYKVCYARVLDYRRKFIEAAQRYNELSYKTIVHESERLEALKHALHCTILASAGQQRSRMLATLFKDERCQQLAAYGILEKMYLDRIIRGNQLQEFAAMLMPHQKATTADGSSILDRAVIEHNLLSASKLYNNITFEELGALLEIPAAKAEKIASQMITEGRMNGFIDQIDGIVHFETREALPTWDKQIQSLCFQVNNLLEKISQTAPEWTAQAMEAQMAQ

SEQ ID NO: 747560 - protein, 355 aa, Homo sapiens
MVNENVSLVISRQLLTDFCTHLPNLPDSTAKEIYHFTLEKIQPRVISFEEQVASIRQHLASIYEKEEDWRNAAQVLVGIPLETGQKQYNVDYKLETYLKIARLYLEDDDPVQAEAYINRASLLQNESTNEQLQIHYKVCYARVLDYRRKFIEAAQRYNELSYKTIVHESERLEALKHALHCTILASAGQQRSRMLATLFKDERCQQLAAYGILEKMYLDRIIRGNQLQEFAAMLMPHQKATTADGSSILDRAVIEHNLLSASKLYNNITFEELGALLEIPAAKAEKIASQMITEGRMNGFIDQIDGIVHFETREALPTWDKQIQSLCFQVNNLLEKISQTAPEWTAQAMEAQMAQ

SEQ ID NO: 747561 - protein, 406 aa, Homo sapiens; identical to SEQ ID NO: 747556

SEQ ID NO: 747562 - protein, 331 aa, Homo sapiens
MRSPGVIHAEARLENIQSYSDFLCREQVASIRQHLASIYEKEEDWRNAAQVLVGIPLETGQKQYNVDYKLETYLKIARLYLEDDDPVQAEAYINRASLLQNESTNEQLQIHYKVCYARVLDYRRKFIEAAQRYNELSYKTIVHESERLEALKHALHCTILASAGQQRSRMLATLFKDERCQQLAAYGILEKMYLDRIIRGNQLQEFAAMLMPHQKATTADGSSILDRAVIEHNLLSASKLYNNITFEELGALLEIPAAKAEKIASQMITEGRMNGFIDQIDGIVHFETREALPTWDKQIQSLCFQVNNLLEKISQTAPEWTAQAMEAQMAQ

SEQ ID NO: 747563 - protein, 406 aa, Homo sapiens; identical to SEQ ID NO: 747556

SEQ ID NO: 747564 - protein, 289 aa, Homo sapiens
NIPHSNSRLIEKTMKRKSYEQYNVDYKLETYLKIARLYLEDDDPVQAEAYINRASLLQNESTNEQLQIHYKVCYARVLDYRRKFIEAAQRYNELSYKTIVHESERLEALKHALHCTILASAGQQRSRMLATLFKDERCQQLAAYGILEKMYLDRIIRGNQLQEFAAMLMPHQKATTADGSSILDRAVIEHNLLSASKLYNNITFEELGALLEIPAAKAEKIASQMITEGRMNGFIDQIDGIVHFETREALPTWDKQIQSLCFQVNNLLEKISQTAPEWTAQAMEAQMAQ

SEQ ID NO: 747565 - protein, 162 aa, Homo sapiens
MLATLFKDERCQQLAAYGILEKMYLDRIIRGNQLQEFAAMLMPHQKATTADGSSILDRAVIEHNLLSASKLYNNITFEELGALLEIPAAKAEKIASQMITEGRMNGFIDQIDGIVHFETREALPTWDKQIQSLCFQVNNLLEKISQTAPEWTAQAMEAQMAQ

SEQ ID NO: 747566 - protein, 142 aa, Homo sapiens
APLKVSPPARGNQLQEFAAMLMPHQKATTADGSSILDRAVIEHNLLSASKLYNNITFEELGALLEIPAAKAEKIASQMITEGRMNGFIDQIDGIVHFETREALPTWDKQIQSLCFQVNNLLEKISQTAPEWTAQAMEAQMAQ

SEQ ID NO: 747567 - protein, 121 aa, Homo sapiens
LGFPKCWDDRGSSILDRAVIEHNLLSASKLYNNITFEELGALLEIPAAKAEKIASQMITEGRMNGFIDQIDGIVHFETREALPTWDKQIQSLCFQVNNLLEKISQTAPEWTAQAMEAQMAQ

SEQ ID NO: 747568 - protein, 249 aa, Homo sapiens
MAAAVRQDLAQLMNSSGSHKDLAGKYRQILEKAIQLSGAEQLEALKAFVEAMVNENVSLVISRQLLTDFCTHLPNLPDSTAKEIYHFTLEKIQPRVISFEEQVASIRQHLASIYEKEEDWRNAAQVLVGIPLETGQKQYNVDYKLETYLKIARLYLEDDDPVQAEAYINRASLLQNESTNEQLQIHYKVCYARVLDYRRKFIEAAQRYNELSYKTIVHESERLEALKHALHCTILASAGLQRSRCYISF

SEQ ID NO: 747569 - protein, 345 aa, Homo sapiens
MAAAVRQDLAQLMNSSGSHKDLAGKYRQILEKAIQLSGAEQLEALKAFVEAMVNENVSLVISRQLLTDFCTHLPNLPDSTAKEIYHFTLEKIQPRVISFEEQVASIRQHLASIYEKEEDWRNAAQVLVGIPLETGQKEKRRENQIEDKTKTGTKIENRDEKELNQEERAKLKTRIRRNGQTQTESNEKDEHTFSIDEYNPMNKKQILEQRNEIRDEEMMKETQEGQPKDHRADSYWRRSHHLRTHISCKGADDSKGKALQRRVFPRCTKRITPFTRKAGPGQCSEKSHCTMPRCGAAAHHGREKAPHRTAKPQEGRRPMNAVKEEKREPTGHRKHGPDLPNTEGG

SEQ ID NO: 747570 - protein, 105 aa, Homo sapiens
MAAAVRQDLAQLMNSSGSHKDLAGKYRQILEKAIQLSGAEQLEALKAFVEAMVNENVSLVISRQLLTDFCTHLPNLPDSTAKEIYHFTLEKIQPRVISFEEQVKI

SEQ ID NO: 747571 - protein, 234 aa, Homo sapiens
AEPREPRTPSCTCAGGSMTVELWLRLRGKGLAMLHVTRGVWGSRVRVWPLLPALLGPPRALSSLAAKMGEYRKMWNPREPRDWAQQYRERFIPFSKEQLLRLLIQQEFHSSPAEKAALEAFSAHVDFCTLFHYHQILARLQALYDPINPDRETLDQPSLTDPQRLSNEQEVLRALEPLLAQANFSPLSEDTLAYALVVHHPQDEVQVTVNLDQPGWESWLHGTAPSCHSFLYLS

SEQ ID NO: 747572 - protein, 618 aa, Homo sapiens
AEPREPRTPSCTCAGGSMTVELWLRLRGKGLAMLHVTRGVWGSRVRVWPLLPALLGPPRALSSLAAKMGEYRKMWNPREPRDWAQQYRERFIPFSKEQLLRLLIQQEFHSSPAEKAALEAFSAHVDFCTLFHYHQILARLQALYDPINPDRETLDQPSLTDPQRLSNEQEVLRALEPLLAQANFSPLSEDTLAYALVVHHPQDEVQVTVNLDQYVYIHFWALGQRVGQMPLKSSVGSRRGFFTKLPPAERCGGPCSPAAARGSKVRVKRGLTGKVSTTLDSQGKRKDGDSSPHFPIRKTEARQREVHILKMRHGQDSNKQSARPIPGIDGAIEPIPCGWTQLIPGFFPMITESLLRWLCDCRARVSVLGLEGAPRAVQSRILLLPLSLSLRRYFKRVVLAARTKRGHLVLKSFKDTPLEGLEQLLPELKVRTPTLQRALLNLMLVVSGVAIFVNVGMVVLTDLKVATSLLLLLFAIFMGLRASKMFGQRRSAQALELAHMLYYRSTSNNSELLSALALRAQDEHTKEALLAHSFLARRPGGTQGSPEETSRWLRSEVENWLLAKSGCEVTFNGTRALAHLQALTPSMGLYPPPGFPKLDPVAPITSEPPQATPSSNIS

SEQ ID NO: 747573 - protein, 477 aa, Homo sapiens
AEPREPRTPSCTCAGGSMTVELWLRLRGKGLAMLHVTRGVWGSRVRVWPLLPALLGPPRALSSLAAKMGEYRKMWNPREPRDWAQQYRERFIPFSKEQLLRLLIQQEFHSSPAEKAALEAFSAHVDFCTLFHYHQILARLQALYDPINPDRETLDQPSLTDPQRLSNEQEVLRALEPLLAQANFSPLSEDTLAYALVVHHPQDEVQVTVNLDQYVYIHFWALGQRVGQMPLKSSVGSRRGFFTKLPPAERRYFKRVVLAARTKRGHLVLKSFKDTPLEGLEQLLPELKVRTPTLQRALLNLMLVVSGVAIFVNVGMVVLTDLKVATSLLLLLFAIFMGLRASKMFGQRRSAQALELAHMLYYRSTSNNSELLSALALRAQDEHTKEALLAHSFLARRPGGTQGSPEETSRWLRSEVENWLLAKSGCEVTFNGTRALAHLQALTPSMGLYPPPGFPKLDPVAPITSEPPQATPSSNIS

SEQ ID NO: 747574 - protein, 426 aa, Homo sapiens
TPAQSFLWLRLRGKGLAMLHVTRGVWGSRVRVWPLLPALLGPPRALSSLAAKMGEYRKMWNPREPRDWAQQYRERFIPFSKEQLLRLLIQALYDPINPDRETLDQPSLTDPQRLSNEQEVLRALEPLLAQANFSPLSEDTLAYALVVHHPQDEVQVTVNLDQYVYIHFWALGQRVGQMPLKSSVGSRRGFFTKLPPAERRYFKRVVLAARTKRGHLVLKSFKDTPLEGLEQLLPELKVRTPTLQRALLNLMLVVSGVAIFVNVGMVVLTDLKVATSLLLLLFAIFMGLRASKMFGQRRSAQALELAHMLYYRSTSNNSELLSALALRAQDEHTKEALLAHSFLARRPGGTQGSPEETSRWLRSEVENWLLAKSGCEVTFNGTRALAHLQALTPSMGLYPPPGFPKLDPVAPITSEPPQATPSSNIS

SEQ ID NO: 747575 - protein, 477 aa, Homo sapiens; identical to SEQ ID NO: 747573

SEQ ID NO: 747576 - protein, 597 aa, Homo sapiens
TPAQSFLWLRLRGKGLAMLHVTRGVWGSRVRVWPLLPALLGPPRALSSLAAKMGEYRKMWNPREPRDWAQQYRERFIPFSKEQLLRLLIQALYDPINPDRETLDQPSLTDPQRLSNEQEVLRALEPLLAQANFSPLSEDTLAYALVVHHPQDEVQVTVNLDQYVYIHFWALGQRVGQMPLKSSVGSRRGFFTKLPPAERCGGPCSPAAARGSKVRVKRGLTGQCLVWVSGPQAGSGEMGGVTHPNAVFSSQGKVSTTLDSQGKRKDGDSSPHFPIRKTEARQREVHILKMRHGQDSNKQSARPIPGIDGAIEPIPCGWTQLIPGFFPMITESLLRWLCDCRARVSVLGLEGAPRAVQSQILLLPLSLSLRRYFKRVVLAARTKRGHLVLKSFKDTPLEGLEQLLPELKVRTPTLQRALLNLMLVVSGVAIFVNVGMVVLTDLKVATSLLLLLFAIFMGLRASKMFGQRRSAQALELAHMLYYRSTSNNSELLSALALRAQDEHTKEALLAHSFLARRPGGTQGSPEETSRWLRSEVENWLLAKSGCEVTFNGTRALAHLQALTPSMGLYPPPGFPKLDPVAPITSEPPQATPSSNIS

SEQ ID NO: 747577 - protein, 115 aa, Homo sapiens
MGFSKKQGRESASDMRTIQGKGAVPPKHDEPLEARYSHGVYPRAPVRMSHRQSVSPEYEGMGTSRSHHPCDWPVAASSSHRTSARNGKRSPLGEWGGKRVPLQAAGEQSAPLGRV

SEQ ID NO: 747578 - protein, 105 aa, Homo sapiens
MRTAEARQIACDELFTNEAEEYSLYEAVKFLMLNRAIELYNDKEKGKEVPFFSVLLFARDTSNDPGQLLRNHLNQVGHTGGLEQVSCAFEHVLPQNKAALLIKLD

SEQ ID NO: 747579 - protein, 348 aa, Homo sapiens
MPQPEAWPGASCAETPAREAAATARDGGKAAASGQPRPEMQCPAEHEEDMYRAADEIEKEKELLIHERGASEPRLSVAPEMDIMDYCKKEWRGNTQKATCMKMGYEEVSQKFTSIRRVRGDNYCALRATLFQAMSQAVGLPPWLQDPELMLVLPEKLISKYNWIKQWKLGLKFDGKNEDLVDKIKESLTLLRKKWAGLAEMRTAEARQIACDELFTNEAEEYSLYEAVKFLMLNRAIELYNDKEKGKEVPFFSVLLFARDTSNDPGQLLRNHLNQVGHTGGLEQVEMFLLAYAVRHTIQVYRLSKYNTEEFITVYPTDPPKDWPVVTLIAEDDRHYNIPVRVCEETSL

SEQ ID NO: 747580 - protein, 268 aa, Homo sapiens
MDIMDYCKKEWRGNTQKATCMKMGYEEVSQKFTSIRRVRGDNYCALRATLFQAMSQAVGLPPWLQDPELMLVLPEKLISKYNWIKQWKLGLKFDGKNEDLVDKIKESLTLLRKKWAGLAEMRTAEARQIACDELFTNEAEEYSLYEAVKFLMLNRAIELYNDKEKGKEVPFFSVLLFARDTSNDPGQLLRNHLNQVGHTGGLEQVEMFLLAYAVRHTIQVYRLSKYNTEEFITVYPTDPPKDWPVVTLIAEDDRHYNIPVRVCEETSL

SEQ ID NO: 747581 - protein, 268 aa, Homo sapiens; identical to SEQ ID NO: 747580

SEQ ID NO: 747582 - protein, 348 aa, Homo sapiens; identical to SEQ ID NO: 747579

SEQ ID NO: 747583 - protein, 268 aa, Homo sapiens; identical to SEQ ID NO: 747580

SEQ ID NO: 747584 - protein, 148 aa, Homo sapiens [sequence omitted]

SEQ ID NO: 747585 - protein, 158 aa, Homo sapiens
MPQPEAWPGASCAETPAREAAATARDGGKAAASGQPRPEMQCPAEHEEDMYRAADEIEKEKELLIHERGASEPRLSVAPEMDIMDYCKKEWRGNTQKATCMKMGYEEVSQKFTSIRRVRGDNYCALRATLFQAMSQAVGLPPWLQDPELMLVRYQKNS

SEQ ID NO: 747586 - protein, 133 aa, Homo sapiens
IDKHQFQVLRPQKPLRTQSHLFNSKSTMTHGKLMNPWWPAGKKQCCYILVFAIGGNSYYGMISSVCICSSCPNKVAHWGLKQQRCNSSQFRRREVRDHSVGRSDSSQGLSPWTAEADSYLCPHMVVPLCVSVS

SEQ ID NO: 747587 - protein, 45 aa, Homo sapiens [sequence omitted]

SEQ ID NO: 747588 - protein, 227 aa, Homo sapiens
MAPCHIRKYQESDRQWVVGLLSRGMAEHAPATFRQLLKLPRTLILLLGGPLALLLVSGSWLLALVFSISLFPALWFLAKKPWTEYVDMTLCTDMSDITKSYLSERGSCFWVAESEEKVVGMVGALPVDDPTLREKRLQLFHLFVDSEHRRQGIAKALVRTVLQFARDQGYSEVILDTGTIQLSAMALYQSMGFKKTGQSFFCVWARLVALHTVHFIYHLPSSKVGSL

SEQ ID NO: 747589 - protein, 227 aa, Homo sapiens; identical to SEQ ID NO: 747588

SEQ ID NO: 747590 - protein, 227 aa, Homo sapiens; identical to SEQ ID NO: 747588

SEQ ID NO: 747591 - protein, 227 aa, Homo sapiens; identical to SEQ ID NO: 747588

SEQ ID NO: 747592 - protein, 410 aa, Homo sapiens
METRPTALMSSTVAAAAPAAGAASRKESPGRWGLGEDPTGVSPSLQCRVCGDSSSGKHYGIYACNGCSGFFKRSVRRRLIYRCQVGAGMCPVDKAHRNQCQACRLKKCLQAGMNQDAVQNERQPRSTAQVHLDSMESNTESRPESLVAPPAPAGRSPRGPTPMSAARALGHHFMASLITAETCAKLEPEDADENIDVTSNDPEFPSSPYSSSSPCGLDSIHETSARLLFMAVKWAKNLPVFSSLPFRDQVILLEEAWSELFLLGAIQWSLPLDSCPLLAPPEASAAGGAQGRLTLASMETRVLQETISRFRALAVDPTEFACMKALVLFKPETRGLKDPEHVEALQDQSQVMLSQHSKAHHPSQPVRFGKLLLLLPSLRFITAERIELLFFRKTIGNTPMEKLLCDMFKN

SEQ ID NO: 747593 - protein, 367 aa, Homo sapiens
METRPTALMSSTVAAAAPAAGAASRKESPGRWGLGEDPTGVSPSLQCRVCGDSSSGKHYGIYACNGCSGFFKRSVRRRLIYRCQVGAGMCPVDKAHRNQCQACRLKKCLQAGMNQDAVQNERQPRSTAQVHLDSMESNTESRPESLVAPPAPAGRSPRGPTPMSAARALGHHFMASLITAETCAKLEPEDADENIDVTSNDPEFPSSPYSSSSPCGLDSIHETSARLLFMAVKWAKNLPVFSSLPFRDQVILLEEAWSELFLLGAIQWSLPLDSCPLLAPPEASAAGGAQGRLTLASMETRVLQETISRFRALAVDPTEFACMKALVLFKPETRGLKDPEHVEALQDQSQVMLSQHSKAHHPSQPVR

SEQ ID NO: 747594 - protein, 386 aa, Homo sapiens
MSHFLRDTWLAGDGEGVSPSLQCRVCGDSSSGKHYGIYACNGCSGFFKRSVRRRLIYRCQVGAGMCPVDKAHRNQCQACRLKKCLQAGMNQDAVQNERQPRSTAQVHLDSMESNTESRPESLVAPPAPAGRSPRGPTPMSAARALGHHFMASLITAETCAKLEPEDADENIDVTSNDPEFPSSPYSSSSPCGLDSIHETSARLLFMAVKWAKNLPVFSSLPFRDQVILLEEAWSELFLLGAIQWSLPLDSCPLLAPPEASAAGGAQGRLTLASMETRVLQETISRFRALAVDPTEFACMKALVLFKPETRGLKDPEHVEALQDQSQVMLSQHSKAHHPSQPVRFGKLLLLLPSLRFITAERIELLFFRKTIGNTPMEKLLCDMFKN

SEQ ID NO: 747595 - protein, 129 aa, Homo sapiens [sequence omitted]

SEQ ID NO: 747596 - protein, 365 aa, Homo sapiens
MASTESSLLRSLGLSPGPGSSEVELDCWFDEDFKFILLPVSYAVVFVLGLGLNAPTLWLFIFRLRPWDATATYMFHLALSDTLYVLSLPTLIYYYAAHNHWPFGTEICKFVRFLFYWNLYCSVLFLTCISVHRYLGICHPLRALRWGRPRLAGLLCLAVWLVVAGCLVPNLFFVTTSNKGTTVLCHDTTRPEEFDHYVHFSSAVMGLLFGVPCLVTLVCYGLMARRLYQPLPGSAQSSSRLRSLRTIAVVLTVFAVCFVPFHITRTIYYLARLLEADCRVLNIVNVVYKVTRPLASANSCLDPVLYLLTGDKYRRQLRQLCGGGKPQPRTAASSLALVSLPEDSSCRWAATPQDSSCSTPRADRL

SEQ ID NO: 747597 - protein, 40 aa, Homo sapiens
MKAESTNTGSKWRPESQVCIPTHHDWQTSSGFKGTAGLFL

SEQ ID NO: 747598 - protein, 312 aa, Homo sapiens
MDGGNQSEGSEFLLLGMSESPEQQRILFWMFLSMYLVTVVGNVLIILAISSDSRLHTPVYFFLANLSFTDLFFVTNTIPKMLVNLQSHNKAISYAGCLTQLYFLVSLVALDNLILAVMAYDRYVAICCPLHYTTAMSPKLCILLLSLCWVLSVLYGLIHTLLMTRVTFCGSRKIHYIFCEMYVLLRMACSNIQINHTVLIATGCFIFLIPFGFVIISYVLIIRAILRIPSVSKKYKAFSTCASHLGAVSLFYGTLCMVYLKPLHTYSVKDSVATVMYAVVTPMMNPFIYSLRNKDMHGALGRLLDKHFKRLT

SEQ ID NO: 747599 - protein, 123 aa, Homo sapiens
MILENMLCQNRKVNQVGGRHRISLKELQFEGDAKRISKKMTISDTRGIGAHQVGRSTNLDWGLSEGSRRKTLLKMKLTYYLILLNILRQVFICEWCLHDHNINTEYCSKNMTSLYVEDEMNRN

SEQ ID NO: 747600 - protein, 1002 aa, Homo sapiens
MGVAGRNRPGAAWAVLLLLLLAPLLLLQGTSPGRGRARGRRRVSVRPHVDECAQGLDDCHADALCQNTPTSYKCSCKPGYQGEGRQCEDIDECGNELNGGCVHDCLNIPGNYRCTCFDGFMLAHDGHNCLDVDECLENNGGCQHTCVNVMGSYECCCKEGFFLSDNQHTCIHRSEEGLSCMNKDHGCSHICKEAPRGSVACECRPGFELAKNQRDCILTCNHGNGGCQHSCDDTADGPECSCHPQYKMHTDGRSCLEREDTVLEVTESNTTSVVDGDKRVKRRLLMETCAVNNGGCDRTCKDTSTGVHCSCPVGFTLQLDGKTCKDIDECQTRNGGCDHFCKNIVGSFDCGCKKGFKLLTDEKSCQDVDECSLDRTCDHSCINHPGTFACACNRGYTLYGFTHCGDTNECSINNGGCQQVCVNTVGSYECQCHPGYKLHWNKKDCVEVKGLLPTSVSPRVSLHCGKSGGGDGCFLRCHSGIHLSSDVTTIRTSVTFKLNEGKCSLKNAELFPEGLRPALPEKHSSVKESFRYVNLTCSSGKQVPGAPGRPSTPKEMFITVEFELETNQKEVTASCDLSCIVKRTEKRLRKAIRTLRKAVHREQFHLQLSGMNLDVAKKPPRTSERQAESCGVGQGHAENQCVSCRAGTYYDGARERCILCPNGTFQNEEGQMTCEPCPRPGNSGALKTPEAWNMSECGGLCQPGEYSADGFAPCQLCALGTFQPEAGRTSCFPCGGGLATKHQGATSFQDCETRVQCSPGHFYNTTTHRCIRCPVGTYQPEFGKNNCVSCPGNTTTDFDGSTNITQCKNRRCGGELGDFTGYIESPNYPGNYPANTECTWTINPPPKRRILIVVPEIFLPIEDDCGDYLVMRKTSSSNSVTTYETCQTYERPIAFTSRSKKLWIQFKSNEGNSARGFQVPYVTYDEDYQELIEDIVRDGRLYASENHQEILKDKKLIKALFDVLAHPQNYFKYTAQESREMFPRSFIRLLRSKVSRFLRPYK

SEQ ID NO: 747601 - protein, 158 aa, Homo sapiens
PPSSSVSLVCELQVWQGLAWARAPQPKAWVSLGLFDQDQRVLSGRWRLPLRALPLDPSLSLGQLNGIPQAGQAELFLRLVNARDAAVQTLAEINPASVHEYQYPPPVSSTSSLEANFLTPAVGFADPPPRTEEPLSGVKDRDEGLGPHHSSDLPPVSF

SEQ ID NO: 747602 - protein, 161 aa, Homo sapiens
SFFLLPACNLEVIAGASAAILDHEVTLRMEAICEDDATEREEAGFPLSLWSNHTSLKLLPLGIFYMLGKRNFYVVKPLLLRDFPCAAKQIQQQMGKASQGFQGDKRPLNKEQDSFLKYFSKTVRNLYSRGEATTMRFCSRGQRSGLTPKIPFNKAMPSSHW

SEQ ID NO: 747603 - protein, 378 aa, Homo sapiens
MRMLVSGRRVKKWQLIIQLFATCFLASLMFFWEPIDNHIVSHMKSYSYRYLINSYDFVNDTLSLKHTSAGPRYQYLINHKEKCQAQDVLLLLFVKTAPENYDRRSGIRRTWGNENYVRSQLNANIKTLFALGTPNPLEGEELQRKLAWEDQRYNDIIQQDFVDSFYNLTLKLLMQFSWANTYCPHAKFLMTADDDIFIHMPNLIEYLQSLEQIGVQDFWIGRVHRGAPPIRDKSSKYYVSYEMYQWPAYPDYTAGAAYVISGDVAAKVYEASQTLNSSLYIDDVFMGLCANKIGIVPQDHVFFSGEGKTPYHPCIYEKMMTSHGHLEDLQDLWKNATDPKVKTISKGFFGQIYCRLMKIILLCKISYVDTYPCRAAFI

SEQ ID NO: 747604 - protein, 376 aa, Homo sapiens
MLVSGRRVKKWQLIIQLFATCFLASLMFFWEPIDNHIVSHMKSYSYRYLINSYDFVNDTLSLKHTSAGPRYQYLINHKEKCQAQDVLLLLFVKTAPENYDRRSGIRRTWGNENYVRSQLNANIKTLFALGTPNPLEGEELQRKLAWEDQRYNDIIQQDFVDSFYNLTLKLLMQFSWANTYCPHAKFLMTADDDIFIHMPNLIEYLQSLEQIGVQDFWIGRVHRGAPPIRDKSSKYYVSYEMYQWPAYPDYTAGAAYVISGDVAAKVYEASQTLNSSLYIDDVFMGLCANKIGIVPQDHVFFSGEGKTPYHPCIYEKMMTSHGHLEDLQDLWKNATDPKVKTISKGFFGQIYCRLMKIILLCKISYVDTYPCRAAFI

SEQ ID NO: 747605 - protein, 376 aa, Homo sapiens; identical to SEQ ID NO: 747604

SEQ ID NO: 747606 - protein, 376 aa, Homo sapiens; identical to SEQ ID NO: 747604

SEQ ID NO: 747607 - protein, 378 aa, Homo sapiens; identical to SEQ ID NO: 747603

SEQ ID NO: 747608 - protein, 378 aa, Homo sapiens; identical to SEQ ID NO: 747603

SEQ ID NO: 747609 - protein, 378 aa, Homo sapiens; identical to SEQ ID NO: 747603

SEQ ID NO: 747610 - protein, 378 aa, Homo sapiens; identical to SEQ ID NO: 747603

SEQ ID NO: 747611 - protein, 251 aa, Homo sapiens
MLVSGRRVKKWQLIIQLFATCFLASLMFFWEPIDNHIVSHMKSYSYRYLINSYDFVNDTLSLKHTSAGPRYQYLINHKEKCQAQDVLLLLFVKTAPENYDRRSGIRRTWGNENYVRSQLNANIKTLFALGTPNPLEGEELQRKLAWEDQRYNDIIQQDFVDSFYNLTLKLLMQFSWANTYCPHAKFLMTADDDIFIHMPNLIEYLQSLEQIGVQDFWIGRVHRGAPPIRDKSSKYYVSCRRGREFSSSRRP

SEQ ID NO: 747612 - protein, 66 aa, Homo sapiens
MEHVVQACHRFIQASYEPLGIIRFRHLQTLKSHVRIHTGEKPYHCDPCGLHFRHKSQLRLHLRQKH

SEQ ID NO: 747613 - protein, 307 aa, Homo sapiens
MLNTTSVTEFLLLGVTDIQELQPFLFVVFLTIYFISVTGNGAVLMIVISDPRLHSLMYFFLGNLSYLDICYSTVTLPKMLQNFLSTHKAISFLGCISQLHFFHFLGSTESMLFAVMAFDLSVAICKPLRYTVIMNPQLCTQMAITIWVIGFFHALLHSVMTSRLNFCGSNRIHHFLCDIKPLLKLACGNTELNQWLLSTVTGTIAMGPFFLTLLSYFYIITYLFFKTRSCSMLCKALSTCASHFMVVILFYAPVLFTYIHPALESFMDQDRIVAIMYTVVTPVLNPLIYTLRNKEVKGALGRVIRRL

SEQ ID NO: 747614 - protein, 402 aa, Homo sapiens
PFRARRAFGGVGRAAERSRGSTAVRWRRVYADGARPEPRAPRGSPPAGLPPLPRLRLGTTSAFCWRTVLSFSALRSNGNFIAPGWKLKGLAFPLSLSLSHSPSLSLSRPPFPLLPPPFPRSRSQHLQARDPAPSTSQLSGCRPFHGRRARLQPPPPRGGRDATMGLIWLLLLSLLEPGWPAAGPGARLRRDAGGRGGVYEHLGGAPRRRKLYCATKYHLQLHPSGRVNGSLENSAYSILEITAVEVGIVAIRGLFSGRYLAMNKRGRLYASEHYSAECEFVERIHELGYNTYASRLYRTVSSTPGARRQPSAERLWYVSVNGKGRPRRGFKTRRTQKSSLFLPRVLDHRDHEMVRQLQSGLPRPPGKGVQPRRRRQKQSPDNLEPSHVQASRLGSQLEASAH

SEQ ID NO: 747615 - protein, 112 aa, Homo sapiens
CDTRPGSEKRRAGWPLPCDTWPGSEKRQAGWPLPCHVTHGLVLRSGRQGGRCHATHGLVLRSGGQGGCCSESHTLAFAVHQSETRPASSLPFMLVPSFHWIQRGFECIGWRQ

SEQ ID NO: 747616 - protein, 143 aa, Homo sapiens
MRPPEPRKATVLRGILRERPTGFQASLSLRTLISTTGFKCGLEAWLPVWTSLHLQELTSRHSWMPPPAGTSRASSRPRLHLLWDWPPQAPPGHPPAPGCSFCGTEPRRHLPGILPPQAAPSVGLSPAGTSPASSRPRLQLLWD

SEQ ID NO: 747617 - protein, 129 aa, Homo sapiens
LATPLPDNVVVVSQEEFLAVLAGVVNHPDPSHKVDHLLACRVVQVVAALVTPVPVHPLQPELAAGRRPIRHDKPTPRAPRPPARRGRPRRGWGCGGPAGAQRAAQGADFRGDTQAQPSGPAATIIRCSR

SEQ ID NO: 747618 - protein, 68 aa, Homo sapiens
GSQRWTNGFTTLKGMLCGVCLGANHHHDTLPNEQTKANWLRILTKTSQPEEAMPWVKSRTTRFQTLYF

SEQ ID NO: 747619 - protein, 325 aa, Homo sapiens
MSNDGRSRNRDRRYDEVPSDLPYQDTTIRTHPILHDSERAVSADPLPPPPLPLQPPFGPDFYSSDTEEPAIAPDLKPVRRFVPDSWKNFFRGKKKDPEWDKPVSDIRYISDGVECSPPASPARPNHRSPLNSCKDPYGGSEGTFSSRKEADAVFPRDPYGSLDRHTQTVRTYSEKVEEYNLRYSYMKSWAGLLRILGVVELLLGAGVFACVTAYIHKDSEWYNLFGYSQPYGMGGVGGLGSMYGGYYYTGPKTPFVLVVAGLAWITTIIILVLGMSMYYRTILLDSNWWPLTEFGINVALFILYMAAAIVYVNDTNRGGLCYYPL

SEQ ID NO: 747620 - protein, 93 aa, Homo sapiens
MGGVGGLGSMYGGYYYTGPKTPFVLVVAGLAWITTIIILVLGMSMYYRTILLDSNWWPLTEFGINVALFILYMAAAIVYVNDTNRGGLCYYPL

SEQ ID NO: 747621 - protein, 212 aa, Homo sapiens [sequence omitted]

SEQ ID NO: 747622 - protein, 212 aa, Homo sapiens [sequence omitted]

SEQ ID NO: 747623 - protein, 333 aa, Homo sapiens
MQAAGHPEPLDSRGSFSLPTMGANVSQDNGTGHNATFSEPLPFLYVLLPAVYSGICAVGLTGNTAVILVILRAPKMKTVTNVFILNLAVADGLFTLVLPVNIAEHLLQYWPFGELLCKLVLAVDHYNIFSSIYFLAVMSVDRYLVVLATVRSRHMPWRTYRGAKVASLCVWLGVTVLVLPFFSFAGVYSNELQVPSCGLSFPWPEQVWFKASRVYTLVLGFVLPVCTICVLYTDLLRRLRAVRLRSGAKALGKARRKVTVLVLVVLAVCLLCWTPFHLASVVALTTDLPQTPLVISMSYVITSLSYANSCLNPFLYAFLDDNFRKNFRSILRC

SEQ ID NO: 747624 - protein, 114 aa, Homo sapiens
RIISGSFCMYNHKKTLAFICFILLRQSKVKVLPPSLSTHSHTEHKYLLMMWTPFILPKFLKSLLPECLMQALNSLLTPFHPPYDARWAMLPVPAMLECLFLSSHFPPVGCFHVY

SEQ ID NO: 747625 - protein, 360 aa, Homo sapiens
MSGSVLFTAGERWRCFLTPSRSSLYWALHNFCCRKKSTTPKKITPNVTFCDENAKEPENALDKLFSSEQQASILHVLNTASTKELEAFRLLRGRRSINIVEHRENFGPFQNLESLMNVPLFKYKSTVQVCNSILCPKTGREKRKSPENRFLRKLLKPDIERERLKAVNSIISIVFGTRRIAWAHLDRKLTVLDWQQSDRWSLMRGIYSSSVYLEEISSIISKMPKADFYVLEKTGLSIQNSSLFPILLHFHIMEAMLYALLNKTFAQDGQHQVLSMNRNAVGKHFELMIGDSRTSGKELVKQFLFDSILKADPRVFFPSDKIVHYRQMFLSTELQRVEELYDSLLQAIAFYELAVFDSQP

SEQ ID NO: 747626 - protein, 176 aa, Homo sapiens
MSGSVLFTAGERWRCFLTPSRSSLYWALHNFCCRKKSTTPKKITPNVTFCDENAKEPENALDKLFSSEQQASILHVLNTASTKELEAFRLLRGRRSINIVEHRENFGPFQNLESLMNVPLFKYKSTVQVCNSILCPKTGREKRKSPENRFLRKLLKPDIERERLKEELPGLTLIVS

SEQ ID NO: 747627 - protein, 181 aa, Homo sapiens
MSGSVLFTAGERWRCFLTPSRSSLYWALHNFCCRKKSTTPKKITPNVTFCDENAKEPENALDKLFSSEQQASILHVLNTASTKELEAFRLLRGRRSINIVEHRENFGPFQNLESLMNVPLFKYKSTVQVCNSILCPKTGREKRKSPENRFLRKLLKPDIERERLKVYSSCLLYCLIFENLL

SEQ ID NO: 747628 - protein, 331 aa, Homo sapiens
MSGSVLFTAGERWRCFLTPSRSSLYWALHNFCCRKKSTTPKKITPNVTFCDENAKEPENALDKLFSSEQQASILHVLNTASTKELEAFRLLRGRRSINIVEHRENFGPFQNLESLMNVPLFKYKSTVQVCNSILCPKTGREKRKSPENRFLRKLLKPDIERERLKAVNSIISIVFGTRRIAWAHLDRKLTVLDWQQSDRWSLMRGIYSSSVYLEEISSIISKMPKADFYVLEKTGLSIQNSSLFPILLHFHIMEAMLYALLNKTFAQDGQHQVLSMNRTAWGTPLTVMGPGHWRALGRPRPKEGARGSPKNLTGFSWTRKCFNSPIGAPPP

SEQ ID NO: 747629 - protein, 225 aa, Homo sapiens
MCPCLSIKVQFKFVTPYFVQRLDGKKESHRTVNSIISIVFGTRRIAWAHLDRKLTVLDWQQSDRWSLMRGIYSSSVYLEEISSIISKMPKADFYVLEKTGLSIQNSSLFPILLHFHIMEAMLYALLNKTFAQDGQHQVLSMNRNAVGKHFELMIGDSRTSGKELVKQFLFDSILKADPRVFFPSDKIVHYRQMFLSTELQRVEELYDSLLQAIAFYELAVFDSQP

SEQ ID NO: 747630 - protein, 216 aa, Homo sapiens
MNVPLFKYKSTVQVCNSILCPKTGREKRKSPENRFLRKLLKPDIERERLKAVNSIISIVFGTRRIAWAHLDRKLTVLDWQQSDRWSLMRGIYSSSVYLEEISSIISKMPKADFYVLEKTGLSIQNSSLFPILLHFHIMEAMLYALLNKTFAQDGQHQVLSMNRTAWGTPLTVMGPGHWRALGRPRPKEGARGSPKNLTGFSWTRKCFNSPIGAPPP

SEQ ID NO: 747631 - protein, 210 aa, Homo sapiens
MLPLPSCSLPILLLFLLPSVPIESQPPPSTLPPFLAPEWDLLSPRVVLSRGAPAGPPLLFLLEAGAFRESAGAPANRSRRGVSETAPASRRGELAVCDAVSGWVTDRRTAVDLRGREVEVLGEVPAAGGSPLRQYFFETRCKADNAEEGGPGAGGGGCRGVDRRHWVSECKAKQSYVRALTADAQGRVGWRWIRIDTACVCTLLSRTGRA

SEQ ID NO: 747632 - protein, 210 aa, Homo sapiens; identical to SEQ ID NO: 747631

SEQ ID NO: 747633 - protein, 210 aa, Homo sapiens; identical to SEQ ID NO: 747631

SEQ ID NO: 747634 - protein, 130 aa, Homo sapiens
MAIWLLSTGTPKRCGWRAGVGGVDLLGSSHGLGQSSGQTGVRHRGAKFLFWPLQYPEKLAGPLTAAAPRVVERAVKSPQTSTRTPGFSCDLGHSSCPLGLDFPTCKWGCQPWLCLLHEALEDWPRLWRSL

SEQ ID NO: 747635 - protein, 75 aa, Homo sapiens
GLGFVHSPLLKRKQRTSRALMHITDWCQAPWCKIPLLAPPVPRETGWAINCCSTKGGRKSCEEPPNQYQDTWVLL

SEQ ID NO: 747636 - protein, 102 aa, Homo sapiens
SFLSNGCLARQYCGRGGSGASAGQWPPSPRSDSAGGRSLSPAASEVMQRYRWLVTSTTTWPAAHLLGGRMKRSAGQGLPMLDAHLLPNRFGVHSLNAEESGG

SEQ ID NO: 747637 - protein, 261 aa, Homo sapiens
AGCRDPGRELRAPGRPRLPGALRQVLCSLCGWLSLYISFCHLNKHRSYEWSCRLVTFTHGVLSIGLSAYIGFIDGPWPFTHPGSPNTPLQVHVLCLTLGYFIFDLGWCVYFQSEGALMLAHHTLSILGIIMALVLGESGTEVNAVLFGSELTNPLLQMRWFLRETGHYHSFTGDVVDFLFVALFTGVRIGVGACLLFCEMVSPTPKWFVKAGGVAMYAVSWCFMFSIWRFAWRKSIKKYHAWRSRRSEERQLKHNGHLKIH

SEQ ID NO: 747638 - protein, 139 aa, Homo sapiens
RARAESSPGCAPQMALALCLQVLCSLCGWLSLYISFCHLNKHRSYEWSCRLVTFTHGVLSIGLSAYIGFIDGPWPFTHPGSPNTPLQVHVLCLTLGYFIFDLGCIWRFAWRKSIKKYHAWRSRRSEERQLKHNGHLKIH

SEQ ID NO: 747639 - protein, 267 aa, Homo sapiens
MTQCCFLRVHPLFFWFWSFHHRMALALCLQVLCSLCGWLSLYISFCHLNKHRSYEWSCRLVTFTHGVLSIGLSAYIGFIDGPWPFTHPGSPNTPLQVHVLCLTLGYFIFDLGWCVYFQSEGALMLAHHTLSILGIIMALVLGESGTEVNAVLFGSELTNPLLQMRWFLRETGHYHSFTGDVVDFLFVALFTGVRIGVGACLLFCEMVSPTPKWFVKAGGVAMYAVSWCFMFSIWRFAWRKSIKKYHAWRSRRSEERQLKHNGHLKIH

SEQ ID NO: 747640 - protein, 258 aa, Homo sapiens
RARAESSPGCAPQMALALCLQVLCSLCGWLSLYISFCHLNKHRSYEWSCRLVTFTHGVLSIGLSAYIGFIDGPWPFTHPGSPNTPLQVHVLCLTLGYFIFDLGWCVYFQSEGALMLAHHTLSILGIIMALVLGESGTEVNAVLFGSELTNPLLQMRWFLRETGHYHSFTGDVVDFLFVALFTGVRIGVGACLLFCEMVSPTPKWFVKAGGVAMYAVSWCFMFSIWRFAWRKSIKKYHAWRSRRSEERQLKHNGHLKIH

SEQ ID NO: 747641 - protein, 397 aa, Homo sapiens
MRSPSAAWLLGAAILLAASLSCSGTIQGTNRSSKGRSLIGKVDGTSHVTGKGVTVETVFSVDEFSASVLTGKLTTVFLPIVYTIVFVVGLPSNGMALWVFLFRTKKKHPAVIYMANLALADLLSVIWFPLKIAYHIHGNNWIYGEALCNVLIGFFYGNMYCSILFMTCLSVQRYWVIVNPMGHSRKKANIAIGISLAIWLLILLVTIPLYVVKQTIFIPALNITTCHDVLPEQLLVGDMFNYFLSLAIGVFLFPAFLTASAYVLMIRMLRSSAMDENSEKKRKRAIKLIVTVLAMYLICFTPSNLLLVVHYFLIKSQGQSHVYALYIVALCLSTLNSCIDPFVYYFVSHDFRDHAKNALLCRSVRTVKQMQVSLTSKKHSRKSSSYSSSSTTVKTSY

SEQ ID NO: 747642 - protein, 303 aa, Homo sapiens [sequence omitted]

SEQ ID NO: 747643 - protein, 180 aa, Homo sapiens
ETFISVMTLVFLSCTGTNRSSKGRSLIGKVDGTSHVTGKGVTVETVFSVDEFSASVLTGKLTTVFLPIVYTIVFVVGLPSNGMALWVFLFRTKKKHPAVIYMANLALADLLSVIWFPLKIAYHIHGNNWIYGEALCNVLIGFFYGNMYCSILFMTCLSVQRYWVIVNPMGHSRKKANIAI

SEQ ID NO: 747644 - protein, 474 aa, Homo sapiens
TEACATPPEMGLSPNLDRQTMAEFSQKRGKRRSDEGLGSMVDFLLANARLVLGVGGAAVLGIATLAVKRFIDRATSPRDEDDTKADSWKELSLLKATPHLQPRPPPAALSQPVLPLAPSSSAPEGPAETDPEVTPQLSSPAPLCLTLQERLLAFERDRVTIPAAQVALAKQLAGDIALELQAYFRSKFPELPFGAFVPGGPLYDGLQAGAADHVRLLVPLVLEPGLWSLVPGVDTVARDPRCWAVRRTQLEFCPRGSSPWDRFLVGGYLSSRVLLELLRKALAASVNWPAIGSLLGCLIRPSMASEELLLEVQHERLELTVAVLVAVPGVDADDRLLLAWPLEGLAGNLWLQDLYPVEAARLRALDDHDAGTRRRLLLLLCAVCRGCSALGQLGRGHLTQVVLRLGEDNVDWTEEALGERFLQALELLIGSLEQASLPCHFNPSVNLFSSLREEEIDDIGYALYSGLQEPEGLL

SEQ ID NO: 747645 - protein, 508 aa, Homo sapiens
ACLSACCEVRGCPRGPSRWVPGSFTFHSQAGLSSGAVVPLPPPVVVRKLRRRQTMAEFSQKRGKRRSDEGLGSMVDFLLANARLVLGVGGAAVLGIATLAVKRFIDRATSPRDEDDTKADSWKELSLLKATPHLQPRPPPAALSQPVLPLAPSSSAPEGPAETDPEVTPQLSSPAPLCLTLQERLLAFERDRVTIPAAQVALAKQLAGDIALELQAYFRSKFPELPFGAFVPGGPLYDGLQAGAADHVRLLVPLVLEPGLWSLVPGVDTVARDPRCWAVRRTQLEFCPRGSSPWDRFLVGGYLSSRVLLELLRKALAASVNWPAIGSLLGCLIRPSMASEELLLEVQHERLELTVAVLVAVPGVDADDRLLLAWPLEGLAGNLWLQDLYPVEAARLRALDDHDAGTRRRLLLLLCAVCRGCSALGQLGRGHLTQVVLRLGEDNVDWTEEALGERFLQALELLIGSLEQASLPCHFNPSVNLFSSLREEEIDDIGYALYSGLQEPEGLL

SEQ ID NO: 747646 - protein, 508 aa, Homo sapiens; identical to SEQ ID NO: 747645

SEQ ID NO: 747647 - protein, 371 aa, Homo sapiens
MAAAAAGLGGGGAGPGPEAGDFLARYRLVSNKLKKRFLRKPNVAEAGEQFGQLGRELRAQECLPYAAWCQLAVARCQQALFHGPGEALALTEAARLFLRQERDARQRLVCPAAYGEPLQAAASALGAAVRLHLELGQPAAAAALCLELAAALRDLGQPAAAAGHFQRAAQLQLPQLPLAALQALGEAASCQLLARDYTGALAVFTRMQRLAREHGSHPVQSLPPPPPPAPQPGPGATPALPAALLPPNSGSAAPSPAALGAFSDVLVRCEVSRVLLLLLLQPPPAKLLPEHAQTLEKYSWEAFDSHGQESSGQLPEELFLLLQSLVMATHEKDTEAIKSLQVEMWPLLTAEQNHLLHLVLQETISPSGQGV

SEQ ID NO: 747648 - protein, 269 aa, Homo sapiens
MAAAAAGLGGGGAGPGPEAGDFLARYRLVSNKLKKRFLRKPNVAEAGEQFGQLGQPAAAAGHFQRAAQLQLPQLPLAALQALGEAASCQLLARDYTGALAVFTRMQRLAREHGSHPVQSLPPPPPPAPQPGPGATPALPAALLPPNSGSAAPSPAALGAFSDVLVRCEVSRVLLLLLLQPPPAKLLPEHAQTLEKYSWEAFDSHGQESSGQLPEELFLLLQSLVMATHEKDTEAIKSLQVEMWPLLTAEQNHLLHLVLQETISPSGQGV

SEQ ID NO: 747649 - protein, 371 aa, Homo sapiens; identical to SEQ ID NO: 747647

SEQ ID NO: 747650 - protein, 371 aa, Homo sapiens; identical to SEQ ID NO: 747647

SEQ ID NO: 747651 - protein, 85 aa, Homo sapiens
DAEVIYEDPEEISWEAFDSHGQESSGQLPEELFLLLQSLVMATHEKDTEAIKSLQVEMWPLLTAEQNHLLHLVLQETISPSGQGV

SEQ ID NO: 747652 - protein, 321 aa, Homo sapiens
MGEWTILERLLEAAVQQHSTMIGRILLTVVVIFRILIVAIVGETVYDDEQTMFVCNTLQPGCNQACYDRAFPISHIRYWVFQIIMVCTPSLCFITYSVHQSAKQRERRYSTVFLALDRDPPESIGGPGGTGGGGSGGGKREDKKLQNAIVNGVLQNTENTSKETEPDCLEVKELTPHPSGLRTASKSKLRRQEGISRFYIIQVVFRNALEIGFLVGQYFLYGFSVPGLYECNRYPCIKEVECYVSRPTEKTVFLVFMFAVSGICVVLNLAELNHLGWRKIKLAVRGAQAKRKSIYEIRNKDLPRVSVPNFGRTQSSDSAYV

SEQ ID NO: 747653 - protein, 121 aa, Homo sapiens
SHSHLLPRSLLPLSAWPPWAWHHHGPGTQSLVGCLCAMSPLLPTHLSLPVLEPSGTPALKDRRPCEVGIPHPPPRGALYQGGPGECFTEGGSVQAVVRTYKPGTLGDRGDRSLEPRNSRSV

SEQ ID NO: 747654 - protein, 130 aa, Homo sapiens [sequence omitted]

SEQ ID NO: 747655 - protein, 89 aa, Homo sapiens
QCSPCLEGPLYLRLQETEASPGTGPYLCLLLLPTAVQPLKLMLPGHNESGASSDKTHKNPAHGAAILGEGDPHGTKCVACAVERTSCGK

SEQ ID NO: 747656 - protein, 106 aa, Homo sapiens
MKGAVELQNLRVALSGRQPGQQGLWAAGQPLPCSGTFGGPLQRTSAPRYSSEILPERPFTFPNWHLQHSRTFYGTLSFSSPSKGPLNLKDRAEGAPHPGLEGLRSS

SEQ ID NO: 747657 - protein, 112 aa, Homo sapiens
PSTSGLCLQPGLGTAGRQIPSQTGLPSSGPRLNPQESAGALPSGWGRWNWPDWRWGDHCACHRDWPSCPTGEHIGVTGEADPSLARLHTPHPHPTIRDSHLIVIHFPSLNSN

SEQ ID NO: 747658 - protein, 68 aa, Homo sapiens
CSSGLDSLVPGDEDKPYKCQLCRSSFRYKGNLASHRTVHTGEKPYHCSICGARFNRPANLKTHSRIHS

SEQ ID NO: 747659 - protein, 136 aa, Homo sapiens
MARTKQTARKSTGGKAPRKQLATKVARKSAPATGGVKKPHRYRPGTVALREIRRYQKSTELLIRKLPFQRLMREIAQDFKTDLRFQSSAVMALQEACESYLVGLFEDTNLCVIHAKRVTIMPKDIQLARRIRGERA

SEQ ID NO: 747660 - protein, 316 aa, Homo sapiens
MPGQNYRTISEFILSGFSAFPQQLLPVLFLLYLLMFLFTLLGNLLIMATVWIERRLHTPMYLFLCALSISEILFTVAITPRMLADLLFTHRSITFVACAIQMFFSFMFGFTHSFLLMVMGYDHYVTICHPLHYNMLMSPRGCAHLVAWTWAGGSVMGMMVTMMVFHLTFCGSNVIHHFLCHVLSLLKLACGSKTSSVIMGVMLVCVTALIGCLFLIILSFVFIVAAILRIPSAEGRHKTFSTCVSHLTVVVMHYSFASLIYLKPKGLHSMYSDALMATTYTVFTPFLSPIIFSLRNKELKNAINKNFCRRFCPLSS

SEQ ID NO: 747661 - protein, 81 aa, Homo sapiens
TMLSPTFVLWDVGYPLYTYGSIFIVIVIIWQVKRSHHELNLEVERSCCWRHQKVRQRARDAASTGEVPISPLTPFHCGCFL

SEQ ID NO: 747662 - protein, 123 aa, Homo sapiens
MLSPTFVLWDVGYPLYTYGSIFIVIVIIWQVKRSHHELNLEVERSCCWRHQKVRQRARDAASTARRLSQEEDQKPQELFSVMKSQGWLPPEGSVRRILCTDPCCQICNAMALEIQQLLADEND

SEQ ID NO: 747663 - protein, 70 aa, Homo sapiens
LLRRSLGSRMVSDRVCKDFEANQFGAITLSYLPKNSGQDSGILSRSILVHKVRIKTSPRVDVKRDEIIVK

SEQ ID NO: 747664 - protein, 77 aa, Homo sapiens
LEENLGNTILNIDLGKELMTNSSKAIATKTKINRWDLIKLKSFCIAKETINRVNRQPPQWEKIFTNYASNKGLISRI

SEQ ID NO: 747665 - protein, 1262 aa, Homo sapiens
MLQQVPENINFPAEEEKILEFWTEFNCFQECLKQSKHKPKFTFYDGPPFATGLPHYGHILAGTIKDIVTRYAHQSGFHVDRRFGWDCHGLPVEYEIDKTLGIRGPEDVAKMGITEYNNQCRAIVMRYSAEWKSTVSRLGRWIDFDNDYKTLYPQFMESVWWVFKQLYDKGLVYRGVKVMPFSTACNTPLSNFESHQNYKDVQDPSVFVTFPLEEDETVSLVAWTTTPWTLPSNLAVCVNPEMQYVKIKDVARGRLLILMEARLSALYKLESDYEILERFPGAYLKGKKYRPLFDYFLKCKENGAFTVLVDNYVKEEEGTGVVHQAPYFGAEDYRVCMDFNIIRKDSLPVCPVDASGCFTTEVTDFAGQYVKDADKSIIRTLKEQGRLLVATTFTHSYPFCWRSDTPLIYKAVPSWFVRVENMVDQLLRNNDLCYWVPELVREKRFGNWLKDARDWTISRNRYWGTPIPLWVSDDFEEVVCIGSVAELEELSGAKISDLHRESVDHLTIPSRCGKGSLHRISEVFDCWFESGSMPYAQVHYPFENKREFEDAFPADFIAEGIDQTRGWFYTLLVLATALFGQPPFKNVIVNGLVLASDGQKMSKRKKNYPDPVSIIQKYGADALRLYLINSPVVRAENLRFKEEGVRDVLKDVLLPWYNAYRFLIQNVLRLQKEEEIEFLYNENTVRESPNITDRWILSFMQSLIGFFETEMAAYRLYTVVPRLVKFVDILTNWYVRMNRRRLKGENGMEDCVMALETLFSVLLSLCRLIAPYTPFLTELMYQNLKVLIDPVSVQDKDTLSIHYLMLPRVREELIDKKTESAVSQMQSVIELGRVIRDRKTIPIKYPLKEIVVIHQDPEALKDIKSLEKYIIEELNVRKVTLSTDKNKYGIRLRAEPDHMVLGKRLKGAFKAVMTSIKQLSSEELEQFQKTGTIVVEGHELHDEDIRLMYTFDQATGGTAQFEAHSDAQALVLLDVTPDQSMVDEGMAREVINRIQKLRKKCNLVPTDEITVYYKAKSEGTYLNSVIESHTEFIFTTIKAPLKPYPVSPSDKVLIQEKTQLKGSELEITLTRGSSLPGPACAYVNLNICANGSEQGGVLLLENPKGDNRLDLLKLKSVVTSIFGVKNTELAVFHDETEIQNQTDLLSLSGKTLCVTAGSAPSLINSSSTLLCQYIIRQLLNAKPQECLMGTVGTLLLENPLGQNGLTHQGLLYEAAKVFGLRSRKLKLFLNETQTQEITEDIPVKTLNMKTVYVSVLPTTADF

SEQ ID NO: 747666 - protein, 509 aa, Homo sapiens
MLQQVPENINFPAEEEKILEFWTEFNCFQECLKQSKHKPKFTFYDGPPFATGLPHYGHILAGTIKDIVTRYAHQSGFHVDRRFGWDCHGLPVEYEIDKTLGIRGPEDVAKMGITEYNNQCRAIVMRYSAEWKSTVSRLGRWIDFDNDYKTLYPQFMESVWWVFKQLYDKGLVYRGVKVMPFSTACNTPLSNFESHQNYKDVQDPSVFVTFPLEEDETVSLVAWTTTPWTLPSNLAVCVNPEMQYVKIKDVARGRLLILMEARLSALYKLESDYEILERFPGAYLKGKKYRPLFDYFLKCKENGAFTVLVDNYVKEEEGTGVVHQAPYFGAEDYRVCMDFNIIRKDSLPVCPVDASGCFTTEVTDFAGQYVKDADKSIIRTLKEQGRLLVATTFTHSYPFCWRSTLLNAKPQECLMGTVGTLLLENPLGQNGLTHQGLLYEAAKVFGLRSRKLKLFLNETQTQEITEDIPVKTLNMKTVYVSVLPTTADFLAWYLSMLVRVSPSLITPIP

SEQ ID NO: 747667 - protein, 187 aa, Homo sapiens
  misc_feature (7)..(7): Xaa can be any naturally occurring amino acid
  misc_feature (23)..(23): Xaa can be any naturally occurring amino acid
  misc_feature (29)..(29): Xaa can be any naturally occurring amino acid
  misc_feature (33)..(33): Xaa can be any naturally occurring amino acid
  misc_feature (42)..(42): Xaa can be any naturally occurring amino acid
  misc_feature (45)..(45): Xaa can be any naturally occurring amino acid
KLEFSDXTFGSNIPKQFVPAVEXGFLDAXEKGXLSGHKLSGXRFXLQDGAHHMVDSNEISFIPSRRRWLLNKALANATLCILEPIMAVEVVAPNEFQGQVIAGINRRHGVITGQDGVEDYFTLYADVPLNDMFGYSTELRSCTEGKGEYTMEYSRYQPCLPSTQEDVINKYLEATGQLPVKKGKAKN

SEQ ID NO: 747668 - protein, 272 aa, Homo sapiens
MTSSHVCCNFLNMWKKSKISTMYYLNQDAKLSNLFLQASSPTTGTAPRSQSRLSVCPSTQDICRICHCEGDEESPLITPCRCTGTLRFVHQSCLHQWIKSSDTRCCELCKYDFIMETKLKPLRKWEKLQMTTSERRKIFCSVTFHVIAITCVVWSLYVLIDRTAEEIKQGNDNGVLEWPFWTKLVVVAIGFTGGLVFMYVQCKVYVQLWRRLKAYNRVIFVQNCPDTAKKLEKNFSCNVNTDIKDAVVVPVPQTGANSLPSAEGGPPEVVSV

SEQ ID NO: 747669 - protein, 272 aa, Homo sapiens; identical to SEQ ID NO: 747668

SEQ ID NO: 747670 - protein, 151 aa, Homo sapiens
MTSSHVCCNFLNMWKKSKISTMYYLNQDAKLSNLFLQASSPTTGTAPRSQSRLSVCPSTQDICRICHCEGDEESPLITPCRCTGTLRFVHQSCLHQWIKSSDTRCCELCKYDFIMETKLKPLRKWEKLQMTTSERIVCIDRPDSGGNQARQ

SEQ ID NO: 747671 - protein, 536 aa, Homo sapiens
MSLFLRVLETLYLDASCCYRGGLQLTPRNEKSPGRSASRSSNISKASSPTTGTAPRSQSRLSVCPSTQDICRSAILHDMSEESFEYCTPVMVLSPARKESGKKSVIQRPRRRRKASERYEHAAEEQIRGRKNDFHLQISSPRWRELYTDSSDSSSTDESHWIQAKRRAQVKFRLSRRRRRNNNKPCENLAGSSTPNGIELVDLGSKGKEQQELIECESCSLNLHRGKHTRYQECNPSLTQGSSEIKRSSRNHEKSKGRYHHRDPQLLQSLRKNEIMKKTFSETDSSTEILGVPEGSKDMNDAGLQVNNPVQKPPATYDDGSDNLEVCRICHCEGDEESPLITPCRCTGTLRFVHQSCLHQWIKSSDTRCCELCKYDFIMETKLKPLRKWEKLQMTTSERRKIFCSVTFHVIAITCVVWSLYVLIDRTAEEIKQGNDNGVLEWPFWTKLVVVAIGFTGGLVFMYVQCKVYVQLWRRLKAYNRVIFVQNCPDTAKKLEKNFSCNVNTDIKDAVVVPVPQTGANSLPSAEGGPPEVVSV

SEQ ID NO: 747672 - protein, 392 aa, Homo sapiens
MSLFLRVLETLYLDASCCYRGGLQLTPRNEKSPGRSASRSSNISKASSPTTGTAPRSQSRLSVCPSTQDICRSAILHDMSEESFEYCTPVMVLSPARKESGKKSVIQRPRRRRKASERYEHAAEEQIRGRKNDFHLQISSPRWRELYTDSSDSSSTDESHWIQAKRRAQVKFRLSRRRRRNNNKPCENLAGSSTPNGIELVDLGSKGKEQQELIECESCSLNLHRGKHTRYQECNPSLTQGSSEIKRSSRNHEKSKGRYHHRDPQLLQSLRKNEIMKKTFSETDSSTEILGVPEGSKDMNDAGLQVNNPVQKPPATYDDGSDNLEVCRICHCEGDEESPLITPCRCTGTLRFVHQSCLHQWIKSSDTRCCELCKYDFIMETKLKPLRKVQYP

SEQ ID NO: 747673 - protein, 272 aa, Homo sapiens; identical to SEQ ID NO: 747668

SEQ ID NO: 747674 - protein, 647 aa, Homo sapiens
MAAGLATWLPFARAAAVGWLPLAQQPLPPAPGVKASRGDEVLVVNVSGRRFETWKNTLDRYPDTLLGSSEKEFFYDADSGEYFFDRDPDMFRHVLNFYRTGRLHCPRQECIQAFDEELAFYGLVPELVGDCCLEEYRDRKKENAERLAEDEEAEQAGDGPALPAGSSLRQRLWRAFENPHTSTAALVFYYVTGFFIAVSVIANVVETIPCRGSARRSSREQPCGERFPQAFFCMDTACVLIFTGEYLLRLFAAPSRCRFLRSVMSLIDVVAILPYYIGLLVPKNDDVSGAFVTLRVFRVFRIFKFSRHSQGLRILGYTLKSCASELGFLLFSLTMAIIIFATVMFYAEKGTNKTNFTSIPAAFWYTIVTMTTLGYGDMVPSTIAGKIFGSICSLSGVLVIALPVPVIVSNFSRIYHQNQRADKRRAQQKVRLARIRLAKSGTTNAFLQYKQNGGLEDSGSGEEQALCVRNRSAFEQQHHHLLHCLEKTTCHEFTDELTFSEALGAVSPGGRTSRSTSVSSQPVGPGSLLSSCCPRRAKRRAIRLANSTASVSRGSMQELDMLAGLRRSHAPQSRSSLNAKPHDSLDLNCDSRDFVAAIISIPTPPANTPDESQPSSPGGGGRAGSTLRNSSLGTPCLFPETVKISSL

SEQ ID NO: 747675 - protein, 218 aa, Homo sapiens
GRGLDRVGVSHNGEEGAALIALLHLLQDSGSGEEQALCVRNRSAFEQQHHHLLHCLEKTTCHEFTDELTFSEALGAVSPGGRTSRSTSVSSQPVGPGSLLSSCCPRRAKRRAIRLANSTASVSRGSMQELDMLAGLRRSHAPQSRSSLNAKPHDSLDLNCDSRDFVAAIISIPTPPANTPDESQPSSPGGGGRAGSTLRNSSLGTPCLFPETVKISSL

SEQ ID NO: 747676 - protein, 71 aa, Homo sapiens
MTKSALERRMLDAGVVVISVQPILFMCSSVKTSSLDVRTKKPKQSKDPGLHFCSGVSCMTVSMLGFSVCKP

SEQ ID NO: 747677 - protein, 131 aa, Homo sapiens
MCCPAGHCPFPPGLLPGREGTQNKEERSSEKHPFPAPCCQPPPNASPLLSTPTGHSHCPTLPSTGFHLRNCAHGSFAPSVFCQKHTQCPEVSWLISTADRIYSRNLLPSPTQASGPPDPNPFCLCRHGIRA

SEQ ID NO: 747678 - protein, 204 aa, Homo sapiens
MELVTFRDVAIEFSPEEWKCLDPAQQNLYRDVMLENYRNLVSLGFVISNPDLVTCLEQIKEPCNLKIHETAAKPPAICSPFSQDLSPVQGIEDSFHKLILKRYEKCGHENLQLRKGCKRVNECKVQKGVNNGVYQCLSTTQSKIFQCNTCVKVFSKFSNSNKHKIRHTGEKPFKCTECGRSFYMSHLTQHTGIHAGEKPYNVKN

SEQ ID NO: 747679 - protein, 199 aa, Homo sapiens
MEARDKQVLRSLRLELGAEVLVEGLVLQYLYQEGILTENHIQEINAQTTGLRKTMLLLDILPSRGPKAFDTFLDSLQEFPWVREKLKKAREEAMTDLPAGDRLTGIPSHILNSSPSDRQINQLAQRLGPEWEPMVLSLGLSQTDIYRCKANHPHNVQSQVVEAFIRWRQRFGKQATFQSLHNGLRAVEVDPSLLLHMLE

SEQ ID NO: 747680 - protein, 115 aa, Homo sapiens
MEARDKQVLRSLRLELGAEVLVEGLVLQYLYQEGILTENHIQEINAQTTGLRKTMLLLDILPSRGPKAFDTFLDSLQEFPWVREKLKKAREEAMTDLPAVAIIRLPRELSLPTLL

SEQ ID NO: 747681 - protein, 181 aa, Homo sapiens
MEARDKQVLRSLRLELGAEVLVEGLVLQYLYQEGILTENHIQEINAQTTGLRKFLDSLQEFPWVREKLKKAREEAMTDLPAGDRLTGIPSHILNSSPSDRQINQLAQRLGPEWEPMVLSLGLSQTDIYRCKANHPHNVQSQVVEAFIRWRQRFGKQATFQSLHNGLRAVEVDPSLLLHMLE

SEQ ID NO: 747682 - protein, 114 aa, Homo sapiens
MQAEYPHTEIHNIFCDRLTGIPSHILNSSPSDRQINQLAQRLGPEWEPMVLSLGLSQTDIYRCKANHPHNVQSQVVEAFIRWRQRFGKQATFQSLHNGLRAVEVDPSLLLHMLE

SEQ ID NO: 747683 - protein, 118 aa, Homo sapiens
EVCLSPSAMIVKPPHHMEGDRLTGIPSHILNSSPSDRQINQLAQRLGPEWEPMVLSLGLSQTDIYRCKANHPHNVQSQVVEAFIRWRQRFGKQATFQSLHNGLRAVEVDPSLLLHMLE

SEQ ID NO: 747684 - protein, 128 aa, Homo sapiens [sequence omitted]

SEQ ID NO: 747685 - protein, 109 aa, Homo sapiens
MEARDKQVLRSLRLELGAEVLVEGLVLQYLYQEGILTENHIQEINAQTTGLRKTMLLLDILPSRGPKAFDTFLDSLQEFPWVREKLKKAREEAMTDLPAGRPQKDHFEP

SEQ ID NO: 747686 - protein, 113 aa, Homo sapiens
GRVGRPTRPDPRVAHASRKPKRRRVGDVEPSRKPKRRRAADVEPSSPEPKRRRVGDVEPSRKPKRRRAADVEPSSPEPKRRRVGDVEPSRKPKRRRAADVEPSLPEPKRRRLS

SEQ ID NO: 747687 - protein, 349 aa, Homo sapiens
DNIKTPAERLRGPLPPSADDNLKTPSERQLTPLPPSAPPSADDNIKTPAERLRGPLPPSADDNLKTPSERQLPFHPQLHPQQMIISRHLPSVCGGRFHPQRMIISRHLPSVSSLPFHPQLHPQQMIISRHLPSVCGGRFHPQRMIISRHLPSVSSLPFHPQLHPQQMIISRHLPSTLSGCNLKTPSERQLTPLPPSAPPSADDNIKTPAERLRGPLPPSADDNLKTPPLATQEAEAEKPRKPKRQRAAEMEPPPEPKRRRVGDVEPSRKPKRRRAADVEPSSPEPKRRRVGDVEPSRKPKRRRAADVEPSSPEPKRRRVGDVEPSRKPKRRRAADVEPSLPEPKRRRLS

SEQ ID NO: 747688 - protein, 70 aa, Homo sapiens
LSVLRQRSAALSTDVSIGISGRTSQTGRHPVWELGFCLALRVPKGLSWAHSVRCCLLAGAEIHVSAVSFL

SEQ ID NO: 747689 - protein, 330 aa, Homo sapiens
MEGAPPGSLALRLLLFVALPASGWLTTGAPEPPPLSGAPQDGIRINVTTLKDDGDISKQQVVLNITYESGQVYVNDLPVNSGVTRISCQTLIVKNENLENLEEKEYFGIVSVRILVHEWPMTSGSSLQLIVIQEEVVEIDGKQVQQKDVTEIDILVKNRGVLRHSNYTLPLEESMLYSISRDSDILFTLPNLSKKESVSSLQTTSQYLIRNVETTVDEDVLPGKLPETPLRAEPPSSYKVMCQWMEKFRKDLCRFWSNVFPVFFQFLNIMVVGITGAAVVITILKVFFPVSEYKGILQLDKVDVIPVTAINLYPDGPEKRAENLEDKTCI

SEQ ID NO: 747690 - protein, 330 aa, Homo sapiens; identical to SEQ ID NO: 747689

SEQ ID NO: 747691 - protein, 330 aa, Homo sapiens; identical to SEQ ID NO: 747689

SEQ ID NO: 747692 - protein, 326 aa, Homo sapiens
GAGAVLQRRPERGVGMQRPGPFSTLYGRVLAPLPGRAGGAASGGGGNSWDLPGSHVRLPGRAQSGTRGGAGNTSTSCGDSNSICPAPSTMSKAEEAKKLAGRAAVENHVRNNQVLGIGSGSTIVHAVQRIAERVKQENLNLVCIPTSFQARQLILQYGLTLSDLDRHPEIDLAIDGADEVDADLNLIKGGGGCLTQEKIVAGYASRFIVIADFRKDSKNLGDQWHKGIPIEVIPMAYVPVSRAVSQKFGGVVELRMAVNKAGPVVTDNGNFILDWKFDRVHKWSEVNTAIKMIPGVVDTGLFINMAERVYFGMQDGSVNMREKPFC

SEQ ID NO: 747693 - protein, 134 aa, Homo sapiens
  misc_feature (97)..(97): Xaa can be any naturally occurring amino acid
  misc_feature (99)..(100): Xaa can be any naturally occurring amino acid
  misc_feature (105)..(106): Xaa can be any naturally occurring amino acid
  misc_feature (110)..(111): Xaa can be any naturally occurring amino acid
  misc_feature (121)..(123): Xaa can be any naturally occurring amino acid
  misc_feature (131)..(131): Xaa can be any naturally occurring amino acid
MQRPGPFSTLYGRVLAPLPGRAGGAASGGGGNSWDLPGSHVRLPGRAQSGTRGGAGNTSTSCGDSNSICPAPSTMSKAEEAKKLAGRAAVENHVRYXQXXGIVNXXYNFXXFLSNIFLGLXXXFFFFFFFXIFF

SEQ ID NO: 747694 - protein, 241 aa, Homo sapiens
MQRPGPFSTLYGRVLAPLPGRAGGAASGGGGNSWDLPGSHVRLPGRAQSGTRGGAGNTSTSCGDSNSICPAPSTMSKAEEAKKLAGRAAVENHVRNNQVLGIGSGSTIVHAVQRIAERVKQENLNLVCIPTSFQARQLILQYGLTLSDLDRHPEIDLAIDGADEVDADLNLIKGGGGCLTQEKIVAGYASRFIVIADFRKDSKNLGDQWHKGIPIEVIPMAYVPVSRAVSQNLTGYTNGVK

SEQ ID NO: 747695 - protein, 326 aa, Homo sapiens; identical to SEQ ID NO: 747692

SEQ ID NO: 747696 - protein, 326 aa, Homo sapiens; identical to SEQ ID NO: 747692

SEQ ID NO: 747697 - protein, 799 aa, Homo sapiens
TGAAALATRVTQSALVPVLAMASFVTEVLAHSGRLEKEDLGTRISRLTRRVEEIKGEVCNMISKKYSEFLPSMQSAQGLITQVDKLSEDIDLLKSRIESEVRRDLHVSTGEFTDLKQQLERDSVVLSLLKQLQEFSTAIEEYNCALTEKKYVTGAQRLEEAQKCLKLLKSRKCFDLKILKSLSMELTIQKQNILYHLGEEWQKLIVWKFPPSKDTSSLESYLQTELHLYTEQSHKEEKTPMPPISSVLLAFSVLGELHSKLKSFGQMLLKYILRPLASCPSLHAVIESQPNIVIIRFESIMTNLEYPSPSEVFTKIRLVLEVLQKQLLDLPLDTDLENEKTSTVPLAEMLGDMIWEDLSECLIKNCLVYSIPTNSSKLQQYEEIIQSTEEFENALKEMRFLKGDTTDLLKYARNINSHFANKKCQDVIVAARNLMTSEIHNTVKIIPDSKINVPELPTPDEDNKLEVQKVSNTQYHEVMNLEPENTLDQHSFSLPTCRISESVKKLMELAYQTLLEATTSSDQCAVQLFYSVRNIFHLFHDVVPTYHKENLQKLPQLAAIHHNNCMYIAHHLLTLGHQFRLRLAPILCDGTATFVDLVPGFRRLGTECFLAQMRAQKGELLERLSSARNFSNMDDEENYSAASKAVRQVLHQLKRLGIVWQDVLPVNIYCKAMGTLLNTAISEVIGKITALEDISTEDGDRLYSLCKTVMDEGPQVFAPLSEESKNKKYQEEVPVYVPKWMPFKELMMMLQASLQEIGDRWADGKGPLAAAFSSSEVKALIRALFQNTERRAAALAKIK

SEQ ID NO: 747698 - protein, 223 aa, Homo sapiens
TGAAALATRVTQSALVPVLAMASFVTEVLAHSGRLEKEDLGTRISRLTRRVEEIKGEVCNMISKKYSEFLPSMQSAQGLITQVDKLSEDIDLLKSRIESEVRRDLHVSTGEFTDLKQQLERDSVVLSLLKQLQEFSTAIEEYNCALTEKKYVTGAQRLEEAQKCLKLLKSRKCFDLKILKSLSMELTIQKQNILYHLGEEWQKLIVWKFPPSKGAADLRWTAL

SEQ ID NO: 747699 - protein, 686 aa, Homo sapiens
TGAAALATRVTQSALVPVLAMASFVTEVLAHSGRLEKEDLGTRISRLTRRVEEIKGEVCNMISKKYSEFLPSMQSAQGLITQVDKLSEDIDLLKSRIESEIPAVWNLTYKLNFIYTLNNRTKRRRPLMPPISSVLLAFSVLGELHSKLKSFGQMLLKYILRPLASCPSLHAVIESQPNIVIIRFESIMTNLEYPSPSEVFTKIRLVLEVLQKQLLDLPLDTDLENEKTSTVPLAEMLGDMIWEDLSECLIKNCLVYSIPTNSSKLQQYEEIIQSTEEFENALKEMRFLKGDTTDLLKYARNINSHFANKKCQDVIVAARNLMTSEIHNTVKIIPDSKINVPELPTPDEDNKLEVQKVSNTQYHEVMNLEPENTLDQHSFSLPTCRISESVKKLMELAYQTLLEATTSSDQCAVQLFYSVRNIFHLFHDVVPTYHKENLQKLPQLAAIHHNNCMYIAHHLLTLGHQFRLRLAPILCDGTATFVDLVPGFRRLGTECFLAQMRAQKGELLERLSSARNFSNMDDEENYSAASKAVRQVLHQLKRLGIVWQDVLPVNIYCKAMGTLLNTAISEVIGKITALEDISTEDGDRLYSLCKTVMDEGPQVFAPLSEESKNKKYQEEVPVYVPKWMPFKELMMMLQASLQEIGDRWADGKGPLAAAFSSSEVKALIRALFQNTERRAAALAKIK

SEQ ID NO: 747700 - protein, 502 aa, Homo sapiens
TGAAALATRVTQSALVPVLAMASFVTEVLAHSGRLEKEDLGTRISRLTRRVEEIKGEVCNMISKKYSEFLPSMQSAQGLITQVDKLSEDIDLLKSRIESEVRRDLHVSTGEFTDLKQQLERDSVVLSLLKQLQEFSTAIEEYNCALTEKKYVTGAQRLEEAQKCLKLLKSRKCFDLKILKSLSMELTIQKQNILYHLGEEWQKLIVWKFPPSKDTSSLESYLQTELHLYTEQSHKEEKTPMPPISSVLLAFSVLGELHSKLKSFGQMLLKYILRPLASCPSLHAVIESQPNIVIIRFESIMTNLEYPSPSEVFTKIRLVLEVLQKQLLDLPLDTDLENEKTSTVPLAEMLGDMIWEDLSECLIKNCLVYSIPTNSSKLQQYEEIIQSTEEFENALKEMRFLKGDTTDLLKYARNINSHFANKKCQDVIVAARNLMTSEIHNTVKIIPDSKINVPELPTPDEDNKLEVQKVSNTQYHEVMNLEPVCEEINGTRLSDFTRGNNQ

SEQ ID NO: 747701 - protein, 716 aa, Homo sapiens
TGAAALATRVTQSALVPVLAMASFVTEVLAHSGRLEKEDLGTRISRLTRRVEEIKGEVCNMISKKYSEFLPSMQSAQGLITQVDKLSEDIDLLKSRIESEVRRDLHVSTGEFTDLKQQLERDSVVLSLLKQLQEFSTAIEEYNCALTEKKYVTGAQRLEEAQKCLKLLKSRKCFDLKILKSLSMELTIQKQNILYHLGEEWQKLIVWKFPPSKDTSSLESYLQTELHLYTEQSHKEEKTPMPPISSVLLAFSVLGELHSKLKSFGQMLLKYILRPLASCPSLHAVIESQPNIVIIRFESIMTNLEYPSPSEVFTKIRLVLEVLQKQLLDLPLDTDLENEKTSTVPLAEMLGDMIWEDLSECLIKNCLVYSIPTNSSKLQQYEEIIQSTEEFENALKEMRFLKGDTTDLLKYARNINSHFANKKCQDVIVAARNLMTSEIHNTVKIIPDSKINVPELPTPDEDNKLEVQKVSNTQYHEVMNLEPENTLDQHSFSLPTCRISESVKKLMELAYQTLLEATTSSDQCAVQLFYSVRNIFHLFHDVVPTYHKENLQKLPQLAAIHHNNCMYIAHHLLTLGHQFRLRLAPILCDGTATFVDLVPGFRRLGTECFLAQMRAQKGELLERLSSARNFSNMDDEENYSAASKAVRQVLHQLKRLGIVWQDVLPVNIYCKAMGTLLNTAISEVIGKITALEVRAIRCYTSLEMQFMSQIVTLLRK

SEQ ID NO: 747702 - protein, 403 aa, Homo sapiens
TGAAALATRVTQSALVPVLAMASFVTEVLAHSGRLEKEDLGTRISRLTRRVEEIKGEVCNMISKKYSEFLPSMQSAQGLITQVDKLSEDIDLLKSRIESEVRRDLHVSTGEFTDLKQQLERDSVVLSLLKQLQEFSTAIEEYNCALTEKKYVTGAQRLEEAQKCLKLLKSRKCFDLKILKSLSMELTIQKQNILYHLGEEWQKLIVWKFPPSKDTSSLESYLQTELHLYTEQSHKEEKTPMPPISSVLLAFSVLGELHSKLKSFGQMLLKYILRPLASCPSLHAVIESQPNIVIIRFESIMTNLEYPSPSEVFTKIRLVLEVLQKQLLDLPLDTDLENEKTSTVPLAEMLGDMIWEDLSECLIKNCLVYSIPTNSSKLQQYEEIIQSTEEFENAILGTLPFSL

SEQ ID NO: 747703 - protein, 312 aa, Homo sapiens
MADGDSGSERGGGGGPCGFQPASRGGGEQETQELASKRLDIQNKRFYLDVKQNAKGRFLKIAEVGAGGSKSRLTLSMAVAAEFRDSLGDFIEHYAQLGPSSPEQLAAGAEEGGGPRRALKSEFLVRENRKYYLDLKENQRGRFLRIRQTVNRGGGGFGAGPGPGGLQSGQTIALPAQGLIEFRDALAKLIDDYGGEDDELAGGPGGGAGGPGGGLYGELPEGTSITVDSKRFFFDVGCNKYGVFLRVSEVKPSYRNAITVPFKAWGKFGGAFCRYADEMKEIQERQRDKLYERRGGGSGGGEESEGEEVDED

SEQ ID NO: 747704 - protein, 237 aa, Homo sapiens
PTRPRTAWVDPRVRGTTTRRFVGHTKDVLSVAFSSDNRQIVSGSRDKTIKLWNTLGVCKYTVQDESHSEWVSCVRFSPNSSNPIIVSCGWDKLVKVWNLANCKLKTNHIGHTGYLNTVTVSPDGSLCASGGKDGQAMLWDLNEGKHLYTLDGGDIINALCFSPNRYWLCAATGPSIKIWDLEGKIIVDELKQEVISTSSKAEPPQCTSLAWSADGQTLFAGYTDNLVRVWQVTIGTR

SEQ ID NO: 747705 - protein, 104 aa, Homo sapiens
TKFAGVYTNEGKHLYTLDGGDIINALCFSPNRYWLCAATGPSIKIWDLEGKIIVDELKQEVISTSSKAEPPQCTSLAWSADGQTLFAGYTDNLVRVWQVTIGTR

SEQ ID NO: 747706 - protein, 98 aa, Homo sapiens
AYYYYYYNSRPLDGDIINALCFSPNRYWLCAATGPSIKIWDLEGKIIVDELKQEVISTSSKAEPPQCTSLAWSADGQTLFAGYTDNLVRVWQVTIGTR

SEQ ID NO: 747707 - protein, 132 aa, Homo sapiens
MRVFAKSENDKLLPLRGTGTTTRRFVGHTKDVLSVAFSSDNRQIVSGSRDKTIKLWNTLGVCKYTVQDESHSEWVSCVRFSPNSSNPIIVSCGWDKLVKVSVKPRQGLYQSGCAPRWSYTPSPVESFADALS

SEQ ID NO: 747708 - protein, 349 aa, Homo sapiens
RVIRRGRGCGASFSKPSSAILVAAATHALAAAMTEQMTLRGTLKGHNGWVTQIATTPQFPDMILSASRDKTIIMWKLTRDETNYGIPQRALRGHSHFVSDVVISSDGQFALSGSWDGTLRLWDLTTGTTTRRFVGHTKDVLSVAFSSDNRQIVSGSRDKTIKLWNTLGVCKYTVQDESHSEWVSCVRFSPNSSNPIIVSCGWDKLVKVWNLANCKLKTNHIGHTGYLNTVTVSPDGSLCASGGKDGQAMLWDLNEGKHLYTLDGGDIINALCFSPNRYWLCAATGPSIKIWDLEGKIIVDELKQEVISTSSKAEPPQCTSLAWSADGQTLFAGYTDNLVRVWQVTIGTR

SEQ ID NO: 747709 - protein, 343 aa, Homo sapiens
SARRATSLVPSSAILVAAATHALAAAMTEQMTLRGTLKGHNGWVTQIATTPQFPDMILSASRDKTIIMWKLTRDETNYGIPQRALRGHSHFVSDVVISSDGQFALSGSWDGTLRLWDLTTGTTTRRFVGHTKDVLSVAFSSDNRQIVSGSRDKTIKLWNTLGVCKYTVQDESHSEWVSCVRFSPNSSNPIIVSCGWDKLVKVWNLANCKLKTNHIGHTGYLNTVTVSPDGSLCASGGKDGQAMLWDLNEGKHLYTLDGGDIINALCFSPNRYWLCAATGPSIKIWDLEGKIIVDELKQEVISTSSKAEPPQCTSLAWSADGQTLFAGYTDNLVRVWQVTIGTR

SEQ ID NO: 747710 - protein, 354 aa, Homo sapiens
SARRATSLVPSSAILVAAATHALAAAMTEQMTLRGTLKGHNGWVTQIATTPQFPDMILSASRDKDLSIDVERADKTIIMWKLTRDETNYGIPQRALRGHSHFVSDVVISSDGQFALSGSWDGTLRLWDLTTGTTTRRFVGHTKDVLSVAFSSDNRQIVSGSRDKTIKLWNTLGVCKYTVQDESHSEWVSCVRFSPNSSNPIIVSCGWDKLVKVWNLANCKLKTNHIGHTGYLNTVTVSPDGSLCASGGKDGQAMLWDLNEGKHLYTLDGGDIINALCFSPNRYWLCAATGPSIKIWDLEGKIIVDELKQEVISTSSKAEPPQCTSLAWSADGQTLFAGYTDNLVRVWQVTIGTR

SEQ ID NO: 747711 - protein, 349 aa, Homo sapiens; identical to SEQ ID NO: 747708

SEQ ID NO: 747712 - protein, 260 aa, Homo sapiens
SARRATSLVPSSAILVAAATHALAAAMTEQMTLRGTLKGHNGWVTQIATTPQFPDMILSPLEIVSGSRDKTIKLWNTLGVCKYTVQDESHSEWVSCVRFSPNSSNPIIVSCGWDKLVKVWNLANCKLKTNHIGHTGYLNTVTVSPDGSLCASGGKDGQAMLWDLNEGKHLYTLDGGDIINALCFSPNRYWLCAATGPSIKIWDLEGKIIVDELKQEVISTSSKAEPPQCTSLAWSADGQTLFAGYTDNLVRVWQVTIGTR

SEQ ID NO: 747713 - protein, 349 aa, Homo sapiens; identical to SEQ ID NO: 747708

SEQ ID NO: 747714 - protein, 342 aa, Homo sapiens
RVIRRGRGCGASFSKPSSAILVAAATHALAAAMTEQMTLRGTLKGHNGWVTQIATTPQFPDMILSASRDKTIIMWKLTRDETNYGIPQRALRGHSHFVSDVVISSDGQFALSGSWDGTLRLWDLTTGTTTRRFVGHTKDVLSVAFSSDNRQIVSGSRDKTIKLWNTLGVCKYTVQDESHSEWVSCVRFSPNSSNPIIVSCGWDKLVKVWNLANCKLKTNHIGHTGYLNTVTVSPDGSLCASGGKDGQAMLWDLNEGKHLYTLDGGDIINALCFSPNRYWLCAATGPSIKIWDLEGKIIVDELKQEVISTSSKAEPPQCTSLAWSADGQTLLFNNAPYELGQT

SEQ ID NO: 747715 - protein, 341 aa, Homo sapiens
RVIRRGRGCGASFSKPSSAILVAAATHALAAAMTEQMTLRGTLKGHNGWVTQIATTPQFPDMILSASRDKTIIMWKLTRDETNYGIPQRALRGHSHFVSDVVISSDGQFALSGSWDGTLRLWDLTTGTTTRRFVGHTKDVLSVAFSSDNRQIVSGSRDKTIKLWNTLGVCKYTVQDESHSEWVSCVRFSPNSSNPIIVSCGWDKLVKVWNLANCKLKTNHIGHTGYLNTVTVSPDGSLCASGGKDGQAMLWDLNEGKHLYTLDGGDIINALCFSPNRYWLCAATGPSIKIWDLEGKIIVDELKQEVISTSSKAEPPQCTSLAWSADGQVSGSVLSGDSASS

SEQ ID NO: 747716 - protein, 372 aa, Homo sapiens
RVIRRGRGCGASFSKPSSAILVAAATHALAAAMTEQMTLRGTLKGHNGWVTQIATTPQFPDMILSASRDKTIIMWKLTRDETNYGIPQRALRGHSHFVSDVVISSDGQFALSGSWDGTLRLWDLTTGTTTRRFVGHTKDVLSVAFSSDNRQIVSGSRDKTIKLWNTLGVCKYTVQDESHSEWVSCVRFSPNSSNPIIVSCGWDKLVKVWNLANCKLKTNHIGHTGYLNTVTVSPDGSLCASGGKDGQAMLWDLNEGKHLYTLDGGDIINALCFSPNRYWLCAATGPSIKIWDLEGKIIVDELKQEVISTSSKAEPPQCTSLAWSADGQEYITTTYKLAVEMRAVSYSLPSVVAHAYWRLRWEDLLNCRGLRL

SEQ ID NO: 747717 - protein, 114 aa, Homo sapiens
LQGYTIPKGTLILPNLWSVHRDPAIWEKPEDFYPNRFLDDQGQLIKKETFIPFGIGKRVCMGEQLAKMELFLMFVSLMQSFAFALPEDSKKPLLTGRFGLTLAPHPFNITISRR

SEQ ID NO: 747718 - protein, 114 aa, Homo sapiens; identical to SEQ ID NO: 747717

SEQ ID NO: 747719 - protein, 362 aa, Homo sapiens
MGKVRCQEPHCKLPVVGSRGEVAAEIWADRRADNRQRLYVGPRAVPGLRPSSLVLGLLWPPGMGAWSPYKSHPCVTTNSSNNSCPAVPVHFTISTPPSIPPHWQGLTALVLLHSWAHGRTPRPTRSSQTHTTLRKAPNWSNSQQWPSPHPPLAPPRSSFPTFVGKGHRNAGQLRRTGQRRATAPPGVSFLAAVPLITVPQSSWGSRAPRAARSPRDNGIISGERGRLGPGLRRRRLLPSIRPSAPKERLRRPETSGRADAGGARVAGPGRPNSISWAAAASVRLWARRDSSSGQLLFVHEDHAYGCGSSPFGAHPTHTHFWHLRLAPPSHSFPAREGDRGLPRKVGKLWLLLSSLWPSSEYV

SEQ ID NO: 747720 - protein, 370 aa, Homo sapiens [sequence omitted]

SEQ ID NO: 747721 - protein, 315 aa, Homo sapiens
MEIVSTGNETITEFVLLGFYDIPELHFLFFIVFTAVYVFIIIGNMLIIVAVVSSQRLHKPMYIFLANLSFLDILYTSAVMPKMLEGFLQEATISVAGCLLQFFIFGSLATAECLLLAVMAYDRYLAICYPLHYPLLMGPRRYMGLVVTTWLSGFVVDGLVVALVAQLRFCGPNHIDQFYCDFMLFVGLACSDPRVAQVTTLILSVFCLTIPFGLILTSYARIVVAVLRVPAGASRRRAFSTCSSHLAVVTTFYGTLMIFYVAPSAVHSQLLSKVFSLLYTVVTPLFNPVIYTMRNKEVHQALRKILCIKQTETLD

SEQ ID NO: 747722 - protein, 318 aa, Homo sapiens
MADKVQTTLLFLAVGEFSVGILGNAFIGLVNCMDWVKKRKIASIDLILTSLAISRICLLCVILLDCFILVLYPDVYATGKEMRIIDFFWTLTNHLSIWFATCLSIYYFFKIGNFFHPLFLWMKWRIDRVISWILLGCVVLSVFISLPATENLNADFRFCVKAKRKTNLTWSCRVNKTQHASTKLFLNLATLLPFCVCLMSFFLLILSLRRHIRRMQLSATGCRDPSTEAHVRALKAVISFLLLFIAYYLSFLIATSSYFMPETELAVIFGESIALIYPSSHSFILILGNNKLRHASLKVIWKVMSILKGRKFQQHKQI

SEQ ID NO: 747723 - protein, 464 aa, Homo sapiens
VSWWGARSRGEMGVLGRVLLWLQLCALTQAVSKLWVPNTDFDVAANWSQNRTPCAGGAVEFPADKMVSVLVQEGHAVSDMLLPLDGELVLASGAGFGVSDVGSHLDCGAGEPAVFRDSDRFSWHDPHLWRSGDEAPGLFFVDAERVPCRHDDVFFPPSASFRVGLGPGASPVRVRSISALGRTFTRDEDLAVFLASRAGRLRFHGPGALSVGPEDCADPSGCVCGNAEAQPWICAALLQPLGGRCPQAACHFALRPQGQCCDLCGAVVLLTHGPAFDLERYRARILDTFLGLPQYHGLQVAVSKVPRSSRLREADTEIQVVLVENGPETGGAGRLARALLADVAENGEALGVLEATMRESGAHVWGSSAAGLAGGVAAAVLLALLVLLVAPPLLRRAGRLRWRRHEAAAPAGAPLGFRNPVFDVTASEELPLPRRLSLVPKAAADSTSHSYFVNPLFAGAEAEA

SEQ ID NO: 747724 - protein, 153 aa, Homo sapiens
SPGGVQGAEARWASWAGSCCGCSSAVSRDHTGAGPDGSGLSGPRAEVALGLEGEDLPRSGQGGLWRVGGVKLGPASLVWRVRSPEVRGQCIGRCGRGEEGLREPRPAPASGGSCPRGFSVCEMGAVPRTCREQRVCACGARQTASASRSPREH

SEQ ID NO: 747725 - protein, 158 aa, Homo sapiens
VAWRGVAWCGAALVPWSSGMCSGSGEPAVFRDSDRFSWHDPHLWRSGDEAPGLFFVDAERVPCRHDDVFFPPSASFRVGLGPGASPVRVTAPATVTSSTLCSPGPRPRPERPPDRRPWGSPPPLAPVELGASHLLVQPPNLPFLSPSSGGQGQGGLTQ

SEQ ID NO: 747726 - protein, 379 aa, Homo sapiens
VAWRGVAWCGAALVPWSSGMCSGSGEPAVFRDSDRFSWHDPHLWRSGDEAPGLFFVDAERVPCRHDDVFFPPSASFRVGLGPGASPVRVRSISALGRTFTRDEDLAVFLASRAGRLRFHGPGALSVGPEDCADPSGCVCGNAEAQPWICAALLQPLGGRCPQAACHFALRPQGQCCDLCGAVVLLTHGPAFDLERYRARILDTFLGLPQYHGLQVAVSKVPRSSRLREADTEIQVVLVENGPETGGAGRLARALLADVAENGEALGVLEATMRESGAHVWGSSAAGLAGGVAAAVLLALLVLLVAPPLLRRAGRLRWRRHEAAAPAGAPLGFRNPVFDVTASEELPLPRRLSLVPKAAADSTSHSYFVNPLFAGAEAEA

SEQ ID NO: 747727 - protein, 108 aa, Homo sapiens [sequence omitted]

SEQ ID NO: 747728 - protein, 520 aa, Homo sapiens
VSWWGARSRGEMGVLGRVLLWLQLCALTQAVSKLWVPNTDFDVAANWSQNRTPCAGGAVEFPADKMVSVLVQEGHAVSDMLLPLDGELVLASGAGFGVSDVGSHLDCGAGEPAVFRDSDRFSWHDPHLWRSGDEAPGLFFVDAERVPCRHDDVFFPPSASFRVGLGPGASPVRVRSISALGRTFTRDEDLAVFLASRAGRLRFHGPGALSVGPEDCADPSGCVCGNAEVSEAAVESRGPREGRDCARDRAAALPRSLAGLLLGGIALLAAVRSGLRADHRPSHQAQPWICAALLQPLGGRCPQAACHFALRPQGQCCDLCGAVVLLTHGPAFDLERYRARILDTFLGLPQYHGLQVAVSKVPRSSRLREADTEIQVVLVENGPETGGAGRLARALLADVAENGEALGVLEATMRESGAHVWGSSAAGLAGGVAAAVLLALLVLLVAPPLLRRAGRLRWRRHEAAAPAGAPLGFRNPVFDVTASEELPLPRRLSLVPKAAADSTSHSYFVNPLFAGAEAEA

SEQ ID NO: 747729 - protein, 108 aa, Homo sapiens [sequence omitted]

SEQ ID NO: 747730 - protein, 456 aa, Homo sapiens
VSWWGARSRGEMGVLGRVLLWLQLCALTQAVSKLWVPNTDFDVAANWSQNRTPCAGGAVEFPADKMVSVLVQEGHAVSDMLLPLDGELVLASGAGFGVSDVGSHLDCGAGEPAVFRDSDRFSWHDPHLWRSGDEAPGLFFVDAERVPCRHDDVFFPPSASFRVGLGPGASPVRVTFTRDEDLAVFLASRAGRLRFHGPGALSVGPEDCADPSGCVCGNAEAQPWICAALLQPLGGRCPQAACHFALRPQGQCCDLCGAVVLLTHGPAFDLERYRARILDTFLGLPQYHGLQVAVSKVPRSSRLREADTEIQVVLVENGPETGGAGRLARALLADVAENGEALGVLEATMRESGAHVWGSSAAGLAGGVAAAVLLALLVLLVAPPLLRRAGRLRWRRHEAAAPAGAPLGFRNPVFDVTASEELPLPRRLSLVPKAAADSTSHSYFVNPLFAGAEAEA

SEQ ID NO: 747731 - protein, 251 aa, Homo sapiens
VSWWGARSRGEMGVLGRVLLWLQLCALTQAVSKLWVPNTDFDVAANWSQNRTPCAGGAVEFPADKMVSVLVQEGHAVSDMLLPLDGELVLASGAGFGVSDVGSHLDCGAGEPAVFRDSDRFSWHDPHLWRSGDEAPGLFFVDAERVPCRHDDVFFPPSASFRVGLGPGASPVRVARPSASWRRPCGSRAHTSGAAPRLGWRAAWRLPCCWRCWSCWWRRRCCAARGGSGGGGTRRRPRLERPSASATRCST

SEQ ID NO: 747732 - protein, 348 aa, Homo sapiens
VSWWGARSRGEMGVLGRVLLWLQLCALTQAVSKLWVPNTDFDVAANWSQNRTPCAGGAVEFPADKMVSVLVQEGHAVSDMLLPLDGELVLASGAGFGVSDVGSHLDCGAGEPAVFRDSDRFSWHDPHLWRSGDEAPGLFFVDAERVPCRHDDVLRGPRRPGGDHAGVGRTRLGQLRGWAGGRRGGCRAAGAAGPAGGAAAAAPRGEAQVEEARGGGPGWSAPRLPQPGVRRDGLRGAGEGAGGGTGASSGPGLGADRRLTLSPRSPCRGGSAWFRRRPQTAPATVTSSTLCSPGPRPRPERPPDRRPWGSPPPLAPVELGASHLLVQPPNLPFLSPSSGGQGQGGLTQ

SEQ ID NO: 747733 - protein, 142 aa, Homo sapiens
  misc_feature (112)..(112): Xaa can be any naturally occurring amino acid
  misc_feature (114)..(114): Xaa can be any naturally occurring amino acid
HCIPAWATEQDFVSIKKESGMTAGSFRQSSFACHGRNPRQVELVKEGPRWKYIRYVAGQGQLAQKDRVPNPGRWTPQESSEAATPHVWLLSAALKFPQPARPSLGGLWWEEXGXVGTAPWLCSTLPVVHHELIFLINPVIIL

SEQ ID NO: 747734 - protein, 69 aa, Homo sapiens
LLLLNSRPVDEVAADTLGEEWKGYVVRISGGNDKQGFPMKQGVLTHGHVHLLLSKGHSCYRPRRTGERK

SEQ ID NO: 747735 - protein, 361 aa, Homo sapiens
MAPTEPWSPSPGSAPWDYSGLDGLEELELCPAGDLPYGYVYIPALYLAAFAVGLLGNAFVVWLLAGRRGPRRLVDTFVLHLAAADLGFVLTLPLWAAAAALGGRWPFGDGLCKLSSFALAGTRCAGALLLAGMSVDRYLAVVKLLEARPLRTPRCALASCCGVWAVALLAGLPSLVYRGLQPLPGGQDSQCGEEPSHAFQGLSLLLLLLTFVLPLVVTLFCYCRISRRLRRPPHVGRARRNSLRIIFAIESTFVGSWLPFSALRAVFHLARLGALPLPCPLLLALRWGLTIATCLAFVNSCANPLIYLLLDRSFRARALDGACGRTGRLARRISSASSLSRDDSSVFRCRAQAANTASASW

SEQ ID NO: 747736 - protein, 104 aa, Homo sapiens
MTEFPEQKGCRHHCSSSQQFPLQVPGRLGGLDQEEFPTAQRLMADLGQIASLRWEPDPTLLHQTGPPCGNFSNSSQGFTDRTLISLGWSPLRGGVATFSMVQWT

SEQ ID NO: 747737 - protein, 377 aa, Homo sapiens
AAVGAGLARACGSCRLSGRHVQTGRDTRGFRLLPHWKITPQASLAPSSELTGMVPREAPESAQCLCPSLTIPNAKDVLRKRHKRRSRQHQRFMARKALLQEQGLLSMPPEPGSSPLPTPFGAATATEAASSGKQCLRAGSGSAPCSRRPAPGKASGPLPSKCVAIDCEMVGTGPRGRVSELARCSIVSYHGDVLYDKYIRPEMPIADYRTRWSGITRQHMRKAVPFQVAQKEILKLLKGKVVVGHALHNDFQALKYVHPRSQTRDTTYVPNFLSEPGLHTRARVSLKDLALQLLHKKIQVGQHGHSSVEDATTAMELYRLVEVQWEQQEARSLWTCPEDREPDSSTDMEQYMEDQYWPDDLAHGSRGGAREAQDRRN

SEQ ID NO: 747738 - protein, 325 aa, Homo sapiens
MVPREAPESAQCLCPSLTIPNAKDVLRKRHKRRSRQHQRFMARKALLQEQGLLSMPPEPGSSPLPTPFGAATATEAASSGKQCLRAGSGSAPCSRRPAPGKASGPLPSKCVAIDCEMVGTGPRGRVSELARCSIVSYHGDVLYDKYIRPEMPIADYRTRWSGITRQHMRKAVPFQVAQKEILKLLKGKVVVGHALHNDFQALKYVHPRSQTRDTTYVPNFLSEPGLHTRARVSLKDLALQLLHKKIQVGQHGHSSVEDATTAMELYRLVEVQWEQQEARSLWTCPEDREPDSSTDMEQYMEDQYWPDDLAHGSRGGAREAQDRRN

SEQ ID NO: 747739 - protein, 325 aa, Homo sapiens; identical to SEQ ID NO: 747738

SEQ ID NO: 747740 - protein, 138 aa, Homo sapiens
MPRQPWSSTGWWRCSGNSRRPAASGPAPRTENLTAAQTWNSTWRTSTGPMTWPTAAEEEPGRHRTEGIEKGAGLPGWASGVAGRKWGPGEQRALLPGQGGAGCSEPAPGPEELGSSVTLTPSAHSIALSLSRAVGSFS

SEQ ID NO: 747741 - protein, 376 aa, Homo sapiens
AAVGAGLARACGSCRLSGRHVQTGRDTRGFRLLPHWKITPQASLAPSSELTGMVPREAPESAQCLCPSLTIPNAKDVLRKRHKRRSRQHQRFMARKALLQEQGLLSMPPEPGSSPLPTPFGAATATEAASSGKQCLRAGSGSAPCSRRPAPGKASGPLPSKCVAIDCEMVGTGPRGRVSELARCSIVSYHGDVLYDKYIRPEMPIADYRTRWSGITRQHMRKAVPFQVAQKEILKLLKGKVVVGHALHNDFQALKYVHPRSQTRDTTYVPNFLSEPGLHTRARVSLKDLALQLLHKKIQVGQHGHSSVEDATTAMELYRLVEVQWEQQEARSLWTCPEDREPDSSTDMEQYMEDQYWALKQKSEKQDSGLNSGAFV

SEQ ID NO: 747742 - protein, 271 aa, Homo sapiens
AAVGAGLARACGSCRLSGRHVQTGRDTRGFRLLPHWKITPQASLAPSSELTGMVPREAPESAQCLCPSLTIPNAKDVLRKRHKRRSRQHQRFMARKALLQEQGLLSMPPEPGSSPLPTPFGAATATEAASSGKQCLRAGSGSAPCSRRPAPGKASGPLPSKCVAIDCEMVGTGPRGRVSELARCSIVSYHGDVLYDKYIRPEMPIADYRTRWSGITRQHMRKAVPFQVAQKEILKLLKGKVVVGHALHNDFQALKYVHPRSQTRDTTVLGS

SEQ ID NO: 747743 - protein, 377 aa, Homo sapiens; identical to SEQ ID NO: 747737

SEQ ID NO: 747744 - protein, 293 aa, Homo sapiens
AAVGAGLARACGSCRLSGRHVQTGRDTRGFRLLPHWKITPQASLAPSSELTGMVPREAPESAQCLCPSLTIPNAKDVLRKRHKRRSRQHQRFMARKALLQEQGLLSMPPEPGSSPLPTPFGAATATEAASSGKQCLRAGSGSAPCSRRPAPGKASGPLPSKCVAIDCEMVGTGPRGRVSELARCSIVSYHGDVLYDKYIRPEMPIADYRTRWSGITRQHMRKAVPFQVAQKEILKLLKGKVVVGHALHNDFQALKYVHPRSQTRDTTVPQTWGHRLSSHWLPPCQHSTEEGAN

SEQ ID NO: 747745 - protein, 1070 aa, Homo sapiens
MYCCSAQDSKMDYKRRFLLGGSKQKVQQHQQYPMPELGRALSAPLASTATTAPLGSLTAAGSCHHAMPHTTPIADIQQGISKYLDALNVFCRASTFLTDLFSTVFRNSHYSKAATQLKDVQEHVMEAASRLTSAIKPEIAKMLMELSAGAANFTDQKEFSLQDIEVLGRCFLTVVQVHFQFLTHALQKVQPVAHSCFAEVIVPEKKNSGSGGGLSGMGHTPEVEEAVRSWRGAAEATSRLRERGCDGCLAGIEVQQLFCSQSAAIPEHQLKELNIKIDSALQAYKIALESLGHCEYAMKAGFHLNPKAIEASLQGCCSEAEAQQTGRRQTPPQPMQCELPTVPVQIGSHFLKGVSFNESAADNLKLKTHTMLQLMKEAGCYNGITSRDDFPVTEVLNQVCPSTWRGACKTAVQLLFGQAGLVVVDTAQIENKEAYAPQISLEGSRIVVQVPSTWCLKEDPATMSLLQRSLDPEKTLGLVDVLYTAVLDLNRWRAGREQALPCIQIQLQREICDFGNQADLPSGNGNKSSGGLQKTFSKLTSRFTKKASCTSSSSSTNYSIQNTPSKNIFIAGCSEEKAKMPGNIDTRLQSILNIGNFPRTTDPSQSAQNSSNTVANGFLMERRENFLHGDDGKDEKGMNLPTDQEMQEVIDFLSGFNMGQSHQGSPLVTRHNSAATAMVTEQKAGAMQPQQPSLPVPPPPRAPQAGAHTPLTPQPGLAPQQQSPKQQQPQVQYYQHLLQPIGPQQPPPQPRAPGKWVHGSSQQPAQAVGAGLSPLGQWPGISDLSSDLYSLGLVSSYMDNVMSEVLGQKPQGPRNNTWPNRDQSDGVFGMLGEILPFDPAVGSDPEFARYVAGVSQAMQQKRQAQHGRRPGNPRGNWPPMDDAHRTWPFPEFFTEGDGLHGGWSGAQGDSASSSDETSSANGDSLFSMFSGPDLVAAVKQRRKHSSGEQDTSTLPSPPLLTTVEDVNQDNKTKTWPPKAPWQHPSPLPSTLPSPSAPLYAVTSPGSQWNDTMQMLQSPVWAATNDCSAAAFSYVQTPPQPPPPPAHKAAPKGFKAFPGKGERRPAYLPQY

SEQ ID NO: 747746 - protein, 67 aa, Homo sapiens
FVPKPGLFLCPNAVGSDPEFARYVAGVSQAMQQKRQAQHGRRPGNPRGNWPPMDDAHRTWPCPPRGL

SEQ ID NO: 747747 - protein, 491 aa, Homo sapiens [sequence omitted]

SEQ ID NO: 747748 - protein, 1070 aa, Homo sapiens; identical to SEQ ID NO: 747745

SEQ ID NO: 747749 - protein, 1070 aa, Homo sapiens; identical to SEQ ID NO: 747745

SEQ ID NO: 747750 - protein, 1070 aa, Homo sapiens; identical to SEQ ID NO: 747745

SEQ ID NO: 747751 - protein, 842 aa, Homo sapiens
MYCCSAQDSKMDYKRRFLLGGSKQKVQQHQQYPMPELGRALSAPLASTATTAPLGSLTAAGSCHHAMPHTTPIADIQQGISKYLDALNVFCRASTFLTDLFSTVFRNSHYSKAATQLKDVQEHVMEAASRLTSAIKPEIAKMLMELSAGAANFTDQKEFSLQDIEVLGRCFLTVVQVHFQFLTHALQKVQPVAHSCFAEVIVPEKKNSGSGGGLSGMGHTPEVEEAVRSWRGAAEATSRLRERGCDGCLAGIEVQQLFCSQSAAIPEHQLKELNIKIDSALQAYKIALESLGHCEYAMKAGFHLNPKAIEASLQGCCSEAEAQQTGRRQTPPQPMQCELPTVPVQIGSHFLKGVSFNESAADNLKLKTHTMLQLMKEAGCYNGITSRDDFPVTEVLNQVCPSTWRGACKTAVQLLFGQAGLVVVDTAQIENKEAYAPQISLEGSRIVVQVPSTWCLKEDPATMSLLQRSLDPEKTLGLVDVLYTAVLDLNRWRAGREQALPCIQIQLQREICDFGNQADLPSGNGNKSSGGLQKTFSKLTSRFTKKASCTSSSSSTNYSIQNTPSKNIFIAGCSEEKAKMPGNIDTRLQSILNIGNFPRTTDPSQSAQNSSNTVANGFLMERRENFLHGDDGKDEKGMNLPTDQEMQEVIDFLSGFNMGQSHQGSPLVTRHNSAATAMVTEQKAGAMQPQQPSLPVPPPPRAPQAGAHTPLTPQPGLAPQQQSPKQQQPQVQYYQHLLQPIGPQQPPPQPRAPGKWVHGSSQQPAQAVGAGLSPLGQWPGISDLSSDLYSLGLVSSYMDNVMSEVLGQKPQGPRNNTWPNRDQSDGVFGMLGEILPFDPAGM

SEQ ID NO: 747752 - protein, 84 aa, Homo sapiens
NVSEECSYSDPSESQTELSEFVHEKEVVDLSQELKERVSEDDETQPEKGTELQFEHLNWDPEEVAEWISQLGFPQYKVYKNKMF

SEQ ID NO: 747753 - protein, 561 aa, Homo sapiens
MVLGPEQKMSDDSVSGDHGESASLGNINPAYSNPSLSQSPGDSEEYFATYFNEKISIPEEEYSCFSFRKLWAFTGPGFLMSIAYLDPGNIESDLQSGAVAGFKLLWILLLATLVGLLLQRLAARLGVVTGLHLAEVCHRQYPKVPRVILWLMVELAIIGSDMQEVIGSAIAINLLSVGRIPLWGGVLITIADTFVFLFLDKYGLRKLEAFFGFLITIMALTFGYEYVTVKPSQSQVLKGMFVPSCSGCRTPQIEQAVGIVGAVIMPHNMYLHSALVKSRQVNRNNKQEVREANKYFFIESCIALFVSFIINVFVVSVFAEAFFGKTNEQVVEVCTNTSSPHAGLFPKDNSTLAVDIYKGGVVLGCYFGPAALYIWAVGILAAGQSSTMTGTYSGQFVMEGFLNLKWSRFARVVLTRSIAIIPTLLVAVFQDVEHLTGMNDFLNVLQSLQLPFALIPILTFTSLRPVMSDFANGLGWRIAGGILVLIICSINMYFVVVYVRDLGHVALYVVAAVVSVAYLGFVFYLGWQCLIALGMSFLDCGHTVSISKGLLTEEATRGYVK

SEQ ID NO: 747754 - protein, 561 aa, Homo sapiens; identical to SEQ ID NO: 747753

SEQ ID NO: 747755 - protein, 561 aa, Homo sapiens; identical to SEQ ID NO: 747753

SEQ ID NO: 747756 - protein, 561 aa, Homo sapiens; identical to SEQ ID NO: 747753

SEQ ID NO: 747757 - protein, 557 aa, Homo sapiens [sequence omitted]

SEQ ID NO: 747758 - protein, 561 aa, Homo sapiens; identical to SEQ ID NO: 747753

SEQ ID NO: 747759 - protein, 482 aa, Homo sapiens
MSIAYLDPGNIESDLQSGAVAGFKLLWILLLATLVGLLLQRLAARLGVVTGLHLAEVCHRQYPKVPRVILWLMVELAIIGSDMQEVIGSAIAINLLSVGRIPLWGGVLITIADTFVFLFLDKYGLRKLEAFFGFLITIMALTFGYEYVTVKPSQSQVLKGMFVPSCSGCRTPQIEQAVGIVGAVIMPHNMYLHSALVKSRQVNRNNKQEVREANKYFFIESCIALFVSFIINVFVVSVFAEAFFGKTNEQVVEVCTNTSSPHAGLFPKDNSTLAVDIYKGGVVLGCYFGPAALYIWAVGILAAGQSSTMTGTYSGQFVMEGFLNLKWSRFARVVLTRSIAIIPTLLVAVFQDVEHLTGMNDFLNVLQSLQLPFALIPILTFTSLRPVMSDFANGLGWRIAGGILVLIICSINMYFVVVYVRDLGHVALYVVAAVVSVAYLGFVFYLGWQCLIALGMSFLDCGHTVSISKGLLTEEATRGYVK

SEQ ID NO: 747760 - protein, 569 aa, Homo sapiens
MVLGPEQKMSDDSVSGDHGESASLGNINPAYSNPSLSQSPGDSEEYFATYFNEKISIPEEENKRLMDLQYSCFSFRKLWAFTGPGFLMSIAYLDPGNIESDLQSGAVAGFKLLWILLLATLVGLLLQRLAARLGVVTGLHLAEVCHRQYPKVPRVILWLMVELAIIGSDMQEVIGSAIAINLLSVGRIPLWGGVLITIADTFVFLFLDKYGLRKLEAFFGFLITIMALTFGYEYVTVKPSQSQVLKGMFVPSCSGCRTPQIEQAVGIVGAVIMPHNMYLHSALVKSRQVNRNNKQEVREANKYFFIESCIALFVSFIINVFVVSVFAEAFFGKTNEQVVEVCTNTSSPHAGLFPKDNSTLAVDIYKGGVVLGCYFGPAALYIWAVGILAAGQSSTMTGTYSGQFVMEGFLNLKWSRFARVVLTRSIAIIPTLLVAVFQDVEHLTGMNDFLNVLQSLQLPFALIPILTFTSLRPVMSDFANGLGWRIAGGILVLIICSINMYFVVVYVRDLGHVALYVVAAVVSVAYLGFVFYLGWQCLIALGMSFLDCGHTVSISKGLLTEEATRGYVK

SEQ ID NO: 747761 - protein, 174 aa, Homo sapiens [sequence omitted]

SEQ ID NO: 747762 - protein, 561 aa, Homo sapiens; identical to SEQ ID NO: 747753

SEQ ID NO: 747763 - protein, 568 aa, Homo sapiens
MVLGPEQKMSDDSVSGDHGESASLGNINPAYSNPSLSQSPGDSEEYFATYFNEKISIPEEEYSCFSFRKLWAFTGPGFLMSIAYLDPGNIESDLQSGAVAGFKLLWILLLATLVGLLLQRLAARLGVVTGLHLAEVCHRQYPKVPRVILWLMVELAIIGSDMQEVIGSAIAINLLSVGRIPLWGGVLITIADTFVFLFLDKYGLRKLEAFFGFLITIMALTFGYEYVTVKPSQSQVLKGMFVPSCSGCRTPQIEQAVGIVGAVIMPHNMYLHSALVKSRQVNRNNKQEVREANKYFFIESCIALFVSFIINVFVVSVFAEAFFGKTNEQVVEVCTNTSSPHAGLFPKDNSTLAVDIYKGGVVLGCYFGPAALYIWAVGILAAGQSSTMTGTYSGQFVMEGFLNLKWSRFARVVLTRSIAIIPTLLVAVFQDVEHLTGMNDFLNVLQSLQLPFALIPILTFTSLRPVMSDFANGLGWRIAGGILVLIICSINMYFVVVYVRDLGHVALYVVAAVVSVAYLGFVFYLGWQCLIALGMSFLDCGHTCHLGLTAQPELYLLNTMDADSLVSR

SEQ ID NO: 747764 - protein, 308 aa, Homo sapiens
MVLGPEQKMSDDSVSGDHGESASLGNINPAYSNPSLSQSPGDSEEYFATYFNEKISIPEEEYSCFSFRKLWAFTGPGFLMSIAYLDPGNIESDLQSGAVAGFKLLWILLLATLVGLLLQRLAARLGVVTGLHLAEVCHRQYPKVPRVILWLMVELAIIGSDMQEVIGSAIAINLLSVGRIPLWGGVLITIADTFVFLFLDKYGLRKLEAFFGFLITIMALTFGYELTFTSLRPVMSDFANGLGWRIAGGILVLIICSINMYFVVVYVRDLGHVALYVVAAVVSVAYLGFVFYLVSLAWKSRGIGIRDG

SEQ ID NO: 747765 - protein, 594 aa, Homo sapiens
SSGTMRKKQLKTEAAPHCELKSYSKNSATQVSTMVLGPEQKMSDDSVSGDHGESASLGNINPAYSNPSLSQSPGDSEEYFATYFNEKISIPEEEYSCFSFRKLWAFTGPGFLMSIAYLDPGNIESDLQSGAVAGFKLLWILLLATLVGLLLQRLAARLGVVTGLHLAEVCHRQYPKVPRVILWLMVELAIIGSDMQEVIGSAIAINLLSVGRIPLWGGVLITIADTFVFLFLDKYGLRKLEAFFGFLITIMALTFGYEYVTVKPSQSQVLKGMFVPSCSGCRTPQIEQAVGIVGAVIMPHNMYLHSALVKSRQVNRNNKQEVREANKYFFIESCIALFVSFIINVFVVSVFAEAFFGKTNEQVVEVCTNTSSPHAGLFPKDNSTLAVDIYKGGVVLGCYFGPAALYIWAVGILAAGQSSTMTGTYSGQFVMEGFLNLKWSRFARVVLTRSIAIIPTLLVAVFQDVEHLTGMNDFLNVLQSLQLPFALIPILTFTSLRPVMSDFANGLGWRIAGGILVLIICSINMYFVVVYVRDLGHVALYVVAAVVSVAYLGFVFYLGWQCLIALGMSFLDCGHTVSISKGLLTEEATRGYVK

SEQ ID NO: 747766 - protein, 561 aa, Homo sapiens; identical to SEQ ID NO: 747753

SEQ ID NO: 747767 - protein, 561 aa, Homo sapiens; identical to SEQ ID NO: 747753

SEQ ID NO: 747768 - protein, 594 aa, Homo sapiens; identical to SEQ ID NO: 747765

SEQ ID NO: 747769 - protein, 576 aa, Homo sapiens
RTRGSTHASPGIWSPGRGGGVSGGCGAGKNHILRTQPLRYPPWCWVLNRRCQMSPGDSEEYFATYFNEKISIPEEEYSCFSFRKLWAFTGPGFLMSIAYLDPGNIESDLQSGAVAGFKLLWILLLATLVGLLLQRLAARLGVVTGLHLAEVCHRQYPKVPRVILWLMVELAIIGSDMQEVIGSAIAINLLSVGRIPLWGGVLITIADTFVFLFLDKYGLRKLEAFFGFLITIMALTFGYEYVTVKPSQSQVLKGMFVPSCSGCRTPQIEQAVGIVGAVIMPHNMYLHSALVKSRQVNRNNKQEVREANKYFFIESCIALFVSFIINVFVVSVFAEAFFGKTNEQVVEVCTNTSSPHAGLFPKDNSTLAVDIYKGGVVLGCYFGPAALYIWAVGILAAGQSSTMTGTYSGQFVMEGFLNLKWSRFARVVLTRSIAIIPTLLVAVFQDVEHLTGMNDFLNVLQSLQLPFALIPILTFTSLRPVMSDFANGLGWRIAGGILVLIICSINMYFVVVYVRDLGHVALYVVAAVVSVAYLGFVFYLGWQCLIALGMSFLDCGHTVSISKGLLTEEATRGYVK

SEQ ID NO: 747770 - protein, 329 aa, Homo sapiens
MVLGPEQKMSDDSVSGDHGESASLGNINPAYSNPSLSQSPGDSEEYFATYFNEKISIPEEEYSCFSFRKLWAFTGPGFLMSIAYLDPGNIESDLQSGAVAGFKLLWILLLATLVGLLLQRLAARLGVVTGLHLAEVCHRQYPKVPRVILWLMVELAIIGSDMQEVIGSAIAINLLSVGRIPLWGGVLITIADTFVFLFLDKYGLRKLEAFFGFLITIMALTFGYELTFTSLRPVMSDFANGLGWRIAGGILVLIICSINMYFVVVYVRDLGHVALYVVAAVVSVAYLGFVFYLGWQCLIALGMSFLDCGHTVSISKGLLTEEATRGYVK

SEQ ID NO: 747771 - protein, 568 aa, Homo sapiens; identical to SEQ ID NO: 747763

SEQ ID NO: 747772 - protein, 174 aa, Homo sapiens [sequence omitted]

SEQ ID NO: 747773 - protein, 561 aa, Homo sapiens; identical to SEQ ID NO: 747753

SEQ ID NO: 747774 - protein, 568 aa, Homo sapiens; identical to SEQ ID NO: 747763

SEQ ID NO: 747775 - protein, 118 aa, Homo sapiens
MVLGPEQKMSDDSVSGDHGESASLGNINPAYSNPSLSQSPGDSEEYFATYFNEKISIPEEEYSCFSFRKLWAFTGPGFLMSIAYLDPGNIESDLQSGAVAGFKLLWILLLPPRYSVQR

SEQ ID NO: 747776 - protein, 371 aa, Homo sapiens
MAATCEISNIFSNYFSAMYSSEDSTLASVPPAATFGADDLVLTLSNPQMSLEGTEKASWLGEQPQFWSKTQVLDWISYQVEKNKYDASAIDFSRCDMDGATLCNCALEELRLVFGPLGDQLHAQLRDLTSSSSDELSWIIELLEKDGMAFQEALDPGPFDQGSPFAQELLDDGQQASPYHPGSCGAGAPSPGSSDVSTAGTGASRSSHSSDSGGSDVDLDPTDGKLFPSDGFRDCKKGDPKHGKRKRGRPRKLSKEYWDCLEGKKSKHAPRGTHLWEFIRDILIHPELNEGLMKWENRHEGVFKFLRSEAVAQLWGQKKKNSNMTYEKLSRAMRYYYKREILERVDGRRLVYKFGKNSSGWKEEEVLQSRN

SEQ ID NO: 747777 - protein, 371 aa, Homo sapiens; identical to SEQ ID NO: 747776

SEQ ID NO: 747778 - protein, 371 aa, Homo sapiens; identical to SEQ ID NO: 747776

SEQ ID NO: 747779 - protein, 371 aa, Homo sapiens; identical to SEQ ID NO: 747776

SEQ ID NO: 747780 - protein, 389 aa, Homo sapiens
CVGDGACVVLGLRHSGSLMAATCEISNIFSNYFSAMYSSEDSTLASVPPAATFGADDLVLTLSNPQMSLEGTEKASWLGEQPQFWSKTQVLDWISYQVEKNKYDASAIDFSRCDMDGATLCNCALEELRLVFGPLGDQLHAQLRDLTSSSSDELSWIIELLEKDGMAFQEALDPGPFDQGSPFAQELLDDGQQASPYHPGSCGAGAPSPGSSDVSTAGTGASRSSHSSDSGGSDVDLDPTDGKLFPSDGFRDCKKGDPKHGKRKRGRPRKLSKEYWDCLEGKKSKHAPRGTHLWEFIRDILIHPELNEGLMKWENRHEGVFKFLRSEAVAQLWGQKKKNSNMTYEKLSRAMRYYYKREILERVDGRRLVYKFGKNSSGWKEEEVLQSRN

SEQ ID NO: 747781 - protein, 426 aa, Homo sapiens
MAATCEISNIFSNYFSAMYSSEDSTLASVPPAATFGADDLVLTLSNPQMSLEGTEKASWLGEQPQFWSKTQVLDWISYQVEKNKYDASAIDFSRCDMDGATLCNCALEELRLVFGPLGDQLHAQLRDLSESRPLEAGEQLHMLSPVEFSVAVGRPWSSGPAAQPERALEGGIRGVGPFLPSLSASSSSDELSWIIELLEKDGMAFQEALDPGPFDQGSPFAQELLDDGQQASPYHPGSCGAGAPSPGSSDVSTAGTGASRSSHSSDSGGSDVDLDPTDGKLFPSDGFRDCKKGDPKHGKRKRGRPRKLSKEYWDCLEGKKSKHAPRGTHLWEFIRDILIHPELNEGLMKWENRHEGVFKFLRSEAVAQLWGQKKKNSNMTYEKLSRAMRYYYKREILERVDGRRLVYKFGKNSSGWKEEEVLQSRN

SEQ ID NO: 747782 - protein, 344 aa, Homo sapiens
MAATCEISNIFSNYFSAMYSSEDSTLASVPPAATFGADDLVLTLSNPQMSLEGTEKASWLGEQPQFWSKTQVLDWISYQVEKNKYDASAIDFSRCDMDGATLCNCALEELRLVFGPLGDQLHAQLRDLTSSSSDELSWIIELLEKDGMAFQEALDPGPFDQGSPFAQELLDDGTGASRSSHSSDSGGSDVDLDPTDGKLFPSDGFRDCKKGDPKHGKRKRGRPRKLSKEYWDCLEGKKSKHAPRGTHLWEFIRDILIHPELNEGLMKWENRHEGVFKFLRSEAVAQLWGQKKKNSNMTYEKLSRAMRYYYKREILERVDGRRLVYKFGKNSSGWKEEEVLQSRN

SEQ ID NO: 747783 - protein, 493 aa, Homo sapiens
MAATCEISNIFSNYFSAMYSSEDSTLASVPPAATFGADDLVLTLSNPQMSLEGTEKASWLGEQPQFWSKTQVLDWISYQVEKNKYDASAIDFSRCDMDGATLCNCALEELRLVFGPLGDQLHAQLRDLSESRPLEAGEQLHMLSPVEFSVAVGRPWSSGPAAQPERALEGGIRGVGPFLPSLSASSSSDELSWIIELLEKDGMAFQEALDPGPFGENPFSPSFPSLSCPIPAPPQSARDDPSPDFFLPQLEKLQQVIRPMGSITCPGLSPEPSLSSHLLFPDQGSPFAQELLDDGQQASPYHPGSCGAGAPSPGSSDVSTAGTGASRSSHSSDSGGSDVDLDPTDGKLFPSDGFRDCKKGDPKHGKRKRGRPRKLSKEYWDCLEGKKSKHAPRGTHLWEFIRDILIHPELNEGLMKWENRHEGVFKFLRSEAVAQLWGQKKKNSNMTYEKLSRAMRYYYKREILERVDGRRLVYKFGKNSSGWKEEEVLQSRN

SEQ ID NO: 747784 - protein, 358 aa, Homo sapiens
MAATCEISNIFSNYFSAMYSSEDSTLASVPPAATFGADDLVLTLSNPQMSLEGTEKASWLGEQPQFWSKTQVLDWISYQVEKNKYDASAIDFSRCDMDGATLCNCALEELRLVFGPLGDQLHAQLRDLTSSSSDELSWIIELLEKDGMAFQEALDPGPFDQGSPFAQELLDDGQQASPYHPGSCGAGTGASRSSHSSDSGGSDVDLDPTDGKLFPSDGFRDCKKGDPKHGKRKRGRPRKLSKEYWDCLEGKKSKHAPRGTHLWEFIRDILIHPELNEGLMKWENRHEGVFKFLRSEAVAQLWGQKKKNSNMTYEKLSRAMRYYYKREILERVDGRRLVYKFGKNSSGWKEEEVLQSRN

SEQ ID NO: 747785 - protein, 371 aa, Homo sapiens; identical to SEQ ID NO: 747776

SEQ ID NO: 747786 - protein, 187 aa, Homo sapiens
PVLGIPLLAVTKTIAGTGASRSSHSSDSGGSDVDLDPTDGKLFPSDGFRDCKKGDPKHGKRKRGRPRKLSKEYWDCLEGKKSKHAPRGTHLWEFIRDILIHPELNEGLMKWENRHEGVFKFLRSEAVAQLWGQKKKNSNMTYEKLSRAMRYYYKREILERVDGRRLVYKFGKNSSGWKEEEVLQSRN

SEQ ID NO: 747787 - protein, 119 aa, Homo sapiens
GERGHLDGKLMEAGLAAPRGTHLWEFIRDILIHPELNEGLMKWENRHEGVFKFLRSEAVAQLWGQKKKNSNMTYEKLSRAMRYYYKREILERVDGRRLVYKFGKNSSGWKEEEVLQSRN

SEQ ID NO: 747788 - protein, 371 aa, Homo sapiens; identical to SEQ ID NO: 747776

SEQ ID NO: 747789 - protein, 277 aa, Homo sapiens
MAATCEISNIFSNYFSAMYSSEDSTLASVPPAATFGADDLVLTLSNPQMSLEGTEKASWLGEQPQFWSKTQVLDWISYQVEKNKYDASAIDFSRCDMDGATLCNCALEELRLVFGPLGDQLHAQLRDLTSSSSDELSWIIELLEKDGMAFQEALDPGPFDQGSPFAQELLDDGQQASPYHPGSCGAGAPSPGSSDVSTAGTGASRSSHSSDSGGSDVDLDPTDGKLFPSDGFRDCKKGDPKHGKRKRGRPRKLSKEYWDCLEGKKSKHEPGLVVLER

SEQ ID NO: 747790 - protein, 237 aa, Homo sapiens
MAATCEISNIFSNYFSAMYSSEDSTLASVPPAATFGADDLVLTLSNPQMSLEGTEKASWLGEQPQFWSKTQVLDWISYQVEKNKYDASAIDFSRCDMDGATLCNCALEELRLVFGPLGDQLHAQLRDLTSSSSDELSWIIELLEKDGMAFQEALDPGPFDQGSPFAQELLDDGQQASPYHPGSCGAGAPSPGSSDVSTAGTGASRSSHSSDSGGSDVDLDPTDGKLFPSVPPPPKKA

SEQ ID NO: 747791 - protein, 136 aa, Homo sapiens
MAATCEISNIFSNYFSAMYSSEDSTLASVPPAATFGADDLVLTLSNPQMSLEGTEKASWLGEQPQFWSKTQVLDWISYQVEKNKYDASAIDFSRCDMDGATLCNCALEELRLVFGPLGDQLHAQLRDLTFTSHYLE

SEQ ID NO: 747792 - protein, 371 aa, Homo sapiens; identical to SEQ ID NO: 747776

SEQ ID NO: 747793 - protein, 419 aa, Homo sapiens
MAATCEISNIFSNYFSAMYSSEDSTLASVPPAATFGADDLVLTLSNPQMSLEGTEKASWLGEQPQFWSKTQVLDWISYQVEKNKYDASAIDFSRCDMDGATLCNCALEELRLVFGPLGDQLHAQLRDLTSSSSDELSWIIELLEKDGMAFQEALDPGPFDQGSPFAQELLDDGQQASPYHPGSCGAGAPSPGSSDVSTAGTGASRSSHSSDSGGSDVDLDPTDGKLFPSGESREVPKRASHLQCTGGPALPAAFSCRGATLPNSPLAPPGPSTTVPTDGFRDCKKGDPKHGKRKRGRPRKLSKEYWDCLEGKKSKHAPRGTHLWEFIRDILIHPELNEGLMKWENRHEGVFKFLRSEAVAQLWGQKKKNSNMTYEKLSRAMRYYYKREILERVDGRRLVYKFGKNSSGWKEEEVLQSRN

SEQ ID NO: 747794 - protein, 383 aa, Homo sapiens
  misc_feature (9)..(9): Xaa can be any naturally occurring amino acid
HALVRIRHXCSLMAATCEISNIFSNYFSAMYSSEDSTLASVPPAATFGADDLVLTLSNPQMSLEGTEKASWLGEQPQFWSKTQVLDWISYQVEKNKYDASAIDFSRCDMDGATLCNCALEELRLVFGPLGDQLHAQLRDLTSSSSDELSWIIELLEKDGMAFQEALDPGPFDQGSPFAQELLDDGQQASPYHPGSCGAGAPSPGSSDVSTAGTGASRSSHSSDSGGSDVDLDPTDGKLFPSDGFRDCKKGDPKHGKRKRGRPRKLSKEYWDCLEGKKSKHAPRGTHLWEFIRDILIHPELNEGLMKWENRHEGVFKFLRSEAVAQLWGQKKKNSNMTYEKLSRAMRYYYKREILERVDGRRLVYKFGKNSSGWKEEEVLQSRN

SEQ ID NO: 747795 - protein, 224 aa, Homo sapiens
MAFQEALDPGPFDQGSPFAQELLDDGQQASPYHPGSCGAGAPSPGSSDVSTAGTGASRSSHSSDSGGSDVDLDPTDGKLFPSDGFRDCKKGDPKHGKRKRGRPRKLSKEYWDCLEGKKSKHAPRGTHLWEFIRDILIHPELNEGLMKWENRHEGVFKFLRSEAVAQLWGQKKKNSNMTYEKLSRAMRYYYKREILERVDGRRLVYKFGKNSSGWKEEEVLQSRN

SEQ ID NO: 747796 - protein, 450 aa, Homo sapiens
MAATCEISNIFSNYFSAMYSSEDSTLASVPPAATFGADDLVLTLSNPQMSLEGTEKASWLGEQPQFWSKTQVLDWISYQVEKNKYDASAIDFSRCDMDGATLCNCALEELRLVFGPLGDQLHAQLRDLTSSSSDELSWIIELLEKDGMAFQEALDPGPFDQGSPFAQELLDDGQQASPYHPGSCGAGAPSPGSSDVSTAGTGTGWEVCPESQQRGEQRVGRQGTYSDPAPRTGASRSSHSSDSGGSDVDLDPTDGKLFPSGESREVPKRASHLQCTGGPALPAAFSCRGATLPNSPLAPPGPSTTVPTDGFRDCKKGDPKHGKRKRGRPRKLSKEYWDCLEGKKSKHAPRGTHLWEFIRDILIHPELNEGLMKWENRHEGVFKFLRSEAVAQLWGQKKKNSNMTYEKLSRAMRYYYKREILERVDGRRLVYKFGKNSSGWKEEEVLQSRN

SEQ ID NO: 747797 - protein, 371 aa, Homo sapiens; identical to SEQ ID NO: 747776

SEQ ID NO: 747798 - protein, 109 aa, Homo sapiens
FLRIFSPPRGTHLWEFIRDILIHPELNEGLMKWENRHEGVFKFLRSEAVAQLWGQKKKNSNMTYEKLSRAMRYYYKREILERVDGRRLVYKFGKNSSGWKEEEVLQSRN

SEQ ID NO: 747799 - protein, 367 aa, Homo sapiens
MAATCEISNIFSNYFSAMYSSEDSTLASVPPAATFGADDLVLTLSNPQMSLEGTEKASWLGEQPQFWSKTQVLDWISYQVEKNKYDASAIDFSRCDMDGATLCNCALEELRLVFGPLGDQLHAQLRDLTSSSSDELSWIIELLEKDGMAFQEALDPGPFDQGSPFAQELLDDGQQASPYHPGSCGAGAPSPGSSDVSTAGTGASRSSHSSDSGGSDVDLDPTDGKLFPSDGFRDCKKGDPKHGKRKRGRPRKLSKEYWDCLEGKKSKHAPRGTHLWEFIRDILIHPELNEGLMKWENRHEGVFKFLRSEAVAQLWGQKKKNSNMTYEKLSRAMRMSRMNSHRWVPLGAAASLTLRGPRGRTVPIGIL

SEQ ID NO: 747800 - protein, 109 aa, Homo sapiens
ERERERELVSRSTRPRIRGRVDRRRRLYLEPGRGAQRPDTSALPGGTGFLSRLPACLPQPDSATPVASWLQPVRLATFLATTSVRCTARRTPPWPLFPLLPPLGPMTWY

SEQ ID NO: 747801 - protein, 138 aa, Homo sapiens
MRVFSLHLGPNSRHIRILPSLVFQIFAAIFVGVLVMSGRGKGGKGLGKGGAKRHRKVLRDNIQGITKPAIRRLARRGGVKRISGLIYEETRGVLKVFLENVIRDAVTYTEHAKRKTVTAMDVVYALKRQGRTLYGFGG

SEQ ID NO: 747802 - protein, 213 aa, Homo sapiens
MERVGRGAPKRPCGNPQTTLWGRGPKEGTENSTGGGSRSCGKPERGPKRVLKPPILLLKKFPNTTWVSKKFCSPSTVTITCGAVSQPGGENPGGNPFVHSPPSVGGASKEVRPRFGSKVPALTLPLVIRGGALCKTTQHKGRLTRKTIEKRGDAKKGPTEGRRLRYTRFLDKGRKKKELKQKQGGALQTAQGKRHRASGDNTSWEKRDPTEYS

SEQ ID NO: 747803 - protein, 315 aa, Homo sapiens
MEPEAGTNRTAVAEFILLGLVQTEEMQPVVFVLLLFAYLVTTGGNLSILAAVLVEPKLHAPMYFFLGNLSVLDVGCITVTVPAMLGRLLSHKSTISYDACLSQLFFFHLLAGMDCFLLTAMAYDRLLAICQPLTYSTRMSQTVQRMLVAASLACAFTNALTHTVAMSTLNFCGPNEVNHFYCDLPQLFQLSCSSTQLNELLLFAVGFIMAGTPLVLIITAYSHVAAAVLRIRSVEGRKKAFSTCGSHLTVVCLFFGRGIFNYMRLGSEEASDKDKGVGVFNTVINPMLNPLIYSLRNPDVQGALWQIFLGRRSLT

SEQ ID NO: 747804 - protein, 159 aa, Homo sapiens
GKDLSSKLTHQKNHEIKVQHSPFPSSLPCPGRLLRTLLGNSSVSFVLISFLLCFAVDLSSFSLTSLPQSLLMLNQDLRAGAHLSASIQRGLLTQPPLLEEDLAFSLPACPCAEEGCLSRVTPICLCCSFIPCLSNYLAMCSLGTQVFRSTDRPAGTLSC

SEQ ID NO: 747805 - protein, 96 aa, Homo sapiens
GEHGRCLVSPASAGRELLSGQGQVCWSGVRARVPGRGGGAWQASLERRGPCAGAGGRAEPQTPLAPARPRQPRAKESRGSPSCHHEPREGFRAAHA

SEQ ID NO: 747806 - protein, 191 aa, Homo sapiens
FSALQMFRHTDSLFPILLQTLSDESDEVILKDLEVLAEIASSPAGQTDDPGPLDGPDLQASHSELQVPTPGRAGLLNTSGTKGLECSPSTPTMNSYFYKFMINLLKRFSSERKLLEVRGPFIIRSALAARFLLFLPRPRLFTFTPFKCQSSHLLFPFSLLLFLTFGSVRNEEGCPFILVADASDMKQTGQC

SEQ ID NO: 747807 - protein, 138 aa, Homo sapiens
RVCSGLVSPLQKQLFCGPMVILKDLEVLAEIASSPAGQTDDPGPLDGPDLQASHSELQVPTPGRAGLLNTSGTKGLECSPSTPTMNSYFYKFMINLLKRFSSERKLLEVRGPFIIRNEEGCPFILVADASDMKQTGQC

SEQ ID NO: 747808 - protein, 782 aa, Homo sapiens
MNPEKDFAPLTPNIVRALNDKLYEKRKVAALEIEKLVREFVAQNNTVQIKHVIQTLSQEFALSQHPHSRKGGLIGLAACSIALGKDSGLYLKELIEPVLTCFNDADSRLRYYACEALYNIVKVARGAVLPHFNVLFDGLSKLAADPDPNVKSGSELLDRLLKDIVTESNKFDLVSFIPLLRERIYSNNQYARQFIISWILVLESVPDINLLDYLPEILDGLFQILGDNGKEIRKMCEVVLGEFLKEIKKNPSSVKFAEMANILVIHCQTTDDLIQLTAMCWMREFIQLAGRVMLPYSSGILTAVLPCLAYDDRKKSIKEVANVCNQSLMKLVTPEDDELDELRPGQRQAEPTPDDALPKQEGTASGGPDGSCDSSFSSGISVFTAASTERAPVTLHLDGIVQVLNCHLSDTAIGMMTRIAVLKWLYHLYIKTPRKMFRHTDSLFPILLQTLSDESDEVILKDLEVLAEIASSPAGQTDDPGPLDGPDLQASHSELQVPTPGRAGLLNTSGTKGLECSPSTPTMNSYFYKFMINLLKRFSSERKLLEVRGPFIIRQLCLLLNAENIFHSMADILLREEDLKFASTMVHALNTILLTSTELFQLRNQLKDLKTLESQNLFCCLYRSWCHNPVTTVSLCFLTQNYRHAYDLIQKFGDLEVTVDFLAEVDKLVQLIECPIFTYLRLQLLDVKNNPYLIKALYGLLMLLPQSSAFQLLSHRLQCVPNPELLQTEDSLKAAPKSQKADSPSIDYAELLQHFEKVQNKHLEVRHQRSGRGDHLDRRVVL

SEQ ID NO: 747809 - protein, 732 aa, Homo sapiens
MNPEKDFAPLTPNIVRALNDKLYEKRKVAALEIEEDSGLYLKELIEPVLTCFNDADSRLRYYACEALYNIVKVARGAVLPHFNVLFDGLSKLAADPDPNVKSGSELLDRLLKDIVTESNKFDLVSFIPLLRERIYSNNQYARQFIISWILVLESVPDINLLDYLPEILDGLFQILGDNGKEIRKMCEVVLGEFLKEIKKNPSSVKFAEMANILVIHCQTTDDLIQLTAMCWMREFIQLAGRVMLPYSSGILTAVLPCLAYDDRKKSIKEVANVCNQSLMKLVTPEDDELDELRPGQRQAEPTPDDALPKQEGTASGGPDGSCDSSFSSGISVFTAASTERAPVTLHLDGIVQVLNCHLSDTAIGMMTRIAVLKWLYHLYIKTPRKMFRHTDSLFPILLQTLSDESDEVILKDLEVLAEIASSPAGQTDDPGPLDGPDLQASHSELQVPTPGRAGLLNTSGTKGLECSPSTPTMNSYFYKFMINLLKRFSSERKLLEVRGPFIIRQLCLLLNAENIFHSMADILLREEDLKFASTMVHALNTILLTSTELFQLRNQLKDLKTLESQNLFCCLYRSWCHNPVTTVSLCFLTQNYRHAYDLIQKFGDLEVTVDFLAEVDKLVQLIECPIFTYLRLQLLDVKNNPYLIKALYGLLMLLPQSSAFQLLSHRLQCVPNPELLQTEDSLKAAPKSQKADSPSIDYAELLQHFEKVQNKHLEVRHQRSGRGDHLDRRVVL

SEQ ID NO: 747810 - protein, 548 aa, Homo sapiens
MCEVVLGEFLKEIKKNPSSVKFAEMANILVIHCQTTDDLIQLTAMCWMREFIQLAGRVMLPYSSGILTAVLPCLAYDDRKKSIKEVANVCNQSLMKLVTPEDDELDELRPGQRQAEPTPDDALPKQEGTASGGPDGSCDSSFSSGISVFTAASTERAPVTLHLDGIVQVLNCHLSDTAIGMMTRIAVLKWLYHLYIKTPRKMFRHTDSLFPILLQTLSDESDEVILKDLEVLAEIASSPAGQTDDPGPLDGPDLQASHSELQVPTPGRAGLLNTSGTKGLECSPSTPTMNSYFYKFMINLLKRFSSERKLLEVRGPFIIRQLCLLLNAENIFHSMADILLREEDLKFASTMVHALNTILLTSTELFQLRNQLKDLKTLESQNLFCCLYRSWCHNPVTTVSLCFLTQNYRHAYDLIQKFGDLEVTVDFLAEVDKLVQLIECPIFTYLRLQLLDVKNNPYLIKALYGLLMLLPQSSAFQLLSHRLQCVPNPELLQTEDSLKAAPKSQKADSPSIDYAELLQHFEKVQNKHLEVRHQRSGRGDHLDRRVVL

SEQ ID NO: 747811 - protein, 217 aa, Homo sapiens
ANSLVIRDCEKEDLKFASTMVHALNTILLTSTELFQLRNQLKDLKTLESQNLFCCLYRSWCHNPVTTVSLCFLTQNYRHAYDLIQKFGDLEVTVDFLAEVDKLVQLIECPIFTYLRLQLLDVKNNPYLIKALYGLLMLLPQSSAFQLLSHRLQCVPNPELLQTEDSLKAAPKSQKADSPSIDYAELLQHFEKVQNKHLEVRHQRSGRGDHLDRRVVL

SEQ ID NO: 747812 - protein, 176 aa, Homo sapiens [sequence omitted]

SEQ ID NO: 747813 - protein, 782 aa, Homo sapiens; identical to SEQ ID NO: 747808

SEQ ID NO: 747814 - protein, 782 aa, Homo sapiens; identical to SEQ ID NO: 747808

SEQ ID NO: 747815 - protein, 758 aa, Homo sapiens
MNPEKDFAPLTPNIVRALNDKLYEKRKVAALEIEKLVREFVAQNNTVQIKHVIQTLSQEFALSQHPHSRKGGLIGLAACSIALGKDSGLYLKELIEPVLTCFNDADSRLRYYACEALYNIVKVARGAVLPHFNVLFDGLSKLAADPDPNVKSGSELLDRLLKDIVTESNKFDLVSFIPLLRERIYSNNQYARQFIISWILVLESVPDINLLDYLPEILDGLFQILGDNGKEIRKMCEVVLGEFLKEIKKNPSSVKFAEMANILVIHCQTTDDLIQLTAMCWMREFIQLAGRVMLPYSSGILTAVLPCLAYDDRKKSIKEVANVCNQSLMKLVTPEDDELDELRPGQRQAEPTPDDALPKQEGTASGGPDGSCDSSFSSGISVFTAASTERAPVTLHLDGIVQVLNCHLSDTAIGMMTRIAVLKWLYHLYIKTPRKMFRHTDSLFPILLQTLSDESDEVILKDLEVLAEIASSPAGQTDDPGPLDGPDLQASHSELQVPTPGRAGLLNTSGTKGLECSPSTPTMNSYFYKFMINLLKRFSSERKLLEVRGPFIIRQLCLLLNAENIFHSMADILLREEDLKFASTMVHALNTILLTSTELFQLRNQLKDLKTLESQNLFCCLYRSWCHNPVTTVSLCFLTQNYRHAYDLIQKFGDLEVTVDFLAEVDKLVQLIECPIFTYLRLQLLDVKNNPYLIKALYGLLMLLPQSSAFQLLSHRLQCVPNPELLQTEDSLKAAPKSQKADSPWHSHRAGCPPSGGL

SEQ ID NO: 747816 - protein, 621 aa, Homo sapiens [sequence omitted]

SEQ ID NO: 747817 - protein, 511 aa, Homo sapiens
MNPEKDFAPLTPNIVRALNDKLYEKRKVAALEIEKLVREFVAQNNTVQIKHVIQTLSQEFALSQHPHSRKGGLIGLAACSIALGKDSGLYLKELIEPVLTCFNDADSRLRYYACEALYNIVKVARGAVLPHFNVLFDGLSKLAADPDPNVKSGSELLDRLLKDIVTESNKFDLVSFIPLLRERIYSNNQYARQFIISWILVLESVPDINLLDYLPEILDGLFQILGDNGKEIRKMCEVVLGEFLKEIKKNPSSVKFAEMANILVIHCQTTDDLIQLTAMCWMREFIQLAGRVMLPYSSGILTAVLPCLAYDDRKKSIKEVANVCNQSLMKLVTPEDDELDELRPGQRQAEPTPDDALPKQEGTASGGPDGSCDSSFSSGISVFTAASTERAPVTLHLDGIVQVLNCHLSDTAIGMMTRIAVLKWLYHLYIKTPRKMFRHTDSLFPILLQTLSDESDEVILKDLEVLAEIASSPAGQTDDPGPLDGPDLQASHSELQVPTPGRAGLLNTSEF

SEQ ID NO: 747818 - protein, 410 aa, Homo sapiens
MNPEKDFAPLTPNIVRALNDKLYEKRKVAALEIEKLVREFVAQNNTVQIKHVIQTLSQEFALSQHPHSRKGGLIGLAACSIALGKDSGLYLKELIEPVLTCFNDADSRLRYYACEALYNIVKVARGAVLPHFNVLFDGLSKLAADPDPNVKSGSELLDRLLKDIVTESNKFDLVSFIPLLRERIYSNNQYARQFIISWILVLESVPDINLLDYLPEILDGLFQILGDNGKEIRKMCEVVLGEFLKEIKKNPSSVKFAEMANILVIHCQTTDDLIQLTAMCWMREFIQLAGRVMLPYSSGILTAVLPCLAYDDRKKSIKEVANVCNQSLMKLVTPEDDELDELRPGQRQAEPTPDDALPKQEGTASGCTEAQHFRDIPPMMRNSLLVRKRETNPNGETFCRVTSASKVSSL

SEQ ID NO: 747819 - protein, 176 aa, Homo sapiens [sequence omitted]

SEQ ID NO: 747820 - protein, 152 aa, Homo sapiens
EALNSQTRTIARGRSHGARSVGRSAHIQATPGRAGLLNTSGTKGLECSPSTPTMNSYFYKFMINLLKRFSSERKLLEVRGPFIIRSALAARFLLFLPRPRLFTFTPFKCQSSHLLFPFSLLLFLTFGSVRNEEGCPFILVADASDMKQTGQC

SEQ ID NO: 747821 - protein, 129 aa, Homo sapiens
LRPGQRQAEPTPDDALPKQEGTASGEWTPSLHLTSCRGPREPDVIGVALGPHLSNQDYFMYVTHTIVAATQRSGSSGSPPFCRQDTGKLSTMATHSQLVKTGTGLEPRQAVSSSHDLNPSCLKDHEAFP

SEQ ID NO: 747822 - protein, 372 aa, Homo sapiens
RSLRRYGELANTPFGLFLPPCFCVPWECCCAYASGLFLELQWTGICDSTMGLSNILFVMAFLLSGAAPLKIQAYFNETADLPCQFANSQNQSLSELVVFWQDQENLVLNEVYLGKEKFDSVHSKYMGRTSFDSDSWTLRLHNLQIKDKGLYQCIIHHKKPTGMIRIHQMNSELSVLANFSQPEIVPISNITENVYINLTCSSIHGYPEPKKMSVLLRTKNSTIEYDGIMQKSQDNVTELYDVSISLSVSFPDVTSNMTIFCILETDKTRLLSSPFSIELEDPQPPPDHIPWITAVLPTVIICVMVFCLILWKWKKKKRPRNSYKCGTNTMEREESEQTKKREKIHIPERSDEAQRVFKSSKTSSCDKSDTCF

SEQ ID NO: 747823 - protein, 329 aa, Homo sapiens
MDPQCTMGLSNILFVMAFLLSGAAPLKIQAYFNETADLPCQFANSQNQSLSELVVFWQDQENLVLNEVYLGKEKFDSVHSKYMGRTSFDSDSWTLRLHNLQIKDKGLYQCIIHHKKPTGMIRIHQMNSELSVLANFSQPEIVPISNITENVYINLTCSSIHGYPEPKKMSVLLRTKNSTIEYDGIMQKSQDNVTELYDVSISLSVSFPDVTSNMTIFCILETDKTRLLSSPFSIELEDPQPPPDHIPWITAVLPTVIICVMVFCLILWKWKKKKRPRNSYKCGTNTMEREESEQTKKREKIHIPERSDEAQRVFKSSKTSSCDKSDTCF

SEQ ID NO: 747824 - protein, 672 aa, Homo sapiens
MESRKLISATDIQYSGSLLNSLNEQRGHGLFCDVTVIVEDRKFRAHKNILSASSTYFHQLFSVAGQVVELSFIRAEIFAEILNYIYSSKIVRVRSDLLDELIKSGQLLGVKFIAELGVPLSQVKSISGTAQDGNTEPLPPDSGDKNLVIQKSKDEAQDNGATIMPIITESFSLSAEDYEMKKIIVTDSDDDDDDVIFCSEILPTKETLPSNNTVAQVQSNPGPVAISDVAPSASNNSPPLTNITPTQKLPTPVNQATLSQTQGSEKLLVSSAPTHLTPNIILLNQTPLSTPPNVSSSLPNHMPSSINLLVQNQQTPNSAILTGNKANEEEEEEIIDDDDDTISSSPDSAVSNTSLVPQADTSQNTSFDGSLIQKMQIPTLLQEPLSNSLKISDIITRNTNDPGVGSKHLMEGQKIITLDTATEIEGLSTGCKVYANIGEDTYDIVIPVKDDPDEGEARLENEIPKTSGSEMANKRMKVKHDDHYELIVDGRVYYICIVCKRSYVCLTSLRRHFNIHSWEKKYPCRYCEKVFPLAEYRTKHEIHHTGERRYQCLACGKSFINYQFMSSHIKSVHSQDPSGDSKLYRLHPCRSLQIRQYAYLSDRSSTIPAMKDDGIGYKVDTGKEPPVGTTTSTQNKPMTWEDIFIQQENDSIFKQNVTDGSTEFEFIIPESY

SEQ ID NO: 747825 - protein, 672 aa, Homo sapiens; identical to SEQ ID NO: 747824

SEQ ID NO: 747826 - protein, 672 aa, Homo sapiens; identical to SEQ ID NO: 747824

SEQ ID NO: 747827 - protein, 112 aa, Homo sapiens
GYANDRRTENHNPSAVMASTSLFLEQAIFTRDVSKSTSNPSYLDLKWICSETSWPTPKKMLLHSEDARASHHPHCKSGSSARTQQGSLLSEGFVSCGRKSNIKNKNPGLDYP

SEQ ID NO: 747828 - protein, 112 aa, Homo sapiens; identical to SEQ ID NO: 747827

SEQ ID NO: 747829 - protein, 112 aa, Homo sapiens; identical to SEQ ID NO: 747827

SEQ ID NO: 747830 - protein, 112 aa, Homo sapiens; identical to SEQ ID NO: 747827

SEQ ID NO: 747831 - protein, 112 aa, Homo sapiens; identical to SEQ ID NO: 747827

SEQ ID NO: 747832 - protein, 112 aa, Homo sapiens; identical to SEQ ID NO: 747827

SEQ ID NO: 747833 - protein, 89 aa, Homo sapiens
  misc_feature (7)..(8): Xaa can be any naturally occurring amino acid
TTRIRQXXQELKASPKIFQKTKCSICNSALELPSVHFLCGHSFHQHCFESYSESDADCPTCLPENRKVMDMIRAQEQKRDLHDQSSIRW

SEQ ID NO: 747834 - protein, 77 aa, Homo sapiens
MWHLKLCAVLMIFLLLLGQIDGSPIPEVSSAKRRPRRMTPFWRGVSLRPIGASCRDDSECITRLCRKRRCSLSVAQE

SEQ ID NO: 747835 - protein, 312 aa, Homo sapiens
MPSAIEAIYIILIAGELTIGIWGNGFIVLVNCIDWLKRRDISLIDIILISLAISRICLLCVISLDGFFMLLFPGTYGNSVLVSIVNVVWTFANNSSLWFTSCLSIFYLLKIANISHPFFFWLKLKINKVMLAILLGSFLISLIISVPKNDDMWYHLFKVSHEENITWKFKVSKIPGTFKQLTLNLGVMVPFILCLISFFLLLFSLVRHTKQIRLHATGFRDPSTEAHMRAIKAVIIFLLLLIVYYPVFLVMTSSALIPQGKLVLMIGDIVTVIFPSSHSFILIMGNSKLREAFLKMLRFVKCFLRRRKPFVP

SEQ ID NO: 747836 - protein, 246 aa, Homo sapiens
MAAAAATKILLCLPLLLLLSGWSRAGRADPHSLCYDITVIPKFRPGPRWCAVQGQVDEKTFLHYDCGNKTVTPVSPLGKKLNVTTAWKAQNPVLREVVDILTEQLRDIQLENYTPKEPLTLQARMSCEQKAEGHSSGSWQFSFDGQIFLLFDSEKRMWTTVHPGARKMKEKWENDKVVAMSFHYFSMGDCIGWLEDFLMGMDSTLEPSAGAPLAMSSGTTQLRATATTLILCCLLIILPCFILPGI

SEQ ID NO: 747837 - protein, 107 aa, Homo sapiens
LWNFSLKVILLHFYLLGFLFVTNSTPIISEDHDIIYQLLFLTHPNLDWFLPVLGVSLSPWALPTLLLCWISVFCVTSSFITLFWGSICMSKNVLTLDLIGYEILCWN

SEQ ID NO: 747838 - protein, 101 aa, Homo sapiens
RGRTPHPPRRGGPAAGTPSRNEALPGAFKFLSIPWTGDWRATHTRHFLPFRHKSIPVCVVAETQMRGSPSSFSRREEETEEETPGAESRFLLHGYDMPRML

SEQ ID NO: 747839 - protein, 103 aa, Homo sapiens [sequence omitted]

SEQ ID NO: 747840 - protein, 460 aa, Homo sapiens
RNMILLVLSVHHIRLASRPWPALRTLKQSVQGLGETCSPDGSSQDPGESWHGISVRTLRWAHEGERLPRIPAPKPRSGAHGGKSGLTVTSRWRRLRRQPSSSSSRPRSPAWSLPPAEWPAIAAGSWPPPPCSLGPAVASPEGRKGSSQELQSGALHPPTLPRDYQLLLPLAFPASAASRGHDNEEREPTPAPAPSIATEISIFRKESMAACTASGAPTGAPRSRKLLPRGLTTPWRRLERPIAETIDKRPAREDLLEETFGIRSAWISGLAEGVEVSKKCWHQGLSAGTLCPQFRGGIARGRVRVFMVAVGFMIAHFSVFRRFPISRGPSCALWFPAVTREFSTQRMEGIYTHTHPSPSPQLWNKHSKSSILVGEMGNSYLSLTFILQTTYSFSRHGTHLVLFGFFFGFVVVVSVWAWFCLFLETRSRSVAQGWSAVARSWLTEASTSRAQAILLPQPPG

SEQ ID NO: 747841 - protein, 351 aa, Homo sapiens
LRPSEKRPYSACLFLSGMKPPPRRRAAPARYLGEVTGPATWSAREKRQLVRLLQARQGQPEPDATELARELRGRSEAEIRVFLQQLKGRVAREAIQKVHPGGLQGPRRREAQPPAPIEVWTDLAEKITGPLEEALAVAFSQVLTIAATEPVTLLHSKPPKPTQARGKPLLLSAPGGQEDPAPEIPSSAPAAPSSAPRTPDPAPEKPSESSAGPSTEEDFAVDFEKIYKYLSSVSRSGRSPELSAAESAVVLDLLMSLPEELPLLPCTALVEHMTETYLRLTAPQPIPAGGSLGPAAEGDGAGSKAPEETPPATEKAEHSELKSPWQAAGICPLNPFLVPLELLGRAATPAR

SEQ ID NO: 747842 - protein, 351 aa, Homo sapiens; identical to SEQ ID NO: 747841

SEQ ID NO: 747843 - protein, 351 aa, Homo sapiens; identical to SEQ ID NO: 747841

SEQ ID NO: 747844 - protein, 312 aa, Homo sapiens
PRGNAWVRRGLNGRNELGVRCCRVRAKSNACCWTGYELEIRVFLQQLKGRVAREAIQKVHPGGLQGPRRREAQPPAPIEVWTDLAEKITGPLEEALAVAFSQVLTIAATEPVTLLHSKPPKPTQARGKPLLLSAPGGQEDPAPEIPSSAPAAPSSAPRTPDPAPEKPSESSAGPSTEEDFAVDFEKIYKYLSSVSRSGRSPELSAAESAVVLDLLMSLPEELPLLPCTALVEHMTETYLRLTAPQPIPAGGSLGPAAEGDGAGSKAPEETPPATEKAEHSELKSPWQAAGICPLNPFLVPLELLGRAATPAR

SEQ ID NO: 747845 - protein, 212 aa, Homo sapiens
MVLEGHMGQEPVTLLHSKPPKPTQARGKPLLLSAPGGQEDPAPEIPSSAPAAPSSAPRTPDPAPEKPSESSAGPSTEEDFAVDFEKIYKYLSSVSRSGRSPELSAAESAVVLDLLMSLPEELPLLPCTALVEHMTETYLRLTAPQPIPAGGSLGPAAEGDGAGSKAPEETPPATEKAEHSELKSPWQAAGICPLNPFLVPLELLGRAATPAR

SEQ ID NO: 747846 - protein, 234 aa, Homo sapiens
PRGNAWVRRGLNGRNELGVRCCRVRAKSNACCWTGYELEIRVFLQQLKGRVAREAIQKVHPGGLQGPRRREAQPPAPIEVEADEQAEKPSESSAGPSTEEDFAVDFEKIYKYLSSVSRSGRSPELSAAESAVVLDLLMSLPEELPLLPCTALVEHMTETYLRLTAPQPIPAGGSLGPAAEGDGAGSKAPEETPPATEKAEHSELKSPWQAAGICPLNPFLVPLELLGRAATPAR

SEQ ID NO: 747847 - protein, 344 aa, Homo sapiens
PRGNAWVRRGLNGRNELGVRCCRVRAKSNACCWTGYELEIRVFLQQLKGRVAREAIQKVHPGGLQGPRRREAQPPAPIEVWTDLAEKITGPLEEALAVAFSQVLTIAATEPVTLLHSKPPKPTQARGKPLLLSAPGGQEDPAPEIPSSAPAAPSSAPRTPDPAPEKPSESSAGPSTEEDFAVDFEKIYKYLSSVSRSGRSPELSAAGEKGEGGGRSRGIKGPWQQAGVSPYPSLHPSLESAVVLDLLMSLPEELPLLPCTALVEHMTETYLRLTAPQPIPAGGSLGPAAEGDGAGSKAPEETPPATEKAEHSELKSPWQAAGICPLNPFLVPLELLGRAATPAR

SEQ ID NO: 747848 - protein, 201 aa, Homo sapiens
TVADRLRPPAPGVMQLPPALCARLAAGPGAAEPLPVERDPAAGAAPFRFVARPVRFPREHQFFEDGDVQRHLYLQDVIMQVADVPEKPRVPAFACQVAGCCQVFDALDDYEHHYHTLHGNVCSFCKRAFPSGHLLDAHILEWHDSLFQILSERQDMYQCLVEGCTEKFKTSRDRKDHMPSLSRSPRGQWRAVRRGGHGNLL

SEQ ID NO: 747849 - protein, 265 aa, Homo sapiens
TVADRLRPPAPGVMQLPPALCARLAAGPGAAEPLPVERDPAAGAAPFRFVARPVRFPREHQFFEDGDVQRHLYLQDVIMQVADVPEKPRVPAFACQVAGCCQVFDALDDYEHHYHTLHGNVCSFCKRAFPSGHLLDAHILEWHDSLFQILSERQDMYQCLVEGCTEKFKTSRDRKDHMVRMHLYPADFRFDKPKKSRSPASAEAPGDSGERSEGEAMEICSEPVAASPAPAGERRIYRHRIPSTICFGQGAARGFKSNKKKTKQC

SEQ ID NO: 747850 - protein, 257 aa, Homo sapiens
TVADRLRPPAPGVMQLPPALCARLAAGPGAAEPLPVERDPAAGAAPFRFVARPVRFPREHQFFEDGDVQRHLYLQDVIMQVADVPEKPRVPAFACQVAGCCQVFDALDDYEHHYHTLHGNVCSFCKRAFPSGHLLDAHILEWHDSLFQILSERQDMYQCLVEGCTEKFKTSRDRKDHMVRMHLYPADFRFDKPKKSRSPASAEAPGDSGERSEGEAMEICSEPVAASPAPAGIPSTICFGQGAARGFKSNKKKTKQC

SEQ ID NO: 747851 - protein, 1148 aa, Homo sapiens
QHLTKETAEMLNQLHIKSSGCFLYLERVLDGVVENFIMLREIRDIPGTLNGLYLWLCQRLFVRKQFAKVQPILNVILAACRPLTITELYHAVWTKNMSLTLEDFQRKLDILSKLLVDGLGNTKILFHYSFAEWLLDVKHCTQKYLCNAAEGHRMLAMSYTCQAKNLTPLEAQEFALHLINSNLQLETAELALWMIWNGTPVRDSLSTLIPKEQEVLQLLVKAGAHVNSEDDRTSCIVRQALEREDSIRTLLDNGASVNQCDSNGRTLLANAAYSGSLDVVNLLVSRGADLEIEDAHGHTPLTLAARQGHTKVVNCLIGCGANINHTDQDGWTALRSAAWGGHTEVVSALLYAGVKVDCADADSRTALRAAAWGGHEDIVLNLLQHGAEVNKADNEGRTALIAAAYMGHREIVEHLLDHGAEVNHEDVDGRTALSVAALCVPASKGHASVVSLLIDRGAEVDHCDKDGMTPLLVAAYEGHVDVVDLLLEGGADVDHTDNNGRTPLLAAASMGHASVVNTLLFWGAAVDSIDSEGRTVLSIASAQGNVEVVRTLLDRGLDENHRDDAGWTPLHMAAFEGHRLICEALIEQGARTNEIDNDGRIPFILASQEGHYDCVQILLENKSNIDQRGYDGRNALRVAALEGHRDIVELLFSHGADVNCKDADGRPTLYILALENQLTMAEYFLENGANVEASDAEGRTALHVSCWQGHMEMVQVLIAYHADVNAADNEKRSALQSAAWQGHVKVVQLLIEHGAVVDHTCNQGATALCIAAQEGHIDVVQVLLEHGADPNHADQFGRTAMRVAAKNGHSQIIKLLEKYGASSLNGCSPSPVHTMEQKPLQSLSSKVQSLTIKSNSSGSTGGGDMQPSLRGLPNGPTHAFSSPSESPDSTVDRQKSSLSNNSLKSSKNSSLRTTSSTATAQTVPIDSFHNLSFTEQIQQHSLPRSRSRQSIVSPSSTTQSLGQSHNSPSSEFEWSQVKPSLKSTKASKGGKSENSAKSGSAGKKAKQSNSSQPKVLEYEMTQFDRRGPIAKSGTAAPPKQMPAESQCKIMIPSAQQEIGRSQQQFLIHQQSGEQKKRNGIMTNPNYHLQSNQVFLGRVSVPRTMQDRGHQEVLEGYPSSETELSLKQALKLQIEGSDPSFNYKKETPL

SEQ ID NO: 747852 - protein, 875 aa, Homo sapiens
ETSKLTTSSCHYMGADLEIEDAHGHTPLTLAARQGHTKVVNCLIGCGANINHTDQDGWTALRSAAWGGHTEVVSALLYAGVKVDCADADSRTALRAAAWGGHEDIVLNLLQHGAEVNKADNEGRTALIAAAYMGHREIVEHLLDHGAEVNHEDVDGRTALSVAALCVPASKGHASVVSLLIDRGAEVDHCDKDGMTPLLVAAYEGHVDVVDLLLEGGADVDHTDNNGRTPLLAAASMGHASVVNTLLFWGAAVDSIDSEGRTVLSIASAQGNVEVVRTLLDRGLDENHRDDAGWTPLHMAAFEGHRLICEALIEQGARTNEIDNDGRIPFILASQEGHYDCVQILLENKSNIDQRGYDGRNALRVAALEGHRDIVELLFSHGADVNCKDADGRPTLYILALENQLTMAEYFLENGANVEASDAEGRTALHVSCWQGHMEMVQVLIAYHADVNAADNEKRSALQSAAWQGHVKVVQLLIEHGAVVDHTCNQGATALCIAAQEGHIDVVQVLLEHGADPNHADQFGRTAMRVAAKNGHSQIIKLLEKYGASSLNGCSPSPVHTMEQKPLQSLSSKVQSLTIKSNSSGSTGGGDMQPSLRGLPNGPTHAFSSPSESPDSTVDRQKSSLSNNSLKSSKNSSLRTTSSTATAQTVPIDSFHNLSFTEQIQQHSLPRSRSRQSIVSPSSTTQSLGQSHNSPSSEFEWSQVKPSLKSTKASKGGKSENSAKSGSAGKKAKQSNSSQPKVLEYEMTQFDRRGPIAKSGTAAPPKQMPAESQCKIMIPSAQQEIGRSQQQFLIHQQSGEQKKRNGIMTNPNYHLQSNQVFLGRVSVPRTMQDRGHQEVLEGYPSSETELSLKQALKLQIEGSDPSFNYKKETPL

SEQ ID NO: 747853 - protein, 1148 aa, Homo sapiens; identical to SEQ ID NO: 747851

SEQ ID NO: 747854 - protein, 1148 aa, Homo sapiens; identical to SEQ ID NO: 747851

SEQ ID NO: 747855 - protein, 187 aa, Homo sapiens
KAYRTLSSAEMQPYDSQPSLKSTKASKGGKSENSAKSGSAGKKAKQSNSSQPKVLEYEMTQFDRRGPIAKSGTAAPPKQMPAESQCKIMIPSAQQEIGRSQQQFLIHQQSGEQKKRNGIMTNPNYHLQSNQVFLGRVSVPRTMQDRGHQEVLEGYPSSETELSLKQALKLQIEGSDPSFNYKKETPL

SEQ ID NO: 747856 - protein, 173 aa, Homo sapiens
VEGVLPCRCPGDRVPFTNHGALLRLLGDGVQGETKLLAAGGMRERAGPWAGEQSRPQAAPGHPGQPMHVGMPEYPLQTACAWTRHTRVCMCTATPPTPCSKNESGAASAGGATTTSAPKPGPQILSTLTEQLGSENTKGCRPRPARRATRPPSLSLTLCLMGPDSQQKLRGLG

SEQ ID NO: 747857 - protein, 96 aa, Homo sapiens
VEGVLPCRCPGDRVPFTNHGALLRLLGDGVQGETKLLAAGGMRERAGPWAGEQSRPQAAPGHPGQPMHVGMPEYPLPGERYTYIPLCVWSTHTLSG

SEQ ID NO: 747858 - protein, 79 aa, Homo sapiens
AIFTPSPLVLEIRHPDPVQLDLAQEDHAVSGKHWRRKRLKKGRPEKKYKSFRLGKDDSTVPFSVPVLLYWISSGLTMTT

SEQ ID NO: 747859 - protein, 129 aa, Homo sapiens
DHSSLLSQLPRLKQDSRLSLLNNWDHRHAPPHPTQFLRFFMEMGSHYVVKSSLELLGSSDPPQLPKVPALQARSSTPSLSFLFYSIYHFQIYFVIYLNMIYLFTMLLFSSSSAQNTIWHIVDNLYMFVK

SEQ ID NO: 747860 - protein, 318 aa, Homo sapiens
MQRANHSTVTQFILVGFSVFPHLQLMLFLLFLLMYLFTLLGNLLIMATVWSERSLHTPMYLFLCALSVSEILYTVAIIPRMLADLLSTQRSIAFLACASQMFFSFSFGFTHSFLLTVMGYDRYVAICHPLRYNVLMSPRGCACLVGCSWAGGLVMGMVVTSAIFHLAFCGHKEIHHFACHVPPLLKLACGDDVLVVAKGVGLVCITALLGCFLLILLSYAFIVAAILKIPSAEGRNKAFSTCASHLTVVVVHYGFASVIYLKPKSPQSLEGDTLMGITYTVLTPFLSPIIFSLRNKELKVAMKKTFFSKLYPEKNVMM

SEQ ID NO: 747861 - protein, 119 aa, Homo sapiens
MPFQCSVRGQRWGPRVQIEWDSCHCPACELKSVQSASGSDKEGSAGTASCFRRGDEVQAEVETTLHSPCIQWCPISCSLGSIPATCVMQLVPPIPRDSTLALLALAPSTEPLGPFSWPA

SEQ ID NO: 747862 - protein, 119 aa, Homo sapiens; identical to SEQ ID NO: 747861

SEQ ID NO: 747863 - protein, 320 aa, Homo sapiens
MDQSNYSSLHGFILLGFSNHPKMEMILSGVVAIFYLITLVGNTAIILASLLDSQLHTPMYFFLRNLSFLDLCFTTSIIPQMLVNLWGPDKTISYVGCIIQLYVYMWLGSVECLLLAVMSYDRFTAICKPLHYFVVMNPHLCLKMIIMIWSISLANSVVLCTLTLNLPTCGNNILDHFLCELPALVKIACVDTTTVEMSVFALGIIIVLTPLILILISYGYIAKAVLRTKSKASQRKAMNTCGSHLTVVSMFYGTIIYMYLQPGNRASKDQGKFLTLFYTVITPSLNPLIYTLRNKDMKDALKKLMRFHHKSTKIKRNCKS

SEQ ID NO: 747864 - protein, 104 aa, Homo sapiens
AAAEHFARSPASSPEFAESPGTSKGCAPRIGPEAGSPGRPGRAARREMAEKALLCPSSAGLGTWPWVLNSAWPVLPLAVDQGVDWRPRGPGVWANRLWRATDRL

SEQ ID NO: 747865 - protein, 233 aa, Homo sapiens
AAAEHFARSPASSPEFAESPGTSKGCAPRIGPEAGSPGRPGRAARREMAEKALLCPSSAGLGTWPWVLNSAWPVLPLAVDQGVDWRPRGPVSSDQIEQLHRRFKQLSGDQPTIRKENFNNVPDLELNPIRSKIVRAFFDNRNLRKGPSGLADEINFEDFLTIMSYFRPIDTTMDEEQVELSRKEKLRFLFHMYDSDSDGRITLEEYRNKWSRSCCRETLTSRRSPLAPSPTGP

SEQ ID NO: 747866 - protein, 157 aa, Homo sapiens
YLMMVRELEVLVTRFSSDQIEQLHRRFKQLSGDQPTIRKENFNNVPDLELNPIRSKIVRAFFDNRNLRKGPSGLADEINFEDFLTIMSYFRPIDTTMDEEQVELSRKEKLRFLFHMYDSDSDGRITLEEYRNKWSRSCCRETLTSRRSPLAPSPTGP

SEQ ID NO: 747867 - protein, 215 aa, Homo sapiens
MRPRSGPTRNPRLRAFAGVPTRGRTRGQSRRCAAEASAGPERDARPGAPAAGTMGAAHSASEEVRELEGKTGFSSDQIEQLHRRFKQLSGDQPTIRKENFNNVPDLELNPIRSKIVRAFFDNRNLRKGPSGLADEINFEDFLTIMSYFRPIDTTMDEEQVELSRKEKLRFLFHMYDSDSDGRITLEEYRNKWSRSCCRETLTSRRSPLAPSPTGP

SEQ ID NO: 747868 - protein, 188 aa, Homo sapiens
MRPRSGPTRNPRLRAFAGVPTRGRTRGQSRRCAAEASAGPERDARPGAPAAGTMGAAHSASEEVRELEGKTGFSSDQIEQLHRRFKQLSGDQPTIRKENFNNVPDLELNPIRSKIVRAFFDNRNLRKGPSGLADEINFEDFLTIMSYFRPIDTTMDEEQVELSRKEKLRSCGFLGLEGGCAVDVKQGP

SEQ ID NO: 747869 - protein, 175 aa, Homo sapiens
AAAEHFARSPASSPEFAESPGTSKGCAPRIGPEAGSPGRPGRAARREMAEKALLCPSSAGLGTWPWVLNSAWPVLPLAVDQGVDWRPRGPVSSDQIEQLHRRFKQLSGDQPTIRKENFNNVPDLELNPIRSKIVRAFFDNRYIAKARLRTLCLVGYGMWDFAVFISNKKKKRFVN

SEQ ID NO: 747870 - protein, 109 aa, Homo sapiens
MPIMRGSEGWVRSHSQPLAHRKRSLKSVSSSPSSMGCAIAGFLRPAPLCSGSRVGSVVVPAGQPHRSQAVPRVTSPFPVAFPMTPDIPLCPAPGQPPHQENVNMGLRYI

SEQ ID NO: 747871 - protein, 215 aa, Homo sapiens; identical to SEQ ID NO: 747867

SEQ ID NO: 747872 - protein, 114 aa, Homo sapiens
KTEWNPVPSPPFKSWFSEKGLRNLRKGPSGLADEINFEDFLTIMSYFRPIDTTMDEEQVELSRKEKLRFLFHMYDSDSDGRITLEEYRNKWSRSCCRETLTSRRSPLAPSPTGP

SEQ ID NO: 747873 - protein, 215 aa, Homo sapiens; identical to SEQ ID NO: 747867

SEQ ID NO: 747874 - protein, 31 aa, Homo sapiens
MAPFIEKKYLAHQRGAANLILIAKNIFYSPG

SEQ ID NO: 747875 - protein, 419 aa, Homo sapiens
MAASSLEQKLSRLEAKLKQENREARRRIDLNLDISPQRPRPTLQLPLANDGGSRSPSSESSPQHPTPPARPRHMLGLPSTLFTPRSMESIEIDQKLQEIMKQTGYLTIGGQRYQAEINDLENLGEMGSGTCGQVWKMRFRKTGHVIAVKQMRRSGNKEENKRILMDLDVVLKSHDCPYIVQCFGTFITNTDVFIAMELMGTCAEKLKKRMQGPIPERILGKMTVAIVKALYYLKEKHGVIHRDVKPSNILLDERGQIKLCDFGISGRLVDSKAKTRSAGCAAYMAPERIDPPDPTKPDYDIRADVWSLGISLVELATGQFPYKNCKTDFEVLTKVLQEEPPLLPGHMGFSGDFQSFVKDCLTKDHRKRPKYNKLLEHSFIKRYETLEVDVASWFKDVMAKTESPRTSGVLSQPHLPFFR

SEQ ID NO: 747876 - protein, 97 aa, Homo sapiens
RRRRCLSAGLTGGRAVRGGGGGGEDGGVLPGTEAVPPGSKAEAGEPGGPAEDRPQPGYQPPAAQAQDCLAPPSPGLGACQPRAATIYAHAHAWLGDT

SEQ ID NO: 747877 - protein, 352 aa, Homo sapiens
MAASSLEQKLSRLEAKLKQENREARRRIDLNLDISPQRPRPTLQLPLANDGGSRSPSSESSPQHPTPPARPRHMLGLPSTLFTPRSMESIEIDQKLQEIMKQTGYLTIGGQRYQAEINDLENLGEMGSGTCGQVWKMRFRKTGHVIAVKQMRRSGNKEENKRILMDLDVVLKSHDCPYIVQCFGTFITNTDVFIAMELMGTCAEKLKKRMQGPIPERILGKMTVAIVKALYYLKEKHGVIHRDVKPSNILLDERGQIKLCDFGISGRLVDSKAKTRSAGCAAYMAVSGGPPAGEGVGAGRPAPALEIRLLLPPLQPERIDPPDPTKPDYDIRADVWSLGISLVELGPPLFSS

SEQ ID NO: 747878 - protein, 346 aa, Homo sapiens
MLPLWATLFTPLSTESIEIDQKLQEIMKQTGYLTIGGQRYQAEINDLENLGEMGSGTCGQVWKMRFRKTGHVIAVKQMRRSGNKEENKRILMDLDVVLKSHDCPYIVQCFGTFITNTDVFIAMELMGTCAEKLKKRMQGPIPERILGKMTVAIVKALYYLKEKHGVIHRDVKPSNILLDERGQIKLCDFGISGRLVDSKAKTRSAGCAAYMAPERIDPPDPTKPDYDIRADVWSLGISLVELATGQFPYKNCKTDFEVLTKVLQEEPPLLPGHMGFSGDFQSFVKDCLTKDHRKRPKYNKLLEHSFIKRYETLEVDVASWFKDVMAKTESPRTSGVLSQPHLPFFR

SEQ ID NO: 747879 - protein, 445 aa, Homo sapiens
MAASSLEQKLSRLEAKLKQENREARRRIDLNLDISPQRPRPTLQLPLANDGGSRSPSSESSPQHPTPPARPRHMLGLPSTLFTPRSMESIEIDQKLQEIMKQTGYLTIGGQRYQAEINDLENLGEMGSGTCGQVWKMRFRKTGHVIAVKVSLGGYPGCAPHPRPVLRLPPVPACAQMRRSGNKEENKRILMDLDVVLKSHDCPYIVQCFGTFITNTDVFIAMELMGTCAEKLKKRMQGPIPERILGKMTVAIVKALYYLKEKHGVIHRDVKPSNILLDERGQIKLCDFGISGRLVDSKAKTRSAGCAAYMAPERIDPPDPTKPDYDIRADVWSLGISLVELATGQFPYKNCKTDFEVLTKVLQEEPPLLPGHMGFSGDFQSFVKDCLTKDHRKRPKYNKLLEHSFIKRYETLEVDVASWFKDVMAKTESPRTSGVLSQPHLPFFR

SEQ ID NO: 747880 - protein, 84 aa, Homo sapiens
MLPLSSSQGLSGAPLPRPGGLSAPCSDDLRTRARLARGHLRLLDHIEPLPISSDPRILPLALPVTVSEVGGREGVPSPPLGDSD

SEQ ID NO: 747881 - protein, 462 aa, Homo sapiens
MAASSLEQKLSRLEAKLKQENREARRRIDLNLDISPQRPRPTLQLPLANDGGSRSPSSESSPQHPTPPARPRHMLGLPSTLFTPRSMESIEIDQKLQEIMKQTGYLTIGGQVPPSLWRGEGGGPARLDPSWERQWGAGGGGRAPGTLQPSLSSQRYQAEINDLENLGEMGSGTCGQVWKMRFRKTGHVIAVKQMRRSGNKEENKRILMDLDVVLKSHDCPYIVQCFGTFITNTDVFIAMELMGTCAEKLKKRMQGPIPERILGKMTVAIVKALYYLKEKHGVIHRDVKPSNILLDERGQIKLCDFGISGRLVDSKAKTRSAGCAAYMAPERIDPPDPTKPDYDIRADVWSLGISLVELATGQFPYKNCKTDFEVLTKVLQEEPPLLPGHMGFSGDFQSFVKDCLTKDHRKRPKYNKLLEHSFIKRYETLEVDVASWFKDVMAKTESPRTSGVLSQPHLPFFR

SEQ ID NO: 747882 - protein, 313 aa, Homo sapiens
  misc_feature (299)..(302): Xaa can be any naturally occurring amino acid
  misc_feature (313)..(313): Xaa can be any naturally occurring amino acid
MAASSLEQKLSRLEAKLKQENREARRRIDLNLDISPQRPRPTLQLPLANDGGSRSPSSESSPQHPTPPARPRHMLGLPSTLFTPRSMESIEIDQKLQEIMKQTGYLTIGGQRYQAEINDLENLGEMGSGTCGQVWKMRFRKTGHVIAVKQMRRSGNKEENKRILMDLDVVLKSHDCPYIVQCFGTFITNTDVFIAMELMGTCAEKLKKRMQGPIPERILGKMTVAIVKALYYLKEKHGVIHRDVKPSNILLDERGQIKLCDFGISGRLVDSKAKTRSAGCAAYMAVSGGPPAGEGVGSXXXXYCGSILFGKTX

SEQ ID NO: 747883 - protein, 322 aa, Homo sapiens
MAASSLEQKLSRLEAKLKQENREARRRIDLNLDISPQRPRPTLQLPLANDGGSRSPSSESSPQHPTPPARPRHMLGLPSTLFTPRSMESIEIDQKLQEIMKQTGYLTIGGQRYQAEINDLENLGEMGSGTCGQVWKMRFRKTGHVIAVKQMRRSGNKEENKRILMDLDVVLKSHDCPYIVQCFGTFITNTDVFIAMELMGTCAEKLKKRMQGPIPERILGKMTVAIVKALYYLKEKHGVIHRDVKPSNILLDERGQIKLCDFGISGRLVDSKAKTRSAGCAAYMAPERIDPPDPTKPDYDIRADVWSLGISLVELGPPLFSS

SEQ ID NO: 747884 - protein, 486 aa, Homo sapiens
MAASSLEQKLSRLEAKLKQENREARRRIDLNLDISPQRPRPTLQLPLANDGGSRSPSSESSPQHPTPPARPRHMLGLPSTLFTPRSMESIEIDQKLQEIMKQTGYLTIGGQRYQAEINDLENLGEMGSGTCGQVWKMRFRKTGHVIAVKVSLGGYPGCAPHPRPVLRLPPVPACAANAALREQGGEQAHPHGPGCGAEEPRLPLHRAVLWDVHHQREYLAAPCSVSSSLTPAPSREQSLWGVGRKTQLPRVPLSLQTDVFIAMELMGTCAEKLKKRMQGPIPERILGKMTVAIVKALYYLKEKHGVIHRDVKPSNILLDERGQIKLCDFGISGRLVDSKAKTRSAGCAAYMAPERIDPPDPTKPDYDIRADVWSLGISLVELATGQFPYKNCKTDFEVLTKVLQEEPPLLPGHMGFSGDFQSFVKDCLTKDHRKRPKYNKLLEHSFIKRYETLEVDVASWFKDVMAKTESPRTSGVLSQPHLPFFR

SEQ ID NO: 747885 - protein, 39 aa, Homo sapiens
RNELELDLKSSGNRHGYDWVTLSIVASQLALYPQQSNQV

SEQ ID NO: 747886 - protein, 252 aa, Homo sapiens
FHVILNKTKHTCIHTHSLTLKMQDEERYMTLNVQSKKRSSAQTSQLTFKDYSVTLHWYKILLGISGTVNGILTLTLISLILLVSQGVLLKCQKGSCSNATQYEDTGDLKVNNGTRRNISNKDLCASRSADQTVLCQSEWLKYQGKCYWFSNEMKSWSDSYVYCLERKSHLLIIHDQLEMAFIQKNLRQLNYVWIGLNFTSLKMTWTWVDGSPIDSKIFFIKGPAKENSCAAIKESKIFSETCSSVFKWICQY

SEQ ID NO: 747887 - protein, 202 aa, Homo sapiens
FHVILNKTKHTCIHTHSLTLKMQDEERYMTLNVQSKKRSSAQTSQLTFKDYSVTLHWYKILLGISGTVNGILTLTLISLILLVLCQSEWLKYQGKCYWFSNEMKSWSDSYVYCLERKSHLLIIHDQLEMAFIQKNLRQLNYVWIGLNFTSLKMTWTWVDGSPIDSKIFFIKGPAKENSCAAIKESKIFSETCSSVFKWICQY

SEQ ID NO: 747888 - protein, 64 aa, Homo sapiens
MQDEERYMTLNVQSKKRSSAQTSQLTFKDYSVTLHWYKILLGISGTVNGILTLTLISLILLDSS

SEQ ID NO: 747889 - protein, 202 aa, Homo sapiens
FHVILNKTKHTCIHTHSLTLKMQDEERYMTLNVQSKKRSSAQTSQLTFKDYSVTLHWYKILLGISGTVNGILTLTLISLILLVSQGVLLKCQKGSCSNATQYEDTGDLKVNNGTRRNISNKDLCASRSADQTVLCQSEWLKYQGKCYWFSNEMKSWSDSYVYCLERKSHLLIIHDQLEMSLVHILGFYTEKPKTIKLRMDWA

SEQ ID NO: 747890 - protein, 78 aa, Homo sapiens
MQDEERYMTLNVQSKKRSSAQTSQLTFKDYSVTLHWYKILLGISGTVNGILTLTLISLILLGFYTEKPKTIKLRMDWA

SEQ ID NO: 747891 - protein, 108 aa, Homo sapiens
MAALKEDRSYGLSCGRVSDGSKVSVFHVKLTDSALRAFESYLRQTGLGSVFLNSLKQKVVTLASSADVLSTVQSASQAMLQSGWSMLLPTAEKQARALCSPVLQSFRQ

SEQ ID NO: 747892 - protein, 406 aa, Homo sapiens
MAPPGPASALSTSAEPLSRSIFRKFLLMLCSLLTSLYVFYCLAERCQTLSGPVVGLSGGGEEAGAPGGGVLAGGPRELAVWPAAAQRKRLLQLPQWRRRRPPAPRDDGEEAAWEEESPGLSGGPGGSGAGSTVAEAPPGTLALLLDEGSKQLPQAIIIGVKKGGTRALLEFLRVHPDVRAVGAEPHFFDRSYDKGLAWYRDLMPRTLDGQITMEKTPSYFVTREAPARISAMSKDTKLIVVVRDPVTRAISDYTQTLSKRPDIPTFESLTFKNRTAGLIDTSWSAIQIGIYAKHLEHWLRHFPIRQMLFVSGERLISDPAGELGRVQDFLGLKRIITDKHFYFNKTKGFPCLKKAEGSSRPHCLGKTKGRTHPEIDREVVRRLREFYRPFNLKFYQMTGHDFGWDG

SEQ ID NO: 747893 - protein, 406 aa, Homo sapiens; identical to SEQ ID NO: 747892

SEQ ID NO: 747894 - protein, 405 aa, Homo sapiens [sequence omitted]

SEQ ID NO: 747895 - protein, 340 aa, Homo sapiens
MAPPGPASALSTSAEPLSRSIFRKFLLMLCSLLTSLYVFYCLAERCQTLSGPVVGLSGGGEEAGAPGGGVLAGGPRELAVWPAAAQRKRLLQLPQWRRRRPPAPRDDGEEAAWEEESPGLSGGPGGSGAGSTVAEAPPGTLALLLDEGSKQLPQAIIIGVKKGGTRALLEFLRVHPDVRAVGAEPHFFDRSYDKGLAWYRDLMPRTLDGQITMEKTPSYFVTREAPARISAMSKDTKLIVVVRDPVTRAISDYTQTLSKRPDIPTFESLTFKNRTAGLIDTSWSAIQIGIYAKHLEHWLRHFPIRQMLFVSGERLISDPAGELAEPTLPGLSLLIIGSDP

SEQ ID NO: 747896 - protein, 149 aa, Homo sapiens
CLFAFLRDLMPRTLDGQITMEKTPSYFVTREAPARISAMSKDTKLIVVVRDPVTRAISDYTQTLSKRPDIPTFESLTFKNRTAGLIDTSWSAIQIGIYAKHLEHWLRHFPIRQMLFVSGERLISDPAGELGRVQDFLGLKRIITDKHFY

SEQ ID NO: 747897 - protein, 346 aa, Homo sapiens
MDTGPDQSYFSGNHWFVFSVYLLTFLVGLPLNLLALVVFVGKLQRRPVAVDVLLLNLTASDLLLLLFLPFRMVEAANGMHWPLPFILCPLSGFIFFTTIYLTALFLAAVSIERFLSVAHPLWYKTRPRLGQAGLVSVACWLLASAHCSVVYVIEFSGDISHSQGTNGTCYLEFRKDQLAILLPVRLEMAVVLFVVPLIITSYCYSRLVWILGRGGSHRRQRRVAGLLAATLLNFLVCFGPYNVSHVVGYICGESPAWRIYVTLLSTLNSCVDPFVYYFSSSGFQADFHELLRRLCGLWGQWQQESSMELKEQKGGEEQRADRPAERKTSEHSQGCGTGGQVACAES

SEQ ID NO: 747898 - protein, 130 aa, Homo sapiens
MSGRGKQGGKARAKAKTRSSRAGLQFPVGRVHRLLRKGNYSERVGAGAPVYLAAVLEYLTAEILELAGNAARDNKKTRIIPRHLQLAIRNDEELNKLLGRVTIAQGGVLPNIQAVLLPKKTESHHKAKGK

SEQ ID NO: 747899 - protein, 266 aa, Homo sapiens
SDPILSSFLLWGWGNSQAGAPAAQLNLATRSPLSSPRPSLLIALYSFAPVERMTPQPSGAPTVQVTRETERSFPRASEDEVTCPTSAPPSPTRTRGNCAEAEEGGCRGAPRKLRARRGGRSRPKSELALSKQRRSRRKKANDRERNRMHNLNSALDALRGVLPTFPDDAKLTKIETLRFAHNYIWALTQTLRIADHSLYALEPPAPHCGELGSPGGSPGDWGSLYSPVSQAGSLSPAASLEERPGLLGATFSACLSPGSLAFSDFL

SEQ ID NO: 747900 - protein, 109 aa, Homo sapiens
MGHSQAITPGPPSQAGGGWQPRGRQGLGGRVGSKAKAALWPPVSQDDLSPGLAPEQVGSLLGPVDLFSCFVSVDVESPKCFPSPATLVRLNPQSQSPLQISVGLGLNFR

SEQ ID NO: 747901 - protein, 728 aa, Homo sapiens
MEETQPPPQPKLPLCDSLMIWLQTFNTASPCQDVKQLTSGVAMAQVLHQIDAAWFNESWLSRIKEDVGDNWRIKASNVKKVLQGIMSYYHEFLGQQISEALIPDLNQITECSDPVELGRLLQLILGCAINCEKKQEHIQNIMTLEESVQHVVMTAIQELMSKEILSSPPNDAVGELEQQLKRALEELQEALAEKEELRQRCEELDMQVTTLQDEKNSLVSENEMMNEKLDQLDGSFDDPNTVVAKKYFHAQLQLEQLQEENFRLEAAKDDYRVHCEELEKQLIEFQHRNDELTSLAEETRALKDEIDVLRATSDKANKLESTVEIYRQKLQDLNDLRKQVKTLQETNMMYMHNTVSLEEELKKANAARTQLETYKRQVQDLHVKLSSESKRADTLAFEMKRLEEKHEALLKEKERLIEQRDTLKETNEELRCSQVQQDHLNQTDASATKSYENLAAEIMPVEYREVFIRLQHENKMLRLQQEGSENERIEELQEQLEQKHRKMNELETEQRLSKERIRELQQQIEDLQKSLQEQGSKSEGESSSKLKQKLEAHMEKLTEVHEELQKKQELIEDLQPDINQNVQKINELEAALQKKDEDMKAMEERYKMYLEKARNVIKTLDPKLNPASAEIMLLRKQLAEKERRIEILESECKVAKFRDYEEKLIVSAWYNKSLAFQKLGMESRLVSGGGACSDTGACTPARSFLAQQRHITNTRRNLSVKVPATTSD

SEQ ID NO: 747902 - protein, 554 aa, Homo sapiens
MEETQPPPQPKLPLCDSLMIWLQTFNTASPCQDVKQLTSGVAMAQVLHQIDAAWFNESWLSRIKEDVGDNWRIKASNVKKVLQGIMSYYHEFLGQQISEALIPDLNQITECSDPVELGRLLQLILGCAINCEKKQEHIQNIMTLEESVQHVVMTAIQELMSKEILSSPPNDAVGELEQQLKRALEELQEALAEKEELRQRCEELDMQVTTLQDEKNSLVSENEMMNEKLDQLDGSFDDPNTVVAKKYFHAQLQLEQLQEENFRLEAAKDDYRVHCEELEKQLIEFQHRNDELTSLAEETRALKDEIDVLRATSDKANKLESTVEIYRQKLQDLNDLRKQVKTLQETNMMYMHNTVSLEEELKKANAARTQLETYKRQVQDLHVKLSSESKRADTLAFEMKRLEEKHEALLKEKERLIEQRDTLKETNEELRCSQVQQDHLNQTDASATKSYENLAAEIMPVEYREVFIRLQHENKMLRLQQEGSENERIEELQEQLEQKHRKMNELETEQRLSKERIRELQQQIEDLQKSLQEQGSKSEGESSSKLKQKLEAHM

SEQ ID NO: 747903 - protein, 562 aa, Homo sapiens
MEETQPPPQPKLPLCDSLMIWLQTFNTASPCQDVKQLTSGVAMAQVLHQIIFFVVVFSDAAWFNESWLSRIKEDVGDNWRIKASNVKKVLQGIMSYYHEFLGQQISEALIPDLNQITECSDPVELGRLLQLILGCAINCEKKQEHIQNIMTLEESVQHVVMTAIQELMSKEILSSPPNDAVGELEQQLKRALEELQEALAEKEELRQRCEELDMQVTTLQDEKNSLVSENEMMNEKLDQLDGSFDDPNTVVAKKYFHAQLQLEQLQEENFRLEAAKDDYRVHCEELEKQLIEFQHRNDELTSLAEETRALKDEIDVLRATSDKANKLESTVEIYRQKLQDLNDLRKQVKTLQETNMMYMHNTVSLEEELKKANAARTQLETYKRQVQDLHVKLSSESKRADTLAFEMKRLEEKHEALLKEKERLIEQRDTLKETNEELRCSQVQQDHLNQTDASATKSYENLAAEIMPVEYREVFIRLQHENKMLRLQQEGSENERIEELQEQLEQKHRKMNELETEQRLSKERIRELQQQIEDLQKSLQEQGSKSEGESSSKLKQKLEAHM

SEQ ID NO: 747904 - protein, 511 aa, Homo sapiens
MEETQPPPQPKLPLCDSLMIWLQTFNTASPCQDVKQLTSGVAMAQVLHQIDAAWFNESWLSRIKEDVGDNWRIKASNVKKVLQGIMSYYHEFLGQQISEALIPDLNQITECSDPVELGRLLQLILGCAINCEKKQEHIQNIMTLEESVQHVVMTAIQELMSKEILSSPPNDAVGELEQQLKRALEELQEALAEKEELRQRCEELDMQVTTLQDEKNSLVSENEMMNEKLDQLDGSFDDPNTVVAKKYFHAQLQLEQLQEENFRLEAAKDDYRVHCEELEKQLIEFQHRNDELTSLAEETRALKDEIDVLRATSDKANKLESTVEIYRQKLQDLNDLRKQVKTLQETNMMYMHNTVSLEEELKKANAARTQLETYKRQVQDLHVKLSSESKRADTLAFEMKRLEEKHEALLKEKERLIEQRDTLKETNEELRCSQVQQDHLNQTDASATKSYENLAAEIMPVEYREVFIRLQHENKMLRLQQEGSENERIEELQEQLEQKHRKMNELETEQR

SEQ ID NO: 747905 - protein, 559 aa, Homo sapiens
MEETQPPPQPKLPLCDSLMIWLQTFNTASPCQDVKQLTSGVAMAQVLHQIDAAWFNESWLSRIKEDVGDNWRIKASNVKKVLQGIMSYYHEFLGQQISEALIPDLNQITECSDPVELGRLLQLILGCAINCEKKQEHIQNIMTLEESVQHVVMTAIQELMSKEILSSPPNDAVGELEQQLKRALEELQEALAEKEELRQRCEELDMQVTTLQDEKNSLVSENEMMNEKLDQLDGSFDDPNTVVAKKYFHAQLQLEQLQEENFRLEAAKDDYRVHCEELEKQLIEFQHRNDELTSLAEETRALKDEIDVLRATSDKANKLESTVEIYRQKLQDLNDLRKQVKTLQETNMMYMHNTVSLEEELKKANAARTQLETYKRQVQDLHVKLSSESKRADTLAFEMKRLEEKHEALLKEKERLIEQRDTLKETNEELRCSQVQQDHLNQTDASATKSYENLAAEIMPVEYREVFIRLQHENKMLRLQQEGSENERIEELQEQLEQKHRKMNELETEQRLSKERIRELQQQIEDLQKSLQEQGSKSEGESKSSHAWRHLICAYIRYC

SEQ ID NO: 747906 - protein, 46 aa, Homo sapiens
VKLSSESKRADTLAFEMKRLEEKHEALLKEKEVNIDIIDKEYFIVL

SEQ ID NO: 747907 - protein, 334 aa, Homo sapiens
MNEDLKVNLSGLPRDYLDAAAAENISAAVSSRVPAVEPEPELVVNPWDIVLCTSGTLISCENAIVVLIIFHNPSLRAPMFLLIGSLALADLLAGIGLITNFVFAYLLQSEATKLVTIGLIVASFSASVCSLLAITVDRYLSLYYALTYHSERTVTFTYVMLVMLWGTSICLGLLPVMGWNCLRDESTCSVVRPLTKNNAAILSVSFLFMFALMLQLYIQICKIVMRHAHQIALQHHFLATSHYVTTRKGVSTLAIILGTFAACWMPFTLYSLIADYTYPSIYTYATLLPATYNSIINPVIYAFRNQEIQKALCLICCGCIPSSLAQRARSPSDV

SEQ ID NO: 747908 - protein, 409 aa, Homo sapiens
MKVFCEVLEELYKKVLLGATLENDSHDYIFYLNPAVSDQDCSTATSLEWANTCGIQGRHQPISVGVAPIAVAPVCLKTNSQMSGSREVMLLQLTVIKVMTTRILSVKTEFHAKEQYRDVIKILLESAKVDSKLICMFQNSDKLLSHMAAQCLALLLYFQLREKITLSNSWIAFCQKNLSEYSESNKAIYCLWTLTAIIKEIFKDSCSQKTEILKQFLTHFDTIFEVFYNSLFSQHFENCRDTSKIVNILMCFLDLLELLIASRIHLKLHFTCQRILFLKPSCMLEVITWPIQAFVKRKVIIFLKKCLLCKVGEDLCRGSVPALMPPDHHVAVDMLALANAVLQAVNSGLLKTLSVYEKHSFFGGDEVQPECELITSPDHVILRAASLVIMKSLEIKFQNYSSASEMKGA

SEQ ID NO: 747909 - protein, 409 aa, Homo sapiens; identical to SEQ ID NO: 747908

SEQ ID NO: 747910 - protein, 270 aa, Homo sapiens
MKVFCEVLEELYKKVLLGATLENDSHDYIFYLNPAVSDQDCSTATSLEWANTCGIQGRHQPISVGVAPIAVAPVCLKTNSQMSGSREVMLLQLTVIKVMTTRILSVKTEFHAKEQYRDVIKILLESAKVDSKLICMFQNSDKLLSHMAAQCLALLLYFQLREKITLSNSWIAFCQKNLSEYSESNKAIYCLWTLTAIIKEIFKDSCSQKTEILKQFLTHFDTIFEVFYNSLFSQHFENCRDTSKIVNILMCFLDLLELLIASRIHLKLTI

SEQ ID NO: 747911 - protein, 409 aa, Homo sapiens; identical to SEQ ID NO: 747908

SEQ ID NO: 747912 - protein, 436 aa, Homo sapiens [sequence omitted]

SEQ ID NO: 747913 - protein, 409 aa, Homo sapiens; identical to SEQ ID NO: 747908

SEQ ID NO: 747914 - protein, 577 aa, Homo sapiens
MKVFCEVLEELYKKVLLGATLENDSHDYIFYLNPAVSDQDCSTATSLEWANTCGIQGRHQPISVGVAPIAVAPVCLKTNSQMSGSREVMLLQLTVIKVMTTRILSVKTEFHAKEQYRDVIKILLESAKVDSKLICMFQNSDKLLSHMAAQCLALLLYFQLREKITLSNSWIAFCQKNLSEYSESNKAIYCLWTLTAIIKEIFKDSCSQKTEILKQFLTHFDTIFEVFYNSLFSQHFENCRDTSKIVNILMCFLDLLELLIASRIHLKLHFTCQRILFLKPSCMLEVITWPIQAFVKRKVIIFLKKCLLCKVGEDLCRGSVPALMPPDHHVAVDMLALANAVLQAVNSGLLKTLSVYEKHSFFGGDEVQPECELITSPDHVILRAASLVIMKSLEIKFQNYSSASEMKVDLQRFMSELLTFLKPHLQPSLQLHNPCKWLSRVFIEQDDDMLEAAKASLGIYLTLTRGCEATESLTQGKEMWDHHTHENGYNPHCIFLFFLKNIGFDSTVLLDFLISSETCFLEYFVRYLKLLQKDWDNFFTICNNFDATESKYDISICGLCPLTCPRTKAPTKQYPIV

SEQ ID NO: 747915 - protein, 195 aa, Homo sapiens
MGQIEWAMWANEQALASGLILITGGIVATAGRFTQWYFGAYSIVAGVFVCLLEYPRGKRKKGSTMERWGQKHMTAVVKLFGPFTRNYYVRAVLHLLLSVPAGFLLATILGTACLAIASGIYLLAAVRGEQWTPIEPKPRERPQIGGTIKQPPSNPPPRPPAEARKKPSEEEAAAAAGGPPGGPQVNPIPVTDEVV

SEQ ID NO: 747916 - protein, 195 aa, Homo sapiens; identical to SEQ ID NO: 747915

SEQ ID NO: 747917 - protein, 195 aa, Homo sapiens; identical to SEQ ID NO: 747915

SEQ ID NO: 747918 - protein, 195 aa, Homo sapiens; identical to SEQ ID NO: 747915

SEQ ID NO: 747919 - protein, 195 aa, Homo sapiens; identical to SEQ ID NO: 747915

SEQ ID NO: 747920 - protein, 208 aa, Homo sapiens
SQINRTSSRVRVAMGQIEWAMWANEQALASGLILITGGIVATAGRFTQWYFGAYSIVAGVFVCLLEYPRGKRKKGSTMERWGQKHMTAVVKLFGPFTRNYYVRAVLHLLLSVPAGFLLATILGTACLAIASGIYLLAAVRGEQWTPIEPKPRERPQIGGTIKQPPSNPPPRPPAEARKKPSEEEAAAAAGGPPGGPQVNPIPVTDEVV

SEQ ID NO: 747921 - protein, 128 aa, Homo sapiens [sequence omitted]

SEQ ID NO: 747922 - protein, 210 aa, Homo sapiens
MGQIEWAMWANEQALASGLILITGGIVATAGRFTQWYFGAYSIVAGVFVCLLEYPRGKRKKGSTMERWGQKHMTAVVKLFGPFTRNYYVRAVLHLLLSVPAGFLLATILGTACLAIASGIYLLSQVPPARRGNCPPLAVRLLVCVRGKGAALSVYAFRVWKWSSVSSLTDLPPAELSFRTPSCCQVLIWAVALFSGGHPHPPRLPAATHS

SEQ ID NO: 747923 - protein, 362 aa, Homo sapiens
MGQIEWAMWANEQALASGLSECTSGTVEAAAWRGVPRPQPGPRATYRVGKWGARRARPGRGQARRVRGTGAGPSGRGLEGGVLRPPVIPLQTLRSAAPLPHSLLSVPRLREGGSCSAGEEAVQPRWFPGSPPRSPRVGAPAWASGEAPLPLGSQLAWRSLSLGLGWGMGSCPGAQPFSSGVCAGGGLRFHKAPKPPSDGPAQPSCTGTLLLGWDGTAPITLLCICSEVLVRAADSIWKWTLSGPGPGSVWPSTVLITGGIVATAGRFTQWYFGAYSIVAGVFVCLLEYPRGKRKKGSTMERWGQKHMTAVVKLFGPFTRNYYVRAVLHLLLSVPAGFLLATILGTACLAIASGIYLLVSGAL

SEQ ID NO: 747924 - protein, 156 aa, Homo sapiens
MGQIEWAMWANEQALASGLILITGGIVATAGRFTQWYFGAYSIVAGVFVCLLEYPRGKRKKGSTMERWGQKHMTAVVKLFGPFTRNYYVRAVLHLLACVCCLVCRICKDPLQIRGAPIRRQGLGLSVPAGFLLATILGTACLAIASGIYLLVSGAL

SEQ ID NO: 747925 - protein, 524 aa, Homo sapiens
MGQIEWAMWANEQALASGLSECTSGTVEAAAWRGVPRPQPGPRATYRVGKWGARRARPGRGQARRVRGTGAGPSGRGLEGGVLRPPVIPLQTLRSAAPLPHSLLSVPRLREGGSCSAGEEAVQPRWFPGSPPRSPRVGAPAWASGEAPLPLGSQLAWRSLSLGLGWGMGSCPGAQPFSSGVCAGGGLRFHKAPKPPSDGPAQPSCTGTLLLGWDGTAPITLLCICSEVLVRAADSIWKWTLSGPGPGSVWPSTVLITGGIVATAGRFTQWYFGAYSIVAGVFVCLLEYPRGKRKKGSTMERWGQKHMTAVVKLFGPFTRNYYVRAVLHLLACVCCLVCRICKDPLQIRGAPIRRQGLGLSMHCWGVLPGLPGRVEGSVLCVCWLLPAEARTPTRGCFLRASAPEPLVSTSRLRTPRTETSPGPRTSPGSAVCLVLRLCGLGPQTWGSVPLSECPSVSLPLTRCPPALGARRLPAGHHPWDRLPGHCERHLPTGEWRPLRSAPATPIPSPCPDTLGHAWPLKPAL

SEQ ID NO: 747926 - protein, 183 aa, Homo sapiens
RLPLDVYRCHWVFIDATGVYRCHVQVTPVAASALRCKEIVQPRPDLLSLLRLNRRALGDGPRNFRRKPHGQLWVVLITGGIVATAGRFTQWYFGAYSIVAGVFVCLLEYPRGKRKKGSTMERWGQKHMTAVVKLFGPFTRNYYVRAVLHLLLSVPAGFLLATILGTACLAIASGIYLLVSGAL

SEQ ID NO: 747927 - protein, 390 aa, Homo sapiens
SQINRTSSRVRVAMGQIEWAMWANEQALASGLILITGGIVATAGRFTQWYFGAYSIVAGVFVCLLEYPRGKRKKGSTMERWESPPALGSLRGLRGPGRAHRVGWSLVSHLEAPEPTLWCLWVNQGRCLPGVFCGRKEAWVPWGGQQGSKGVPSGRGPAAPSRLPPSPRGQKHMTAVVKLFGPFTRNYYVRAVLHLLACVCCLVCRICKDPLQIRGAPIRRQGLGLSMHCWGVLPGLPGRVEGSVLCVCWLLPAEARTPTRGCFLRASAPEPLVSTSRLRTPRTETSPGPRTSPGSAVCLVLRLCGLGPQTWGSVPLSECPSVSLPLTRCPPALGARRLPAGHHPWDRLPGHCERHLPTGEWRPLRSAPATPIPSPCPDTLGHAWPLKPAL

SEQ ID NO: 747928 - protein, 128 aa, Homo sapiens [sequence omitted]

SEQ ID NO: 747929 - protein, 122 aa, Homo sapiens
MRGSTMERWGQKHMTAVVKLFGPFTRNYYVRAVLHLLLSVPAGFLLEYPRGKRKKGSTMERWGQKHMTAVVKLFGPFTRNYYVRAVLHLLLSVPAGFLLATILGTACLAIASGIYLLVSGAL

SEQ ID NO: 747930 - protein, 138 aa, Homo sapiens
  misc_feature (9)..(9): Xaa can be any naturally occurring amino acid
  misc_feature (14)..(16): Xaa can be any naturally occurring amino acid
  misc_feature (19)..(19): Xaa can be any naturally occurring amino acid
KPLTVAFFXPSPPXXXLLXPPKVFHSTSWPCGAWTRPSLTVDLSCWSFFSLELPVQILCPFFYCGFCIFLFLLFFLRWSLAPSPRLECSGVISAHCNLRLLGSSNSPASASRVAGTTGTCHHAWLIFGIFSRDGVSPR

SEQ ID NO: 747931 - protein, 429 aa, Homo sapiens
MGQIEWAMWANEQALASGLSECTSGTVEAAAWRGVPRPQPGPRATYRVGKWGARRARPGRGQARRVRGTGAGPSGRGLEGGVLRPPVIPLQTLRSAAPLPHSLLSVPRLREGGSCSAGEEAVQPRWFPGSPPRSPRVGAPAWASGEAPLPLGSQLAWRSLSLGLGWGMGSCPGAQPFSSGVCAGGGLRFHKAPKPPSDGPAQPSCTGTLLLGWDGTAPITLLCICSEVLVRAADSIWKWTLSGPGPGSVWPSTVLITGGIVATAGRFTQWYFGAYSIVAGVFVCLLEYPRGKRKKGSTMERWGQKHMTAVVKLFGPFTRNYYVRAVLHLLLSVPAGFLLATILGTACLAIASGIYLLAAVRGEQWTPIEPKPRERPQIGGTIKQPPSNPPPRPPAEARKKPSEEEAAAAAGGPPGGPQVNPIPVTDEVV

SEQ ID NO: 747932 - protein, 393 aa, Homo sapiens
MGQIEWAMWANEQALASGLSECTSGTVEAAAWRGVPRPQPGPRATYRVGKWGARRARPGRGQARRVRGTGAGPSGRGLEGGVLRPPVIPLQTLRSAAPLPHSLLSVPRLREGGSCSAGEEAVQPRWFPGSPPRSPRVGAPAWASGEAPLPLGSQLAWRSLSLGLGWGMGSCPGAQPFSSGVCAGGGLRFHKAPKPPSDGPAQPSCTGTLLLGWDGTAPITLLCICSEVLVRAADSIWKWTLSGPGPGSVWPSTGEAGLRRGLRAEAPLQQLQEGPAPGEECLGRAWGLRVRRRGPLPPLPWGSERPPCCLEGAWQLEWEQRPQGGRAGGRGPAACPVPRKVTACFESAAKKSVGQFRQLSPELPRETHPACPALPTGSRRTEGTQLGARRPGL

SEQ ID NO: 747933 - protein, 128 aa, Homo sapiens [sequence omitted]

SEQ ID NO: 747934 - protein, 393 aa, Homo sapiens; identical to SEQ ID NO: 747932

SEQ ID NO: 747935 - protein, 137 aa, Homo sapiens
MGQIEWAMWANEQALASGLILITGGIVATAGRFTQWYFGAYSIVAGVFVCLLEYPRGKRKKGSTMERWGQKHMTAVVKLFGPFTRNYYVRAVLHLLLSVPAGFLLATILGTACLAIASGIYLLRLLMVPRSAPLPIV

SEQ ID NO: 747936 - protein, 189 aa, Homo sapiens
MRGSTMERWGQKHMTAVVKLFGPFTRNYYVRAVLHLLLSVPAGFLLEYPRGKRKKGSTMERWGQKHMTAVVKLFGPFTRNYYVRAVLHLLLSVPAGFLLATILGTACLAIASGIYLLAAVRGEQWTPIEPKPRERPQIGGTIKQPPSNPPPRPPAEARKKPSEEEAAAAAGGPPGGPQVNPIPVTDEVV

SEQ ID NO: 747937 - protein, 295 aa, Homo sapiens
SQINRTSSRVRVAMGQIEWAMWANEQALASGLILITGGIVATAGRFTQWYFGAYSIVAGVFVCLLEYPRGKRKKGSTMERWESPPALGSLRGLRGPGRAHRVGWSLVSHLEAPEPTLWCLWVNQGRCLPGVFCGRKEAWVPWGGQQGSKGVPSGRGPAAPSRLPPSPRGQKHMTAVVKLFGPFTRNYYVRAVLHLLLSVPAGFLLATILGTACLAIASGIYLLAAVRGEQWTPIEPKPRERPQIGGTIKQPPSNPPPRPPAEARKKPSEEEAAAAAGGPPGGPQVNPIPVTDEVV

SEQ ID NO: 747938 - protein, 405 aa, Homo sapiens
MGQIEWAMWANEQALASGLSECTSGTVEAAAWRGVPRPQPGPRATYRVGKWGARRARPGRGQARRVRGTGAGPSGRGLEGGVLRPPVIPLQTLRSAAPLPHSLLSVPRLREGGSCSAGEEAVQPRWFPGSPPRSPRVGAPAWASGEAPLPLGSQLAWRSLSLGLGWGMGSCPGAQPFSSGVCAGGGLRFHKAPKPPSDGPAQPSCTGTLLLGWDGTAPITLLCICSEVLVRAADSIWKWTLSGPGPGSVWPSTVLITGGIVATAGRFTQWYFGAYSIVAGVFVCLLEYPRGKRKKGSTMERWGQKHMTAVVKLFGPFTRNYYVRAVLHLLACVCCLVCRICKDPLQIRGAPIRRQGLGSACTAGGSCLGFLVGWRVPCCVSAGYCRLRPGHPHVAASSEQVHQSR

SEQ ID NO: 747939 - protein, 405 aa, Homo sapiens; identical to SEQ ID NO: 747938

SEQ ID NO: 747940 - protein, 180 aa, Homo sapiens
SQINRTSSRVRVAMGQIEWAMWANEQALASGLILITGGIVATAGRFTQWYFGAYSIVAGVFVCLLEYPRGKRKKGSTMERWLSVPAGFLLATILGTACLAIASGIYLLAAVRGEQWTPIEPKPRERPQIGGTIKQPPSNPPPRPPAEARKKPSEEEAAAAAGGPPGGPQVNPIPVTDEVV

SEQ ID NO: 747941 - protein, 342 aa, Homo sapiens
MGQIEWAMWANEQALASGLSECTSGTVEAAAWRGVPRPQPGPRATYRVGKWGARRARPGRGQARRVRGTGAGPSGRGLEGGVLRPPVIPLQTLRSAAPLPHSLLSVPRLREGGSCSAGEEAVQPRWFPGSPPRSPRVGAPAWASGEAPLPLGSQLAWRSLSLGLGWGMGSCPGAQPFSSGVCAGGGLRFHKAPKPPSDGPAQPSCTGTLLLGWDGTAPITLLCICSEVLVRAADSIWKWTLSGPGPGSVWPSTVLITGGIVATAGRFTQWYFGAYSIVAGVFVCLLEYPRGKRKKGSTMERWGQKHMTAVVKLFGPFTRNYYVRAVLHLLLGSLYINLSISA

SEQ ID NO: 747942 - protein, 119 aa, Homo sapiens
AVVKLFGPFTRNYYVRAVLHLLVSPRPAPPLGLRRAWSRPSPLSHRPGCLDRSHPPLTSVFFQTKIRVPGSGRACVCCLVCRICKDPLQIRGAPIRRQGLGSACTAGGSCLGFLVGWRV

SEQ ID NO: 747943 - protein, 84 aa, Homo sapiens
ARGAGRKSLFTQTAHRLGNNAVKEVSRLGLTAPTSCSHTHQRGKKKRSERKKKRGKNQDLITRATDRLQTPVSMESRGLSPGSS

SEQ ID NO: 747944 - protein, 407 aa, Homo sapiens
MESAITLWQFLLQLLLDQKHEHLICWTSNDGEFKLLKAEEVAKLWGLRKNKTNMNYDKLSRALRYYYDKNIIKKVIGQKFVYKFVSFPEILKMDPHAVEISRESLLLQDSDCKASPEGREAHKHGLAALRSTSRNEYIHSGLYSSFTINSLQNPPDAFKAIKTEKLEEPPEDSPPVEEVRTVIRFVTNKTDKHVTRPVVSLPSTSEAAAASAFLASSVSAKISSLMLPNAASISSASPFSSRSPSLSPNSPLPSEHRSLFLEAACHDSDSLEPLNLSSGSKTKSPSLPPKAKKPKGLEISAPPLVLSGTDIGSIALNSPALPSGSLTPAFFTAQTPNGLLLTPSPLLSSIHFWSSLSPVAPLSPARLQGPSTLFQFPTLLNGHMPVPIPSLDRAASPVLLSSNSQKS

SEQ ID NO: 747945 - protein, 407 aa, Homo sapiens; identical to SEQ ID NO: 747944

SEQ ID NO: 747946 - protein, 380 aa, Homo sapiens
MESAITLWQFLLQLLLDQKHEHLICWTSNDGEFKLLKAEEVAKLWGLRKNKTNMNYDKLSRALRYYYDKNIIKKVIGQKFVYKFVSFPEILKMDPHAVEISRESLLLQDSDCKASPEGREAHKHGLAALRSTSRNEYIHSGLYSSFTINSLQNPPDAFKAIKTEKLEEPPEDSPPVEEVRTVIRFVTNKTDKHVTRPVVSLPSTSEAAAASAFLASSVSAKISSLMLPNAASISSASPFSSRSPSLSPNSPLPSEHRSLFLEAACHDSDSLEPLNLSSGSKTKSPSLPPKAKKPKGLEISAPPLVLSGTDIGSIALNSPALPSGSLTPAFFTAQTPNGLLLTPSPLLSSIHFWSSLSPVAPLSPARLQGPSTLFQVSVWK

SEQ ID NO: 747947 - protein, 306 aa, Homo sapiens
MVTEFLLLGFSHLADLQGLLFSVFLTIYLLTVAGNFLIVVLVSTDAALQSPMYFFLRTLSALEIGYTSVTVPLLLHHLLTGRRHISRSGCALQMFFFLFFGATECCLLAAMAYDRYAAICEPLRYPLLLSHRVCLQLAGSAWACGVLVGLGHTPFIFSLPFCGPNTIPQFFCEIQPVLQLVCGDTSLNELQIILATALLILCPFGLILGSYGRILVTIFRIPSVAGRRKAFSTCSSHLIVVSLFYGTALFIYIRPKASYDPATDPLVSLFYAVVTPILNPIIYSLRNTEVKAALKRTIQKTVPMEI

SEQ ID NO: 747948 - protein, 703 aa, Homo sapiens
MSARATRPRSRRGRHAPPGELDPVAESSEEVEAASGSSKPSFAPPPVSSGLEQLGPMEEVSGQGLGSRTDKKMDGGSGRELASAPEVPHKPAVEAHQAPEAALQYKETVPPGNGAPDVFQTLQHTLSSLEAAAAAWRHQPPSHSGPMEFEGTSEGGAGSLGKQEGAGSCQREAARLAERNAWLRLALSSREDELVRTQASLEAIRAEKETLQKEVQELQDSLLRLEPCPHLSHNQAGGSGSGSSSSEADREPWETQDSFSLAHPLLRRLRSHSSTQILGSLPNQPLSPEMHIMEAQMEQLRGSIEKLKCFNRLLSAVLQGYKGRCEGLSMQLGQREAEATALHLALQYSEHCEEAYRVLLALREADSGAGDEAPMSDLQAAEKEAWRLLAQEEAAMDAGTQQNPQPSPEGSSVDKPTPQEVAFQLRSYVQRLQERRSLVKILSEPGPTLAPMPIVPRAEAMVQAILGTQAGPALPRLEKTQIQQDLVAAREALADLMLRLQLVRREKRGLELREAALRALGPAHVLLLEQLRWERAELQAGGANSSGGHSSGGGSSGDEEEWYQGLPAVPGGTSGIDGGQVGRAWDPEKLAQELAASLTRTLDLQEQLQSLRRELEQVAQKGRARRSQSAELNRDLCKAHSALVLAFRGAHRKQEEQRRKLEQQMALMEAQQAEEVAVLEATARALGKPRPPLPPPQLGDTFL

SEQ ID NO: 747949 - protein, 804 aa, Homo sapiens
MSARATRPRSRRGRHAPPGELDPVAESSEEVEAASGSSKPSFAPPPVSSGLEQLGPMEEVSGQGLGSRTDKKMDGGSGRELASAPEVPHKPAVEAHQAPEAALQYKETVPPGNGAPDVFQTLQHTLSSLEAAAAAWRHQPPSHSGPMEFEGTSEGGAGSLGKQEGAGSCQREAARLAERNAWLRLALSSREDELVRTQASLEAIRAEKETLQKEVQELQDSLLRLEPCPHLSHNQAGGSGSGSSSSEADREPWETQDSFSLAHPLLRRLRSHSSTQILGSLPNQPLSPEMHIMEAQMEQLRGSIEKLKCFNRLLSAVLQGYKGRCEGLSMQLGQREAEATALHLALQYRVLLCHPGWSAVVPSWLTATSASPVQVILLPQPPEYAGTTGAYHHTLLIFVFLVETGFHHVGQAGLELLTSGNPPKVLGLQVRAIAPAELSVLKHSEPVSHSEHCEEAYRVLLALREADSGAGDEAPMSDLQAAEKEAWRLLAQEEAAMDAGTQQNPQPSPEGSSVDKPTPQEVAFQLRSYVQRLQERRSLVKILSEPGPTLAPMPIVPRAEAMVQAILGTQAGPALPRLEKTQIQQDLVAAREALADLMLRLQLVRREKRGLELREAALRALGPAHVLLLEQLRWERAELQAGGANSSGGHSSGGGSSGDEEEWYQGLPAVPGGTSGIDGGQVGRAWDPEKLAQELAASLTRTLDLQEQLQSLRRELEQVAQKGRARRSQSAELNRDLCKAHSALVLAFRGAHRKQEEQRRKLEQQMALMEAQQAEEVAVLEATARALGKPRPPLPPPQLGDTFL

SEQ ID NO: 747950 - protein, 732 aa, Homo sapiens
MDGGSGRELASAPEVPHKPAVEAHQAPEAALQYKETVPPGNGAPDVFQTLQHTLSSLEAAAAAWRHQPPSHSGPMEFEGTSEGGAGSLGKQEGAGSCQREAARLAERNAWLRLALSSREDELVRTQASLEAIRAEKETLQKEVQELQDSLLRLEPCPHLSHNQAGGSGSGSSSSEADREPWETQDSFSLAHPLLRRLRSHSSTQILGSLPNQPLSPEMHIMEAQMEQLRGSIEKLKCFNRLLSAVLQGYKGRCEGLSMQLGQREAEATALHLALQYRVLLCHPGWSAVVPSWLTATSASPVQVILLPQPPEYAGTTGAYHHTLLIFVFLVETGFHHVGQAGLELLTSGNPPKVLGLQVRAIAPAELSVLKHSEPVSHSEHCEEAYRVLLALREADSGAGDEAPMSDLQAAEKEAWRLLAQEEAAMDAGTQQNPQPSPEGSSVDKPTPQEVAFQLRSYVQRLQERRSLVKILSEPGPTLAPMPIVPRAEAMVQAILGTQAGPALPRLEKTQIQQDLVAAREALADLMLRLQLVRREKRGLELREAALRALGPAHVLLLEQLRWERAELQAGGANSSGGHSSGGGSSGDEEEWYQGLPAVPGGTSGIDGGQVGRAWDPEKLAQELAASLTRTLDLQEQLQSLRRELEQVAQKGRARRSQSAELNRDLCKAHSALVLAFRGAHRKQEEQRRKLEQQMALMEAQQAEEVAVLEATARALGKPRPPLPPPQLGDTFL

SEQ ID NO: 747951 - protein, 307 aa, Homo sapiens
RLLEDKKITVLLDEVAEDMGKCHLTKGKQALEIRSSLSEKRALTDPIQGTEYSAESLVRNLQWAKAHELPESMCLKFDCGVQIQLGFAAEFSNVMIIYTSIVYKPPEIIMCDAYVTDFPLDLDIDPKDANKGTPEETGSYLVSKDLPKHCLYTRLSSLQKLKEHLVFTVCLSYQYSGLEDTVEDKQEVNVGKPLIAKLDMHRGLGRKTCFQTCLMSNGPYQSSAATSGGAGHYHSLQDPFHGVYHSHPGNPSNVTPADSCHCSRTPDAFISSFAHHASCHFSRSNVPVETTDEIPFSFSDRLRISEK

SEQ ID NO: 747952 - protein, 307 aa, Homo sapiens; identical to SEQ ID NO: 747951

SEQ ID NO: 747953 - protein, 307 aa, Homo sapiens; identical to SEQ ID NO: 747951

SEQ ID NO: 747954 - protein, 307 aa, Homo sapiens; identical to SEQ ID NO: 747951

SEQ ID NO: 747955 - protein, 779 aa, Homo sapiens
MRIEERKSQHLTGLTDEKVKAYLSLHPQVLDEFVSESVSAETVEKWLKRKNNKSEDESAPKEVSRYQDTNMQGVVYELNSYIEQRLDTGGDNQLLLYELSSIIKIATKADGFALYFLGECNNSLCIFTPPGIKEGKPRLIPAGPITQGTTVSAYVAKSRKTLLVEDILGDERFPRGTGLESGTRIQSVLCLPIVTAIGDLIGILELYRHWGKEAFCLSHQEVATANLAWASVAIHQVQVCRGLAKQTELNDFLLDVSKTYFDNIVAIDSLLEHIMIYAKNLVNADRCALFQVDHKNKELYSDLFDIGEEKEGKPVFKKTKEIRFSIEKGIAGQVARTGEVLNIPDAYADPRFNREVDLYTGYTTRNILCMPIVSRGSVIGVVQMVNKISGSAFSKTDENNFKMFAVFCALALHCANMYHRIRHSECIYRVTMEKLSYHSICTSEEWQGLMQFTLPVRLCKEIELFHFDIGPFENMWPGIFVYMVHRSCGTSCFELEKLCRFIMSVKKNYRRVPYHNWKHAVTVAHCMYAILQNNHTLFTDLERKGLLIACLCHDLDHRGFSNSYLQKFDHPLAALYSTSTMEQHHFSQTVSILQLEGHNIFSTLSSSEYEQVLEIIRKAIIATDLALYFGNRKQLEEMYQTGSLNLNNQSHRDRVIGLMMTACDLCSVTKLWPVTKLTANDIYAEFWAEGDEMKKLGIQPIPMMDRDKKDEVPQGQLGFYNAVAIPCYTTLTQILPPTEPLLKACRDNLSQWEKVIRGEETATWISSPSVAQKAAASED

SEQ ID NO: 747956 - protein, 820 aa, Homo sapiens
EFRAAAAKLRGVPRAPAFALAAAAALLFGSDMEDGPSNNASCFRRLTECFLSPSLTDEKVKAYLSLHPQVLDEFVSESVSAETVEKWLKRKNNKSEDESAPKEVSRYQDTNMQGVVYELNSYIEQRLDTGGDNQLLLYELSSIIKIATKADGFALYFLGECNNSLCIFTPPGIKEGKPRLIPAGPITQGTTVSAYVAKSRKTLLVEDILGDERFPRGTGLESGTRIQSVLCLPIVTAIGDLIGILELYRHWGKEAFCLSHQEVATANLAWASVAIHQVQVCRGLAKQTELNDFLLDVSKTYFDNIVAIDSLLEHIMIYAKNLVNADRCALFQVDHKNKELYSDLFDIGEEKEGKPVFKKTKEIRFSIEKGIAGQVARTGEVLNIPDAYADPRFNREVDLYTGYTTRNILCMPIVSRGSVIGVVQMVNKISGSAFSKTDENNFKMFAVFCALALHCANMYHRIRHSECIYRVTMEKLSYHSICTSEEWQGLMQFTLPVRLCKEIELFHFDIGPFENMWPGIFVYMVHRSCGTSCFELEKLCRFIMSVKKNYRRVPYHNWKHAVTVAHCMYAILQNNHTLFTDLERKGLLIACLCHDLDHRGFSNSYLQKFDHPLAALYSTSTMEQHHFSQTVSILQLEGHNIFSTLSSSEYEQVLEIIRKAIIATDLALYFGNRKQLEEMYQTGSLNLNNQSHRDRVIGLMMTACDLCSVTKLWPVTKLTANDIYAEFWAEGDEMKKLGIQPIPMMDRDKKDEVPQGQLGFYNAVAIPCYTTLTQILPPTEPLLKACRDNLSQWEKVIRGEETATWISSPSVAQKAAASED

SEQ ID NO: 747957 - protein, 363 aa, Homo sapiens
MYHRIRHSECIYRVTMEKLSYHSICTSEEWQGLMQFTLPVRLCKEIELFHFDIGPFENMWPGIFVYMVHRSCGTSCFELEKLCRFIMSVKKNYRRVPYHNWKHAVTVAHCMYAILQNNHTLFTDLERKGLLIACLCHDLDHRGFSNSYLQKFDHPLAALYSTSTMEQHHFSQTVSILQLEGHNIFSTLSSSEYEQVLEIIRKAIIATDLALYFGNRKQLEEMYQTGSLNLNNQSHRDRVIGLMMTACDLCSVTKLWPVTKLTANDIYAEFWAEGDEMKKLGIQPIPMMDRDKKDEVPQGQLGFYNAVAIPCYTTLTQILPPTEPLLKACRDNLSQWEKVIRGEETATWISSPSVAQKAAASED

SEQ ID NO: 747958 - protein, 831 aa, Homo sapiens
MRIEERKSQHLTGLTDEKVKAYLSLHPQVLDEFVSESVSAETVEKWLKRKNNKSEDESAPKEVSRYQDTNMQGVVYELNSYIEQRLDTGGDNQLLLYELSSIIKIATKADGFALYFLGECNNSLCIFTPPGIKEGKPRLIPAGPITQGTTVSAYVAKSRKTLLVEDILGDERFPRGTGLESGTRIQSVLCLPIVTAIGDLIGILELYRHWGKEAFCLSHQEVATANLAWASVAIHQVQVCRGLAKQTELNDFLLDVSKTYFDNIVAIDSLLEHIMIYAKNLVNADRCALFQVDHKNKELYSDLFDIGEEKEGKPVFKKTKEIRFSIEKGIAGQVARTGEVLNIPDAYADPRFNREVDLYTGYTTRNILCMPIVSRGSVIGVVQMVNKISGSAFSKTDENNFKMFAVFCALALHCANMYHRIRHSECIYRVTMEKLSYHSICTSEEWQGLMQFTLPVRLCKEIELFHFDIGPFENMWPGIFVYMVHRSCGTSCFELEKLCRFIMSVKKNYRRVPYHNWKHAVTVAHCMYAILQNNHTLFTDLEVHHDDTAAYNMETTPKQNDTNNIINSVILRMPELGVLESLDLDPPPTQTTTLRKGLLIACLCHDLDHRGFSNSYLQKFDHPLAALYSTSTMEQHHFSQTVSILQLEGHNIFSTLSSSEYEQVLEIIRKAIIATDLALYFGNRKQLEEMYQTGSLNLNNQSHRDRVIGLMMTACDLCSVTKLWPVTKLTANDIYAEFWAEGDEMKKLGIQPIPMMDRDKKDEVPQGQLGFYNAVAIPCYTTLTQILPPTEPLLKACRDNLSQWEKVIRGEETATWISSPSVAQKAAASED

SEQ ID NO: 747959 - protein, 704 aa, Homo sapiens
MRIEERKSQHLTGLTDEKVKAYLSLHPQVLDEFVSESVSAETVEKWLKRKNNKSEDESAPKEVSRYQDTNMQGVVYELNSYIEQRLDTGGDNQLLLYELSSIIKIATKADGFALYFLGECNNSLCIFTPPGIKEGKPRLIPAGPITQGTTVSAYVAKSRKTLLVEDILGDERFPRGTGLESGTRIQSVLCLPIVTAIGDLIGILELYRHWGKEAFCLSHQEVATANLAWASVAIHQVQVCRGLAKQTELNDFLLDVSKTYFDNIVAIDSLLEHIMIYAKNLVNADRCALFQVDHKNKELYSDLFDIGEEKEGKPVFKKTKEIRFSIEKGIAGQVARTGEVLNIPDAYADPRFNREVDLYTGYTTRNILCMPIVSRGSVIGVVQMVNKISGSAFSKTDENNFKMFAVFCALALHCANMYHRIRHSECIYRVTMEKLSYHSICTSEEWQGLMQFTLPVRLCKEIELFHFDIGPFENMWPGIFVYMVHRSCGTSCFELEKLCRFIMSVKKNYRRVPYHNWKHAVTVAHCMYAILQNNHTLFTDLEVHHDDTAAYNMETTPKQNDTNNIINSVILRMPELGVLESLDLDPPPTQTTTLRKGLLIACLCHDLDHRGFSNSYLQKFDHPLAALYSTSTMEQHHFSQTVSILQLEGHNIFSTLSSSEYEQVLEIIRKAIIATDLALYFGNRKQLEEMYQTGSLNLNNQSHR

SEQ ID NO: 747960 - protein, 84 aa, Homo sapiens
EFRAAAAKLRGVPRAPAFALAAAAALLFGSDMEDGPSNNASCFRRLTECFLSPKANGIDIEVIHRDVTVEEMGVEKTLKEKNVE

SEQ ID NO: 747961 - protein, 85 aa, Homo sapiens
QTAKMAAPFSPRELIPGRIQISVSLRAPAGVAAGPSWEVPPSEEEWIGDPLKEAVWPHFGRAAVLRGGSLLPSVGLGSQKPNRLE

SEQ ID NO: 747962 - protein, 121 aa, Homo sapiens
MGVWLVEGRLLIGLKSNLGGRTDQNWGLMGGAGWSQDDAQISGSGFWVERSVIYREGEPRGGAGLEECSERVSCQSGGPTADPEAPAWDLWSQTNLRVNLGSNYKVMAEAEDREGEQRLQR

SEQ ID NO: 747963 - protein, 127 aa, Homo sapiens
NYSARYEAWVVLRFAAAYGFRNIQNMILKLKKGKFPFHFVEVLACAGGCLNGRGQAQTPDGHADKALLRQMEGIYADIPVRRPESSAHVQELYQEWLEGINSPKAREVLHTTYQSQERGTHSLDIKW

SEQ ID NO: 747964 - protein, 456 aa, Homo sapiens
MKCEHCTRKECSKKTKTDDQENVSADAPSPAQENGEKGEFHKLADAKIFLSDCLACDSCMTAEEGVQLSQQNAKDFFRVLNLNKKCDTSKHKVLVVSVCPQSLPYFAAKFNLSVTDASRRLCGFLKSLGVHYVFDTTIAADFSILESQKEFVRRYRQHSEEERTLPMLTSACPGWVRYAERVLGRPITAHLCTAKSPQQVMGSLVKDYFARQQNLSPEKIFHVIVAPCYDKKLEALQESLPPALHGSRGADCVLTSGEIAQIMEQGDLSVRDAAVDTLFGDLKEDKVTRHDGASSDGHLAHIFRHAAKELFNEDVEEVTYRALRNKDFQEVTLEKNGEVVLRFAAAYGFRNIQNMILKLKKGKFPFHFVEVLACAGGCLNGRGQAQTPDGHADKALLRQMEGIYADIPVRRPESSAHVQELYQEWLEGINSPKAREVLHTTYQSQERGTHSLDIKW

SEQ ID NO: 747965 - protein, 278 aa, Homo sapiens
MKCEHCTRKECSKKTKTDDQENVSADAPSPAQENGEKGEFHKLADAKIFLSDCLACDSCMTAEEGVQLSQQNAKDFFRVLNLNKKCDTSKHKVLVVSVCPQSLPYFAAKFNLSVTDASRRLCGFLKSLGVHYVFDTTIAADFSILESQKEFVRRYRQHSEEERTLPMLTSACPGWVRYAERVLGRPITAHLCTAKSPQQVMGSLVKDYFARQQNLSPEKIFHVIVAPCYDKKLEALQESLPPALHGSRGADCVLTSGEIAQIMEQGDLSVRDAAVDTL

SEQ ID NO: 747966 - protein, 502 aa, Homo sapiens
MKCEHCTRKECSKKTKTDDQENVSADAPSPAQENGEKGEFHKLADAKIFLSDCLACDSCMTAEEGVQLSQQNAKDFFRVLNLNKKCDTSKHKVLVVSVCPQSLPYFAAKFNLSVTDASRRLCGFLKSLGVHYVFDTTIAADFSILESQKEFVRRYRQHSEEERTLPMLTSACPGWVRYAERVLGRPITAHLCTAKSPQQVMGSLVKDYFARQQNLSPEKIFHVIVAPCYDKKLEALQESLPPALHGSRGADCVLTSEISQAWWCTPVITATREAAARESLEPGRQRLQRDKIAPLDSSLGGGGEIAQIMEQGDLSVRDAAVDTLFGDLKEDKVTRHDGASSDGHLAHIFRHAAKELFNEDVEEVTYRALRNKDFQEVTLEKNGEVVLRFAAAYGFRNIQNMILKLKKGKFPFHFVEVLACAGGCLNGRGQAQTPDGHADKALLRQMEGIYADIPVRRPESSAHVQELYQEWLEGINSPKAREVLHTTYQSQERGTHSLDIKW

SEQ ID NO: 747967 - protein, 410 aa, Homo sapiens
MKCEHCTRKECSKKTKTDDQENVSADAPSPAQENGEKGEFHKLADAKIFLSDCLACDSCMTAEEGVQLSQQNAKDFFRVLNLNKKCDTSKHKVLVVSVCPQSLPYFAAKFNLSVTDASRRLCGFLKSLGVHYVFDTTIAADFSILESQKEFVRRYRQHSEEERTLPMLTSACPGWVRYAERVLGRPITAHLCTAKSPQQVMGSLVKDYFARQQNLSPEKIFHVIVAPCYDKKLEALQESLPPALHGSRGADCVLTSGEIAQIMEQGDLSVRDAAVDTLNKDFQEVTLEKNGEVVLRFAAAYGFRNIQNMILKLKKGKFPFHFVEVLACAGGCLNGRGQAQTPDGHADKALLRQMEGIYADIPVRRPESSAHVQELYQEWLEGINSPKAREVLHTTYQSQERGTHSLDIKW

SEQ ID NO: 747968 - protein, 278 aa, Homo sapiens; identical to SEQ ID NO: 747965

SEQ ID NO: 747969 - protein, 278 aa, Homo sapiens; identical to SEQ ID NO: 747965

SEQ ID NO: 747970 - protein, 397 aa, Homo sapiens
MTAEEGVQLSQQNAKDFFRVLNLNKKCDTSKHKVLVVSVCPQSLPYFAAKFNLSVTDASRRLCGFLKSLGVHYVFDTTIAADFSILESQKEFVRRYRQHSEEERTLPMLTSACPGWVRYAERVLGRPITAHLCTAKSPQQVMGSLVKDYFARQQNLSPEKIFHVIVAPCYDKKLEALQESLPPALHGSRGADCVLTSGEIAQIMEQGDLSVRDAAVDTLFGDLKEDKVTRHDGASSDGHLAHIFRHAAKELFNEDVEEVTYRALRNKDFQEVTLEKNGEVVLRFAAAYGFRNIQNMILKLKKGKFPFHFVEVLACAGGCLNGRGQAQTPDGHADKALLRQMEGIYADIPVRRPESSAHVQELYQEWLEGINSPKAREVLHTTYQSQERGTHSLDIKW

SEQ ID NO: 747971 - protein, 434 aa, Homo sapiens
MGQMDRVRFQENGEKGEFHKLADAKIFLSDCLACDSCMTAEEGVQLSQQNAKDFFRVLNLNKKCDTSKHKVLVVSVCPQSLPYFAAKFNLSVTDASRRLCGFLKSLGVHYVFDTTIAADFSILESQKEFVRRYRQHSEEERTLPMLTSACPGWVRYAERVLGRPITAHLCTAKSPQQVMGSLVKDYFARQQNLSPEKIFHVIVAPCYDKKLEALQESLPPALHGSRGADCVLTSGEIAQIMEQGDLSVRDAAVDTLFGDLKEDKVTRHDGASSDGHLAHIFRHAAKELFNEDVEEVTYRALRNKDFQEVTLEKNGEVVLRFAAAYGFRNIQNMILKLKKGKFPFHFVEVLACAGGCLNGRGQAQTPDGHADKALLRQMEGIYADIPVRRPESSAHVQELYQEWLEGINSPKAREVLHTTYQSQERGTHSLDIKW

SEQ ID NO: 747972 - protein, 290 aa, Homo sapiens [sequence omitted]

SEQ ID NO: 747973 - protein, 302 aa, Homo sapiens
MKCEHCTRKECSKKTKTDDQENVSADAPSPAQENGEKGEFHKLADAKIFLSDCLACDSCMTAEEGVQLSQQNAKDFFRVLNLNKKCDTSKHKVLVVSVCPQSLPYFAAKFNLSVTDASRRLCGFLKSLGVHYVFDTTIAADFSILESQKEFVRRYRQHSEEERTLPMLTSACPGWVRYAERVLGRPITAHLCTAKSPQQVMGSLVKDYFARQQNLSPEKIFHVIVAPCYDKKLEALQESLPPVRQMEGIYADIPVRRPESSAHVQELYQEWLEGINSPKAREVLHTTYQSQERGTHSLDIKW

SEQ ID NO: 747974 - protein, 189 aa, Homo sapiens
MKDLYFLCLVRFGDLKEDKVTRHDGASSDGHLAHIFRHAAKELFNEDVEEVTYRALRNKDFQEVTLEKNGEVVLRFAAAYGFRNIQNMILKLKKGKFPFHFVEVLACAGGCLNGRGQAQTPDGHADKALLRQMEGIYADIPVRRPESSAHVQELYQEWLEGINSPKAREVLHTTYQSQERGTHSLDIKW

SEQ ID NO: 747975 - protein, 226 aa, Homo sapiens
MKCEHCTRKECSKKTKTDDQENVSADAPSPAQENGEKGEFHKLADAKIFLSDCLACDSCMTAEEGVQLSQQNAKDFFRVLNLNKKCDTSKHKVLVVSVCPQSLPYFAAKFNLSVTDASRRLCGFLKSLGVHYVFDTTIAADFSILERCLNGRGQAQTPDGHADKALLRQMEGIYADIPVRRPESSAHVQELYQEWLEGINSPKAREVLHTTYQSQERGTHSLDIKW

SEQ ID NO: 747976 - protein, 167 aa, Homo sapiens
MKCEHCTRKECSKKTKTDDQENVSADAPSPAQENGEKGEFHKLADAKIFLSDCLACDSCMTAEEGVQLSQQNAKDFFRVLNLNKKKKKKKKKKRCVGGLGPLEKVFEDPLVWGGGAPMLVLSGTGGQRGGSLEGTPGTRDTRAGGFLHNIKKSPGGTRIRFGTNSQM

SEQ ID NO: 747977 - protein, 127 aa, Homo sapiens; identical to SEQ ID NO: 747963

SEQ ID NO: 747978 - protein, 456 aa, Homo sapiens; identical to SEQ ID NO: 747964

SEQ ID NO: 747979 - protein, 456 aa, Homo sapiens; identical to SEQ ID NO: 747964

SEQ ID NO: 747980 - protein, 278 aa, Homo sapiens; identical to SEQ ID NO: 747965

SEQ ID NO: 747981 - protein, 487 aa, Homo sapiens
MKCEHCTRKECSKKTKTDDQENVSADAPSPAQENGEKGEFHKLADAKIFLSDCLACDSCMTAEEGVQLSQQNAKDFFRVLNLNKKCDTSKHKVLVVSVCPQSLPYFAAKFNLSVTDASRRLCGFLKSLGVHYVFDTTIAADFSILESQKEFVRRYRQHSEEERTLPMLTSACPGWVRYAERVLGRPITAHLCTAKSPQQVMGSLVKDYFARQQNLSPEKIFHVIVAPCYDKKLEALQESLPPALHGSRGADCVLTSEISQAWWCTPVITATREAAARESLEPGRQRLQRDKIAPLDSSLGGGGEIAQIMEQGDLSVRDAAVDTLFGDLKEDKVTRHDGASSDGHLAHIFRHAAKELFNEDVEEVTYRALRNKDFQEVTLEKNGEVVLRFAAAYGFRNIQNMILKLKKGCLNGRGQAQTPDGHADKALLRQMEGIYADIPVRRPESSAHVQELYQEWLEGINSPKAREVLHTTYQSQERGTHSLDIKW

SEQ ID NO: 747982 - protein, 524 aa, Homo sapiens
AAEVGGPGPRSLASGLFKAPPASAPWAARRGGGRRGVPASAGRVRSSRFSLNLSIFPTPAKRKRTETEPLVPRTTVRECSKKTKTDDQENVSADAPSPAQENGEKGEFHKLADAKIFLSDCLACDSCMTAEEGVQLSQQNAKDFFRVLNLNKKCDTSKHKVLVVSVCPQSLPYFAAKFNLSVTDASRRLCGFLKSLGVHYVFDTTIAADFSILESQKEFVRRYRQHSEEERTLPMLTSACPGWVRYAERVLGRPITAHLCTAKSPQQVMGSLVKDYFARQQNLSPEKIFHVIVAPCYDKKLEALQESLPPALHGSRGADCVLTSGEIAQIMEQGDLSVRDAAVDTLFGDLKEDKVTRHDGASSDGHLAHIFRHAAKELFNEDVEEVTYRALRNKDFQEVTLEKNGEVVLRFAAAYGFRNIQNMILKLKKGKFPFHFVEVLACAGGCLNGRGQAQTPDGHADKALLRQMEGIYADIPVRRPESSAHVQELYQEWLEGINSPKAREVLHTTYQSQERGTHSLDIKW

SEQ ID NO: 747983 - protein, 408 aa, Homo sapiens
MKCEHCTRKECSKKTKTDDQENVSADAPSPAQENGEKCDTSKHKVLVVSVCPQSLPYFAAKFNLSVTDASRRLCGFLKSLGVHYVFDTTIAADFSILESQKEFVRRYRQHSEEERTLPMLTSACPGWVRYAERVLGRPITAHLCTAKSPQQVMGSLVKDYFARQQNLSPEKIFHVIVAPCYDKKLEALQESLPPALHGSRGADCVLTSGEIAQIMEQGDLSVRDAAVDTLFGDLKEDKVTRHDGASSDGHLAHIFRHAAKELFNEDVEEVTYRALRNKDFQEVTLEKNGEVVLRFAAAYGFRNIQNMILKLKKGKFPFHFVEVLACAGGCLNGRGQAQTPDGHADKALLRQMEGIYADIPVRRPESSAHVQELYQEWLEGINSPKAREVLHTTYQSQERGTHSLDIKW

SEQ ID NO: 747984 - protein, 339 aa, Homo sapiens
  misc_feature (1)..(1): Xaa can be any naturally occurring amino acid
XRHEEDFFRVLRVHYVFDTTIAADFSILESQKEFVRRYRQHSEEERTLPMLTSACPGWVRYAERVLGRPITAHLCTAKSPQQVMGSLVKDYFARQQNLSPEKIFHVIVAPCYDKKLEALQESLPPALHGSRGADCVLTSGEIAQIMEQGDLSVRDAAVDTLFGDLKEDKVTRHDGASSDGHLAHIFRHAAKELFNEDVEEVTYRALRNKDFQEVTLEKNGEVVLRFAAAYGFRNIQNMILKLKKGKFPFHFVEVLACAGGCLNGRGQAQTPDGHADKALLRQMEGIYADIPVRRPESSAHVQELYQEWLEGINSPKAREVLHTTYQSQERGTHSLDIKW

SEQ ID NO: 747985 - protein, 188 aa, Homo sapiens
MKCEHCTRKECSKKTKTDDQENVSADAPSPAQENGEKGEFHKLADAKIFLSDCLACDSCMTAEEGVQLSQQNAKDFFRVLNLNKKCDTSKHKVLVVSVCPQSLPYFAAKFNLSVTDASRRLCGFLKSLGVHYVFDTTIAADFSILESQKEFVRRYRQHSEEERTLPMLTSACPGMLPFPSSLQACRFP

SEQ ID NO: 747986 - protein, 167 aa, Homo sapiens; identical to SEQ ID NO: 747976

SEQ ID NO: 747987 - protein, 577 aa, Homo sapiens
MLTPAFDLSQDPDFLTIAIRVPYARVSEFDVYFEGSDFKFYAKPYFLRLTLPGRIVENGSEQGSYDADKGIFTIRLPKETPGQHFEGLNMLTALLAPRKSRTAKPLVEEIGASEIPEEVVDDEEFDWEIEQTPCEEVSESALNPQCHYGFGNLRSGVLQRLQDELSDVIDIKDPDFTPAAERRQKRLAAELAKFDPDHYLADFFEDEAIEQILKYNPWWTDKYSKMMAFLEKSQEQENHATLVSFSEEEKYQLRKFVNKSYLLDKRACRQVCYSLIDILLAYCYETRVTEGEKNVESAWNIRKLSPTLCWFETWTNVHDIMVSFGRRVLCYPLYRHFKLVMKAYRDTIKILQLGKSAVLKCLLDIHKIFQENDPAYILNDLYISDYCVWIQKVKSKKLAALAEALKEVSLTKAQLGLELEELEAAALLVQEEETALKAAHSVSGQQTLCSSSEASDSEDSDSSVSSGNEDSGSDSEQDELKDSPSETVSSLQGPFLEESSAFLIADGGVRRNTAIQESDASQGKPLASSWPLGVSGPLIEELGEQLKTTVQVSEPKGTTAVNRSNIQERDGCQTPNN

SEQ ID NO: 747988 - protein, 577 aa, Homo sapiens; identical to SEQ ID NO: 747987

SEQ ID NO: 747989 - protein, 388 aa, Homo sapiens
MLTPAFDLSQDPDFLTIAIRVPYARVSEFDVYFEGSDFKFYAKPYFLRLTLPGRIVENGSEQGSYDADKGIFTIRLPKETPGQHFEGLNMLTALLAPRKSRTAKPLVEEIGASEIPEEVVDDEEFDWEIEQTPCEEVSESALNPQCHYGFGNLRSGVLQRLQDELSDVIDIKDPDFTPAAERRQKRLAAELAKFDPDHYLADFFEDEAIEQILKYNPWWTDKYSKMMAFLEKSQEQENHATLVSFSEEEKYQLRKFVNKSYLLDKRACRQVCYSLIDILLAYCYETRVTEGEKNVESAWNIRKLSPTLCWFETWTNVHDIMVSFGRRVLCYPLYRHFKLVMKAYRDTIKILQLGKILLYLQIWEGKSCKFLVCEDIIMIFAFLLYINK

SEQ ID NO: 747990 - protein, 194 aa, Homo sapiens
MLTPAFDLSQDPDFLTIAIRVPYARVSEFDVYFEGSDFKFYAKPYFLRLTLPGRIVENGSEQGSYDADKGIFTIRLPKETPGQHFEGLNMLTALLAPRKSRTAKPLVEEIGASEIPEEVVDDEEFDWEIEQTPCEEVSESALNPQCHYGFGNLRSGVLQRLQDELSDVIDIKDPDFTPAAQRPGASVFVQLQST

SEQ ID NO: 747991 - protein, 257 aa, Homo sapiens
MVSFGRRVLCYPLYRHFKLVMKAYRDTIKILQLGKSAVLKCLLDIHKIFQENDPAYILNDLYISDYCVWIQKVKSKKLAALAEALKEVSLTKAQLGLELEELEAAALLVQEEETALKAAHSVSGQQTLCSSSEASDSEDSDSSVSSGNEDSGSDSEQDELKDSPSETVSSLQGPFLEESSAFLIADGGVRRNTAIQESDASQGKPLASSWPLGVSGPLIEELGEQLKTTVQVSEPKGTTAVNRSNIQERDGCQTPNN

SEQ ID NO: 747992 - protein, 116 aa, Homo sapiens
MLTPAFDLSQDPDFLTIAIRVPYARVSEFDVYFEGSDFKFYAKPYFLRRVRGAWPQERRIREIAALEGECKVERAVLDCANAFSRRFRSFSWCQGTALFQGCVLDAAEALFLLELS

SEQ ID NO: 747993 - protein, 894 aa, Homo sapiens
MESTLSASNMQDPSSSPLEKCLGSANGNGDLDSEEGSSLEETGFNWGEYLEETGASAAPHTSFKHVEISIQSNFQPGMKLEVANKNNPDTYWVATIITTCGQLLLLRYCGYGEDRRADFWCDVVIADLHPVGWCTQNNKVLMPPDAIKEKYTDWTEFLIRDLTGSRTAPANLLEGPLRGKGPIDLITVGSLIELQDSQNPFQYWIVSVIENVGGRLRLRYVGLEDTESYDQWLFYLDYRLRPVGWCQENKYRMDPPSEIYPLKMASEWKCTLEKSLIDAAKFPLPMEVFKDHADLRSHFFTVGMKLETVNMCEPFYISPASVTKVFNNHFFQVTIDDLRPEPSKLSMLCHADSLGILPVQWCLKNGVSLTPPKGYSGQDFDWADYHKQHGAQEAPPFCFRNTSFSRGFTKNMKLEAVNPRNPGELCVASVVSVKGRLMWLHLEGLQTPVPEVIVDVESMDIFPVGWCEANSYPLTAPHKTVSQKKRKIAVVQPEKQLPPTVPVKKIPHDLCLFPHLDTTGTVNGKYCCPQLFINHRCFSGPYLNKGRIAELPQSVGPGKCVLVLKEVLSMIINAAYKPGRVLRELQLVEDPHWNFQEETLKAKYRGKTYRAVVKIVRTSDQVANFCRRVCAKLECCPNLFSPVLISENCPENCSIHTKTKYTYYYGKRKKISKPPIGESNPDSGHPKPARRRKRRKSIFVQKKRRSSAVDFTAGSGEESEEEDADAMDDDTASEETGSELRDDQTDTSSAEVPSARPRRAVTLRSGSEPVRRPPPERTRRGRGAPAASSAEEGEKCPPTKPEGTEDTKQEEEERLVLESNPLEWTVTDVVRFIKLTDCAPLAKIFQEQDIDGQALLLLTLPTVQECMELKLGPAIKLCHQIERVKVAFYAQYAN

SEQ ID NO: 747994 - protein, 177 aa, Homo sapiens
MQDPSSSPLEKCLGSANGNGDLDSEEGSSLEETGFNWGEYLEETGASAAPHTSFKHVEISIQSNFQPGMKLEVANKNNPDTYWVATIITTCGQLLLLRYCGYGEDRRADFWCDVVIADLHPVGWCTQNNKVLMPPDAIKEKYTDWTEFLIRDLTGSRTAPANLLEGVCIVVIHLMYL

SEQ ID NO: 747995 - protein, 151 aa, Homo sapiens
RPLRNTAITSTTQQILSSRFRDRAPVFCPVCLLYIACSGQSLSSCSGTKYTHPFPKRRAQGLREGWEPSRPGHTMGSLFTLVITHPCRPHFARVRLLGPLRPSPAAPRSAATARPGALPVSLSLSLSSFPPPSPGAGKPGANQPSTAAHAQ

SEQ ID NO: 747996 - protein, 110 aa, Homo sapiens
RSFLFTCAPPLMCPTPVQGQHLPPITQARDTVGTMDFSLPLLPISKLSSHTAQIHSKWPIFYGPVTPHLVGVARTEFLGLWLRLRATHLSPLHCCWSQLPRTLMLSSHFP

SEQ ID NO: 747997 - protein, 159 aa, Homo sapiens
MADVPGAQRAVPGDGPEPRDPLDCWACAVLVTAQNLLVAAFNLLLLVLVLGTILLPAVTMLGFGFLCHSQFLRSQAPPCTAHLRDPGFTALLVTGFLLLVPLLVLALASYRRLCLRLRLADCLVPYSRALYRRRRAPQPRQIRASPGSQAVPTSGKVWV

SEQ ID NO: 747998 - protein, 126 aa, Homo sapiens
MADVPGAQRAVPGDGPEPRDPLDCWACAVLVTAQNLLVAAFNLLLLVLVLGTILLPAVTMLGFGFLCHSQDLKPGIFRPALPPPLPERSPSIPLGAAASVDPVLRKAPTSRKTHFPFTTHISILNI

SEQ ID NO: 747999 - protein, 629 aa, Homo sapiens
MAVPPGHGPFSGFPGPQEHTQVLPDVRLLPRRLPLAFRDATSAPLRKLSVDLIKTYKHINEVYYAKKKRRAQQAPPQDSSNKKEKKVLNHGYDDDNHDYIVRSGERWLERYEIDSLIGKGSFGQVVKAYDHQTQELVAIKIIKNKKAFLNQAQIELRLLELMNQHDTEMKYYIVHLKRHFMFRNHLCLVFELLSYNLYDLLRNTHFRGVSLNLTRKLAQQLCTALLFLATPELSIIHCDLKPENILLCNPKRSAIKIVDFGSSCQLGQRIYQYIQSRFYRSPEVLLGTPYDLAIDMWSLGCILVEMHTGEPLFSGSNEVDQMNRIVEVLGIPPAAMLDQAPKARKYFERLPGGGWTLRRTKELRKDYQGPGTRRLQEVLGVQTGGPGGRRAGEPGHSPADYLRFQDLVLRMLEYEPAARISPLGALQHGFFRRTADEATNTGPAGSSASTSPAPLDTCPSSSTASSISSSGGSSGSSSDNRTYRYSNRYCGGPGPPITDCEMNSPQVPPSQPLRPWAGGDVPHKTHQAPASASSLPGTGAQLPPQPRYLGRPPSPTSPPPPELMDVSLVGGPADCSPPHPAPAPQHPAASALRTRMTGGRPPLPPPDDPATLGPHLGLRGVPQSTAASS

SEQ ID NO: 748000 - protein, 629 aa, Homo sapiens; identical to SEQ ID NO: 747999

SEQ ID NO: 748001 - protein, 601 aa, Homo sapiens
MAVPPGHGPFSGFPGPQEHTQVLPDVRLLPRRLPLAFRDATSAPLRKLSVDLIKTYKHINEVYYAKKKRRAQQAPPQDSSNKKEKKVLNHGYDDDNHDYIVRSGERWLERYEIDSLIGKGSFGQVVKAYDHQTQELVAIKIIKNKKAFLNQAQIELRLLELMNQHDTEMKYYIVHLKRHFMFRNHLCLVFELLSYNLYDLLRNTHFRGVSLNLTRKLAQQLCTALLFLATPELSIIHCDLKPENILLCNPKRSAIKIVDFGSSCQLGQRIYQYIQSRFYRSPEVLLGTPYDLAIDMWSLGCILVEMHTGEPLFSGSNEVDQMNRIVEVLGIPPAAMLDQAPKARKYFERLPGGGWTLRRTKELRKDYQGPGTRRLQEDLVLRMLEYEPAARISPLGALQHGFFRRTADEATNTGPAGSSASTSPAPLDTCPSSSTASSISSSGGSSGSSSDNRTYRYSNRYCGGPGPPITDCEMNSPQVPPSQPLRPWAGGDVPHKTHQAPASASSLPGTGAQLPPQPRYLGRPPSPTSPPPPELMDVSLVGGPADCSPPHPAPAPQHPAASALRTRMTGGRPPLPPPDDPATLGPHLGLRGVPQSTAASS

SEQ ID NO: 748002 - protein, 688 aa, Homo sapiens
LAARPPHWGPHRAPAPRGPRASPDPGLSGGGSRGAGCKKAPPGRAPAPGLAPLRPSEPTMAVPPGHGPFSGFPGPQEHTQVLPDVRLLPRRLPLAFRDATSAPLRKLSVDLIKTYKHINEVYYAKKKRRAQQAPPQDSSNKKEKKVLNHGYDDDNHDYIVRSGERWLERYEIDSLIGKGSFGQVVKAYDHQTQELVAIKIIKNKKAFLNQAQIELRLLELMNQHDTEMKYYIVHLKRHFMFRNHLCLVFELLSYNLYDLLRNTHFRGVSLNLTRKLAQQLCTALLFLATPELSIIHCDLKPENILLCNPKRSAIKIVDFGSSCQLGQRIYQYIQSRFYRSPEVLLGTPYDLAIDMWSLGCILVEMHTGEPLFSGSNEVDQMNRIVEVLGIPPAAMLDQAPKARKYFERLPGGGWTLRRTKELRKDYQGPGTRRLQEVLGVQTGGPGGRRAGEPGHSPADYLRFQDLVLRMLEYEPAARISPLGALQHGFFRRTADEATNTGPAGSSASTSPAPLDTCPSSSTASSISSSGGSSGSSSDNRTYRYSNRYCGGPGPPITDCEMNSPQVPPSQPLRPWAGGDVPHKTHQAPASASSLPGTGAQLPPQPRYLGRPPSPTSPPPPELMDVSLVGGPADCSPPHPAPAPQHPAASALRTRMTGGRPPLPPPDDPATLGPHLGLRGVPQSTAASS

SEQ ID NO: 748003 - protein, 543 aa, Homo sapiens
SCEVCIVFLVGLLAWREKNGAWLCPAPTPFFVTCPAPKVVKAYDHQTQELVAIKIIKNKKAFLNQAQIELRLLELMNQHDTEMKYYIVHLKRHFMFRNHLCLVFELLSYNLYDLLRNTHFRGVSLNLTRKLAQQLCTALLFLATPELSIIHCDLKPENILLCNPKRSAIKIVDFGSSCQLGQRIYQYIQSRFYRSPEVLLGTPYDLAIDMWSLGCILVEMHTGEPLFSGSNEVDQMNRIVEVLGIPPAAMLDQAPKARKYFERLPGGGWTLRRTKELRKDYQGPGTRRLQEVLGVQTGGPGGRRAGEPGHSPADYLRFQDLVLRMLEYEPAARISPLGALQHGFFRRTADEATNTGPAGSSASTSPAPLDTCPSSSTASSISSSGGSSGSSSDNRTYRYSNRYCGGPGPPITDCEMNSPQVPPSQPLRPWAGGDVPHKTHQAPASASSLPGTGAQLPPQPRYLGRPPSPTSPPPPELMDVSLVGGPADCSPPHPAPAPQHPAASALRTRMTGGRPPLPPPDDPATLGPHLGLRGVPQSTAASS

SEQ ID NO: 748004 - protein, 589 aa, Homo sapiens
MAVPPGHGPFSGFPGPQEHTQVLPDVRLLPRRLPLAFRDATSAPLRKLSVDLIKTYKHINEVYYAKKKRRAQQAPPQDSSNKKEKKVLNHGYDDDNHDYIVRSGERWLERYEIDSLIGKGSFGQVVKAYDHQTQELVAIKIIKNKKAFLNQAQIELRLLELMNQHDTEMKYYIVHLKRHFMFRNHLCLVFELLSYNLYDLLRNTHFRGVSLNLTRKLAQQLCTALLFLATPELSIIHCDLKPENILLCNPKRSAIKIVDFGSSCQLGQRIYQYIQSRFYRSPEVLLGTPYDLAIDMWSLGCILVEMHTGEPLFSGSNEVDQMNRIVEVLGIPPAAMLDQAPKARKYFERLPGGGWTLRRTKELRKDLVLRMLEYEPAARISPLGALQHGFFRRTADEATNTGPAGSSASTSPAPLDTCPSSSTASSISSSGGSSGSSSDNRTYRYSNRYCGGPGPPITDCEMNSPQVPPSQPLRPWAGGDVPHKTHQAPASASSLPGTGAQLPPQPRYLGRPPSPTSPPPPELMDVSLVGGPADCSPPHPAPAPQHPAASALRTRMTGGRPPLPPPDDPATLGPHLGLRGVPQSTAASS

SEQ ID NO: 748005 - protein, 675 aa, Homo sapiens
AFRSQQAQEGLLGLSGGGSRGAGCKKAPPGRAPAPGLAPLRPSEPTMAVPPGHGPFSGFPGPQEHTQVLPDVRLLPRRLPLAFRDATSAPLRKLSVDLIKTYKHINEVYYAKKKRRAQQAPPQDSSNKKEKKVLNHGYDDDNHDYIVRSGERWLERYEIDSLIGKGSFGQVVKAYDHQTQELVAIKIIKNKKAFLNQAQIELRLLELMNQHDTEMKYYIVHLKRHFMFRNHLCLVFELLSYNLYDLLRNTHFRGVSLNLTRKLAQQLCTALLFLATPELSIIHCDLKPENILLCNPKRSAIKIVDFGSSCQLGQRIYQYIQSRFYRSPEVLLGTPYDLAIDMWSLGCILVEMHTGEPLFSGSNEVDQMNRIVEVLGIPPAAMLDQAPKARKYFERLPGGGWTLRRTKELRKDYQGPGTRRLQEVLGVQTGGPGGRRAGEPGHSPADYLRFQDLVLRMLEYEPAARISPLGALQHGFFRRTADEATNTGPAGSSASTSPAPLDTCPSSSTASSISSSGGSSGSSSDNRTYRYSNRYCGGPGPPITDCEMNSPQVPPSQPLRPWAGGDVPHKTHQAPASASSLPGTGAQLPPQPRYLGRPPSPTSPPPPELMDVSLVGGPADCSPPHPAPAPQHPAASALRTRMTGGRPPLPPPDDPATLGPHLGLRGVPQSTAASS

SEQ ID NO: 748006 - protein, 629 aa, Homo sapiens; identical to SEQ ID NO: 747999

SEQ ID NO: 748007 - protein, 1265 aa, Homo sapiens
MWRPNNNLSKEKTEWHVEKSSGKLQAAMASVIVRPSSSTKTDSMPAMQLASKDRVSERSSAGAHKTDCLKLAEAGETGRIILPNVNSDSVHTKSEKNFQAVSQGSVPSSVMSAVNTMCNTKTDVITSAADTTSVSSWGGSEVISSLSNTILASTSSECVSSKSVSQPVAQKQECKVSTTAPVTLASSKTGSVVQPSSGFSGTTDFIHLKKHKAALAAAQYKSSNASETEPNAIKNQTLSASLPLDSTVICSTINKANSVGNGQASQTSQPNYHTKLKKAWLTRHSEEDKNTNKMENSGNSVSEIIKPCSVNLIASTSSDIQNSVDSKIIVDKYVKDDKVNRRKAKRTYESGSESGDSDESESKSEQRTKRQPKPTYKKKQNDLQKRKGEIEEDLKPNGVLSRSAKERSKLKLQSNSNTGIPRSVLKDWRKVKKLKQTGESFLQDDSCCEIGPNLQKCRECRLIRSKKGEEPAHSPVFCRFYYFRRLSFSKNGVVRIDGFSSPDQYDDEAMSLWTHENFEDDELDIETSKYILDIIGDKFCQLVTSEKTALSWVKKDAKIAWKRAVRGVREMCDACEATLFNIHWVCQKCGFVVCLDCYKAKERKSSRDKELYAWMKCVKGQPHDHKHLMPTQIIPGSVLTDLLDAMHTLREKYGIKSHCHCTNKQNLQVGNFPTMNGVSQVLQNVLNHSNKISLCMPESQQQNTPPKSEKNGGSSPESDVGTDNKLTPPESQSPLHWLADLAEQKAREEKKENKELTLENQIKEEREQDNSESPNGRTSPLVSQNNEQGSTLRDLLTTTAGKLRVGSTDAGIAFAPVYSMGAPSSKSGRTMPNILDDIIASVVENKIPPSKTSKINVKPELKEEPEESIISAVENNKLYSDIPHSWICEKHILWLKDYKNSSNWKLFKECWKQGQPAVVSGVHKKMNISLWKAESISLDFGDHQADLLNCKDSIISNANVKEFWDGFEEVSKRQKNKSGETVVLKLKDWPSGEDFKTMMPARYEDLLKSLPLPEYCNPEGKFNLASHLPGFFVRPDLGPRLCSAYGVVAAKDHDIGTTNLHIEVSDVVNILVYVGIAKGNGILSKAGILKKFEEEDLDDILRKRLKDSSEIPGALWHIYAGKDVDKIREFLQKISKEQGLEVLPEHDPIRDQSWYVNKKLRQRLLEEYGVRTCTLIQFLGDAIVLPAGALHQVQNFHSCIQVTEDFVSPEHLVESFHLTQELRLLKEEINYDDKLQVKNILYHAVKEMVRALKIHEDEVEDMEEN

SEQ ID NO: 748008 - protein, 1236 aa, Homo sapiens
MWRPNNNLSKEKTEWHVEKSSGKLQAAMASVIVRPSSSTKTDSMPAMQLASKDRVSERSSAGAHKTDCLKLAEAGETGRIILPNVNSDSVHTKSEKNFQAVSQGSVPSSVMSAVNTMCNTKTDVITSAADTTSVSSWGGSEVISSLSNTILASTSSECVSSKSVSQPVAQKQECKVSTTAPVTLASSKTGSVVQPSSGFSGTTDFIHLKKHKAALAAAQYKSSNASETEPNAIKNQTLSASLPLDSTVICSTINKANSVGNGQASQTSQPNYHTKLKKAWLTRHSEEDKNTNKMENSGNSVSEIIKPCSVNLIASTSSDIQNSVDSKIIVDKYVKDDKVNRRKAKRTYESGSESGDSDESESKSEQRTKRQPKPTYKKKQNDLQKRKGEIEEDLKPNGVLSRSAKERSKLKLQSNSNTGIPRSVLKDWRKVKKLKQTGESFLQDDSCCEIGPNLQKCRECRLIRSKKGEEPAHSPVFCRFYYFRRLSFSKNGVVRIDGFSSPDQYDDEAMSLWTHENFEDDELDIETSKYILDIIGDKFCQLVTSEKTALSWVKKDAKIAWKRAVRGVREMCDACEATLFNIHWVCQKCGFVVCLDCYKAKERKSSRDKELYAWMKCVKGQPHDHKHLMPTQIIPGSVLTDLLDAMHTLREKYGIKSHCHCTNKQNLQVGNFPTMNGVSQVLQNVLNHSNKISLCMPESQQQNTPPKSEKNGGSSPESDVGTDNKLTPPESQSPLHWLADLAEQKAREEKKENKELTLENQIKEEREQDNSESPNGRTSPLVSQNNEQGSTLRDLLTTTAGKLRVGSTDAGIAFAPVYSMGAPSSKSGRTMPNILDDIIASVVENKIPPSKTSKINVKPELKEEPEESIISAVENNKLYSDIPHSWICEKHILWLKDYKNSSNWKLFKECWKQGQPAVVSGVHKKMNISLWKAESISLDFGDHQADLLNCKDSIISNANVKEFWDGFEEVSKRQKNKSGETVVLKLKDWPSGEDFKTMMPARYEDLLKSLPLPEYCNPEGKFNLASHLPGFFVRPDLGPRLCSAYGVVAAKDHDIGTTNLHIEVSDVVNILVYVGIAKGNGILSKAGILKKFEEEDLDDILRKRLKDSSEIPGALWHIYAGKDVDKIREFLQKISKEQGLEVLPEHDPIRDQSWYVNKKLRQRLLEEYGVRTCTLIQFLGDAIVLPAGALHQVQNFHSCIQVTEDFVSPEHLVESFHLTQELRLLKEEINYDDKLQ

SEQ ID NO: 748009 - protein, 288 aa, Homo sapiens
MKPSGEDQAALAAGPWEECFQAAVQLALRAGQIIRKALTEEKRVSTKTSAADLVTETDHLVEDLIISELRERFPSHRFIAEEAAASGAKCVLTHSPTWIIDPIDGTCNFVHRFPTVAVSIGFAVRQELEFGVIYHCTEERLYTGRRGRGAFCNGQRLRVSGETDLSKALVLTEIGPKRDPATLKLFLSNMERLLHAKAHGVRVIGSSTLALCHLASGAADAYYQFGLHCWDLAAATVIIREAGGIVIDTSGGPLDLMACRVVAASTREMAMLIAQALQTINYGRDDEK

SEQ ID NO: 748010 - protein, 342 aa, Homo sapiens
MKPSGEDQAALAAGPWEECFQAAVQLALRAGQIIRKALTEEKRVSTKTSAADLVTETDHLVEDLIISELRERFPSHRFIAEEAAASGAKCVLTHSPTWIIDPIDGTCNFVHRFPTVAVSIGFAVRQELEFGVIYHCTEERLYTGRRGRGAFCNGQRLRVSGETEMESHHLAQAGLELMASDLFKGPWVLDRQLVGQKRGPVQTLEGCSMSDIGAGCCIAKASSGVRVDWKLPFGLLASLAQGARCILFTRCAELLESGGCPESSIRKKRADSVIKTFGCCPLDHGASTVVWDTPRKRESHKESVTRTLGGGGKYVCHESHTPRELTHKCHVLHNYASARTII

SEQ ID NO: 748011 - protein, 263 aa, Homo sapiens
EAERAGQIIRKALTEEKRVSTKTSAADLVTETDHLVEDLIISELRERFPSHRFIAEEAAASGAKCVLTHSPTWIIDPIDGTCNFVHRFPTVAVSIGFAVRQELEFGVIYHCTEERLYTGRRGRGAFCNGQRLRVSGETDLSKALVLTEIGPKRDPATLKLFLSNMERLLHAKAHGVRVIGSSTLALCHLASGAADAYYQFGLHCWDLAAATVIIREAGGIVIDTSGGPLDLMACRVVAASTREMAMLIAQALQTINYGRDDEK

SEQ ID NO: 748012 - protein, 264 aa, Homo sapiens
MDIVDQLPIIRKALTEEKRVSTKTSAADLVTETDHLVEDLIISELRERFPSHRFIAEEAAASGAKCVLTHSPTWIIDPIDGTCNFVHRFPTVAVSIGFAVRQELEFGVIYHCTEERLYTGRRGRGAFCNGQRLRVSGETDLSKALVLTEIGPKRDPATLKLFLSNMERLLHAKAHGVRVIGSSTLALCHLASGAADAYYQFGLHCWDLAAATVIIREAGGIVIDTSGGPLDLMACRVVAASTREMAMLIAQALQTINYGRDDEK

SEQ ID NO: 748013 - protein, 257 aa, Homo sapiens
MIIRKALTEEKRVSTKTSAADLVTETDHLVEDLIISELRERFPSHRFIAEEAAASGAKCVLTHSPTWIIDPIDGTCNFVHRFPTVAVSIGFAVRQELEFGVIYHCTEERLYTGRRGRGAFCNGQRLRVSGETDLSKALVLTEIGPKRDPATLKLFLSNMERLLHAKAHGVRVIGSSTLALCHLASGAADAYYQFGLHCWDLAAATVIIREAGGIVIDTSGGPLDLMACRVVAASTREMAMLIAQALQTINYGRDDEK

SEQ ID NO: 748014 - protein, 116 aa, Homo sapiens
MKPSGEDQAALAAGPWEECFQAAVQLALRAGQIIRKALTEEKRVSTKTSAADLVTETDHLVEDLIISELRERFPSHRFIAEEAAASGAKCVLTHSPTWIIDPIDGTCNFVHSLNSE

SEQ ID NO: 748015 - protein, 163 aa, Homo sapiens
QHLRCSVARSAGSCHGTRHLRLAEAVWLVAPGPIFSLQSFGRSAVLHFSLGKMPSRGTSLKSACTPQKRLHSRLHLSSLPSPQGPSDWKLHIGTLPPGLRGRGCLLPVWPALLGSGGCHSHHQRSRRHRDRHFGWTPRPHGLQSGCGQHPGDGDAHSSGLTDD

SEQ ID NO: 748016 - protein, 93 aa, Homo sapiens
LEDPSGLYQGSSTLALCHLASGAADAYYQFGLHCWDLAAATVIIREAGGIVIDTSGGPLDLMACRVVAASTREMAMLIAQALQTINYGRDDEK

SEQ ID NO: 748017 - protein, 134 aa, Homo sapiens
RSSLFFDPENAFGRCKQRPAPQGPACRRFIAEEAAASGAKCVLTHSPTWIIDPIDGTCNFVHSGVAVARSVGRLLGAEAAGVRVIGRSTIGDSGELAVRGRGAAYVATFCGLWAAVGSGLAAGKSVYSCRRHGG

SEQ ID NO: 748018 - protein, 356 aa, Homo sapiens
SVFGLGVCDYVHMMLAWMHVHMGCCLTPWLAVDCAVDPGGEPGSPCRLCGGLECWTWCPVLIGRRVESQSWLSDHAAALAAGPWEECFQAAVQLALRAGQIIRKALTEEKRVSTKTSAADLVTETDHLVEDLIISELRERFPSHRFIAEEAAASGAKCVLTHSPTWIIDPIDGTCNFVHRFPTVAVSIGFAVRQELEFGVIYHCTEERLYTGRRGRGAFCNGQRLRVSGETDLSKALVLTEIGPKRDPATLKLFLSNMERLLHAKAHGVRVIGSSTLALCHLASGAADAYYQFGLHCWDLAAATVIIREAGGIVIDTSGGPLDLMACRVVAASTREMAMLIAQALQTINYGRDDEK

SEQ ID NO: 748019 - protein, 288 aa, Homo sapiens; identical to SEQ ID NO: 748009

SEQ ID NO: 748020 - protein, 288 aa, Homo sapiens; identical to SEQ ID NO: 748009

SEQ ID NO: 748021 - protein, 301 aa, Homo sapiens
MKPSGEDQAALAAGPWEECFQAAVQLALRAGQIIRKALTEEKRVSTKTSAADLVTETDHLVEDLIISELRERFPSHRFIAEEAAASGAKCVLTHSPTWIIDPIDGTCNFVHRFPTVAVSIGFAVRQELEFGVIYHCTEERLYTGRRGRGAFCNGQRLRVSGETDLSKALVLTEIGPKRDPATLKLFLSNMERLLHAKAHGVRVIGSSTLALCHLASGAADAYYQFGLHCWDLAAATVIIREAGGIVIDTSGGPLDLMACRVVAASTREMAMLIAQALQTINYGLLNRRLSHQDLVFSCFSL

SEQ ID NO: 748022 - protein, 128 aa, Homo sapiens
GDEGDSAQLWAAAVSQAVQTQWSCLWKSRTNLLGHKASSILPGCPSSQQPHEEGALPILWTRRQTQLGQVACPGSHRSAVEDPGPLASVFGSSCLLQAVLPVSRHMAWQSGRTSAWGLDWRKEWLPLP

SEQ ID NO: 748023 - protein, 484 aa, Homo sapiens
AGVRGAARGVQVAAVARVLAGAGGTGGDRRGLPQGRRSPLGPRARLTAPPAPAPPRPAPGARGPPALGTRRPPGIGAERSVPAPVPPPPPSGRPPGLAAAAASGPRVPAAGGAGGVGGCRAPPPVRLESTSRARRPASMEEKYLPELMAEKDSLDPSFTHALRLVNQEIEKFQKGEGKDEEKYIDVVINKNMKLGQKVLIPVKQFPKFNFVGKLLGPRGNSLKRLQEETLTKMSILGKGSMRDKAKEEELRKSGEAKYFHLNDDLHVLIEVFAPPAEAYARMGHALEEIKKFLIPDYNDEIRQAQLQELTYLNGGSENADVPVVRGKPTLRTRGVPAPAITRGRGGVTARPVGVVVPRGTPTPRGVLSTRGPVSRGRGLLTPRARGVPPTGYRPPPPPPTQETYGEYDYDDGYGTAYDEQSYDSYDNSYSTPAQSGADYYDYGHGLSEETYDSYGQEEWTNSRHKAPSARTAKGVYRDQPYGRY

SEQ ID NO: 748024 - protein, 409 aa, Homo sapiens
AGVRGAARGVQVAAVARVLAGAGGTGGDRRGLPQGRRSPLGPRARLTAPPAPAPPRPAPGARGPPALGTRRPPGIGAERSVPAPVPPPPPSGRPPGLAAAAASGPRVPAAGGAGGVGGCRAPPPVRLESTSRARRPASMEEKYLPELMAEKDSLDPSFTHALRLVNQEIEKFQKGEGKDEEKYIDVVINKNMKLGQKVLIPVKQFPKFNFVGKLLGPRGNSLKRLQEETLTKMSILGKGSMRDKAKEEELRKSGEAKYFHLNDDLHVLIEVFAPPAEAYARMGHALEEIKKFLIPDYNDEIRQAQLQELTYLNGGSENADVPVVRGKPTLRTRGVPAPAITRGRGGVTARPVGVVVPRGTPTPRGVLSTRGPVSRGRGLLTPRARGVPPTGYRPPPPPPTQETYGEYWC

SEQ ID NO: 748025 - protein, 357 aa, Homo sapiens
SSEEGWRLLKIDKEYLAKNGHRGGGGSSSSSFTHALRLVNKIEKFQKGEGKDEEKYIDVVINKNMKLGQKVLIPVKQFPKFNFVGKLLGPRGNSLKRLQEETLTKMSILGKGSMRDKAKEEELRKSGEAKYFHLNDDLHVLIEVFAPPAEAYARMGHALEEIKKFLIPDYNDEIRQAQLQELTYLNGGSENADVPVVRGKPTLRTRGVPAPAITRGRGGVTARPVGVVVPRGTPTPRGVLSTRGPVSRGRGLLTPRARGVPPTGYRPPPPPPTQETYGEYDYDDGYGTAYDEQSYDSYDNSYSTPAQSGADYYDYGHGLSEETYDSYGQEEWTNSRHKAPSARTAKGVYRDQPYGRY

SEQ ID NO: 748026 - protein, 318 aa, Homo sapiens
MEIEKFQKGEGKDEEKYIDVVINKNMKLGQKVLIPVKQFPKFNFVGKLLGPRGNSLKRLQEETLTKMSILGKGSMRDKAKEEELRKSGEAKYFHLNDDLHVLIEVFAPPAEAYARMGHALEEIKKFLIPDYNDEIRQAQLQELTYLNGGSENADVPVVRGKPTLRTRGVPAPAITRGRGGVTARPVGVVVPRGTPTPRGVLSTRGPVSRGRGLLTPRARGVPPTGYRPPPPPPTQETYGEYDYDDGYGTAYDEQSYDSYDNSYSTPAQSGADYYDYGHGLSEETYDSYGQEEWTNSRHKAPSARTAKGVYRDQPYGRY

SEQ ID NO: 748027 - protein, 341 aa, Homo sapiens
AGVRGAARGVQVAAVARVLAGAGGTGGDRRGLPQGRRSPLGPRARLTAPPAPAPPPVRLESTSRARRPASMEEKYLPELMAEKDSLDPSFTHALRLVNQEIEKFQKGEGKDEEKYIDVVINKNMKLGQKVLIPVKQFPKFNFVGKLLGPRGNSLKRLQEETLTKMSILGKGSMRDKAKEEELRKSGEAKYFHLNDDLHVLIEVFAPPAEAYARMGHALEEIKKFLIPDYNDEIRQAQLQELTYLNGGSENADVPVVRGKPTLRTRGVPAPAITRGRGGVTARPVGVVVPRGTPTPRGVLSTRGPVSRGRGLLTPRARGVPPTGYRPPPPPPTQETYGEYWC

SEQ ID NO: 748028 - protein, 100 aa, Homo sapiens
TETLPHGHTVTWTHWHIHMDGHTDIRRNPHGHTTTLSQGHTDTRRHHMDTPPHYHRDTQTHKRHHYTVTWTHHHRNTQTHCHMDTATHRHTATLSHGHTS

SEQ ID NO: 748029 - protein, 78 aa, Homo sapiens
MRTDSSKMTDVESGVANFASSARAGRRNALPDIQSSAATDGTSDLPLKLEALSVKEDAKEKDEKTTQDQLEKPQNEEK

SEQ ID NO: 748030 - protein, 137 aa, Homo sapiens
KKATVARAPGSDAVARFARRAGHRLGSRARSLGAGRGGRSLRPRVAATAWLRPSPELRRGRIPVDCRGGSELEPESQLRAAERWASASARAPAGQAAARGWSHAILKRHFIKITLGEAENPVPGTGKIGERKFIRIF

SEQ ID NO: 748031 - protein, 128 aa, Homo sapiens
MDLHLDALRSHESASNSSSGSSSRGDQKGHYLCMNNNGNQDTMLGSPDVAMRTDSSKMTDVESGVANFASSARAGRRNALPDIQSSAATDGTSDLPLKLEALSVKEDAKEKDEKTTQDQLEKPQNEEK

SEQ ID NO: 748032 - protein, 137 aa, Homo sapiens; identical to SEQ ID NO: 748030

SEQ ID NO: 748033 - protein, 132 aa, Homo sapiens
KKATVARAPGSDAVARFARRAGHRLGSRARSLGAGRGGRSLRPRVAATAWLRPSPELRRGRIPVDCRGGSELEPESQLRAAERWASASARAPAGQAAARGWSHAILKRHFIKITLGEAENPVPGTGKIGMLL

SEQ ID NO: 748034 - protein, 487 aa, Homo sapiens
MLKREGKVQPYTKTLDGGWGWMIVIHFFLVNVFVMGMTKTFAIFFVVFQEEFEGTSEQIGWIGSIMSSLRFCAGPLVAIICDILGEKTTSILGAFVVTGGYLISSWATSIPFLCVTMGLLPGLGSAFLYQVAAVVTTKYFKKRLALSTAIARSGMGLTFLLAPFTKFLIDLYDWTGALILFGAIALNLVPSSMLLRPIHIKSENNSGIKDKGSSLSAHGPEAHATETHCHETEESTIKDSTTQKAGLPSKNLTVSQNQSEEFYNGPNRNRLLLKSDEESDKVISWSCKQLFDISLFRNPFFYIFTWSFLLSQLAYFIPTFHLVARAKTLGIDIMDASYLVSVAGILETVSQIISGWVADQNWIKKYHYHKSYLILCGITNLLAPLATTFPLLMTYTICFAIFAGGYLALILPVLVDLCRNSTVNRFLGLASFFAGMAVLSGPPIAGWLYDYTQTYNGSFYFSGICYLLSSVSFFFVPLAERWKNSLT

SEQ ID NO: 748035 - protein, 425 aa, Homo sapiens
MGMDDCDSFFPGPLVAIICDILGEKTTSILGAFVVTGGYLISSWATSIPFLCVTMGLLPGLGSAFLYQVAAVVTTKYFKKRLALSTAIARSGMGLTFLLAPFTKFLIDLYDWTGALILFGAIALNLVPSSMLLRPIHIKSENNSGIKDKGSSLSAHGPEAHATETHCHETEESTIKDSTTQKAGLPSKNLTVSQNQSEEFYNGPNRNRLLLKSDEESDKVISWSCKQLFDISLFRNPFFYIFTWSFLLSQLAYFIPTFHLVARAKTLGIDIMDASYLVSVAGILETVSQIISGWVADQNWIKKYHYHKSYLILCGITNLLAPLATTFPLLMTYTICFAIFAGGYLALILPVLVDLCRNSTVNRFLGLASFFAGMAVLSGPPIAGWLYDYTQTYNGSFYFSGICYLLSSVSFFFVPLAERWKNSLT

SEQ ID NO: 748036 - protein, 377 aa, Homo sapiens
MGMDDCDSFFPGLGSAFLYQVAAVVTTKYFKKRLALSTAIARSGMGLTFLLAPFTKFLIDLYDWTGALILFGAIALNLVPSSMLLRPIHIKSENNSGIKDKGSSLSAHGPEAHATETHCHETEESTIKDSTTQKAGLPSKNLTVSQNQSEEFYNGPNRNRLLLKSDEESDKVISWSCKQLFDISLFRNPFFYIFTWSFLLSQLAYFIPTFHLVARAKTLGIDIMDASYLVSVAGILETVSQIISGWVADQNWIKKYHYHKSYLILCGITNLLAPLATTFPLLMTYTICFAIFAGGYLALILPVLVDLCRNSTVNRFLGLASFFAGMAVLSGPPIAGWLYDYTQTYNGSFYFSGICYLLSSVSFFFVPLAERWKNSLT

SEQ ID NO: 748037 - protein, 345 aa, Homo sapiens
EDPSGEQSLWIWMGLTFLLAPFTKFLIDLYDWTGALILFGAIALNLVPSSMLLRPIHIKSENNSGIKDKGSSLSAHGPEAHATETHCHETEESTIKDSTTQKAGLPSKNLTVSQNQSEEFYNGPNRNRLLLKSDEESDKVISWSCKQLFDISLFRNPFFYIFTWSFLLSQLAYFIPTFHLVARAKTLGIDIMDASYLVSVAGILETVSQIISGWVADQNWIKKYHYHKSYLILCGITNLLAPLATTFPLLMTYTICFAIFAGGYLALILPVLVDLCRNSTVNRFLGLASFFAGMAVLSGPPIAGWLYDYTQTYNGSFYFSGICYLLSSVSFFFVPLAERWKNSLT

SEQ ID NO: 748038 - protein, 257 aa, Homo sapiens
MGMDDCDSFFPGPLVAIICDILGEKTTSILGAFVVTGGYLISSWATSIPFLCVTMGLLPGLGSAFLYQVAAVVTTKYFKKRLALSTAIARSGMGLTFLLAPFTKFLIDLYDWTGILETVSQIISGWVADQNWIKKYHYHKSYLILCGITNLLAPLATTFPLLMTYTICFAIFAGGYLALILPVLVDLCRNSTVNRFLGLASFFAGMAVLSGPPIAGWLYDYTQTYNGSFYFSGICYLLSSVSFFFVPLAERWKNSLT

SEQ ID NO: 748039 - protein, 452 aa, Homo sapiens
MLKREGKVQPYTKTLDGGWGWMIVIHFFLVNVFVMGMTKTFAIFFVVFQEEFEGTSEQIGWIGSIMSSLRFCAGPLVAIICDILGEKTTSILGAFVVTGGYLISSWATSIPFLCVTMGLLPGLGSAFLYQVAAVVTTKYFKKRLALSTAIARSGMGLTFLLAPFTKFLIDLYDWTGALILFGAIALNLVPSSMLLRPIHIKSENNSGIKDKGSSLSAHGPEAHATETHCHETEESTIKDSTTQKAGLPSKNLTVSQNQSEEFYNGPNRNRLLLKSDEESDKVISWSCKQLFDISLFRNPFFYIFTWSFLLSQLAYFIPTFHLVARAKTLGIDIMDASYLVSVAGILETVSQIISGWVADQNWIKKYHYHKSYLILCGITNLLAPLATTFPLLMTYTICFAIFAGGYLALILPVLVDLCRNSTVNRFLGLASFFAGMAVLSGPPIAGNTFTTF

SEQ ID NO: 748040 - protein, 170 aa, Homo sapiens
MLKREGKVQPYTKTLDGGWGWMIVIHFFLVNVFVMGMTKTFAIFFVVFQEEFEGTSEQIGWIGSIMSSLRFCAGPLVAIICDILGEKTTSILGAFVVTGGYLISSWATSIPFLCVTMGLLPGLGSAFLYQVAAVVTTKYFKKRLALSTAIARSGMGLTFLLAPFTKFLTS

SEQ ID NO: 748041 - protein, 179 aa, Homo sapiens
MLKREGKVQPYTKTLDGGWGWMIVIHFFLVNVFVMGMTKTFAIFFVVFQEEFEGTSEQIGWIGSIMSSLRFCAGPLVAIICDILGEKTTSILGAFVVTGGYLISSWATSIPFLCVTMGLLPGLGSAFLYQVAAVVTTKYFKKRLALSTAIARSGMGLTFLLAPFTKFLIDLYDWTGTSF

SEQ ID NO: 748042 - protein, 110 aa, Homo sapiens
WSFLLSQLAYFIPTFHLVARAKTLGIDIMDASYLVSVAGKKAYISLLPKRKDQLNFTSLLHFNKKLKKNKRGIVEGPEKVKFLRLDGAPGHFPGRDLCHCTQAPLLDSGP

SEQ ID NO: 748043 - protein, 228 aa, Homo sapiens
CQPSTRSTLQAKAQKFLEVVYQNLLCETLLNWLHQGEISSPRRVLLIVSSRKHLQRLAFQAKVSSMMLPLQGAQMLQMLEKSLRKSLPASLKVYGTVFHINHGNPFNLKAVVDKWPDFNTVVVCPQEQDMTDDLDHYTNTYQIYSKDPQNCQEFLGSPELINWKQHLQIQSSQPSLNEAIQNLAAIKSFKVKQTQRILYMAAETAKELTPFLLKSKILSPSGGKPKAM

SEQ ID NO: 748044 - protein, 361 aa, Homo sapiens
CQPSTRSTLQAKAQKFLEVVYQNLLCETLLNWLHQGEISSPRRVLLIVSSRKHLQRLAFQAKVSSMMLPLQGAQMLQMLEKSLRKSLPASLKVYGTVFHINHGNPFNLKAVVDKWPDFNTVVVCPQEQDMTDDLDHYTNTYQIYSKDPQNCQEFLGSPELINWKQHLQIQSSQPSLNEAIQNLAAIKSFKVKQTQRILYMAAETAKELTPFLLKSKILSPSGGKPKAINQEMFKLSSMDVTHAHLVNKFWHFGGNERSQRFIERCIQTFPTCCLLGPEGTPVCWDLMDQTGEMRMAGTLPEYRLHGLVTYVIYSHAQKLGKLGFPVYSHVDYSNEAMQKMSYTLQHVPIPRSWNQWNCVPL

SEQ ID NO: 748045 - protein, 295 aa, Homo sapiens
MLPLQGAQMLQMLEKSLRKSLPASLKVYGTVFHINHGNPFNLKAVVDKWPDFNTVVVCPQEQDMTDDLDHYTNTYQIYSKDPQNCQEFLGSPELINWKQHLQIQSSQPSLNEAIQNLAAIKSFKVKQTQRILYMAAETAKELTPFLLKSKILSPSGGKPKAINQEMFKLSSMDVTHAHLVNKFWHFGGNERSQRFIERCIQTFPTCCLLGPEGTPVCWDLMDQTGEMRMAGTLPEYRLHGLVTYVIYSHAQKLGKLGFPVYSHVDYSNEAMQKMSYTLQHVPIPRSWNQWNCVPL

SEQ ID NO: 748046 - protein, 243 aa, Homo sapiens
CQPSTRSTLQAKAQKFLEVVYQNLLCETLLNWLHQGEISSPRRVLLIVSSRKHLQRLAFQAKVSSMMLPLQGAQMLQMLEKSLRKSLPASLKVYGTVFHINHGNPFNLKAVVDKWPDFNTVVVCPQEQDMTDDLDHYTNTYQIYSKDPQNCQEFLGSPELINWKQHLQIQSSQPSLNEAIQNLAAIKSFKVKQTQRILYMAAETAKELTPFLLKSKILSPSGGKPKAIGSLVKNPSFFPIPTL

SEQ ID NO: 748047 - protein, 160 aa, Homo sapiens
CQPSTRSTLQAKAQKFLEVVYQNLLCETLLNWLHQGEISSPRRVLLIVSSRKHLQRLAFQAKVSSMMLPLQGAQMLQMLEKSLRKSLPASLKVYGTVFHINHGNPFNLKAVVDKWPDFNTVVVCPQEQDMTDDLDHYTNTYQIYSKDPLQIQSSQPSLNE

SEQ ID NO: 748048 - protein, 122 aa, Homo sapiens
CQPSTRSTLQAKAQKFLEVVYQNLLCETLLNWLHQGEISSPRRVLLIVSSRKHLQRLAFQAKVSSMMLPLQGAQMLQMLEKSLRKSLPASLKVIMENSERSKEDKLDVKEEGKGLIFMMHLF

SEQ ID NO: 748049 - protein, 70 aa, Homo sapiens
CQPSTRSTLQAKAQKFLEVVYQNLLCETLLNWLHQGEISSPRRVLLIVSSRKHLQRLAFQVRTHYKVSDT

SEQ ID NO: 748050 - protein, 228 aa, Homo sapiens; identical to SEQ ID NO: 748043

SEQ ID NO: 748051 - protein, 343 aa, Homo sapiens
CQPSTRSTLQAKAQKFLEVVYQNLLCETLLNWLHQGEISSPRRVLLIVSSRKHLQRLAFQAKVSSMMLPLQGAQMLQMLEKSLRKSLPASLKVYGTVFHINHGNPFNLKAVVDKWPDFNTVVVCPQEQDMTDDLDHYTNTYQIYSKDPQNCQEFLGSPELINWKQHLQIQSSQPSLNEAIHMAAETAKELTPFLLKSKILSPSGGKPKAINQEMFKLSSMDVTHAHLVNKFWHFGGNERSQRFIERCIQTFPTCCLLGPEGTPVCWDLMDQTGEMRMAGTLPEYRLHGLVTYVIYSHAQKLGKLGFPVYSHVDYSNEAMQKMSYTLQHVPIPRSWNQWNCVPL

SEQ ID NO: 748052 - protein, 319 aa, Homo sapiens
MPFPNCSAPSTVVATAVGVLLGLECGLGLLGNAVALWTFLFRVRVWKPYAVYLLNLALADLLLAACLPFLAAFYLSLQAWHLGRVGCWALHFLLDLSRSVGMAFLAAVALDRYLRVVHPRLKVNLLSPQAALGVSGLVWLLMVALTCPGLLISEAAQNSTRCHSFYSRADGSFSIIWQEALSCLQFVLPFGLIVFCNAGIIRALQKRLREPEKQPKLQRAQALVTLVVVLFALCFLPCFLARVLMHIFQNLGSCRALCAVAHTSDVTGSLTYLHSVLNPVVYCFSSPTFRSSYRRVFHTLRGKGQAAEPPDFNPRDSYS

SEQ ID NO: 748053 - protein, 973 aa, Homo sapiens
MAQLYYKKVNYSPYRDRIPLQIVRAETELSAEEKAFLNAVEKGDYATVKQALQEAEIYYNVNINCMDPLGRSALLIAIENENLEIMELLLNHSVYVGDALLYAIRKEVVGAVELLLSYRRPSGEKQVPTLMMDTQFSEFTPDITPIMLAAHTNNYEIIKLLVQKRVTIPRPHQIRCNCVECVSSSEVDSLRHSRSRLNIYKALASPSLIALSSEDPILTAFRLGWELKELSKVENEFKAEYEELSQQCKLFAKDLLDQARSSRELEIILNHRDDHSEELDPQKYHDLAKLKVAIKYHQKEFVAQPNCQQLLATLWYDGFPGWRRKHWVVKLLTCMTIGFLFPMLSIAYLISPRSNLGLFIKKPFIKFICHTASYLTFLFMLLLASQHIVRTDLHVQGPPPTVVEWMILPWVLGFIWGEIKEMWDGGFTEYIHDWWNLMDFAMNSLYLATISLKIVAYVKYNGSRPREEWEMWHPTLIAEALFAISNILSSLRLISLFTANSHLGPLQISLGRMLLDILKFLFIYCLVLLAFANGLNQLYFYYETRAIDEPNNCKGIRCEKQNNAFSTLFETLQSLFWSVFGLLNLYVTNVKARHEFTEFVGATMFGTYNVISLVVLLNMLIAMMNNSYQLIADHADIEWKFARTKLWMSYFDEGGTLPPPFNIIPSPKSFLYLGNWFNNTFCPKRDPDGRRRRRNLRSFTERNADSLIQNQHYQEVIRNLVKRYVAAMIRNSKTHEGLTEENFKELKQDISSFRYEVLDLLGNRKHPRSFSTSSTELSQRDDNNDGSGGARAKSKSVSFNLGCKKKTCHGPPLIRTMPRSSGAQGKSKAESSSKRSFMGPSLKKLGLLFSKFNGHMSEPSSEPMYTISDGIVQQHCMWQDIRYSQMEKGKAEACSQSEINLSEVELGEVQGAAQSSECPLACSSSLHCASSICSSNSKLLDSSEDVFETWGEACDLLMHKWGDGQEEQVTTRL

SEQ ID NO: 748054 - protein, 320 aa, Homo sapiens
LGVAVMLGLNHTSMSEFILVGFSAFPHLQLMLFLLFLLMYLFTLLGNLLIMATVWSERSLHTPMYLFLCVLSVSEILYTVAIIPRMLADLLSTQRSIAFLACASQMFFSFSFGFTHSFLLTVMGYDRYVAICHPLRYNVLMSPRGCACLVGCSWAGGSVMGMVVTSAIFQLTFCGSHEIQHFLCHVPPLLKLACGNNVPAVALGVGLVCIMALLGCFLLILLSYAFIVADILKIPSAEGRNKAFSTCASHLIVVIVHYGFASVIYLKPKGPHSQEGDTLMATTYAVLTPFLSPIIFSLRNKELKVAMKRTFLSTLYSSGT

SEQ ID NO: 748055 - protein, 442 aa, Homo sapiens
GPLRAAPEEVPGPGGAVRPSWSCGSRTVRGVEGRGRARCQPRCSRPGSMALVTVSRSPPGSGASTPVGPWDQAVQRRSRLQRRQSFAVLRGAVLGLQDGGDNDDAAEASSEPTEKAPSEEELHGDQTDFGQGSQSPQKQEEQRQHLHLMVQLLRPQDDIRLAAQLEAPRPPRLRYLLVVSTREGEGLSQDETVLLGVDFPDSSSPSCTLGLVLPLWSDTQVYLDGDGGFSVTSGGQSRIFKPISIQTMWATLQVLHQACEAALGSGLVPGGSALTWASHYQERLNSEQSCLNEWTAMADLESLRPPSAEPGGSSEQEQMEQAIRAELWKVLDLESTSETSDMPEVFSSHESSHEEPLQPFPQLARTKGGQQVDRGPQPALKSRQSVVTLQGSAVVANRTQAFQEQEQGQGQGQGEPCISSTPRFRKVVRQASVHDSGEEGEA

SEQ ID NO: 748056 - protein, 392 aa, Homo sapiens
GPLRAAPEEVPGPGGAVRPSWSCGSRTVRGVEGRGRARCQPRCSRPGSMALVTVSRSPPGSGASTPVGPWDQAVQRRSRLQRRQSFAVLRGAVLGLQDGGDNDDAAEASSEPTAPSFILNSSPAHSPMAREIDNFYPERFTYHNVRLWDEESAQLLPHWKETHRFIEAARAQGTHVLVHCKMGVSRSAATVLAYAMKQYECSLEQALRHVQELRPIARPNPGFLRQLQIYQGILTASEGGGEEKVVGMEESQAAPKEEPGPRPRINLRGVMRSISLLEPSLELESTSETSDMPEVFSSHESSHEEPLQPFPQLARTKGGQQVDRGPQPALKSRQSVVTLQGSAVVANRTQAFQEQEQGQGQGQGEPCISSTPRFRKVVRQASVHDSGEEGEA

SEQ ID NO: 748057 - protein, 91 aa, Homo sapiens
ASPNSRIPERGEGTALPALTLPWGCSLGRTRRSSEGVDSSEGRALRCSVGLSWDVFAAVPRPPVTPRQITGHQARDSLLFVLSGLWLVSFS

SEQ ID NO: 748058 - protein, 707 aa, Homo sapiens
GPLRAAPEEVPGPGGAVRPSWSCGSRTVRGVEGRGRARCQPRCSRPGSMALVTVSRSPPGSGASTPVGPWDQAVQRRSRLQRRQSFAVLRGAVLGLQDGGDNDDAAEASSEPTEKAPSEEELHGDQTDFGQGSQSPQKQEEQRQHLHLMVQLLRPQDDIRLAAQLEAPRPPRLRYLLVVSTREGEGLSQDETVLLGVDFPDSSSPSCTLGLVLPLWSDTQVYLDGDGGFSVTSGGQSRIFKPISIQTMWATLQVLHQACEAALGSGLVPGGSALTWASHYQERLNSEQSCLNEWTAMADLESLRPPSAEPGGSSEQEQMEQAIRAELWKVLDVSDLESVTSKEIRQALELRLGLPLQQYRDFIDNQMLLLVAQRDRASRIFPHLYLGSEWNAANLEELQRNRVTHILNMAREIDNFYPERFTYHNVRLWDEESAQLLPHWKETHRFIEAARAQGTHVLVHCKMGVSRSAATVLAYAMKQYECSLEQALRHVQELRPIARPNPGFLRQLQIYQGILTASRQSHVWEQKVGGVSPEEHPAPEVSTPFPPLPPEPEGGGEEKVVGMEESQAAPKEEPGPRPRINLRGVMRSISLLEPSLELESTSETSDMPEVFSSHESSHEEPLQPFPQLARTKGGQQVDRGPQPALKSRQSVVTLQGSAVVANRTQAFQEQEQGQGQGQGEPCISSTPRFRKVVRQASVHDSGEEGEA

SEQ ID NO: 748059 - protein, 666 aa, Homo sapiens
ASPNSRIPERGGGDSPPRPHPALGLLSRQDQAVQRRSRLQRRQSFAVLRGAVLGLQDGGDNDDAAEASSEPTEKAPSEEELHGDQTDFGQGSQSPQKQEEQRQHLHLMVQLLRPQDDIRLAAQLEAPRPPRLRYLLVVSTREGEGLSQDETVLLGVDFPDSSSPSCTLGLVLPLWSDTQVYLDGDGGFSVTSGGQSRIFKPISIQTMWATLQVLHQACEAALGSGLVPGGSALTWASHYQERLNSEQSCLNEWTAMADLESLRPPSAEPGGSSEQEQMEQAIRAELWKVLDVSDLESVTSKEIRQALELRLGLPLQQYRDFIDNQMLLLVAQRDRASRIFPHLYLGSEWNAANLEELQRNRVTHILNMAREIDNFYPERFTYHNVRLWDEESAQLLPHWKETHRFIEAARAQGTHVLVHCKMGVSRSAATVLAYAMKQYECSLEQALRHVQELRPIARPNPGFLRQLQIYQGILTASRQSHVWEQKVGGVSPEEHPAPEVSTPFPPLPPEPEGGGEEKVVGMEESQAAPKEEPGPRPRINLRGVMRSISLLEPSLELESTSETSDMPEVFSSHESSHEEPLQPFPQLARTKGGQQVDRGPQPALKSRQSVVTLQGSAVVANRTQAFQEQEQGQGQGQGEPCISSTPRFRKVVRQASVHDSGEEGEA

SEQ ID NO: 748060 - protein, 498 aa, Homo sapiens
MLVGLGLIGEARCLIWRRGFSVTSGGQSRIFKPISIQTMWATLQVLHQACEAALGSGLVPGGSALTWASHYQERLNSEQSCLNEWTAMADLESLRPPSAEPGGSSEQEQMEQAIRAELWKVLDVSDLESVTSKEIRQALELRLGLPLQQYRDFIDNQMLLLVAQRDRASRIFPHLYLGSEWNAANLEELQRNRVTHILNMAREIDNFYPERFTYHNVRLWDEESAQLLPHWKETHRFIEAARAQGTHVLVHCKMGVSRSAATVLAYAMKQYECSLEQALRHVQELRPIARPNPGFLRQLQIYQGILTASRQSHVWEQKVGGVSPEEHPAPEVSTPFPPLPPEPEGGGEEKVVGMEESQAAPKEEPGPRPRINLRGVMRSISLLEPSLELESTSETSDMPEVFSSHESSHEEPLQPFPQLARTKGGQQVDRGPQPALKSRQSVVTLQGSAVVANRTQAFQEQEQGQGQGQGEPCISSTPRFRKVVRQASVHDSGEEGEA

SEQ ID NO: 748061 - protein, 673 aa, Homo sapiens
GPLRAAPEEVPGPGGAVRPSWSCGSRTVRGVEGRGRARCQPRCSRPGSMALVTVSRSPPGSGASTPVGPWDQAVQRRSRLQRRQSFAVLRGAVLGLQDGGDNDDAAEASSEPTEKAPSEEELHGDQTDFGQGSQSPQKQEEQRQHLHLMVQLLRPQDDIRLAAQLEAPRPPRLRYLLVVSTREGEGLSQDETVLLGVDFPDSSSPSCTLGLVLPLWSDTQVYLDGDGGFSVTSGGQSRIFKPISIQTMWATLQVLHQACEAALGSGLVPGGSALTWASHYQERLNSEQSCLNEWTAMADLESLRPPSAEPGGSSEQEQMEQAIRAELWKVLDVSDLESVTSKEIRQALELRLGLPLQQYRDFIDNQMLLLVAQRDRASRIFPHLYLGSEWNAANLEELQRNRVTHILNMAREIDNFYPERFTYHNVRLWDEESAQLLPHWKETHRFIEAARAQGTHVLVHCKMGVSRSAATVLAYAMKQYECSLEQALRHVQELRPIARPNPGFLRQLQIYQGILTASEGGGEEKVVGMEESQAAPKEEPGPRPRINLRGVMRSISLLEPSLELESTSETSDMPEVFSSHESSHEEPLQPFPQLARTKGGQQVDRGPQPALKSRQSVVTLQGSAVVANRTQAFQEQEQGQGQGQGEPCISSTPRFRKVVRQASVHDSGEEGEA

SEQ ID NO: 748062 - protein, 658 aa, Homo sapiens
GPLRAAPEEVPGPGGAVRPSWSCGSRTVRGVEGRGRARCQPRCSRPGSMALVTVSRSPPGSGASTPVGPWDQAVQRRSRLQRRQSFAVLRGAVLGLQDGGDNDDAAEASSEPTEKAPSEEELHGDQTDFGQGSQSPQKQEEQRQHLHLMVQLLRPQDDIRLAAQLEAPRPPRLRYLLVVSTREGEGLSQDETVLLGVDFPDSSSPSCTLGLVLPLWSDTQVYLDGDGGFSVTSGGQSRIFKPISIQTMWATLQVLHQACEAALGSGLVPGGSALTWASHYQERLNSEQSCLNEWTAMADLESLRPPSAEPGGSSEQEQMEQAIRAELWKVLDVSDLESVTSKEIRQALELRLGLPLQQYRDFIDNQMLLLVAQRDRASRIFPHLYLGSEWNAANLEELQRNRAQGTHVLVHCKMGVSRSAATVLAYAMKQYECSLEQALRHVQELRPIARPNPGFLRQLQIYQGILTASRQSHVWEQKVGGVSPEEHPAPEVSTPFPPLPPEPEGGGEEKVVGMEESQAAPKEEPGPRPRINLRGVMRSISLLEPSLELESTSETSDMPEVFSSHESSHEEPLQPFPQLARTKGGQQVDRGPQPALKSRQSVVTLQGSAVVANRTQAFQEQEQGQGQGQGEPCISSTPRFRKVVRQASVHDSGEEGEA

SEQ ID NO: 748063 - protein, 707 aa, Homo sapiens; identical to SEQ ID NO: 748058

SEQ ID NO: 748064 - protein, 304 aa, Homo sapiens
MYEAGWYSAEGHFYPERFTYHNVRLWDEESAQLLPHWKETHRFIEAARAQGTHVLVHCKMGVSRSAATVLAYAMKQYECSLEQALRHVQELRPIARPNPGFLRQLQIYQGILTASRQSHVWEQKVGGVSPEEHPAPEVSTPFPPLPPEPEGGGEEKVVGMEESQAAPKEEPGPRPRINLRGVMRSISLLEPSLELESTSETSDMPEVFSSHESSHEEPLQPFPQLARTKGGQQVDRGPQPALKSRQSVVTLQGSAVVANRTQAFQEQEQGQGQGQGEPCISSTPRFRKVVRQASVHDSGEEGEA

SEQ ID NO: 748065 - protein, 426 aa, Homo sapiens
GPLRAAPEEVPGPGGAVRPSWSCGSRTVRGVEGRGRARCQPRCSRPGSMALVTVSRSPPGSGASTPVGPWDQAVQRRSRLQRRQSFAVLRGAVLGLQDGGDNDDAAEASSEPTAPSFILNSSPAHSPMAREIDNFYPERFTYHNVRLWDEESAQLLPHWKETHRFIEAARAQGTHVLVHCKMGVSRSAATVLAYAMKQYECSLEQALRHVQELRPIARPNPGFLRQLQIYQGILTASRQSHVWEQKVGGVSPEEHPAPEVSTPFPPLPPEPEGGGEEKVVGMEESQAAPKEEPGPRPRINLRGVMRSISLLEPSLELESTSETSDMPEVFSSHESSHEEPLQPFPQLARTKGGQQVDRGPQPALKSRQSVVTLQGSAVVANRTQAFQEQEQGQGQGQGEPCISSTPRFRKVVRQASVHDSGEEGEA

SEQ ID NO: 748066 - protein, 707 aa, Homo sapiens; identical to SEQ ID NO: 748058

SEQ ID NO: 748067 - protein, 106 aa, Homo sapiens
MKTELPVQKGSRLPPPPPPCTSCPLPVHSWNQPGQATSGPQRQAGSSGPSRGRLEGLADRFPHPPPPVQVFAAVPRPPVTPRQITGHQARDSLLFVLSGLWLVSFS

SEQ ID NO: 748068 - protein, 670 aa, Homo sapiens
GPLRAAPEEVPGPGGAVRPSWSCGSRTVRGVEGRGRARCQPRCSRPGSMALVTVSRSPPGSGASTPVGPWDQAVQRRSRLQRRQSFAVLRGAVLGLQDGGDNDDAAEASSEPTEKAPSEEELHGDQTDFGQGSQSPQKQEEQRQHLHLMVQLLRPQDDIRLAAQLEAPRPPRLRYLLVVSTREGEGLSQDETVLLGVDFPDSSSPSCTLGLVLPLWSDTQVYLDGDGGFSVTSGGQSRIFKPISIQTMWATLQVLHQACEAALGSGLVPGGSALTWASHYQERLNSEQSCLNEWTAMADLESLRPPSAEPGGSSEQEQMEQAIRAELWKVLDVSDLESVTSKEIRQALELRLGLPLQQYRDFIDNQMLLLVAQRDRASRIFPHLYLGSEWNAANLEELQRNRVTHILNMAREIDNFYPERFTYHNVRLWDEESAQLLPHWKETHRFIEAARAQGTHVLVHCKMGVSRSAATVLAYAMKQYECSLEQALRHVQELRPIARPNPGFLRQLQIYQGILTASRQSHVWEQKVGGVSPEEHPAPEVSTPFPPLPPEPEGGGEEKVVGMEESQAAPKEEPGPRPRINLRGVMRSISLLEPSLELESTSETSDMPEVFSSHESSHEGLADRFPHPPPPVQVFAAVPRPPVTPRQITGHQARDSLLFVLSGLWLVSFS

SEQ ID NO: 748069 - protein, 636 aa, Homo sapiens
GPLRAAPEEVPGPGGAVRPSWSCGSRTVRGVEGRGRARCQPRCSRPGSMALVTVSRSPPGSGASTPVGPWDQAVQRRSRLQRRQSFAVLRGAVLGLQDGGDNDDAAEASSEPTEKAPSEEELHGDQTDFGQGSQSPQKQEEQRQHLHLMVQLLRPQDDIRLAAQLEAPRPPRLRYLLVVSTREGEGLSQDETVLLGVDFPDSSSPSCTLGLVLPLWSDTQVYLDGDGGFSVTSGGQSRIFKPISIQTMWATLQVLHQACEAALGSGLVPGGSALTWASHYQERLNSEQSCLNEWTAMADLESLRPPSAEPGGSSEQEQMEQAIRAELWKVLDVSDLESVTSKEIRQALELRLGLPLQQYRDFIDNQMLLLVAQRDRASRIFPHLYLGSEWNAANLEELQRNRVTHILNMAREIDNFYPERFTYHNVRLWDEESAQLLPHWKETHRFIEAARAQGTHVLVHCKMGVSRSAATVLAYAMKQYECSLEQALRHVQELRPIARPNPGFLRQLQIYQGILTASEGGGEEKVVGMEESQAAPKEEPGPRPRINLRGVMRSISLLEPSLELESTSETSDMPEVFSSHESSHEGLADRFPHPPPPVQVFAAVPRPPVTPRQITGHQARDSLLFVLSGLWLVSFS

SEQ ID NO: 748070 - protein, 598 aa, Homo sapiens
GPLRAAPEEVPGPGGAVRPSWSCGSRTVRGVEGRGRARCQPRCSRPGSMALVTVSRSPPGSGASTPVGPWDQAVQRRSRLQRRQSFAVLRGAVLGLQDGGDNDDAAEASSEPTEKAPSEEELHGDQTDFGQGSQSPQKQEEQRQHLHLMVQLLRPQDDIRLAAQLEAPRPPRLRYLLVVSTREGEGLSQDETVLLGVDFPDSSSPSCTLGLVLPLWSDTQVYLDGDGGFSVTSGGQSRIFKPISIQTMWATLQVLHQACEAALGSGLVPGGSALTWASHYQERLNSEQSCLNEWTAMADLESLRPPSAEPGGSSEQEQMEQAIRAELWKVLDVSDLESVTSKEIRQALELRLGLPLQQYRDFIDNQMLLLVAQRDRASRIFPHLYLGSEWNAANLEELQRNRVTHILNMAREIDNFYPERFTYHNVRLWDEESAQLLPHWKETHRFIEAARAQGTHVLVHCKMGVSRSAATVLAYAMKQYECSLEQALRHVQELRPIARPNPGFLRQLQIYQGILTASRQSHVWEQKVGGVSPEEHPAPEVSTPFPPLPPEPVGGGPAPNSPLFEFDYKKLARFLQTFCLGKPWGLRNILEFGPISSF

SEQ ID NO: 748071 - protein, 243 aa, Homo sapiens
GPLRAAPEEVPGPGGAVRPSWSCGSRTVRGVEGRGRARCQPRCSRPGSMALVTVSRSPPGSGASTPVGPWDQAVQRRSRLQRRQSFAVLRGAVLGLQDGGDNDDAAEASSEPTEKAPSEEELHGDQTDFGQGSQSPQKQEEQRQHLHLMVQLLRPQDDIRLAAQLEAPRPPRLRYLLVVSTREGEGLSQDETVLLGVDFPDSRFEQGEERRGKEVRDRGDNGFPSVPCQLPQLHPGPGLAPLE

SEQ ID NO: 748072 - protein, 518 aa, Homo sapiens
MIPEVPGLLDLCDSGSSGAFRGVLGPLERGISSNGGGCSSRNNSHNIGSRSSSGGGGGDGGSSLPDSDPHSHRPVPEGGRRGGGSDGSDGSGGRGDSGAYDGSGACGGSDACDGSGDSSGDSWTKQVTCRYFKYGICKEGDNCRYSHDLSDRLCGVVCKYFQRGCCVYGDRCRCEHSKPLKQEEATATELTTKSSLAASSSLSSIVGPLVEMNTNEAESRNSNFATVVAGSEDWANAIEFVPGQPYCGRTVPSCTEAPLQGSVTKEESEEEQTAVETKKQLCPYAAVGQCRYGENCVYLHGDLCDMCGLQVLHPMDAAQRSQHIQACIEAHEKDMEFSFAVQRSKDKVCGICMEVVYEKANPNEHRFGILSNCNHTFCLKCIRKWRSAKEFESRIVKSCPQCRITSNFVIPSEYWVEEKEEKQKLIQKYKEAMSNKACKYFDEGRGSCPFGENCFYKHMYPDGRREEPQRQQVGTSSRNPGQQRNHFWEFFEEGANSNPFDDEEEAVTFELGEMLLML

SEQ ID NO: 748073 - protein, 36 aa, Homo sapiens
MAKPQDERSCIFESPLEKGLSKWICRDVFSNTPLLS

SEQ ID NO: 748074 - protein, 153 aa, Homo sapiens
GIEAQQVVLLLEDYQFVHPTFLEMINSLLSSGEVPGLYTLEELEPLLLPLKDQASQDGFFGPVFNYFTYRIQQNLHIVLIMDSANSNFMINCESNPALHKKCQVLWMEGWSNSSMKKIPEMLFSETGGGEKYNDKKRKEEKKKNSGSILIKSV

SEQ ID NO: 748075 - protein, 143 aa, Homo sapiens
GLENRAHSEQFNAFFRLPKGESLKEVHECFLWVPFSHFNTHGKMCISENYICFASQDGNQCSVIIPLREVLAIDKTNDSSKSVIISIKGKTAFRFHEVKDFEQLVAKLRLRCGAASTQYHDISTEVINYTAIKSFGKKGVCLV

SEQ ID NO: 748076 - protein, 176 aa, Homo sapiens
GLENRAHSEQFNAFFRLPKGESLKEVHECFLWVPFSHFNTHGKMCISENYICFASQDGNQCSVIIPLREVLAIDKTNDSSKSVIISIKGKTAFRFHEVKDFEQLVAKLRLRCGAASTQYHDISTELAISSESTEPSDNFEVQSLTSQRECSKTVNTEALMTVFHPQNLETLNSKMV

SEQ ID NO: 748077 - protein, 231 aa, Homo sapiens
MFLVGLTGGIASGKSSVIQVFQQLGCAVIDVDVMARHVVQPGYPAHRRIVEVFGTEVLLENGDINRKVLGDLIFNQPDRRQLLNAITHPEIRKEMMKETFKYFLRGYRYVILDIPLLFETKKLLKYMKHTVVVYCDRDTQLARLMRRNSLNRKDAEARINAQLPLTDKARMARHVLDNSGEWSVTKRQVILLHTELERSLEYLPLRFGVLTGLAAIASLLYLLTHYLLPYA

SEQ ID NO: 748078 - protein, 231 aa, Homo sapiens; identical to SEQ ID NO: 748077

SEQ ID NO: 748079 - protein, 231 aa, Homo sapiens; identical to SEQ ID NO: 748077

SEQ ID NO: 748080 - protein, 231 aa, Homo sapiens; identical to SEQ ID NO: 748077

SEQ ID NO: 748081 - protein, 737 aa, Homo sapiens
MRSFSGPLIREDVHKVDIMTFCQQKAAQSCKSETLGSRDSALLWQLLVLLCRQNGSMVGSDIAELLMQDCKKLEKYKRQPPVANLINLTDEDWPVLSSGTPNLLTGEIPPSVETPAQIVEKFTRLLYYGRKKEALEWAMKNHLWGHALFLSSKMDPQTYSWVMSGFTSTLALNDPLQTLFQLMSGRIPQAATCCGEKQWGDWRPHLAVILSNQAGDPELYQRAIVAIGDTLAGKGLVEAAHFCYLMAHVPFGHYTVKTDHLVLLGSSHSQEFLKFATTEAIQRTEIFEYCQMLGRPKSFIPSFQVYKLLYASRLADYGLVSQALHYCEAIGAAVLSQGESSHPVLLVELIKLAEKLKLSDPLVLERRSGDRDLEPDWLAQLRRQLEQKVAGDIGDPHPTRSDISGAGGTTTENTFYQDFSGCQGYSEAPGYRSALWLTPEQTCLLQPSPQQPFPLQPGSYPAGGGAGQTGTPRPFYSVPETHLPGTGSSVAVTEATGGTVWEEMLQTHLGPGENTVSQETSQPPDGQEVISKPQTPLAARPRSISESSASSAKEDEKESSDEADKNSPRNTAQRGKLGDGKEHTKSSGFGWFSWFRSKPTKNASPAGDEDSSDSPDSEETPRASSPHQAGLGLSLTPSPESPPLPDVSAFSRGRGGGEGRGSASSGGAAAGAGVGGLSGPESVSFELCSNPGVLLPPPALKGAVPLYNPSQVPQLPTATSLNRPNRLAQRRYPTQPC

SEQ ID NO: 748082 - protein, 614 aa, Homo sapiens
MELWAPQRLPQTRGKATAPSKDPDRGFRRDGHHRPVPHSWHNGERFHQWQDNRGSPQPQQEPRADHQQQPHYASRPGDWHQPVSGVDYYEGGYRNQLYSRPGYENSYQSYQSPTMREEYAYGSYYYHGHPQWLQEERVPRQRSPYIWHEDYREQKYLDEHHYENQHSPFGTNSETHFQSNSRNPCKDSPASNSGQEWPGELFPGSLLAEAQKNKPSLASESNLLQQRESGLSSSSYELSQYIRDAPERDDPPASAAWSPVQAEDVSSAGPKAPMKFYIPHVPVSFGPGGQLVHVGPSSPTDGQAALVELHSMEVILNDSEEQEEMRSFSGPLIREDVHKVDIMTFCQQKAAQSCKSETLGSRDSALLWQLLVLLCRQNGSMVGSDIAELLMQDCKKLEKYKRQPPVANLINLTDEDWPVLSSGTPNLLTGEIPPSVETPAQIVEKFTRLLYYGRKKEALEWAMKNHLWGHALFLSSKMDPQTYSWVMSGFTSTLALNDPLQTLFQLMSGRIPQAATCCGEKQWGDWRPHLAVILSNQAGDPELYQRAIVAIGDTLAGKGLVEAAHFCYLMAHVPFGHYTVKTDHLVLLGSSHRYATWEKGNSKDIFQGTVLALC

SEQ ID NO: 748083 - protein, 144 aa, Homo sapiens
LQRGPTGSSRGRLVSAAVEAGRTGPELPRRGWVVAARARRQEASRAALPLSRGWAALSGSSCRALATPPRPSLGLALAAVLCRQCLPRAWVCRRAGQGSGRHYRAAICAELKKPLTIEEVAPAPSGLTRSELMSISVELTLVIF

SEQ ID NO: 748084 - protein, 1061 aa, Homo sapiens
MELWAPQRLPQTRGKATAPSKDPDRGFRRDGHHRPVPHSWHNGERFHQWQDNRGSPQPQQEPRADHQQQPHYASRPGDWHQPVSGVDYYEGGYRNQLYSRPGYENSYQSYQSPTMREEYAYGSYYYHGHPQWLQEERVPRQRSPYIWHEDYREQKYLDEHHYENQHSPFGTNSETHFQSNSRNPCKDSPASNSGQEWPGELFPGSLLAEAQKNKPSLASESNLLQQRESGLSSSSYELSQYIRDAPERDDPPASAAWSPVQAEDVSSAGPKAPMKFYIPHVPVSFGPGGQLVHVGPSSPTDGQAALVELHSMEVILNDSEEQEEMRSFSGPLIREDVHKVDIMTFCQQKAAQSCKSETLGSRDSALLWQLLVLLCRQNGSMVGSDIAELLMQDCKKLEKYKRQPPVANLINLTDEDWPVLSSGTPNLLTGEIPPSVETPAQIVEKFTRLLYYGRKKEALEWAMKNHLWGHALFLSSKMDPQTYSWVMSGFTSTLALNDPLQTLFQLMSGRIPQAATCCGEKQWGDWRPHLAVILSNQAGDPELYQRAIVAIGDTLAGKGLVEAAHFCYLMAHVPFGHYTVKTDHLVLLGSSHSQEFLKFATTEAIQRTEIFEYCQMLGRPKSFIPSFQVYKLLYASRLADYGLVSQALHYCEAIGAAVLSQGESSHPVLLVELIKLAEKLKLSDPLVLERRSGDRDLEPDWLAQLRRQLEQKVAGDIGDPHPTRSDISGAGGTTTENTFYQDFSGCQGYSEAPGYRSALWLTPEQTCLLQPSPQQPFPLQPGSYPAGGGAGQTGTPRPFYSVPETHLPGTGSSVAVTEATGGTVWEEMLQTHLGPGENTVSQETSQPPDGQEVISKPQTPLAARPRSISESSASSAKEDEKESSDEADKNSPRNTAQRGKLGDGKEHTKSSGFGWFSWFRSKPTKNASPAGDEDSSDSPDSEETPRASSPHQAGLGLSLTPSPESPPLPDVSAFSRGRGGGEGRGSASSGGAAAGAGVGGLSGPESVSFELCSNPGVLLPPPALKGAVPLYNPSQVPQLPTATSLNRPNRLAQRRYPTQPC

SEQ ID NO: 748085 - protein, 1061 aa, Homo sapiens; identical to SEQ ID NO: 748084

SEQ ID NO: 748086 - protein, 1061 aa, Homo sapiens; identical to SEQ ID NO: 748084

SEQ ID NO: 748087 - protein, 942 aa, Homo sapiens
MEVTLTMSICVCWSEDVSSAGPKAPMKFYIPHVPVSFGPGGQLVHVGPSSPTDGQAALVELHSMEVKKTQCPWNAGTLLTQLLLTCLPCFPVPEPGHLQEWDALAGNWAMYPLDWRVQEWVGLFSERIDATVVFFLRCQCLIFSNKIHFFSFCFLHKALSHILAPRPWGLTLDLTERGLGWPQSSTQNLIVLFQVILNDSEEQEEMRSFSGPLIREDVHKVDIMTFCQQKAAQSCKSETLGSRDSALLWQLLVLLCRQNGSMVGSDIAELLMQDCKKLEKYKRQPPVANLINLTDEDWPVLSSGTPNLLTGEIPPSVETPAQIVEKFTRLLYYGRKKEALEWAMKNHLWGHALFLSSKMDPQTYSWVMSGFTSTLALNDPLQTLFQLMSGRIPQAATCCGEKQWGDWRPHLAVILSNQAGDPELYQRAIVAIGDTLAGKGLVEAAHFCYLMAHVPFGHYTVKTDHLVLLGSSHSQEFLKFATTEAIQRTEIFEYCQMLGRPKSFIPSFQVYKLLYASRLADYGLVSQALHYCEAIGAAVLSQGESSHPVLLVELIKLAEKLKLSDPLVLERRSGDRDLEPDWLAQLRRQLEQKVAGDIGDPHPTRSDISGAGGTTTENTFYQDFSGCQGYSEAPGYRSALWLTPEQTCLLQPSPQQPFPLQPGSYPAGGGAGQTGTPRPFYSVPETHLPGTGSSVAVTEATGGTVWEEMLQTHLGPGENTVSQETSQPPDGQEVISKPQTPLAARPRSISESSASSAKEDEKESSDEADKNSPRNTAQRGKLGDGKEHTKSSGFGWFSWFRSKPTKNASPAGDEDSSDSPDSEETPRASSPHQAGLGLSLTPSPESPPLPDVSAFSRGRGGGEGRGSASSGGAAAGAGVGGLSGPESVSFELCSNPGVLLPPPALKGAVPLYNPSQVPQLPTATSLNRPNRLAQRRYPTQPC

SEQ ID NO: 748088 - protein, 737 aa, Homo sapiens; identical to SEQ ID NO: 748081

SEQ ID NO: 748089 - protein, 737 aa, Homo sapiens; identical to SEQ ID NO: 748081

SEQ ID NO: 748090 - protein, 681 aa, Homo sapiens
MVGSDIAELLMQDCKKLEKYKRQPPVANLINLTDEDWPVLSSGTPNLLTGEIPPSVETPAQIVEKFTRLLYYGRKKEALEWAMKNHLWGHALFLSSKMDPQTYSWVMSGFTSTLALNDPLQTLFQLMSGRIPQAATCCGEKQWGDWRPHLAVILSNQAGDPELYQRAIVAIGDTLAGKGLVEAAHFCYLMAHVPFGHYTVKTDHLVLLGSSHSQEFLKFATTEAIQRTEIFEYCQMLGRPKSFIPSFQVYKLLYASRLADYGLVSQALHYCEAIGAAVLSQGESSHPVLLVELIKLAEKLKLSDPLVLERRSGDRDLEPDWLAQLRRQLEQKVAGDIGDPHPTRSDISGAGGTTTENTFYQDFSGCQGYSEAPGYRSALWLTPEQTCLLQPSPQQPFPLQPGSYPAGGGAGQTGTPRPFYSVPETHLPGTGSSVAVTEATGGTVWEEMLQTHLGPGENTVSQETSQPPDGQEVISKPQTPLAARPRSISESSASSAKEDEKESSDEADKNSPRNTAQRGKLGDGKEHTKSSGFGWFSWFRSKPTKNASPAGDEDSSDSPDSEETPRASSPHQAGLGLSLTPSPESPPLPDVSAFSRGRGGGEGRGSASSGGAAAGAGVGGLSGPESVSFELCSNPGVLLPPPALKGAVPLYNPSQVPQLPTATSLNRPNRLAQRRYPTQPC

SEQ ID NO: 748091 - protein, 737 aa, Homo sapiens; identical to SEQ ID NO: 748081

SEQ ID NO: 748092 - protein, 265 aa, Homo sapiens
MELWAPQRLPQTRGKATAPSKDPDRGFRRDGHHRPVPHSWHNGERFHQWQDNRGSPQPQQEPRADHQQQPHYASRPGDWHQPVSGVDYYEGGYRNQLYSRPGYENSYQSYQSPTMREEYAYGSYYYHGHPQWLQEERVPRQRSPYIWHEDYREQKYLDEHHYENQHSPFGTNSETHFQSNSRNPCKDSPASNSGQEWPGELFPGSLLAEAQKNKPSLASESNLLQQRESGLSSSSYELSQYIRDAPERDDPPASAAWSPVQAGGF

SEQ ID NO: 748093 - protein, 942 aa, Homo sapiens; identical to SEQ ID NO: 748087

SEQ ID NO: 748094 - protein, 144 aa, Homo sapiens; identical to SEQ ID NO: 748083

SEQ ID NO: 748095 - protein, 144 aa, Homo sapiens; identical to SEQ ID NO: 748083

SEQ ID NO: 748096 - protein, 171 aa, Homo sapiens
MKTGHEGEEKAVKEDMPMSSNDKAEDWEVKMDEEEWRSRQLMIEAPGVWGWMQVGIFWEHWAWLNENQTVSPRGIHLFVLTGLSSRQRESTPIISIKRGHDSSWRRQDGVIHYKDMNFPVFSKSLSSVLQYCQQGCIQLYVRMVFKLDEVNDAFLHVIQGKSVGKVLLALK

SEQ ID NO: 748097 - protein, 144 aa, Homo sapiens; identical to SEQ ID NO: 748083

SEQ ID NO: 748098 - protein, 88 aa, Homo sapiens
VRWGAPFLGHVLDNQISCVLDAGNIAAAGSDEKCKLAMQRGAQSSVNYSQGSLKDAVRKLVGEGGVNVAIDMVGGDICLEALRRCMGW

SEQ ID NO: 748099 - protein, 130 aa, Homo sapiens
MGGGTHKRLDGRNTPTGTSRPSTGETMRSLARAVRKETGRRVAQIQRKTISLLVPPSAESYFQSIKPWTNSPSLRVIKFFRYIKARTLGYRKPSVLATRQGGLIELTNTSCLWTAKLKEHSVTHTHWGFS

SEQ ID NO: 748100 - protein, 129 aa, Homo sapiens
MRCDTMIQYGRCLTFHLAGYSIDSVQSRHRTLRSIYNLSYPIGHFLCLVILVYCAEYINEAAAMNWRLFSKYQYFDSRGMFISIVFSAPLLVNAMIIVVMWVWKTLNVMTDLKNAQERRKEKKRRRKED

SEQ ID NO: 748101 - protein, 137 aa, Homo sapiens
MVKHWSITHVSLPSILSHDIVALPFSPNKRSPAEQAMRCDTMIQYGRCLTFHLAGYSIDSVQSRHRTLRSIYNLTLPDRALSVSVILVYCAEYINEAAAMNWRLFSKYQYFDSRGMFISIVFSAPLLVNAMIIVVRR

SEQ ID NO: 748102 - protein, 129 aa, Homo sapiens; identical to SEQ ID NO: 748100

SEQ ID NO: 748103 - protein, 129 aa, Homo sapiens; identical to SEQ ID NO: 748100

SEQ ID NO: 748104 - protein, 129 aa, Homo sapiens; identical to SEQ ID NO: 748100

SEQ ID NO: 748105 - protein, 137 aa, Homo sapiens; identical to SEQ ID NO: 748101

SEQ ID NO: 748106 - protein, 941 aa, Homo sapiens
MAAYLQWRRFVFFDKELVKEPLSNDGAAPGATPASGSAASKFLCLPPGITVCDSGRGSLVFGDMEGQIWFLPRSLQLTGFQAYKLRVTHLYQLKQHNILASVGEDEEGINPLVKIWNLEKRDGGNPLCTRIFPAIPGTEPTVVSCLTVHENLNFMAIGFTDGSVTLNKGDITRDRHSKTQILHKGNYPVTGLAFRQAGKTTHLFVVTTENVQSYIVSGKDYPRVELDTHGCGLRCSALSDPSQDLQFIVAGDECVYLYQPDERGPCFAFEGHKLIAHWFRGYLIIVSRDRKVSPKSEFTSRDSQSSDKQILNIYDLCNKFIAYSTVFEDVVDVLAEWGSLYVLTRDGRVHALQEKDTQTKLEMLFKKNLFEMAINLAKSQHLDSDGLAQIFMQYGDHLYSKGNHDGAVQQYIRTIGKLEPSYVIRKFLDAQRIHNLTAYLQTLHRQSLANADHTTLLLNCYTKLKDSSKLEEFIKKKSESEVHFDVETAIKVLRQAGYYSHALYLAENHAHHEWYLKIQLEDIKNYQEALRYIGKLPFEQAESNMKRYGKILMHHIPEQTTQLLKGLCTDYRPSLEGRSDREAPGCRANSEEFIPIFANNPRELKAFLEHMSEVQPDSPQGIYDTLLELRLQNWAHEKDPQVKEKLHAEAISLLKSGRFCDVFDKALVLCQMHDFQDGVLYLYEQGKLFQQIMHYHMQHEQYRQVISVCERHGEQDPSLWEQALSYFARKEEDCKEYVAAVLKHIENKNLMPPLLVVQTLAHNSTATLSVIRDYLVQKLQKQSQQIAQDELRVRRYREETTRIRQEIQELKASPKIFQKTKCSICNSALELPSVHFLCGHSFHQHCFESYSESDADCPTCLPENRKVMDMIRAQEQKRDLHDQFQHQLKCSNDSFSVIADYFGRGVFNKLTLLTDPPTARLTSSLEAGLQRDLLMHSRRGT

SEQ ID NO: 748107 - protein, 716 aa, Homo sapiens
TENVQSYIASGALSDPSQDLQFIVAGDECVYLYQPDERGPCFAFEGHKLIAHWFRGYLIIVSRDRKVSPKSEFTSRDSQSSDKQILNIYDLCNKFIAYSTVFEDVVDVLAEWGSLYVLTRDGRVHALQEKDTQTKLEMLFKKNLFEMAINLAKSQHLDSDGLAQIFMQYGDHLYSKGNHDGAVQQYIRTIGKLEPSYVIRKFLDAQRIHNLTAYLQTLHRQSLANADHTTLLLNCYTKLKDSSKLEEFIKKKSESEVHFDVETAIKVLRQAGYYSHALYLAENHAHHEWYLKIQLEDIKNYQEALRYIGKLPFEQAESNMKRYGKILMHHIPEQTTQLLKGLCTDYRPSLEGRSDREAPGCRANSEEFIPIFANNPRELKAFLEHMSEVQPDSPQGIYDTLLELRLQNWAHEKDPQVKEKLHAEAISLLKSGRFCDVFDKALVLCQMHDFQDGVLYLYEQGKLFQQIMHYHMQHEQYRQVISVCERHGEQDPSLWEQALSYFARKEEDCKEYVAAVLKHIENKNLMPPLLVVQTLAHNSTATLSVIRDYLVQKLQKQSQQIAQDELRVRRYREETTRIRQEIQELKASPKIFQKTKCSICNSALELPSVHFLCGHSFHQHCFESYSESDADCPTCLPENRKVMDMIRAQEQKRDLHDQFQHQLKCSNDSFSVIADYFGRGVFNKLTLLTDPPTARLTSSLEAGLQRDLLMHSRRGT

SEQ ID NO: 748108 - protein, 588 aa, Homo sapiens
MAAYLQWRRFVFFDKELVKEPLSNDGAAPGATPASGSAASKFLCLPPGITVCDSGRGSLVFGDMEGQIWFLPRSLQLTGFQAYKLRVTHLYQLKQHNILASVGEDEEGINPLVKIWNLEKRDGGNPLCTRIFPAIPGTEPTVVSCLTVHENLNFMAIGFTDGSVTLNKGDITRDRHSKTQILHKGNYPVTGLAFRQAGKTTHLFVVTTENVQSYIVSGKDYPRVELDTHGCGLRCSALSDPSQDLQFIVAGDECVYLYQPDERGPCFAFEGHKLIAHWFRGYLIIVSRDRKVSPKSEFTSRDSQSSDKQILNIYDLCNKFIAYSTVFEDVVDVLAEWGSLYVLTRDGRVHALQEKDTQTKLEMLFKKNLFEMAINLAKSQHLDSDGLAQIFMQYGDHLYSKGNHDGAVQQYIRTIGKLEPSYVIRKFLDAQRIHNLTAYLQTLHRQSLANADHTTLLLNCYTKLKDSSKLEEFIKKKSESEVHFDVETAIKVLRQAGYYSHALYLAENHAHHEWYLKIQLEDIKNYQEALRYIGKLPFEQAESNMKRYGKILMHHIPEQTTQLLLFTSSVDHSRSVGEGTSATSECGQ

SEQ ID NO: 748109 - protein, 43 aa, Homo sapiens
LWEQALSYFARKEEDCKEYVAAVLKHIENKNLMPPLLGTWEDR

SEQ ID NO: 748110 - protein, 89 aa, Homo sapiens
RWEPWAKMAAYLQWRRFVFFDKELVKEPLSNDGAAPGATPASGSAASKFLCLPPGITVCDSGRGSLVFGDILRLELSFPSRDPEEIELG

SEQ ID NO: 748111 - protein, 579 aa, Homo sapiens
MLFKKNLFEMAINLAKSQHLDSDGLAQIFMQYGDHLYSKGNHDGAVQQYIRTIGKLEPSYVIRKFLDAQRIHNLTAYLQTLHRQSLANADHTTLLLNCYTKLKDSSKLEEFIKKKSESEVHFDVETAIKVLRQAGYYSHALYLAENHAHHEWYLKIQLEDIKNYQEALRYIGKLPFEQAESNMKRYGKILMHHIPEQTTQLLKGLCTDYRPSLEGRSDREAPGCRANSEEFIPIFANNPRELKAFLEHMSEVQPDSPQGIYDTLLELRLQNWAHEKDPQVKEKLHAEAISLLKSGRFCDVFDKALVLCQMHDFQDGVLYLYEQGKLFQQIMHYHMQHEQYRQVISVCERHGEQDPSLWEQALSYFARKEEDCKEYVAAVLKHIENKNLMPPLLVVQTLAHNSTATLSVIRDYLVQKLQKQSQQIAQDELRVRRYREETTRIRQEIQELKASPKIFQKTKCSICNSALELPSVHFLCGHSFHQHCFESYSESDADCPTCLPENRKVMDMIRAQEQKRDLHDQFQHQLKCSNDSFSVIADYFGRGVFNKLTLLTDPPTARLTSSLEAGLQRDLLMHSRRGT

SEQ ID NO: 748112 - protein, 717 aa, Homo sapiens
  misc_feature (692)..(692): Xaa can be any naturally occurring amino acid
  misc_feature (694)..(696): Xaa can be any naturally occurring amino acid
  misc_feature (698)..(699): Xaa can be any naturally occurring amino acid
  misc_feature (705)..(705): Xaa can be any naturally occurring amino acid
  misc_feature (708)..(709): Xaa can be any naturally occurring amino acid
  misc_feature (714)..(714): Xaa can be any naturally occurring amino acid
  misc_feature (716)..(716): Xaa can be any naturally occurring amino acid
MAAYLQWRRFVFFDKELVKEPLSNDGAAPGATPASGSAASKFLCLPPGITVCDSGRGSLVFGDMEGQIWFLPRSLQLTGFQAYKLRVTHLYQLKQHNILASVGEDEEGINPLVKIWNLEKRDGGNPLCTRIFPAIPGTEPTVVSCLTVHENLNFMAIGFTDGSVTLNKGDITRDRHSKTQILHKGNYPVTGLAFRQAGKTTHLFVVTTENVQSYIVSGKDYPRVELDTHGCGLRCSALSDPSQDLQFIVAGDECVYLYQPDERGPCFAFEGHKLIAHWFRGYLIIVSRDRKVSPKSEFTSRDSQSSDKQILNIYDLCNKFIAYSTVFEDVVDVLAEWGSLYVLTRDGRVHALQEKDTQTKLEMLFKKNLFEMAINLAKSQHLDSDGLAQIFMQYGDHLYSKGNHDGAVQQYIRTIGKLEPSYVIRKFLDAQRIHNLTAYLQTLHRQSLANADHTTLLLNCYTKLKDSSKLEEFIKKKSESEVHFDVETAIKVLRQAGYYSHALYLAENHAHHEWYLKIQLEDIKNYQEALRYIGKLPFEQAESNMKRYGKILMHHIPEQTTQLLKGLCTDYRPSLEGRSDREAPGCRANSEEFIPIFANNPRELKAFLEHMSEVQPDSPQGIYDTLLELRLQNWAHEKDPQVKEKLHAEAISLLKSGRFCDVFDKAWSCARCTTSRMVSFTFMSRGSCSSRXCXXXCXXGSTGRXIKXXKKKGXKXK

SEQ ID NO: 748113 - protein, 127 aa, Homo sapiens
KLHAEAISLLKSGRFCDVFDKALVLCQMHDFQDGVLYLYEQGKLEEFGEFQGKGKNPSHFPETATEVCPCPGRRFQQIMHYHMQHEQYRQVISVCERHGEQDPSLWEQALSYFARKEEDCKEYVAAV

SEQ ID NO: 748114 - protein, 299 aa, Homo sapiens
MKKILKSRIERDKDFSHQRRHYKEFRFDLTQIPHGEAVTAAEFRIYKDRSNNRFENETIKISIYQIIKEYTNRDADLFLLDTRKAQALDVGWLVFDITVTSNHWVINPQNNLGLQLCAETGDGRSINVKSAGLVGRQGPQSKQPFMVAFFKASEVLLRSVRAANKRKNQNRNKSSSHQDSSRMSSVGDYNTSEQKQACKKHELYVSFRDLGWQDWIIAPEGYAAFYCDGECSFPLNAHMNATNHAIVQTLVHLMFPDHVPKPCCAPTKLNAISVLYFDDSSNVILKKYRNMVVRSCGCH

SEQ ID NO: 748115 - protein, 454 aa, Homo sapiens
MHLTVFLLKGIVGFLWSCWVLVGYAKGGLGDNHVHSSFIYRRLRNHERREIQREILSILGLPHRPRPFSPGKQASSAPLFMLDLYNAMTNEENPEESEYSVRASLAEETRGARKGYPASPNGYPRRIQLSRTTPLTTQSPPLASLHDTNFLNDADMVMSFVNLVERDKDFSHQRRHYKEFRFDLTQIPHGEAVTAAEFRIYKDRSNNRFENETIKISIYQIIKEYTNRDADLFLLDTRKAQALDVGWLVFDITVTSNHWVINPQNNLGLQLCAETGDGRSINVKSAGLVGRQGPQSKQPFMVAFFKASEVLLRSVRAANKRKNQNRNKSSSHQDSSRMSSVGDYNTSEQKQACKKHELYVSFRDLGWQDWIIAPEGYAAFYCDGECSFPLNAHMNATNHAIVQTLVHLMFPDHVPKPCCAPTKLNAISVLYFDDSSNVILKKYRNMVVRSCGCH

SEQ ID NO: 748116 - protein, 379 aa, Homo sapiens
MHLTVFLLKGIVGFLWSCWVLVGYAKGGLGDNHVHSSFIYRRLRNHERREIQREILSILGLPHRPRPFSPGKQASSAPLFMLDLYNAMTNEENPEESEYSVRASLAEETRGARKGYPASPNGYPRRIQLSRTTPLTTQSPPLASLHDTNFLNDADMVMSFVNLVERDKDFSHQRRHYKEFRFDLTQIPHGEAVTAAEFRIYKDRSNNRFENETIKISIYQIIKEYTNRDADLFLLDTRKAQALDVGWLVFDITVTSNHWVINPQNNLGLQLCAETGDGRSINVKSAGLVGRQGPQSKQPFMVAFFKASEVLLRSVRAANKRKNQNRNKSSSHQDSSRMSSVGGKNKPEQQLCTESYGVVCCKSSSHNKFTLYVYLRMVH

SEQ ID NO: 748117 - protein, 1123 aa, Homo sapiens
MPEPTKKEENEVPAPAPPPEEPSKEKEAGTTPAKDWTLVETPPGEEQAKQNANSQLSILFIEKPQGGTVKVGEDITFIAKVKAEDLLRKPTIKWFKGKWMDLASKAGKHLQLKETFERHSRVYTFEMQIIKAKDNFAGNYRCEVTYKDKFDSCSFDLEVHESTGTTPNIDIRSAFKRSGEGQEDAGELDFSGLLKRREVKQQEEEPQVDVWELLKNAKPSEYEKIAFQYGITDLRGMLKRLKRMRREEKKSAAFAKILDPAYQVDKGGRVRFVVELADPKLEVKWYKNGQEIRPSTKYIFEHKGCQRILFINNCQMTDDSEYYVTAGDEKCSTELFVREPPIMVTKQLEDTTAYCGERVELECEVSEDDANVKWFKNGEEIIPGPKSRYRIRVEGKKHILIIEGATKADAAEYSVMTTGGQSSAKLSVDLKPLKILTPLTDQTVNLGKEICLKCEISENIPGKWTKNGLPVQESDRLKVVHKGRIHKLVIANALTEDEGDYVFAPDAYNVTLPAKVHVIDPPKIILDGLDADNTVTVIAGNKLRLEIPISGEPPPKAMWSRGDKAIMEGSGRIRTESYPDSSTLVIDIAERDDSGVYHINLKNEAGEAHASIKVKVVDFPDPPVAPTVTEVGDDWCIMNWEPPAYDGGSPILGYFIERKKKQSSRWMRLNFDLCKETTFEPKKMIEGVAYEVRIFAVNAIGISKPSMPSRPFVPLAVTSPPTLLTVDSVTDTTVTMRWRPPDHIGAAGLDGYVLEYCFEGTEDWIVANKDLIDKTKFTITGLPTDAKIFVRVKAVNAAGASEPKYYSQPILVKEIIEPPKIRIPRHLKQTYIRRVGEAVNLVIPFQGKPRPELTWKKDGAEIDKNQINIRNSETDTIIFIRKAERSHSGKYDLQVKVDKFVETASIDIQIIDRPGPPQIVKIEDVWGENVALTWTPPKDDGNAAITGYTIQKADKKSMEWFTVIEHYHRTSATITELVIGNEYYFRVFSENMCGLSEDATMTKESAVIARDGKIYKNPVYEDFDFSEAPMFTQPLVNTYAIAGYNATLNCSVRGNPKPKITWMKNKVAIVDDPRYRMFSNQGVCTLEIRKPSPYDGGTYCCKAVNDLGTVEIECKLEVKVIAQ

SEQ ID NO: 748118 - protein, 117 aa, Homo sapiens
MPEPTKKEENEVPAPAPPPEEPSKEKEAGTTPAKDEEEVSPPSALPPGLGSRALERKDSGERKPREGILDLILIQSLMSSFLEAVIDSNPCLIQIVVFTAIFHYVSSYKKTNVLRNN

SEQ ID NO: 748119 - protein, 1148 aa, Homo sapiens
MPEPTKKEENEVPAPAPPPEEPSKEKEAGTTPAKDEEEVSPPSALPPGLGSRALERKDSDWTLVETPPGEEQAKQNANSQLSILFIEKPQGGTVKVGEDITFIAKVKAEDLLRKPTIKWFKGKWMDLASKAGKHLQLKETFERHSRVYTFEMQIIKAKDNFAGNYRCEVTYKDKFDSCSFDLEVHESTGTTPNIDIRSAFKRSGEGQEDAGELDFSGLLKRREVKQQEEEPQVDVWELLKNAKPSEYEKIAFQYGITDLRGMLKRLKRMRREEKKSAAFAKILDPAYQVDKGGRVRFVVELADPKLEVKWYKNGQEIRPSTKYIFEHKGCQRILFINNCQMTDDSEYYVTAGDEKCSTELFVREPPIMVTKQLEDTTAYCGERVELECEVSEDDANVKWFKNGEEIIPGPKSRYRIRVEGKKHILIIEGATKADAAEYSVMTTGGQSSAKLSVDLKPLKILTPLTDQTVNLGKEICLKCEISENIPGKWTKNGLPVQESDRLKVVHKGRIHKLVIANALTEDEGDYVFAPDAYNVTLPAKVHVIDPPKIILDGLDADNTVTVIAGNKLRLEIPISGEPPPKAMWSRGDKAIMEGSGRIRTESYPDSSTLVIDIAERDDSGVYHINLKNEAGEAHASIKVKVVDFPDPPVAPTVTEVGDDWCIMNWEPPAYDGGSPILGYFIERKKKQSSRWMRLNFDLCKETTFEPKKMIEGVAYEVRIFAVNAIGISKPSMPSRPFVPLAVTSPPTLLTVDSVTDTTVTMRWRPPDHIGAAGLDGYVLEYCFEGTEDWIVANKDLIDKTKFTITGLPTDAKIFVRVKAVNAAGASEPKYYSQPILVKEIIEPPKIRIPRHLKQTYIRRVGEAVNLVIPFQGKPRPELTWKKDGAEIDKNQINIRNSETDTIIFIRKAERSHSGKYDLQVKVDKFVETASIDIQIIDRPGPPQIVKIEDVWGENVALTWTPPKDDGNAAITGYTIQKADKKSMEWFTVIEHYHRTSATITELVIGNEYYFRVFSENMCGLSEDATMTKESAVIARDGKIYKNPVYEDFDFSEAPMFTQPLVNTYAIAGYNATLNCSVRGNPKPKITWMKNKVAIVDDPRYRMFSNQGVCTLEIRKPSPYDGGTYCCKAVNDLGTVEIECKLEVKVIAQ

SEQ ID NO: 748120 - protein, 1099 aa, Homo sapiens
MNPFPPFCSSDWTLVETPPGEEQAKQNANSQLSILFIEKPQGGTVKVGEDITFIAKVKAEDLLRKPTIKWFKGKWMDLASKAGKHLQLKETFERHSRVYTFEMQIIKAKDNFAGNYRCEVTYKDKFDSCSFDLEVHESTGTTPNIDIRSAFKRSGEGQEDAGELDFSGLLKRREVKQQEEEPQVDVWELLKNAKPSEYEKIAFQYGITDLRGMLKRLKRMRREEKKSAAFAKILDPAYQVDKGGRVRFVVELADPKLEVKWYKNGQEIRPSTKYIFEHKGCQRILFINNCQMTDDSEYYVTAGDEKCSTELFVREPPIMVTKQLEDTTAYCGERVELECEVSEDDANVKWFKNGEEIIPGPKSRYRIRVEGKKHILIIEGATKADAAEYSVMTTGGQSSAKLSVDLKPLKILTPLTDQTVNLGKEICLKCEISENIPGKWTKNGLPVQESDRLKVVHKGRIHKLVIANALTEDEGDYVFAPDAYNVTLPAKVHVIDPPKIILDGLDADNTVTVIAGNKLRLEIPISGEPPPKAMWSRGDKAIMEGSGRIRTESYPDSSTLVIDIAERDDSGVYHINLKNEAGEAHASIKVKVVDFPDPPVAPTVTEVGDDWCIMNWEPPAYDGGSPILGYFIERKKKQSSRWMRLNFDLCKETTFEPKKMIEGVAYEVRIFAVNAIGISKPSMPSRPFVPLAVTSPPTLLTVDSVTDTTVTMRWRPPDHIGAAGLDGYVLEYCFEGTEDWIVANKDLIDKTKFTITGLPTDAKIFVRVKAVNAAGASEPKYYSQPILVKEIIEPPKIRIPRHLKQTYIRRVGEAVNLVIPFQGKPRPELTWKKDGAEIDKNQINIRNSETDTIIFIRKAERSHSGKYDLQVKVDKFVETASIDIQIIDRPGPPQIVKIEDVWGENVALTWTPPKDDGNAAITGYTIQKADKKSMEWFTVIEHYHRTSATITELVIGNEYYFRVFSENMCGLSEDATMTKESAVIARDGKIYKNPVYEDFDFSEAPMFTQPLVNTYAIAGYNATLNCSVRGNPKPKITWMKNKVAIVDDPRYRMFSNQGVCTLEIRKPSPYDGGTYCCKAVNDLGTVEIECKLEVKVIAQ

SEQ ID NO: 748121 - protein, 1097 aa, Homo sapiens
MPEPTKKEDWTLVETPPGEEQAKQNANSQLSILFIEKPQGGTVKVGEDITFIAKVKAEDLLRKPTIKWFKGKWMDLASKAGKHLQLKETFERHSRVYTFEMQIIKAKDNFAGNYRCEVTYKDKFDSCSFDLEVHESTGTTPNIDIRSAFKRSGEGQEDAGELDFSGLLKRREVKQQEEEPQVDVWELLKNAKPSEYEKIAFQYGITDLRGMLKRLKRMRREEKKSAAFAKILDPAYQVDKGGRVRFVVELADPKLEVKWYKNGQEIRPSTKYIFEHKGCQRILFINNCQMTDDSEYYVTAGDEKCSTELFVREPPIMVTKQLEDTTAYCGERVELECEVSEDDANVKWFKNGEEIIPGPKSRYRIRVEGKKHILIIEGATKADAAEYSVMTTGGQSSAKLSVDLKPLKILTPLTDQTVNLGKEICLKCEISENIPGKWTKNGLPVQESDRLKVVHKGRIHKLVIANALTEDEGDYVFAPDAYNVTLPAKVHVIDPPKIILDGLDADNTVTVIAGNKLRLEIPISGEPPPKAMWSRGDKAIMEGSGRIRTESYPDSSTLVIDIAERDDSGVYHINLKNEAGEAHASIKVKVVDFPDPPVAPTVTEVGDDWCIMNWEPPAYDGGSPILGYFIERKKKQSSRWMRLNFDLCKETTFEPKKMIEGVAYEVRIFAVNAIGISKPSMPSRPFVPLAVTSPPTLLTVDSVTDTTVTMRWRPPDHIGAAGLDGYVLEYCFEGTEDWIVANKDLIDKTKFTITGLPTDAKIFVRVKAVNAAGASEPKYYSQPILVKEIIEPPKIRIPRHLKQTYIRRVGEAVNLVIPFQGKPRPELTWKKDGAEIDKNQINIRNSETDTIIFIRKAERSHSGKYDLQVKVDKFVETASIDIQIIDRPGPPQIVKIEDVWGENVALTWTPPKDDGNAAITGYTIQKADKKSMEWFTVIEHYHRTSATITELVIGNEYYFRVFSENMCGLSEDATMTKESAVIARDGKIYKNPVYEDFDFSEAPMFTQPLVNTYAIAGYNATLNCSVRGNPKPKITWMKNKVAIVDDPRYRMFSNQGVCTLEIRKPSPYDGGTYCCKAVNDLGTVEIECKLEVKVIAQ

SEQ ID NO: 748122 - protein, 870 aa, Homo sapiens
HINLKNEAGEAHASIKVRFVVELADPKLEVKWYKNGQEIRPSTKYIFEHKGCQRILFINNCQMTDDSEYYVTAGDEKCSTELFVREPPIMVTKQLEDTTAYCGERVELECEVSEDDANVKWFKNGEEIIPGPKSRYRIRVEGKKHILIIEGATKADAAEYSVMTTGGQSSAKLSVDLKPLKILTPLTDQTVNLGKEICLKCEISENIPGKWTKNGLPVQESDRLKVVHKGRIHKLVIANALTEDEGDYVFAPDAYNVTLPAKVHVIDPPKIILDGLDADNTVTVIAGNKLRLEIPISGEPPPKAMWSRGDKAIMEGSGRIRTESYPDSSTLVIDIAERDDSGVYHINLKNEAGEAHASIKVKVVDFPDPPVAPTVTEVGDDWCIMNWEPPAYDGGSPILGYFIERKKKQSSRWMRLNFDLCKETTFEPKKMIEGVAYEVRIFAVNAIGISKPSMPSRPFVPLAVTSPPTLLTVDSVTDTTVTMRWRPPDHIGAAGLDGYVLEYCFEGTEDWIVANKDLIDKTKFTITGLPTDAKIFVRVKAVNAAGASEPKYYSQPILVKEIIEPPKIRIPRHLKQTYIRRVGEAVNLVIPFQGKPRPELTWKKDGAEIDKNQINIRNSETDTIIFIRKAERSHSGKYDLQVKVDKFVETASIDIQIIDRPGPPQIVKIEDVWGENVALTWTPPKDDGNAAITGYTIQKADKKSMEWFTVIEHYHRTSATITELVIGNEYYFRVFSENMCGLSEDATMTKESAVIARDGKIYKNPVYEDFDFSEAPMFTQPLVNTYAIAGYNATLNCSVRGNPKPKITWMKNKVAIVDDPRYRMFSNQGVCTLEIRKPSPYDGGTYCCKAVNDLGTVEIECKLEVKVIAQ

SEQ ID NO: 748123 - protein, 1177 aa, Homo sapiens
MPEPTKKEENEVPAPAPPPEEPSKEKEAGTTPAKDEEEVSPPSALPPGLGSRALERKDSDWTLVETPPGEEQAKQNANSQLSILFIEKPQGGTVKVGEDITFIAKVKAEDLLRKPTIKWFKGKWMDLASKAGKHLQLKETFERHSRVYTFEMQIIKAKDNFAGNYRCEVTYKDKFDSCSFDLEVHESTGTTPNIDIRSAFKRSGEGQEDAGELDFSGLLKRREVKQQEEEPQVDVWELLKNAKPSEYEKIAFQYGITDLRGMLKRLKRMRREEKKSAAFAKILDPAYQVDKGGRVRFVVELADPKLEVKWYKNGQEIRPSTKYIFEHKGCQRILFINNCQMTDDSEYYVTAGDEKCSTELFVREPPIMVTKQLEDTTAYCGERVELECEVSEDDANVKWFKNGEEIIPGPKSRYRIRVEGKKHILIIEGATKADAAEYSVMTTGGQSSAKLSVDLKPLKILTPLTDQTVNLGKEICLKCEISENIPGKWTKNGLPVQESDRLKVVHKGRIHKLVIANALTEDEGDYVFAPDAYNVTLPAKVHVIDPPKIILDGLDADNTVTVIAGNKLRLEIPISGEPPPKAMWSRGDKAIMEGSGRIRTESYPDSSTLVIDIAERDDSGVYHINLKNEAGEAHASIKVKVVDFPDPPVAPTVTEVGDDWCIMNWEPPAYDGGSPILGYFIERKKKQSSRWMRLNFDLCKETTFEPKKMIEGVAYEVRIFAVNAIGISKPSMPSRPFVPLAVTSPPTLLTVDSVTDTTVTMRWRPPDHIGAAGLDGYVLEYCFEGTEDWIVANKDLIDKTKFTITGLPTDAKIFVRVKAVNAAGASEPKYYSQPILVKEIIEPPKIRIPRHLKQTYIRRVGEAVNLVIPFQGKPRPELTWKKDGAEIDKNQINIRNSETDTIIFIRKAERSHSGKYDLQVKVDKFVETASIDIQIIDRPGPPQIVKIEDVWGENVALTWTPPKDDGNAAITGYTIQKADKKSMEWFTVIEHYHRTSATITELVIGNEYYFRVFSENMCGLSEDATMTKESAVIARDGKIYKNPVYEDFDFSEAPMFTQPLVNTYAIAGYNATLNCSVRGNPKPKITWMKNKVAIVDDPRYRMFSNQGVCTLEIRKPSPYDGGTYCCKAVNDLGTVEIECKLEVKGGLSFCRLLLQGVPPNIIDSYLRDLHSSNPEEY

SEQ ID NO: 748124 - protein, 486 aa, Homo sapiens
MNWEPPAYDGGSPILGYFIERKKKQSSRWMRLNFDLCKETTFEPKKMIEGVAYEVRIFAVNAIGISKPSMPSRPFVPLAVTSPPTLLTVDSVTDTTVTMRWRPPDHIGAAGLDGYVLEYCFEGTEDWIVANKDLIDKTKFTITGLPTDAKIFVRVKAVNAAGASEPKYYSQPILVKEIIEPPKIRIPRHLKQTYIRRVGEAVNLVIPFQGKPRPELTWKKDGAEIDKNQINIRNSETDTIIFIRKAERSHSGKYDLQVKVDKFVETASIDIQIIDRPGPPQIVKIEDVWGENVALTWTPPKDDGNAAITGYTIQKADKKSMEWFTVIEHYHRTSATITELVIGNEYYFRVFSENMCGLSEDATMTKESAVIARDGKIYKNPVYEDFDFSEAPMFTQPLVNTYAIAGYNATLNCSVRGNPKPKITWMKNKVAIVDDPRYRMFSNQGVCTLEIRKPSPYDGGTYCCKAVNDLGTVEIECKLEVKVIAQ

SEQ ID NO: 748125 - protein, 812 aa, Homo sapiens
  misc_feature (788)..(788): Xaa can be any naturally occurring amino acid
  misc_feature (799)..(800): Xaa can be any naturally occurring amino acid
MPEPTKKEENEVPAPAPPPEEPSKEKEAGTTPAKDEEEVSPPSALPPGLGSRALERKDSDWTLVETPPGEEQAKQNANSQLSILFIEKPQGGTVKVGEDITFIAKVKAEDLLRKPTIKWFKGKWMDLASKAGKHLQLKETFERHSRVYTFEMQIIKAKDNFAGNYRCEVTYKDKFDSCSFDLEVHESTGTTPNIDIRSAFKRSGEGQEDAGELDFSGLLKRREVKQQEEEPQVDVWELLKNAKPSEYEKIAFQYGITDLRGMLKRLKRMRREEKKSAAFAKILDPAYQVDKGGRVRFVVELADPKLEVKWYKNGQEIRPSTKYIFEHKGCQRILFINNCQMTDDSEYYVTAGDEKCSTELFVREPPIMVTKQLEDTTAYCGERVELECEVSEDDANVKWFKNGEEIIPGPKSRYRIRVEGKKHILIIEGATKADAAEYSVMTTGGQSSAKLSVDLKPLKILTPLTDQTVNLGKEICLKCEISENIPGKWTKNGLPVQESDRLKVVHKGRIHKLVIANALTEDEGDYVFAPDAYNVTLPAKVHVIDPPKIILDGLDADNTVTVIAGNKLRLEIPISGEPPPKAMWSRGDKAIMEGSGRIRTESYPDSSTLVIDIAERDDSGVYHINLKNEAGEAHASIKVKVVDFPDPPVAPTVTEVGDDWCIMNWEPPAYDGGSPILGYFIERKKKQSSRWMRLNFDLCKETTFEPKKMIEGVAYEVRIFAVNAIGISKPSMPSRPFVPLAVTSPPTLLTVDSVTDTTVTMRWRPPDHIGAAGLDGYVLEYCFEGRGXDSCKCLFESYXXLHHPSSKLNLVL

SEQ ID NO: 748126 - protein, 435 aa, Homo sapiens
MPEPTKKEENEVPAPAPPPEEPSKEKEAGTTPAKDEEEVSPPSALPPGLGSRALERKDSDWTLVETPPGEEQAKQNANSQLSILFIEKPQGGTVKVGEDITFIAKVKAEDLLRKPTIKWFKGKWMDLASKAGKHLQLKETFERHSRVYTFEMQIIKAKDNFAGNYRCEVTYKDKFDSCSFDLEVHESTGTTPNIDIRSAFKRSGEGQEDAGELDFSGLLKRREVKQQEEEPQVDVWELLKNAKPSEYEKIAFQYGITDLRGMLKRLKRMRREEKKSAAFAKILDPAYQVDKGGRVRFVVELADPKLEVKWYKNGQEIRPSTKYIFEHKGCQRILFINNCQMTDDSEYYVTAGDEKCSTELFVREPPIMVTKQLEDTTAYCGERVELECEVSEDDANVKWFKNGEEIIPGPKSRYRIRVEGKKHILIIEGATKSKF

SEQ ID NO: 748127 - protein, 390 aa, Homo sapiens
MPEPTKKEENEVPAPAPPPEEPSKEKEAGTTPAKDEEEVSPPSALPPGLGSRALERKDSDWTLVETPPGEEQAKQNANSQLSILFIEKPQGGTVKVGEDITFIAKVKAEDLLRKPTIKWFKGKWMDLASKAGKHLQLKETFERHSRVYTFEMQIIKAKDNFAGNYRCEVTYKDKFDSCSFDLEVHESTGTTPNIDIRSAFKRSGEGQEDAGELDFSGLLKRREVKQQEEEPQVDVWELLKNAKPSEYEKIAFQYGITDLRGMLKRLKRMRREEKKSAAFAKILDPAYQVDKGGRVRFVVELADPKLEVKWYKNGQEIRPSTKYIFEHKGCQRILFINNCQMTDDSEYYVTAGDEKCSTELFVRGKNEISYCGHQELLASSPRDNDQSESN

SEQ ID NO: 748128 - protein, 222 aa, Homo sapiens
MPEPTKKEENEVPAPAPPPEEPSKEKEAGTTPAKDEEEVSPPSALPPGLGSRALERKDSDWTLVETPPGEEQAKQNANSQLSILFIEKPQGGTVKVGEDITFIAKVKAEDLLRKPTIKWFKGKWMDLASKAGKHLQLKETFERHSRVYTFEMQIIKAKDNFAGNYRCEVTYKDKFDSCSFDLEVHESTGTTPNIDIRSAFKRSGEGQEDAGELDFSGLLKRR

SEQ ID NO: 748129 - protein, 138 aa, Homo sapiens
MPEPTKKEENEVPAPAPPPEEPSKEKEAGTTPAKDEEEVSPPSALPPGLGSRALERKDSDWTLVETPPGEEQAKQNANSQLSILFIEKPQGGTVKVANIAQPGWEQPRESPHHAHHPLWHWLHPLPIPFHPPLLLNKF

SEQ ID NO: 748130 - protein, 1141 aa, Homo sapiens
MPEPTKKEENEVPAPAPPPEEPSKEKEAGTTPAKDWTLVETPPGEEQAKQNANSQLSILFIEKPQGGTVKVGEDITFIAKVKAEDLLRKPTIKWFKGKWMDLASKAGKHLQLKETFERHSRVYTFEMQIIKAKDNFAGNYRCEVTYKDKFDSCSFDLEVHESTGTTPNIDIRSAFKRSGEGQEDAGELDFSGLLKRREVKQQEEEPQVDVWELLKNAKPSEYEKIAFQYGITDLRGMLKRLKRMRREEKKSAAFAKILDPAYQVDKGGRVRFVVELADPKLEVKWYKNGQEIRPSTKYIFEHKGCQRILFINNCQMTDDSEYYVTAGDEKCSTELFVREPPIMVTKQLEDTTAYCGERVELECEVSEDDANVKWFKNGEEIIPGPKSRYRIRVEGKKHILIIEGATKADAAEYSVMTTGGQSSAKLSVDLKPLKILTPLTDQTVNLGKEICLKCEISENIPGKWTKNGLPVQESDRLKVVHKGRIHKLVIANALTEDEGDYVFAPDAYNVTLPAKVHVIDPPKIILDGLDADNTVTVIAGNKLRLEIPISGEPPPKAMWSRGDKAIMEGSGRIRTESYPDSSTLVIDIAERDDSGVYHINLKNEAGEAHASIKVKVVDFPDPPVAPTVTEVGDDWCIMNWEPPAYDGGSPILGYFIERKKKQSSRWMRLNFDLCKETTFEPKKMIEGVAYEVRIFAVNAIGISKPSMPSRPFVPLAVTSPPTLLTVDSVTDTTVTMRWRPPDHIGAAGLDGYVLEYCFEGSTSAKQSDENGEAAYDLPAEDWIVANKDLIDKTKFTITGLPTDAKIFVRVKAVNAAGASEPKYYSQPILVKEIIEPPKIRIPRHLKQTYIRRVGEAVNLVIPFQGKPRPELTWKKDGAEIDKNQINIRNSETDTIIFIRKAERSHSGKYDLQVKVDKFVETASIDIQIIDRPGPPQIVKIEDVWGENVALTWTPPKDDGNAAITGYTIQKADKKSMEWFTVIEHYHRTSATITELVIGNEYYFRVFSENMCGLSEDATMTKESAVIARDGKIYKNPVYEDFDFSEAPMFTQPLVNTYAIAGYNATLNCSVRGNPKPKITWMKNKVAIVDDPRYRMFSNQGVCTLEIRKPSPYDGGTYCCKAVNDLGTVEIECKLEVKVIAQ

SEQ ID NO: 748131 - protein, 1171 aa, Homo sapiens
MPEPTKKEENEVPAPAPPPEEPSKEKEAGTTPAKDEEEVSPPSALPPGLGSRALERKDSDWTLVETPPGEEQAKQNANSQLSILFIEKPQGGTVKVGEDITFIAKVKAEDLLRKPTIKWFKGKWMDLASKAGKHLQLKETFERHSRVYTFEMQIIKAKDNFAGNYRCEVTYKDKFDSCSFDLEVHESTGTTPNIDIRSAFKRSGEGQEDAGELDFSGLLKRREVKQQEEEPQVDVWELLKNAKPSEYEKIAFQYGITDLRGMLKRLKRMRREEKKSAAFAKILDPAYQVDKGGRVRFVVELADPKLEVKWYKNGQEIRPSTKYIFEHKGCQRILFINNCQMTDDSEYYVTAGDEKCSTELFVREPPIMVTKQLEDTTAYCGERVELECEVSEDDANVKWFKNGEEIIPGPKSRYRIRVEGKKHILIIEGATKADAAEYSVMTTGGQSSAKLSVDLKPLKILTPLTDQTVNLGKEICLKCEISENIPGKWTKNGLPVQESDRLKVVHKGRIHKLVIANALTEDEGDYVFAPDAYNVTLPAKVHVIDPPKIILDGLDADNTVTVIAGNKLRLEIPISGEPPPKAMWSRGDKAIMEGSGRIRTESYPDSSTLVIDIAERDDSGVYHINLKNEAGEAHASIKVKVVDFPDPPVAPTVTEVGDDWCIMNWEPPAYDGGSPILGYFIERKKKQSSRWMRLNFDLCKETTFEPKKMIEGVAYEVRIFAVNAIGISKPSMPSRPFVPLAVTSPPTLLTVDSVTDTTVTMRWRPPDHIGAAGLDGYVLEYCFEGTEDWIVANKDLIDKTKFTITGLPTDAKIFVRVKAVNAAGASEPKYYSQPILVKEIIEPPKIRIPRHLKQTYIRRVGEAVNLVIPFQGKPRPELTWKKDGAEIDKNQINIRNSETDTIIFIRKAERSHSGKYDLQVKVDKFVETASIDIQIIDRPGPPQIVKIEDVWGENVALTWTPPKDDGNAAITGYTIQKADKKSMEWFTVIEHYHRTSATITELVIGNEYYFRVFSENMCGLSEDATMTKESAVIARDGKIYKNPVYEDFDFSEAPMFTQPLVNTYAIAGYNATLNCSVRGNPKPKITWMKNKVAIVDDPRYRMFSNQGVCTLEIRKPSPYDGGTYCCKAVNDLGTVEIECKLEVKVIYQGVNTPGQPVFLEGQQQSLHNKDF

SEQ ID NO: 748132 - protein, 1109 aa, Homo sapiens
MPEPTKKEENEVPAPAPPPEDWTLVETPPGEEQAKQNANSQLSILFIEKPQGGTVKVGEDITFIAKVKAEDLLRKPTIKWFKGKWMDLASKAGKHLQLKETFERHSRVYTFEMQIIKAKDNFAGNYRCEVTYKDKFDSCSFDLEVHESTGTTPNIDIRSAFKRSGEGQEDAGELDFSGLLKRREVKQQEEEPQVDVWELLKNAKPSEYEKIAFQYGITDLRGMLKRLKRMRREEKKSAAFAKILDPAYQVDKGGRVRFVVELADPKLEVKWYKNGQEIRPSTKYIFEHKGCQRILFINNCQMTDDSEYYVTAGDEKCSTELFVREPPIMVTKQLEDTTAYCGERVELECEVSEDDANVKWFKNGEEIIPGPKSRYRIRVEGKKHILIIEGATKADAAEYSVMTTGGQSSAKLSVDLKPLKILTPLTDQTVNLGKEICLKCEISENIPGKWTKNGLPVQESDRLKVVHKGRIHKLVIANALTEDEGDYVFAPDAYNVTLPAKVHVIDPPKIILDGLDADNTVTVIAGNKLRLEIPISGEPPPKAMWSRGDKAIMEGSGRIRTESYPDSSTLVIDIAERDDSGVYHINLKNEAGEAHASIKVKVVDFPDPPVAPTVTEVGDDWCIMNWEPPAYDGGSPILGYFIERKKKQSSRWMRLNFDLCKETTFEPKKMIEGVAYEVRIFAVNAIGISKPSMPSRPFVPLAVTSPPTLLTVDSVTDTTVTMRWRPPDHIGAAGLDGYVLEYCFEGTEDWIVANKDLIDKTKFTITGLPTDAKIFVRVKAVNAAGASEPKYYSQPILVKEIIEPPKIRIPRHLKQTYIRRVGEAVNLVIPFQGKPRPELTWKKDGAEIDKNQINIRNSETDTIIFIRKAERSHSGKYDLQVKVDKFVETASIDIQIIDRPGPPQIVKIEDVWGENVALTWTPPKDDGNAAITGYTIQKADKKSMEWFTVIEHYHRTSATITELVIGNEYYFRVFSENMCGLSEDATMTKESAVIARDGKIYKNPVYEDFDFSEAPMFTQPLVNTYAIAGYNATLNCSVRGNPKPKITWMKNKVAIVDDPRYRMFSNQGVCTLEIRKPSPYDGGTYCCKAVNDLGTVEIECKLEVKVIAQ

SEQ ID NO: 748133 - protein, 808 aa, Homo sapiens
MTDDSEYYVTAGDEKCSTELFVREPPIMVTKQLEDTTAYCGERVELECEVSEDDANVKWFKNGEEIIPGPKSRYRIRVEGKKHILIIEGATKADAAEYSVMTTGGQSSAKLSVDLKPLKILTPLTDQTVNLGKEICLKCEISENIPGKWTKNGLPVQESDRLKVVHKGRIHKLVIANALTEDEGDYVFAPDAYNVTLPAKVHVIDPPKIILDGLDADNTVTVIAGNKLRLEIPISGEPPPKAMWSRGDKAIMEGSGRIRTESYPDSSTLVIDIAERDDSGVYHINLKNEAGEAHASIKVKVVDFPDPPVAPTVTEVGDDWCIMNWEPPAYDGGSPILGYFIERKKKQSSRWMRLNFDLCKETTFEPKKMIEGVAYEVRIFAVNAIGISKPSMPSRPFVPLAVTSPPTLLTVDSVTDTTVTMRWRPPDHIGAAGLDGYVLEYCFEGTEDWIVANKDLIDKTKFTITGLPTDAKIFVRVKAVNAAGASEPKYYSQPILVKEIIEPPKIRIPRHLKQTYIRRVGEAVNLVIPFQGKPRPELTWKKDGAEIDKNQINIRNSETDTIIFIRKAERSHSGKYDLQVKVDKFVETASIDIQIIDRPGPPQIVKIEDVWGENVALTWTPPKDDGNAAITGYTIQKADKKSMEWFTVIEHYHRTSATITELVIGNEYYFRVFSENMCGLSEDATMTKESAVIARDGKIYKNPVYEDFDFSEAPMFTQPLVNTYAIAGYNATLNCSVRGNPKPKITWMKNKVAIVDDPRYRMFSNQGVCTLEIRKPSPYDGGTYCCKAVNDLGTVEIECKLEVKVIAQ

SEQ ID NO: 748134 - protein, 166 aa, Homo sapiens
MEWFTVIEHYHRTSATITELVIGNEYYFRVFSENMCGLSEDATMTKESAVIARDGKIYKNPVYEDFDFSEAPMFTQPLVNTYAIAGYNATLNCSVRGNPKPKITWMKNKVAIVDDPRYRMFSNQGVCTLEIRKPSPYDGGTYCCKAVNDLGTVEIECKLEVKVIAQ

SEQ ID NO: 748135 - protein, 283 aa, Homo sapiens
AVFSFQGKPRPELTWKKDGAEIDKNQINIRNSETDTIIFIRKAERSHSGKYDLQVKVDKFVETASIDIQIIDRPGPPQIVKIEDVWGENVALTWTPPKDDGNAAITGYTIQKADKKSMEWFTVIEHYHRTSATITELVIGNEYYFRVFSENMCGLSEDATMTKESAVIARDGKIYKNPVYEDFDFSEAPMFTQPLVNTYAIAGYNATLNCSVRGNPKPKITWMKNKVAIVDDPRYRMFSNQGVCTLEIRKPSPYDGGTYCCKAVNDLGTVEIECKLEVKVIAQ

SEQ ID NO: 748136 - protein, 260 aa, Homo sapiens
GPQFRRKMAGSPELVVLDPPWDKELAAGTESQALVSATPREDFRVRCTSKRAVTEMLQLCGRFVQKLGDALPEEIREPALRDAQWTFESAVQENISINGQAWQEASDNCFMDSDIKVLEDQFDEIIVDIATKRKQYPRKILECVIKTIKAKQEILKQYHPVVHPLDLKYDPDPAPHMENLKCRGETVAKEISEAMKSLPALIEQGEGFSQVLRMQPVIHLQRIHQEVFPVVIGNQMLNLRTFTQIEPTTETGSRKPLTGY

SEQ ID NO: 748137 - protein, 238 aa, Homo sapiens
GPQFRRKMAGSPELVVLDPPWDKELAAGTESQALVSATPREDFRVRCTSKRAVTEMLQLCGRFVQKLGDALPEEIREPALRDAQWTFESAVQENISINGQAWQEASDNCFMDSDIKVLEDQFDEIIVDIATKRKQYPRKILECVIKTIKAKQEILKQYHPVVHPLDLKYDPDPESLPALIEQGEGFSQVLRMQPVIHLQRIHQEVFPVVIGNQMLNLRTFTQIEPTTETGSRKPLTGY

SEQ ID NO: 748138 - protein, 160 aa, Homo sapiens
GPQFRRKMAGSPELVVLDPPWDKELAAGTESQALVSATPREDFRVRCTSKRAVTEMLQLCGRFVQKLGDALPEEIREPALRDAQWTFESAVQENISINGQAWQEASDNCFMDSDIKVLEDQFDEIIVDIATKRKQYPRKILECVIKTIKAKQEILSPCLH

SEQ ID NO: 748139 - protein, 161 aa, Homo sapiens
GPQFRRKMAGSPELVVLDPPWDKELAAGTESQALVSATPREDFRVRCTSKRAVTEMLQLCGRFVQKLGDALPEEIREPALRDAQWTFESAVQENISINGQAWQEASDNCFMDSDIKVLEDQFDEIIVDIATKRKQYPRKILECVIKTIKAKQEILPLIWKI

SEQ ID NO: 748140 - protein, 147 aa, Homo sapiens
GPQFRRKMAGSPELVVLDPPWDKELAAGTESQALVSATPREDFRVRCTSKRAVTEMLQLCGRFVQKLGDALPEEIREPALRDAQWTFESAVQENISINGQAWQEASDNCFMDSDIKVLEDQFDEIIVDITQIEPTTETGSRKPLTGY

SEQ ID NO: 748141 - protein, 278 aa, Homo sapiens
GPQFRRKMAGSPELVVLDPPWDKELAAGTESQALVSATPREDFRVRCTSKRAVTEMLQLCGRFVQKLGDALPEEIREPALRDAQWTFESAVQENISINGQAWQEASDNCFMDSDIKVLEDQFDEIIVDIATKRKQYPRKILECVIKTIKAKQEILKQYHPVVHPLDLKYDPDPVEYNRVVHPLDLKYDPDPAPHMENLKCRGETVAKEISEAMKSLPALIEQGEGFSQVLRMQPVIHLQRIHQEVFPVVIGNQMLNLRTFTQIEPTTETGSRKPLTGY

SEQ ID NO: 748142 - protein, 519 aa, Homo sapiens
MAAPSRLLIRGGRVVNDDFSEVADVLVEDGVVRALGHDLLPPGGAPAGLRVLDAAGKLVLPGGIDTHTHMQFPFMGSRSIDDFHQGTKAALSGGTTMIIDFAIPQKGGSLIEAFETWRSWADPKVCCDYSLHVAVTWWSDQVKEEMKILVQDKGVNSFKMFMAYKDLYMVTDLELYEAFSRCKEIGAIAQVHAENGDLIAEGAKKMLALGITGPEGHELCRPEAVEAEATLRAITIASAVNCPLYIVHVMSKSAAKVIADARRDGKVVYGEPIAASLGTDGTHYWNKEWHHAAHHVMGPPLRPDPSTPDFLMNLLANDDLTTTGTDNCTFNTCQKALGKDDFTKIPNGVNGVEDRMSVIWEKGVHSGKMDENRFVAVTSTNAAKIFNLYPRKGRIAVGSDADIVIWDPKGTRTISAKTHHQAVNFNIFEGMVCHGVPLVTISRGKVVYEAGVFSVTAGDGKFIPRKPFAEYIYKRIKQRDRTCTPTPVERAPYKGEVATLKSRVTKEDATAGTRKQAHP

SEQ ID NO: 748143 - protein, 72 aa, Homo sapiens
MRSKWQMENSNLDLSHFKGHTVDHYNVLVWVVKMRPTIICYLSVCMCVCVCVCVCVCVCVISKLCSSTDSSR

SEQ ID NO: 748144 - protein, 501 aa, Homo sapiens
MAAPSRLLIRGGRVVNDDFSEVADVLVEDGVVRALGHDLLPPGGAPAGLRVLDAAGKLVLPGGIDTHTHMQFPFMGSRSIDDFHQGTKAALSGGTTMIIDFAIPQKGGSLIEAFETWRSWADPKVCCDYSLHVAVTWWSDQVKEEMKILVQDKGVNSFKMFMAYKDLYMVTDLELYEAFSRCKEIGAIAQVHAEGPEGHELCRPEAVEAEATLRAITIASAVNCPLYIVHVMSKSAAKVIADARRDGKVVYGEPIAASLGTDGTHYWNKEWHHAAHHVMGPPLRPDPSTPDFLMNLLANDDLTTTGTDNCTFNTCQKALGKDDFTKIPNGVNGVEDRMSVIWEKGVHSGKMDENRFVAVTSTNAAKIFNLYPRKGRIAVGSDADIVIWDPKGTRTISAKTHHQAVNFNIFEGMVCHGVPLVTISRGKVVYEAGVFSVTAGDGKFIPRKPFAEYIYKRIKQRDRTCTPTPVERAPYKGEVATLKSRVTKEDATAGTRKQAHP

SEQ ID NO: 748145 - protein, 333 aa, Homo sapiens
MVTDLELYEAFSRCKEIGAIAQVHAEGPEGHELCRPEAVEAEATLRAITIASAVNCPLYIVHVMSKSAAKVIADARRDGKVVYGEPIAASLGTDGTHYWNKEWHHAAHHVMGPPLRPDPSTPDFLMNLLANDDLTTTGTDNCTFNTCQKALGKDDFTKIPNGVNGVEDRMSVIWEKGVHSGKMDENRFVAVTSTNAAKIFNLYPRKGRIAVGSDADIVIWDPKGTRTISAKTHHQAVNFNIFEGMVCHGVPLVTISRGKVVYEAGVFSVTAGDGKFIPRKPFAEYIYKRIKQRDRTCTPTPVERAPYKGEVATLKSRVTKEDATAGTRKQAHP

SEQ ID NO: 748146 - protein, 416 aa, Homo sapiens
MAAPSRLLIRGGRVVNDDFSEVADVLVEDGVVRALGHDLLPPGGAPAGLRVLDAAGKLVLPGGIDTHTHMQFPFMGSRSIDDFHQGTKAALSGGTTMIIDFAIPQKGGSLIEAFETWRSWADPKVCCDYSLHVAVTWWSDQVKEEMKILVQDKGVNSFKMFMAYKDLYMVTDLELYEAFSRCKEIGAIAQVHAENGDLIAEGAKKMLALGITGPEGHELCRPEAVEAEATLRAITIASAVNCPLYIVHVMSKSAAKVIADARRDGKVVYGEPIAASLGTDGTHYWNKEWHHAAHHVMGPPLRPDPSTPDFLMNLLANDDLTTTGTDNCTFNTCQKALGKDDFTKIPNGVNGVEDRMSVIWEKGVHSGKMDENRFVAVTSTNAAKIFNLYPRKGRIAVGSDADIVIWDPKGTRGCPL

SEQ ID NO: 748147 - protein, 157 aa, Homo sapiens
CRNWHEIWDPKGTRGCRSCVAFSDNGSVYKTNMNLPLQCLANARVHMEERTISAKTHHQAVNFNIFEGMVCHGVPLVTISRGKVVYEAGVFSVTAGDGKFIPRKPFAEYIYKRIKQRDRTCTPTPVERAPYKGEVATLKSRVTKEDATAGTRKQAHP

SEQ ID NO: 748148 - protein, 129 aa, Homo sapiens
KGLPRCALEASCLRGGGTSWKGTISAKTHHQAVNFNIFEGMVCHGVPLVTISRGKVVYEAGVFSVTAGDGKFIPRKPFAEYIYKRIKQRDRTCTPTPVERAPYKGEVATLKSRVTKEDATAGTRKQAHP

SEQ ID NO: 748149 - protein, 510 aa, Homo sapiens
MAAPSRLLIRGGRVVNDDFSEVADVLVEDGVVRALGHDLLPPGGAPAGLRVLDAAGKLVLPGGIDTHTHMQFPFMGSRSIDDFHQGTKAALSGGTTMIIDFAIPQKGGSLIEAFETWRSWADPKVCCDYSLHVAVTWWSDQVKEEMKILVQDKGVNSFKMFMAYKDLYMVTDLELYEAFSRCKEIGAIAQVHAENGDLIAEGAKKMLALGITGPEGHELCRPEAVEAEATLRAITIASAVNCPLYIVHVMSKSAAKVIADARRDGKVVYGEPIAASLGTDGTHYWNKEWHHAAHHVMGPPLRPDPSTPDFLMNLLANDDLTTTGTDNCTFNTCQKALGKDDFTKIPNGVNGVEDRMSVIWEKGVHSGKMDENRFVAVTSTNAAKIFNLYPRKGRIAVGSDADIVIWDPKGTRTISAKTHHQAVNFNIFEGMVCHGVPLVTISRGKVVYEAGVFSVTAGDGKFIPRKPFAEYIYKRIKQRDRVKKSEERRLPFPSQPNIVNPWRSRPYSTP

SEQ ID NO: 748150 - protein, 519 aa, Homo sapiens; identical to SEQ ID NO: 748142

SEQ ID NO: 748151 - protein, 317 aa, Homo sapiens
MAAPSRLLIRGGRVVNDDFSEVADVLVEDGVVRALGHDLLPPGGAPAGLRVLDAAGKLVLPGGIDTHTHMQFPFMGSRSIDDFHQGTKAALSGGTTMIIDFAIPQKGGSLIEAFETWRSWADPKVCCDYSLHVAVTWWSDQVKEEMKILVQDKGVNSFKMFMAYKDLYMVTDLELYEAFSRCKEIGAIAQVHAENGDLIAEGAKKMLALGITGPEGHELCRPEAVEAEATLRAITIASAVNCPLYIVHVMSKSAAKVIADARRDGKVVYGEPIAASLGTDGTHYWNKEWHHAAHHVMGPPLRPDPSTPDFLMNLLAK

SEQ ID NO: 748152 - protein, 485 aa, Homo sapiens
MGEPGFFVTGDRAGGRSWCLRRVGMSAGWLLLEDGCEVTVGRGFGVTYQLVSKICPLMISRNHCVLKQNPEGQWTIMDNKSLNGVWLNRARLEPLRVYSIHQGDYIQLGVPLENKENAEYEYEVTEEDWETIYPCLSPKNDQMIEKNKELRTKRKFSLDELAGPGAEGPSNLKSKINKVSCESGQPVKSQGKGEVASTPSDNLDPKLTALEPSKTTGAPIYPGFPKVTEVHHEQKASNSSASQRSLQMFKVTMSRILRLKIQMQEKHEAVMNVKKQTQKGNSKKVVQMEQELQDLQSQLCAEQAQQQARVEQLEKTFQEEEQHLQGLEIAQGEKDLKQQLAQALQEHWALMEELNRSKKDFEAIIQAKNKELEQTKEEKEKMQAQKEEVLSHMNDVLENELQCIICSEYFIEAVTLNCAHSFCSYCINEWMKRKIECPICRKDIKSKTYSLVLDNCINKMVNNLSSEVKERRIVLIRERKAKRLF

SEQ ID NO: 748153 - protein, 86 aa, Homo sapiens
MGEPGFFVTGDRAGGRSWCLRRVGMSAGWLLLEDGCEVRGKGSCGAEGRGWRERGSGEGGRCLAGLNEWQRGGGHQEEERSVCGGG

SEQ ID NO: 748154 - protein, 485 aa, Homo sapiens; identical to SEQ ID NO: 748152

SEQ ID NO: 748155 - protein, 485 aa, Homo sapiens; identical to SEQ ID NO: 748152

SEQ ID NO: 748156 - protein, 455 aa, Homo sapiens
MGEPGFFVTGDRAGGRSWCLRRVGMSAGWLLLEDGCEVTVGRGFGVTYQLVSKICPLMISRNHCVLKQNPEGQWTIMDNKSLNGVWLNRARLEPLRVYSIHQGDYIQLGVPLENKENAEYEYEVTEEDWETIYPCLSPKNDQMIEKNKELRTKRKFSLDELAGPGAEGPSNLKSKINKVSCESGQPVKSQGKGEVASTPSDNLDPKLTALEPSKTTGAPIYPGFPKVTEVHHEQKASNSSASQRSLQMFKVTMSRILRLKIQMQEKHEAVMNVKKQTQKGNSKKVVQMEQELQDLQSQLCAEQAQQQARVEQLEKTFQEEEQHLQGLEIAQGEKDLKQQLAQALQEEEKEKMQAQKEEVLSHMNDVLENELQCIICSEYFIEAVTLNCAHSFCSYCINEWMKRKIECPICRKDIKSKTYSLVLDNCINKMVNNLSSEVKERRIVLIRERKAKRLF

SEQ ID NO: 748157 - protein, 485 aa, Homo sapiens; identical to SEQ ID NO: 748152

SEQ ID NO: 748158 - protein, 428 aa, Homo sapiens
MISRNHCVLKQNPEGQWTIMDNKSLNGVWLNRARLEPLRVYSIHQGDYIQLGVPLENKENAEYEYEVTEEDWETIYPCLSPKNDQMIEKNKELRTKRKFSLDELAGPGAEGPSNLKSKINKVSCESGQPVKSQGKGEVASTPSDNLDPKLTALEPSKTTGAPIYPGFPKVTEVHHEQKASNSSASQRSLQMFKVTMSRILRLKIQMQEKHEAVMNVKKQTQKGNSKKVVQMEQELQDLQSQLCAEQAQQQARVEQLEKTFQEEEQHLQGLEIAQGEKDLKQQLAQALQEHWALMEELNRSKKDFEAIIQAKNKELEQTKEEKEKMQAQKEEVLSHMNDVLENELQCIICSEYFIEAVTLNCAHSFCSYCINEWMKRKIECPICRKDIKSKTYSLVLDNCINKMVNNLSSEVKERRIVLIRERKAKRLF

SEQ ID NO: 748159 - protein, 448 aa, Homo sapiens
MGEPGFFVTGDRAGGRSWCLRRVGMSAGWLLLEDGCEVTVGRGFGVTYQLVSKICPLMISRNHCVLKQNPEGQWTIMDNKSLNGVWLNRARLEPLRVYSIHQGDYIQLGVPLENKENAEYEYEVTEEDWETIYPCLSPKNDQMIEKNKELRTKRKFSLDELAGPGAEGPSNLKSKINKVSCESGQPVKSQGKGEVASTPSDNLDPKLTALEPSKTTGAPIYPGFPKVTEVHHEQKASNSSASQRSLQMFKVTMSRILRLKIQMQEKHEAVMNVKKQTQKGNSKKVVQMEQELQDLQSQLCAEQAQQQARVEQLEKTFQEEEQHLQGLEIAQGEKDLKQQLAQALQEHWALMEELNRSKKDFEAIIQAKNKELEQTKEEKEKMQAQKEEVLSHMNDVLENELQCIICSEYFIEQRDCSEDRALRAFERLPGSASLRWSGGFSLAVTPLL

SEQ ID NO: 748160 - protein, 96 aa, Homo sapiens
FLRWSLALSPRLVCSGTILAHRNLCPLGSSNSPASASQVAGTTGTDYHTSLIFVFLVETGFHHVGQAGLEFLTSSNLPTSASQNAGITGVSHWAWP

SEQ ID NO: 748161 - protein, 167 aa, Homo sapiens
VLGFRCEPVHPATNLVLKTTQIDCLWLCICRSQSSRALSELKWQWQGCIPIWRLQGEDLPCTLHSPGLAAPSPPPKQQCWAESICCRPPLNTSASSSTFKNTWEYTGLTHTIQDNLPLQILSLHLQSPLHLGRPHSPTSAGSCVDTLKSRLRLLVCTSMLFLCLFFP

SEQ ID NO: 748162 - protein, 69 aa, Homo sapiens
NPNHWPKFHPLPQTSSPLQHHGCSPYQQLAEGLPGISSPPWNQIQVPLTATAPHLIPGLLVVKPRPFLL

SEQ ID NO: 748163 - protein, 106 aa, Homo sapiens
ETTPGEVCHGPQETGDGFPGPPRKTKEEKFTFIEHQMFAHHCCGLWWGKGWFNSVITPTWQCYEGHIITILQTGKLRLKHEGSKVIQQVSGRGRICFAPGPHPPGS

SEQ ID NO: 748164 - protein, 133 aa, Homo sapiens
SQPSKSTARPVGPRDLHSLNGTRRNVHFQATILRHRTQFSPQVSDSRPCSWCSEPTKPAVLPHSFVSRGQLICFFSHYSSNPAPPSTHTLLDTGLQTNHMACAPENACLKAQGVQTLADENGRKEAKPEARKQ

SEQ ID NO: 748165 - protein, 1014 aa, Homo sapiens
AVTSLSVSFPMLFHPLLPHLISPPLDPGTLAGNQRLQQVMHAADPLEIQADVHWTHIREREEEERMAPASESSASGAPLDENDLEEDVDSEPAEIEGEAAEDGDPGDTGAELDDDQHWSDSPSDADRELRLPCPAEGEAELELRVSEDEEKLPASPKHQERGPSQATSPIRSPQESALLFIPVHSPSTEGPQLPPVPAATQEKSPEERLFPEPLLPKEKPKADAPSDLKAVHSPIRSQPVTLPEARTPVSPGSPQPQPPVAASTPPPSPLPICSQPQPSTEATVPSPTQSPIRFQPAPAKTSTPLAPLPVQSQSDTKDRLGSPLAVDEALRRSDLVEEFWMKSAEIRRSLGLTPVDRSKGPEPSFPTPAFRPVSLKSYSVEKSPQDEGLHLLKPLSIPKRLGLPKPEGEPLSLPTPRSPSDRELRSAQEERRELSSSSGLGLHGSSSNMKTLGSQSFNTSDSAMLTPPSSPPPPPPPGEEPATLRRKLREAEPNASVVPPPLPATWMRPPREPAQPPREEVRKSFVESVEEIPFADDVEDTYDDKTEDSSLQEKFFTPPSCWPRPEKPRHPPLAKENGRLPALEGTLQPQKRGLPLVSAEAKELAEERMRAREKSVKSQALRDAMARQLSRMQQMELASGAPRPRKASSAPSQGKERRPDSPTRPTLRGSEEPTLKHEATSEEVLSPPSDSGGPDGSFTSSEGSSGKSKKRSSLFSPRRNKKEKKSKGEGRPPEKPSSNLLEEAAAKPKSLWKSVFSGYKKDKKKKADDKSCPSTPSSGATVDSGKHRVLPVVRAELQLRRQLSFSEDSDLSSDDVLEKSSQKSRREPRTYTEEELNAKLTRRVQKAARRQAKQEELKRLHRAQIIQRQLQQVEERQRRLEERGVAVEKALRGEAGMGKKDDPKLMQEWFKLVQEKNAMVRYESELMIFARELELEDRQSRLQQELRERMAVEDHLKTEEELSEEKQILNEMLEVVEQRDSLVALLEEQRLREREEDKDLEAAMLSKGFSLNWS

SEQ ID NO: 748166 - protein, 126 aa, Homo sapiens
AVTSLSVSFPMLFHPLLPHLISPPLDPGTLAGNQRLQQVMHAADPLEIQADVHWTHIREREEEERMAPASESSASGGKHSQPQAAVCPEHHPPAASVATGGLSVRAEPPMRSHTGARRIPLCCCQL

SEQ ID NO: 748167 - protein, 1025 aa, Homo sapiens
QCPHLQPLFSSHLAPSIEKCPPPVFGGPGPPPAPMLRVESPLGLAASPLSWGLHGSALRKAVPLAPVKMQPAVCPPFLPSFEPFCFAAPLDENDLEEDVDSEPAEIEGEAAEDGDPGDTGAELDDDQHWSDSPSDADRELRLPCPAEGEAELELRVSEDEEKLPASPKHQERGPSQATSPIRSPQESALLFIPVHSPSTEGPQLPPVPAATQEKSPEERLFPEPLLPKEKPKADAPSDLKAVHSPIRSQPVTLPEARTPVSPGSPQPQPPVAASTPPPSPLPICSQPQPSTEATVPSPTQSPIRFQPAPAKTSTPLAPLPVQSQSDTKDRLGSPLAVDEALRRSDLVEEFWMKSAEIRRSLGLTPVDRSKGPEPSFPTPAFRPVSLKSYSVEKSPQDEGLHLLKPLSIPKRLGLPKPEGEPLSLPTPRSPSDRELRSAQEERRELSSSSGLGLHGSSSNMKTLGSQSFNTSDSAMLTPPSSPPPPPPPGEEPATLRRKLREAEPNASVVPPPLPATWMRPPREPAQPPREEVRKSFVESVEEIPFADDVEDTYDDKTEDSSLQEKFFTPPSCWPRPEKPRHPPLAKENGRLPALEGTLQPQKRGLPLVSAEAKELAEERMRAREKSVKSQALRDAMARQLSRMQQMELASGAPRPRKASSAPSQGKERRPDSPTRPTLRGSEEPTLKHEATSEEVLSPPSDSGGPDGSFTSSEGSSGKSKKRSSLFSPRRNKKEKKSKGEGRPPEKPSSNLLEEAAAKPKSLWKSVFSGYKKDKKKKADDKSCPSTPSSGATVDSGKHRVLPVVRAELQLRRQLSFSEDSDLSSDDVLEKSSQKSRREPRTYTEEELNAKLTRRVQKAARRQAKQEELKRLHRAQIIQRQLQQVEERQRRLEERGVAVEKALRGEAGMGKKDDPKLMQEWFKLVQEKNAMVRYESELMIFARELELEDRQSRLQQELRERMAVEDHLKTEEELSEEKQILNEMLEVVEQRDSLVALLEEQRLREREEDKDLEAAMLSKGFSLNWS

SEQ ID NO: 748168 - protein, 929 aa, Homo sapiens
MSKWRGCSQVEKELASLRVCTHFCPFPLPDQHWSDSPSDADRELRLPCPAEGEAELELRVSEDEEKLPASPKHQERGPSQATSPIRSPQESALLFIPVHSPSTEGPQLPPVPAATQEKSPEERLFPEPLLPKEKPKADAPSDLKAVHSPIRSQPVTLPEARTPVSPGSPQPQPPVAASTPPPSPLPICSQPQPSTEATVPSPTQSPIRFQPAPAKTSTPLAPLPVQSQSDTKDRLGSPLAVDEALRRSDLVEEFWMKSAEIRRSLGLTPVDRSKGPEPSFPTPAFRPVSLKSYSVEKSPQDEGLHLLKPLSIPKRLGLPKPEGEPLSLPTPRSPSDRELRSAQEERRELSSSSGLGLHGSSSNMKTLGSQSFNTSDSAMLTPPSSPPPPPPPGEEPATLRRKLREAEPNASVVPPPLPATWMRPPREPAQPPREEVRKSFVESVEEIPFADDVEDTYDDKTEDSSLQEKFFTPPSCWPRPEKPRHPPLAKENGRLPALEGTLQPQKRGLPLVSAEAKELAEERMRAREKSVKSQALRDAMARQLSRMQQMELASGAPRPRKASSAPSQGKERRPDSPTRPTLRGSEEPTLKHEATSEEVLSPPSDSGGPDGSFTSSEGSSGKSKKRSSLFSPRRNKKEKKSKGEGRPPEKPSSNLLEEAAAKPKSLWKSVFSGYKKDKKKKADDKSCPSTPSSGATVDSGKHRVLPVVRAELQLRRQLSFSEDSDLSSDDVLEKSSQKSRREPRTYTEEELNAKLTRRVQKAARRQAKQEELKRLHRAQIIQRQLQQVEERQRRLEERGVAVEKALRGEAGMGKKDDPKLMQEWFKLVQEKNAMVRYESELMIFARELELEDRQSRLQQELRERMAVEDHLKTEEELSEEKQILNEMLEVVEQRDSLVALLEEQRLREREEDKDLEAAMLSKGFSLNWS

SEQ ID NO: 748169 - protein, 1025 aa, Homo sapiens; identical to SEQ ID NO: 748167

SEQ ID NO: 748170 - protein, 1025 aa, Homo sapiens; identical to SEQ ID NO: 748167

SEQ ID NO: 748171 - protein, 1025 aa, Homo sapiens; identical to SEQ ID NO: 748167

SEQ ID NO: 748172 - protein, 1025 aa, Homo sapiens; identical to SEQ ID NO: 748167

SEQ ID NO: 748173 - protein, 1002 aa, Homo sapiens
QCPHLQPLFSSHLAPSIEKCPPPVFGGPGPPPAPMLRVESPLGLAASPLSWGLHGSALRKAVPLAPVKMQPAVCPPFLPSFEPFCFAAPLDENDLEEDVDSEPAEIEGEAAEDGDPGDTGAELDDDQHWSDSPSDADRELRLPCPAEGEAELELRVSEDEEKLPASPKHQERGPSQATSPIRSPQESALLFIPVHSPSTEGPQLPPVPAATQEKSPEERLFPEPLLPKEKPKADAPSDLKAVHSPIRSQPVTLPEARTPVSPGSPQPQPPVAASTPPPSPLPICSQPQPSTEATVPSPTQSPIRFQPAPAKTSTPLAPLPVQSQSDTKDRLGSPLAVDEALRRSDLVEEFWMKSAEIRRSLGLTPVDRSKGPEPSFPTPAFRPVSLKSYSVEKSPQDEGLHLLKPLSIPKRLGLPKPEGEPLSLPTPRSPSDRELRSAQEERRELSSSSGLGLHGSSSNMKTLGSQSFNTSDSAMLTPPSSPPPPPPPGEEPATLRRKLREAEPNASVVPPPLPATWMRPPREPAQPPREEVRKSFVESVEEIPFADDVEDTYDDKTEDSSLQEKFFTPPSCWPRPEKPRHPPLAKENGRLPALEGTLQPQKRGLPLVSAEAKELAEERMRAREKSVKSQALRDAMARQLSRMQQMELASGAPRPRKASSAPSQGKERRPDSPTRPTLRGSEEPTLKHEATSEEVLSPPSDSGGPDGSFTSSEGSSGKSKKRSSLFSPRRNKKEKKSKGEGRPPEKPSSNLLEEAAAKPKSLWKSVFSGYKKDKKKKADDKSCPSTPSSGATVDSGKHRVLPVVRAELQLRRQLSFSEDSDLSSDDVLEKSSQKSRREPRTYTEEELNAKLTRRVQKAARRQAKQEELKRLHRAQIIQRQLQQVEERQRRLEERGVAVEKALRGEADYWGESYYSDLIDLHLGGMYGSACADTNPADALSPPTLPSPCSQKQGEINPITKWQKHRPFSSSKQSSVLISPLPTCAPEEDLSLLLLPGVVFNFL

SEQ ID NO: 748174 - protein, 1052 aa, Homo sapiens
QCPHLQPLFSSHLAPSIEKCPPPVFGGPGPPPAPMLRVESPLGLAASPLSWGLHGSALRKAVPLAPVKMQPAVCPPFLPSFEPFCFAAPLDENDLEEDVDSEPAEIEGEAAEDGDPGDTGAELDDDQHWSDSPSDADRELRLPCPAEGEAELELRVSEDEEKLPASPKHQERGPSQATSPIRSPQESALLFIPVHSPSTEGPQLPPVPAATQEKSPEERLFPEPLLPKEKPKADAPSDLKAVHSPIRSQPVTLPEARTPVSPGSPQPQPPVAASTPPPSPLPICSQPQPSTEATVPSPTQSPIRFQPAPAKTSTPLAPLPVQSQSDTKDRLGSPLAVDEALRRSDLVEEFWMKSAEIRRSLGLTPVDRSKGPEPSFPTPAFRPVSLKSYSVEKSPQDEGLHLLKPLSIPKRLGLPKPEGEPLSLPTPRSPSDRELRSAQEERRELSSSSGLGLHGSSSNMKTLGSQSFNTSDSAMLTPPSSPPPPPPPGEEPATLRRKLREAEPNASVVPPPLPATWMRPPREPAQPPREEVRKSFVESVEEIPFADDVEDTYDDKTEDSSLQEKFFTPPSCWPRPEKPRHPPLAKENGRLPALEGTLQPQKRGLPLVSAEAKELAEERMRAREKSVKSQALRDAMARQLSRMQQMELASGAPRPRKASSAPSQGKERRPDSPTRPTLRGSEEPTLKHEATSEEVLSPPSDSGGPDGSFTSSEGSSGKSKKRSSLFSPRRNKKEKKSKGEGRPPEKPSSNLLEEAAAKPKSLWKSVFSGYKKDKKKKADDKSCPSTPSSGATVDSGKHRVLPVVRAELQLRRQLSFSEDSDLSSDDVLEKSSQKSRRESIYVPHALAFRRSCASKPRTYTEEELNAKLTRRVQKAARRQAKQEELKRLHRAQIIQRQLQQVEERQRRLEERGVAVEKALRGEADYWGESYYSDLIDLHLGGMGKKDDPKLMQEWFKLVQEKNAMVRYESELMIFAGAGAGNRRVTGASRTLRGILKGGGCKKRFRCGGGQTRAWARPKEEAGAPGLVPRFVRGVPAGAYGKPGIHPVSFPPL

SEQ ID NO: 748175 - protein, 539 aa, Homo sapiens
MGSPEDDLIGIPFPDHSSELLSCLNEQRQLGHLCDLTIRTQGLEYRTHRAVLAACSHYFKKLFTEGGGGAVMGAGGSGTATGGAGAGVCELDFVGPEALGALLEFAYTATLTTSSANMPAVLQAARLLEIPCVIAACMEILQGSGLEAPSPDEDDCERARQYLEAFATATASGVPNGEDSPPQVPLPPPPPPPPRPVARRSRKPRKAFLQTKGARANHLVPEVPTVPAHPLTYEEEEVAGRVGSSGGSGPGDSYSPPTGTASPPEGPQSYEPYEGEEEEEELVYPPAYGLAQGGGPPLSPEELGSDEDAIDPDLMAYLSSLHQDNLAPGLDSQDKLVRKRRSQMPQECPVCHKIIHGAGKLPRHMRTHTGEKPFACEVCGVRFTRNDKLKIHMRKHTGERPYSCPHCPARFLHSYDLKNHMHLHTGDRPYECHLCHKAFAKEDHLQRHLKGQNCLEVRTRRRRKDDAPPHYPPPSTAAASPAGLDLSNGHLDTFRLSLARFWEQSAPTGPPVSTPGPPDDDEEEGAPTTPQAEGAMESS

SEQ ID NO: 748176 - protein, 539 aa, Homo sapiens; identical to SEQ ID NO: 748175

SEQ ID NO: 748177 - protein, 539 aa, Homo sapiens; identical to SEQ ID NO: 748175

SEQ ID NO: 748178 - protein, 539 aa, Homo sapiens; identical to SEQ ID NO: 748175

SEQ ID NO: 748179 - protein, 404 aa, Homo sapiens
MGSPEDDLIGIPFPDHSSELLSCLNEQRQLGHLCDLTIRTQGLEYRTHRAVLAACSHATSAVARRSRKPRKAFLQTKGARANHLVPEVPTVPAHPLTYEEEEVAGRVGSSGGSGPGDSYSPPTGTASPPEGPQSYEPYEGEEEEEELVYPPAYGLAQGGGPPLSPEELGSDEDAIDPDLMAYLSSLHQDNLAPGLDSQDKLVRKRRSQMPQECPVCHKIIHGAGKLPRHMRTHTGEKPFACEVCGVRFTRNDKLKIHMRKHTGERPYSCPHCPARFLHSYDLKNHMHLHTGDRPYECHLCHKAFAKEDHLQRHLKGQNCLEVRTRRRRKDDAPPHYPPPSTAAASPAGLDLSNGHLDTFRLSLARFWEQSAPTGPPVSTPGPPDDDEEEGAPTTPQAEGAMESS

SEQ ID NO: 748180 - protein, 437 aa, Homo sapiens
MGSPEDDLIGIPFPDHSSELLSCLNEQRQLGHLCDLTIRTQGLEYRTHRAVLAACSHYFKKLFTEGGGGAVMGAGGSGTATGGAGAGVCELDFVGPEALGALLEFAYTATLTTSSANMPAVLQAARLLEIPCVIAACMEILQGSGLEAPSPDEDDCERARQYLEAFATATASGVPNGEDSPPQVPLPPPPPPPPRPVARRSRKPRKAFLQTKGARANHLVPEVPTVPAHPLTYEEEEVAGRVGSSGGSGPGDSYSPPTGTASPPEGPQSYEPYEGEEEEEELVYPPAYGLAQGGGPPLSPEELGSDEDAIDPDLMAYLSSLHQDNLAPGLDSQDKLVRKRRSQMPQECPVCHKIIHGAGKLPRHMRTHTGEKPFACEVCGVRFTRNDKLKIHMRKHTGERPYSCPHCPARFLHSYDLKNHMHLHTGDRPYECHRCRP

SEQ ID NO: 748181 - protein, 153 aa, Homo sapiens
MGGKQAGGQVRQQDRTGAGPQAPGPGGGRASSHTVSLSSSSQRTRRLRGAPEPGLGDLELGRDLTPTAPGSSQLPSPPSPFVACGLSSPPRPPGSEDVTAWSSSSLTPSCCSWRSLARPLSGSLAEPRGRGLGTWGGGALRACVPGPYLFSLL

SEQ ID NO: 748182 - protein, 252 aa, Homo sapiens
MGGLRPWSRYGLLVVAHLLALGLGAVVFQALEGPPACRLQAELRAELAAFQAEHRACLPPGALEELLGTALATQAHGVSTLGNSSEGRTWDLPSALLFAASILTTTGYGHMAPLSPGGKAFCMVYAALGLPASLALVATLRHCLLPVLSRPRAWVAVHWQLSPARAALLQAVALGLLVASSFVLLPALVLWGLQGDCSLLGAVYFCFSSLSTIGLEDLLPGRGRSLHPVIYHLGQLALLGGGTSLQGTAWEG

SEQ ID NO: 748183 - protein, 255 aa, Homo sapiens
MGGLRPWSRYGLLVVAHLLALGLGAVVFQALEGPPACRLQAELRAELAAFQAEHRACLPPGALEELLGTALATQAHGVSTLGNSSEGRTWDLPSALLFAASILTTTGYGHMAPLSPGGKAFCMVYAALGLPASLALVATLRHCLLPVLSRPRAWVAVHWQLSPARAALLQAVALGLLVASSFVLLPALVLWGLQGDCSLLGAVYFCFSSLSTIGLEDLLPGRGRSLHPVIYHLGQLALLVASRTLGHAAGSGDLL

SEQ ID NO: 748184 - protein, 257 aa, Homo sapiens
MGGLRPWSRYGLLVVAHLLALGLGAVVFQALEGPPACRLQAELRAELAAFQAEHRACLPPGALEELLGTALATQAHGVSTLGNSSEGRTWDLPSALLFAASILTTTGYGHMAPLSPGGKAFCMVYAALGLPASLALVATLRHCLLPVLSRPRAWVAVHWQLSPARAALLQAVALGLLVASSFVLLPALVLWGLQGDCSLLGAVYFCFSSLSTIGLEDLLPGRGRSLHPVIYHLGQLALLGKSSHLTACGGRGKRSLD

SEQ ID NO: 748185 - protein, 197 aa, Homo sapiens
DEEEQSQLEPGPGQFKATRGQPSAEGSIGVGRDPSRHGTQSSHCPLTLSSPGYGHMAPLSPGGKAFCMVYAALGLPASLALVATLRHCLLPVLSRPRAWVAVHWQLSPARAALLQAVALGLLVASSFVLLPALVLWGLQGDCSLLGAVYFCFSSLSTIGLEDLLPGRGRSLHPVIYHLGQLALLGGGTSLQGTAWEG

SEQ ID NO: 748186 - protein, 109 aa, Homo sapiens [sequence omitted]

SEQ ID NO: 748187 - protein, 521 aa, Homo sapiens
CAGEVASVLPGRSRSAPCRAQSLAPGCSDLVSARREQRESMEDPSEPDRLASADGGSPEEEEDGEREPLLPRIAWAHPRRGAPGSAVRLLDAAGEEGEAGDEELPLPPGDVGVSRSSPAELDRSRPAVSVTIGTSEMNAFLDDPEFADIMLRAEQAIEVGIFPERISQGSSGSYFVKDPKRKIIGVFKPKSEEPYGQLNPKWTKYVHKVCCPCCFGRGCLIPNQGYLSEAGAYLVDNKLHLSIVPKTKVVWLVSETFNYNAIDRAKSRGKKYALEKVPKVGRKFHRIGLPPKIGSFQLFVEGYKEAEYWLRKFEADPLPENIRKQFQSQFERLVILDYIIRNTDRGNDNWLVRYEKQKCEKEIDHKESKWIDDEEFLIKIAAIDNGLAFPFKHPDEWRAYPFHWAWLPQAKVPFSEEIRNLILPYISDMNFVQDLCEDLYELFKTDKGFDKATFESQMSVMRGQILNLTQALRDGKSPFQLVQIPCVIVERSQGGSQGRIVHLSNSFTQTVNCRKPFFSSW

SEQ ID NO: 748188 - protein, 521 aa, Homo sapiens; identical to SEQ ID NO: 748187

SEQ ID NO: 748189 - protein, 521 aa, Homo sapiens; identical to SEQ ID NO: 748187

SEQ ID NO: 748190 - protein, 521 aa, Homo sapiens; identical to SEQ ID NO: 748187

SEQ ID NO: 748191 - protein, 369 aa, Homo sapiens
CAGEVASVLPGRSRSAPCRAQSLAPGCSDLVSARREQRESMEDPSEPDRLASADGGSPEEEEDGEREPLLPRIAWAHPRRGAPGSAVRLLDAAGEEGEAGDEELPLPPGDVGVSRSSPAELDRSRPAVSVTIGTSEMNAFLDDPEFADIMLRAEQAIEVGIFPERISQGSSGSYFVKDPKRKIIGVFKPKSEEPYGQLNPKWTKYVHKVCCPCCFGRGCLIPNQGYLSEAGAYLVDNKLHLSIVPKTKVVWLVSETFNYNAIDRAKSRGKKYALEKVPKVGRKFHRIGLPPKIGSFQLFVEGYKEAEYWLRKFEADPLPENIRKQFQSQFERLVILDYIIRNTGIEVLSFVHVNLVHFQTIFLLSKSKR

SEQ ID NO: 748192 - protein, 305 aa, Homo sapiens
CAGEVASVLPGRSRSAPCRAQSLAPGCSDLVSARREQRESMEDPSEPDRLASADGGSPEEEEDGEREPLLPRIAWAHPRRGAPGSAVRLLDAAGEEGEAGDEELPLPPGDVGVSRSSPAELDRSRPAVSVTIGTSEMNAFLDDPEFADIMLRAEQAIEVGIFPERISQGSSGSYFVKDPKRKIIGVFKPKSEEPYGQLNPKWTKYVHKVCCPCCFGRGCLIPNQGYLSEAGAYLVDNKLHLSIVPKTKVVWLVSETFNYNAIDRAKSRGKKYALEKVPKVGRKFHRIGLPPKRVSLCCPSWSTVL

SEQ ID NO: 748193 - protein, 136 aa, Homo sapiens; identical to SEQ ID NO: 741065

SEQ ID NO: 748194 - protein, 1253 aa, Homo sapiens
MKIITYFCIWAVAWAIPVPQSKPLERHVEKSMNLHLLARSNVSVQDELNASGTIKESGVLVHEGDRGRQENTQDGHKGEGNGSKWAEVGGKSFSTYSTLANEEGNIEGWNGDTGKAETYGHDGIHGKEENITANGIQGQVSIIDNAGATNRSNTNGNTDKNTQNGDVGDAGHNEDVAVVQEDGPQVAGSNNSTDNEDEIIENSCRNEGNTSEITPQINSKRNGTKEAEVTPGTGEDAGLDNSDGSPSGNGADEDEDEGSGDDEDEEAGNGKDSSNNSKGQEGQDHGKEDDHDSSIGQNSDSKEYYDPEGKEDPHNEVDGDKTSKSEENSAGIPEDNGSQRIEDTQKLNHRESKRVENRITKESETHAVGKSQDKGIEIKGPSSGNRNITKEVGKGNEGKEDKGQHGMILGKGNVKTQGEVVNIEGPGQKSEPGNKVGHSNTGSDSNSDGYDSYDFDDKSMQGDDPNSSDESNGNDDANSESDNNSSSRGDASYNSDESKDNGNGSDSKGAEDDDSDSTSDTNNSDSNGNGNNGNDDNDKSDSGKGKSDSSDSDSSDSSNSSDSSDSSDSDSSDSNSSSDSDSSDSDSSDSSDSDSSDSSNSSDSSDSSDSSDSSDSSDSSDSKSDSSKSESDSSDSDSKSDSSDSNSSDSSDNSDSSDSSNSSNSSDSSDSSDSSDSSSSSDSSSSSDSSNSSDSSDSSDSSNSSESSDSSDSSDSDSSDSSDSSNSNSSDSDSSNSSDSSDSSDSSDSSNSSDSSDSSDSSNSSDSSDSSDSSDSSDSSNSSDSNDSSNSSDSSDSSNSSDSSNSSDSSDSSDSSDSDSSNSSDSSNSSDSSDSSNSSDSSDSSDSSDSSDSDSSNRSDSSNSSDSSDSSDSSNSSDSSDSSDSSDSNESSNSSDSSDSSNSSDSDSSDSSNSSDSSDSSNSSDSSESSNSSDNSNSSDSSNSSDSSDSSDSSNSSDSSNSGDSSNSSDSSDSNSSDSSDSSNSSDSSDSSDSSDSSDSSDSSNSSDSSDSSDSSDSSNSSDSSNSSDSSDSSDSSDSSDSSDSSNSSDSSDSSDSSDSSDSSGSSDSSDSSDSSDSSDSSDSSDSSDSSDSSESSDSSDSSDSSDSSDSSDSSDSSDSSDSSDSSDSSNSSDSSDSSDSSDSSDSSDSSDSSDSSDSSDSSDSSDSSDSSDSSDSSDSSDSNESSDSSDSSDSSDSSNSSDSSDSSDSSDSTSDSNDESDSQSKSGNGNNNGSDSDSDSEGSDSNHSTSDD

SEQ ID NO: 748195 - protein, 307 aa, Homo sapiens
MLRVVEGIFIFVVVSESVFGVLGNGFIGLVNCIDCAKNKLSTIGFILTGLAISRIFLIWIIITDGFIQIFSPNIYASGNLIEYISYFWVIGNQSSMWFATSLSIFYFLKIANFSNYIFLWLKSRTNMVLPFMIVFLLISSLLNFAYIAKILNDYKTKNDTVWDLNMYKSEYFIKQILLNLGVIFFFTLSLITCIFLIISLWRHNRQMQSNVTGLRDSNTEAHVKAMKVLISFIILFILYFIGMAIEISCFTVRENKLLLMFGMTTTAIYPWGHSFILILGNSKLKQASLRVLQQLKCCEKRKNLRVT

SEQ ID NO: 748196 - protein, 92 aa, Homo sapiens
SAASPEHGYICVRGCGPSGQGTAHDFGEATWCSRCCWLRLLQLRLGLFPGQRLLQFGFKKQSVTWAVFSSEWGLVRATSPPGPVCCQPKKGS

SEQ ID NO: 748197 - protein, 92 aa, Homo sapiens; identical to SEQ ID NO: 748196

SEQ ID NO: 748198 - protein, 483 aa, Homo sapiens
MAGFAELGLSSWLVEQCRQLGLKQPTPVQLGCIPAILEGRDCLGCAKTGSGKTAAFVLPILQKLSEDPYGIFCLVLTPTRELAYQIAEQFRVLGKPLGLKDCIIVGGMDMVAQALELSRKPHVVIATPGRLADHLRSSNTFSIKKIRFLVMDEADRLLEQGCTDFTVDLEAILAAVPARRQTLLFSATLTDTLRELQGLATNQPFFWEAQAPVSTVEQLDQRYLLVPEKVKDAYLVHLIQRFQDEHEDWSIIIFTNTCKTCQILCMMLRKFSFPTVALHSMMKQKERFAALAKFKSSIYRILIATDVASRGLDIPTVQVVINHNTPGLPKIYIHRVGRTARAGRQGQAITLVTQYDIHLVHAIEEQIKKKLEEFSVEEAEVLQILTQVNVVRRECEIKLEAAHFDEKKEINKRKQLILEGKDPDLEAKRKAELAKIKQKNRRFKEKVEETLKRQKAGRAGHKGRPPRTPSGSHSGPVPSQGLV

SEQ ID NO: 748199 - protein, 162 aa, Homo sapiens
MDEADRLLEQGCTDFTVDLEAILAAVPARRQTLLFSATLTDTLRELQGLATNQPFFWEAQAPVSTVEQLDQRYLLVPEKVKDAYLVHLIQRFQDEHEDWSIIIFTNTCKTCQILCMMLRKFSFPTVALHSMMKQLGRLRQENCLNPGSGGCNEWRSHNCTPA

SEQ ID NO: 748200 - protein, 544 aa, Homo sapiens
MAGFAELGLSSWLVEQCRQLGLKQPTPVQLGCIPAILEGRDCLGCAKTGSGKTAAFVLPILQKLSEDPYGIFCLVLTPTRELAYQIAEQFRVLGKPLGLKDCIIVGGMDMVAQALELSRKPHVVIATPGRLADHLRSSNTFSIKKIRFLVMDEADRLLEQGCTDFTVDLEAILAAVPARRQTLLFSATLTDTLRELQGLATNQPFFWEAQAPVSTVEQLDQRYLLVPEKVKDAYLVHLIQRFQDEHEDWSIIIFTNTCKTCQILCMMLRKFSFPTVALHSMMKQKERFAALAKFKSSIYRILIATDVASRVSSPQSPAKGLPLLLQGPTDEKAGLRMSGSPSIPAELTLGESLPRFPHMDSGADQPPPASRGLDIPTVQVVINHNTPGLPKIYIHRVGRTARAGRQGQAITLVTQYDIHLVHAIEEQIKKKLEEFSVEEAEVLQILTQVNVVRRECEIKLEAAHFDEKKEINKRKQLILEGKDPDLEAKRKAELAKIKQKNRRFKEKVEETLKRQKAGRAGHKGRPPRTPSGSHSGPVPSQGLV

SEQ ID NO: 748201 - protein, 507 aa, Homo sapiens
MAGFAELGLSSWLVEQCRQLGLKQPTPVQLGCIPAILEGRDCLGCAKTGSGKTAAFVLPILQKLSEDPYGIFCLVLTPTRELAYQIAEQFRVLGKPLGLKDCIIVGGMDMVAQALELSRKPHVVIATPGRLADHLRSSNTFSIKKIRFLVMDEADRLLEQGCTDFTVDLEAILAAVPARRQTLLFSATLTDTLRELQGLATNQPFFWEAQAPVSTVEQLDQRYLLVPEKVKDAYLVHLIQRFQDEHEDWSIIIFTNTCKTCQILCMMLRKFSFPTVALHSMMKQKERFAALAKFKSSIYRILIATDVASRGLDIPTVQVVINHNTPGLPKIYIHRVGRTARAGRQGQAITLVTQYDIHLVHAIEEQIKKKLEEFSVEEAEVLQILTQVNVVRRECEIKLEAAHFDEKKEINKRKQLILEGKDPDLEAKRKAELAKIKQKNRRFKEKVEETLKRQKAGRAGHKGRPPRTPSGSHSGRGPTQCPTAEPVGARVVRALLLCPETTGWSLP

SEQ ID NO: 748202 - protein, 413 aa, Homo sapiens
MAGFAELGLSSWLVEQCRQLGLKQPTPVQLGCIPAILEGRDCLGCAKTGSGKTAAFVLPILQKLSEDPYGIFCLVLTPTRELAYQIAEQFRVLGKPLGLKDCIIVGGMDMVAQALELSRKPHVVIATPGRLADHLRSSNTFSIKKIRFLVMDEADRLLEQGCTDFTVDLEAILAAVPARRQTLLFSATLTDTLRELQGLATNQPFFWEAQAPVSTVEQLDQRYLLVPEKVKDAYLVHLIQRFQDEHEDWSIIIFTNTCKTCQILCMMLRKFSFPTVALHSMMKQKERFAALAKFKSSIYRILIATDVASRGLDIPTVQVVINHNTPGLPKIYIHPGHRLGPTQAQSPPRAWSEPHTAICPVLDSSMELRVGGTFLGGSSPSRGPTQCPTAEPVGARVVRALLLCPETTGWSLP

SEQ ID NO: 748203 - protein, 456 aa, Homo sapiens
MAGFAELGLSSWLVEQCRQLGLKQPTPVQLGCIPAILEGRDCLGCAKTGSGKTAAFVLPILQKLSEDPYGIFCLVLTPTRELAYQIAEQFRVLGKPLGLKDCIIVGGMDMVAQALELSRKPHVVIATPGRLADHLRSSNTFSIKKIRFLVMDEADRLLEQGCTDFTVDLEAILAAVPARRQTLLFSATLTDTLRELQGLATNQPFFWEAQAPVSTVEQLDQRYLLVPEKVKDAYLVHLIQRFQDEHEDWSIIIFTNTCKTCQILCMMLRKFSFPTVALHSMMKQKERFAALAKFKSSIYRILIATDVASRGLDIPTVQVVINHNTPGLPKIYIHRVGRTARAGGRVTASAGENSTDDSTLVATPIEGSTIHARTLAPLPPWDSRPEVAKILTRSRGAEQSVGITLGGGRLENRGFPTEPCSAGEAALRHPAVAQHEQPPAGRPAPRAPGTQRGQTP

SEQ ID NO: 748204 - protein, 376 aa, Homo sapiens
MDMVAQALELSRKPHVVIATPGRLADHLRSSNTFSIKKIRFLVMDEADRLLEQGCTDFTVDLEAILAAVPARRQTLLFSATLTDTLRELQGLATNQPFFWEAQAPVSTVEQLDQRYLLVPEKVKDAYLVHLIQRFQDEHEDWSIIIFTNTCKTCQILCMMLRKFSFPTVALHSMMKQKERFAALAKFKSSIYRILIATDVASRGLDIPTVQVVINHNTPGLPKIYIHRVGRTARAGRQGQAITLVTQYDIHLVHAIEEQIKKKLEEFSVEEAEVLQILTQVNVVRRECEIKLEAAHFDEKKEINKRKQLILEGKDPDLEAKRKAELAKIKQKNRRFKEKVEETLKRQKAGRAGHKGRPPRTPSGSHSGPVPSQGLV

SEQ ID NO: 748205 - protein, 217 aa, Homo sapiens
MLRKFSFPTVALHSMMKQKERFAALAKFKSSIYRILIATDVASRGLDIPTVQVVINHNTPGLPKIYIHRVGRTARAGRQGQAITLVTQYDIHLVHAIEEQIKKKLEEFSVEEAEVLQILTQVNVVRRECEIKLEAAHFDEKKEINKRKQLILEGKDPDLEAKRKAELAKIKQKNRRFKEKVEETLKRQKAGRAGHKGRPPRTPSGSHSGPVPSQGLV

SEQ ID NO: 748206 - protein, 333 aa, Homo sapiens [sequence omitted]

SEQ ID NO: 748207 - protein, 321 aa, Homo sapiens
MVAQALELSRKPHVVIATPGRLADHLRSSNTFSIKKIRFLVMDEADRLLEQGCTDFTVDLEAILAAVPARRQTLLFSATLTDTLRELQGLATNQPFLTCQILCMMLRKFSFPTVALHSMMKQKERFAALAKFKSSIYRILIATDVASRGLDIPTVQVVINHNTPGLPKIYIHRVGRTARAGRQGQAITLVTQYDIHLVHAIEEQIKKKLEEFSVEEAEVLQILTQVNVVRRECEIKLEAAHFDEKKEINKRKQLILEGKDPDLEAKRKAELAKIKQKNRRFKEKVEETLKRQKAGRAGHKGRPPRTPSGSHSGPVPSQGLV

SEQ ID NO: 748208 - protein, 113 aa, Homo sapiens
MVAQALELSRKPHVVIATPGRLADHLRSSNTFSIKKIRFLVSSPRPCRPQELGSEPPGPMSEPGAPSHPFRKRMSVRLSSKTLGTVTRTVQGPTRGGPVLAMLFGGRALLRLG

SEQ ID NO: 748209 - protein, 518 aa, Homo sapiens
MAGFAELGLSSWLVEQCRQLGLKQPTPVQLGCIPAILEGRDCLGCAKTGSGKTAAFVLPILQKLSEDPYGIFCLVLTPTRGPAELNKMAPVQWLTPVIPALWELQELAYQIAEQFRVLGKPLGLKDCIIVGGMDMVAQALELSRKPHVVIATPGRLADHLRSSNTFSIKKIRFLVMDEADRLLEQGCTDFTVDLEAILAAVPARRQTLLFSATLTDTLRELQGLATNQPFFWEAQAPVSTVEQLDQRYLLVPEKVKDAYLVHLIQRFQDEHEDWSIIIFTNTCKTCQILCMMLRKFSFPTVALHSMMKQKERFAALAKFKSSIYRILIATDVASRGADQPPPASRGLDIPTVQVVINHNTPGLPKIYIHRVGRTARAGRQGQAITLVTQYDIHLVHAIEEQIKKKLEEFSVEEAEVLQILTQVNVVRRECEIKLEAAHFDEKKEINKRKQLILEGKDPDLEAKRKAELAKIKQKNRRFKEKVEETLKRQKAGRAGHKGRPPRTPSGSHSGPVPSQGLV

SEQ ID NO: 748210 - protein, 483 aa, Homo sapiens; identical to SEQ ID NO: 748198

SEQ ID NO: 748211 - protein, 483 aa, Homo sapiens; identical to SEQ ID NO: 748198

SEQ ID NO: 748212 - protein, 265 aa, Homo sapiens
MAGFAELGLSSWLVEQCRQLGLKQPTPVQLGCIPAILEGRDCLGCAKTGSGKTAAFVLPILQKLSEDPYGIFCLVLTPTRELAYQIAEQFRVLGKPLGLKDCIIVGGMDMVAQALELSRKPHVVIATPGRLADHLRSSNTFSIKKIRFLVMDEADRLLEQGCTDFTVDLEAILAAVPARRQTLLFSATLTDTLRELQGLATNQPFFWEAQAPVSTVEQLDQRYLLVPEKVKDAYLVHLIQRFQDEHEDWSIIIFTNTCKKNALPP

SEQ ID NO: 748213 - protein, 508 aa, Homo sapiens
MAGFAELGLSSWLVEQCRQLGLKQPTPVQLGCIPAILEGRDCLGCAKTGSGKTAAFVLPILQKLSEDPYGIFCLVLTPTRGPAELNKMAPVQWLTPVIPALWELQELAYQIAEQFRVLGKPLGLKDCIIVGGMDMVAQALELSRKPHVVIATPGRLADHLRSSNTFSIKKIRFLVMDEADRLLEQGCTDFTVDLEAILAAVPARRQTLLFSATLTDTLRELQGLATNQPFFWEAQAPVSTVEQLDQRYLLVPEKVKDAYLVHLIQRFQDEHEDWSIIIFTNTCKTCQILCMMLRKFSFPTVALHSMMKQKERFAALAKFKSSIYRILIATDVASRGLDIPTVQVVINHNTPGLPKIYIHRVGRTARAGRQGQAITLVTQYDIHLVHAIEEQIKKKLEEFSVEEAEVLQILTQVNVVRRECEIKLEAAHFDEKKEINKRKQLILEGKDPDLEAKRKAELAKIKQKNRRFKEKVEETLKRQKAGRAGHKGRPPRTPSGSHSGPVPSQGLV

SEQ ID NO: 748214 - protein, 374 aa, Homo sapiens [sequence omitted]

SEQ ID NO: 748215 - protein, 217 aa, Homo sapiens; identical to SEQ ID NO: 748205

SEQ ID NO: 748216 - protein, 333 aa, Homo sapiens
RAAGSADHTGPYKGPLQAATRMAGFAELGLSSWLVEQCRQLGLKQPTPVQLGCIPAILEGRDCLGCAKTGSGKTAAFVLPILQKLSEDPYGIFCLVLTPTRELAYQIAEQFRVLGKPLGLKDCIIVGGMDMVAQALELSRKPHVVIATPGRLADHLRSSNTFSIKKIRFLVMDEADRLLEQGCTDFTVDLEAILAAVPARRQTLLFSATLTDTLRELQGLATNQPFFWEAQAPVSTVEQLDQRYLLVPEKVKDAYLVHLIQRFQDEHEDWSIIIFTNTCKTCQILCMMLRKFSFPTVALHSMMKQLGRLRQENCLNPGSGGCNEWRSHNCTPA

SEQ ID NO: 748217 - protein, 82 aa, Homo sapiens
QVPTKADAEGQVGWPPGLPPWPGSSLFLHGLQLHIPRAASSCLGSQRCCHLQPEEPARSSNLRGPRMQKDWPVLSRKEEEAS

SEQ ID NO: 748218 - protein, 197 aa, Homo sapiens
GDRTPPDCSNLNILNGEIGARKSGVGNEHRVADQNSGSGTPRRGSEARPAPRHQPGAAFLYQRGVASRSPKATQGARWTARPADWFSPGANEPGRLQVLWQRGVRAETHDGQGGRGVTGFRLVRYWVMLCAALRALGGHSRQGGRSVPEAAPEWQPQLAGQPAPPGLTGRGNGRLGAAFARALPKPGFHPCISGVTT

SEQ ID NO: 748219 - protein, 143 aa, Homo sapiens
GDRTPPDCSNLNILNGEIGARKSGVGNEHRVADQNSGSGTPRRGSEARPAPRHQPGAAFLYQRGVASRSPKATQGARWTARPADWFSPGANEPGRLQVLWQRGVRAETHDGQGGRNRISSCCPDCLNSWLQATLLPRPLKVLG

SEQ ID NO: 748220 - protein, 120 aa, Homo sapiens
QGSVRASKRFIRGYVGIGCQAWRAPDYCIFPTSKGPASGSCTNTLHLLLPSCSTCHICCLYPLGMSKALEFRLGFKFWLCQVRMEGYDSGQITHFLQAPVFWICEMRTVLRRFAISVIVG

SEQ ID NO: 748221 - protein, 311 aa, Homo sapiens
MIKKNASSEDFFILLGFSNWPQLEVVLFVVILIFYLMTLTGNLFIIILSYVDSHLHTPMYFFLSNLSFLDLCHTTSSIPQLLVNLRGPEKTISYAGCMVQLYFVLALGIAECVLLVVMSYDRYVAVCRPLHYTVLMHPRFCHLLAAASWVIGFTISALHSSFTFWVPLCGHRLVDHFFCEVPALLRLSCVDTHANELTLMVMSSIFVLIPLILILTAYGAIARAVLSMQSTTGLQKVFRTCGAHLMVVSLFFIPVMCMYLQPPSENSPDQGKFIALFYTVVTPSLNPLIYTLRNKHVKGAAKRLLGWEWGK

SEQ ID NO: 748222 - protein, 117 aa, Homo sapiens
ILTQLATADARFWKGPSEPHLAKLEEDVWPCPQFHQTKAASGPPFVCVFRGWGGGGAGAWTLVLPQLRVVTQPLPFVSTFQPANCFPSVISFHLHCHTWSEQDRAYHPVYQMRKWQF

SEQ ID NO: 748223 - protein, 80 aa, Homo sapiens
AAWLSIGQPVLGASWGLRGLHTSALTSALVATVSGSLVLSPFMGPCCSRLAGESSLLYLPGPGLPLRTESVGPWNPAELS

SEQ ID NO: 748224 - protein, 707 aa, Homo sapiens
MLGSLVLRRKALAPRLLLRLLRSPTLRGHGGASGRNVTTGSLGEPQWLRVATGGRPGTSPALFSGRGAATGGRQGGRFDTKCLAAATWGRLPGPEETLPGQDSWNGVPSRAGLGMCALAAALVVHCYSKSPSNKDAALLEAARANNMQEVSRLLSEGADVNAKHRLGWTALMVAAINRNNSVVQVLLAAGADPNLGDDFSSVYKTAKEQGIHSLEDGGQDGASRHITNQWTSALEFRRWLGLPAGVLITREDDFNNRLNNRASFKGCTALHYAVLADDYRTVKELLDGGANPLQRNEMGHTPLDYAREGEVMKLLRTSEAKYQEKQRKREAEERRRFPLEQRLKEHIIGQESAIATVGAAIRRKENGWYDEEHPLVFLFLGSSGIGKTELAKQTAKYMHKDAKKGFIRLDMSEFQERHEVAKFIGSPPGYVGHEEGGQLTKKLKQCPNAVVLFDEVDKAHPDVLTIMLQLFDEGRLTDGKGKTIDCKDAIFIMTSNVASDEIAQHALQLRQEALEMSRNRIAENLGDVQISDKITISKNFKENVIRPILKAHFRRDEFLGRINEIVYFLPFCHSELIQLVNKELNFWAKRAKQRHNITLLWDREVADVLVDGYNVHYGARSIKHEVERRVVNQLAAAYEQDLLPGGCTLRITVEDSDKQLLKSPELPSPQAEKRLPKLRLEIIDKDSKTRRLDIRAPLHPEKVCNTI

SEQ ID NO: 748225 - protein, 707 aa, Homo sapiens; identical to SEQ ID NO: 748224

SEQ ID NO: 748226 - protein, 677 aa, Homo sapiens
MLGSLVLRRKALAPRLLLRLLRSPTLRGHGGASGRNVTTGSLGEPQWLRVATGGRPGTSPALFSGRGAATGGRQGGRFDTKCLAAATWGRLPGPEETLPGQDSWNGVPSRAGLGMCALAAALVVHCYSKSPSNKDAALLEAARANNMQEVSRLLSEGADVNAKHRLGWTALMVAAINRNNSVVQVLLAAGADPNLGDDFSSVYKTAKEQGIHSLEVLITREDDFNNRLNNRASFKGCTALHYAVLADDYRTVKELLDGGANPLQRNEMGHTPLDYAREGEVMKLLRTSEAKYQEKQRKREAEERRRFPLEQRLKEHIIGQESAIATVGAAIRRKENGWYDEEHPLVFLFLGSSGIGKTELAKQTAKYMHKDAKKGFIRLDMSEFQERHEVAKFIGSPPGYVGHEEGGQLTKKLKQCPNAVVLFDEVDKAHPDVLTIMLQLFDEGRLTDGKGKTIDCKDAIFIMTSNVASDEIAQHALQLRQEALEMSRNRIAENLGDVQISDKITISKNFKENVIRPILKAHFRRDEFLGRINEIVYFLPFCHSELIQLVNKELNFWAKRAKQRHNITLLWDREVADVLVDGYNVHYGARSIKHEVERRVVNQLAAAYEQDLLPGGCTLRITVEDSDKQLLKSPELPSPQAEKRLPKLRLEIIDKDSKTRRLDIRAPLHPEKVCNTI

SEQ ID NO: 748227 - protein, 677 aa, Homo sapiens; identical to SEQ ID NO: 748226

SEQ ID NO: 748228 - protein, 677 aa, Homo sapiens; identical to SEQ ID NO: 748226

SEQ ID NO: 748229 - protein, 395 aa, Homo sapiens
MLGSLVLRRKALAPRLLLRLLRSPTLRGHGGASGRNVTTGSLGEPQWLRVATGGRPGTSPALFSGRGAATGGRQGGRFDTKCLAAATWGRLPGPEETLPGQDSWNGVPSRAGLGMCALAAALVVHCYSKSPSNKDAALLEAARANNMQEVSRLLSEGADVNAKHRLGWTALMVAAINRNNSVVQVLLAAGADPNLGDDFSSVYKTAKEQGIHSLEVLITREDDFNNRLNNRASFKGCTALHYAVLADDYRTVKELLDGGANPLQRNEMGHTPLDYAREGEVMKLLRTSEAKYQEKQRKREAEERRRFPLEQRLKEHIIGQESAIATVGAAIRRKENGWYDEEHPLVFLFLGSSGIGKTELAKQTAKYMHKDAKKGFIRLDMSEFQERHEVSDDSP

SEQ ID NO: 748230 - protein, 563 aa, Homo sapiens [sequence omitted]

SEQ ID NO: 748231 - protein, 648 aa, Homo sapiens
MLGSLVLRRKALAPRLLLRLLRSPTLRGHGGASGRNVTTGSLGEPQWLRVATGGRPGTSPALFSGRGAATGGRQGGRFDTKCLAAATWGRLPGPEETLPGQDSWNGVPSRAGLGMCALAAALVVHCYSKSPSNKDAALLEAARANNMQEVSSVVQVLLAAGADPNLGDDFSSVYKTAKEQGIHSLEVLITREDDFNNRLNNRASFKGCTALHYAVLADDYRTVKELLDGGANPLQRNEMGHTPLDYAREGEVMKLLRTSEAKYQEKQRKREAEERRRFPLEQRLKEHIIGQESAIATVGAAIRRKENGWYDEEHPLVFLFLGSSGIGKTELAKQTAKYMHKDAKKGFIRLDMSEFQERHEVAKFIGSPPGYVGHEEGGQLTKKLKQCPNAVVLFDEVDKAHPDVLTIMLQLFDEGRLTDGKGKTIDCKDAIFIMTSNVASDEIAQHALQLRQEALEMSRNRIAENLGDVQISDKITISKNFKENVIRPILKAHFRRDEFLGRINEIVYFLPFCHSELIQLVNKELNFWAKRAKQRHNITLLWDREVADVLVDGYNVHYGARSIKHEVERRVVNQLAAAYEQDLLPGGCTLRITVEDSDKQLLKSPELPSPQAEKRLPKLRLEIIDKDSKTRRLDIRAPLHPEKVCNTI

SEQ ID NO: 748232 - protein, 630 aa, Homo sapiens
MLGSLVLRRKALAPRLLLRLLRSPTLRGHGDAALLEAARANNMQEVSRLLSEGADVNAKHRLGWTALMVAAINRNNSVVQVLLAAGADPNLGDDFSSVYKTAKEQGIHSLEDGGQDGASRHITNQWTSALEFRRWLGLPAGVLITREDDFNNRLNNRASFKGCTALHYAVLADDYRTVKELLDGGSSRELSPHSPRHPSYTGINFSPRISNGANPLQRNEMGHTPLDYAREGEVMKLLRTSEAKYQEKQRKREAEERRRFPLEQRLKEHIIGQESAIATVGAAIRRKENGWYDEEHPLVFLFLGSSGIGKTELAKQTAKYMHKDAKKGFIRLDMSEFQERHEVAKFIGSPPGYVGHEEGGQLTKKLKQCPNAVVLFDEVDKAHPDVLTIMLQLFDEGRLTDGKGKTIDCKDAIFIMTSNVASDEIAQHALQLRQEALEMSRNRIAENLGDVQISDKITISKNFKENVIRPILKAHFRRDEFLGRINEIVYFLPFCHSELIQLVNKELNFWAKRAKQRHNITLLWDREVADVLVDGYNVHYGARSIKHEVERRVVNQLAAAYEQDLLPGGCTLRITVEDSDKQLLKSPELPSPQAEKRLPKLRLEIIDKDSKTRRLDIRAPLHPEKVCNTI

SEQ ID NO: 748233 - protein, 355 aa, Homo sapiens
MSAPFDGVLLKDRDQDLFPVVTPVSSTHRMPSGNVEWMDGWVDDVVIRTGEAGFIRLDMSEFQERHEVAKFIGSPPGYVGHEEGGQLTKKLKQCPNAVVLFDEVDKAHPDVLTIMLQLFDEGRLTDGKGKTIDCKDAIFIMTSNVASDEIAQHALQLRQEALEMSRNRIAENLGDVQISDKITISKNFKENVIRPILKAHFRRDEFLGRINEIVYFLPFCHSELIQLVNKELNFWAKRAKQRHNITLLWDREVADVLVDGYNVHYGARSIKHEVERRVVNQLAAAYEQDLLPGGCTLRITVEDSDKQLLKSPELPSPQAEKRLPKLRLEIIDKDSKTRRLDIRAPLHPEKVCNTI

SEQ ID NO: 748234 - protein, 277 aa, Homo sapiens
RSLCIEWHVIKKLKQCPNAVVLFDEVDKAHPDVLTIMLQLFDEGRLTDGKGKTIDCKDAIFIMTSNVASDEIAQHALQLRQEALEMSRNRIAENLGDVQISDKITISKNFKENVIRPILKAHFRRDEFLGRINEIVYFLPFCHSELIQLVNKELNFWAKRAKQRHNITLLWDREVADVLVDGYNVHYGARSIKHEVERRVVNQLAAAYEQDLLPGGCTLRITVEDSDKQLLKSPELPSPQAEKRLPKLRLEIIDKDSKTRRLDIRAPLHPEKVCNTI

SEQ ID NO: 748235 - protein, 174 aa, Homo sapiens
PCNPSSRKENVIRPILKAHFRRDEFLGRINEIVYFLPFCHSELIQLVNKELNFWAKRAKQRHNITLLWDREVADVLVDGYNVHYGARSIKHEVERRVVNQLAAAYEQDLLPGGCTLRITVEDSDKQLLKSPELPSPQAEKRLPKLRLEIIDKDSKTRRLDIRAPLHPEKVCNTI

SEQ ID NO: 748236 - protein, 193 aa, Homo sapiens
LSWGRAPLPTTPSSGPTLRTSPSLSTPENVIRPILKAHFRRDEFLGRINEIVYFLPFCHSELIQLVNKELNFWAKRAKQRHNITLLWDREVADVLVDGYNVHYGARSIKHEVERRVVNQLAAAYEQDLLPGGCTLRITVEDSDKQLLKSPELPSPQAEKRLPKLRLEIIDKDSKTRRLDIRAPLHPEKVCNTI

SEQ ID NO: 748237 - protein, 287 aa, Homo sapiens
CWYWSRVLGSGERLRAVDYLSREVVRNSTLFAASSNAPRQPCWTWSAQGPAPRGYRSSCQDAGVPGVEEKSTGATATPPAAQVPNAPGPWRCFRPECDYWESRGAAVAEGSHRGAPWNIAGLVLRTWGSHRGAPGRTLRYQMPRGCHLGTPSWSRRNTPRTGQLERGPQQGRTGHVRPGRSAGGSLLQQESVQQGCSPVGSCPCQQYARSQQKQMCFASFCCSTGVRVWKLTLADPGITCWLLRRAAGLRLSPFGRAFAEQQCWESTLPSPRGCHYHIPLSCQALII

SEQ ID NO: 748238 - protein, 197 aa, Homo sapiens
GRGRRGARRPRRGARRPGGASGGEWRTRRRAAVPACRCSAAVAAPVYPALGTAPGGETVPAMSAAMRERFDRFLHEKNCMTDLLAKLEAKTGVNRSFIALGVIGLVALYLVFGYGASLLCNLIGFGYPAYISIKAIESPNKEDDTQWLTYWVVYGVFSIAEFFSDIFLSWFPFYYMLKCGFLLWCMAPSPSNGAELL

SEQ ID NO: 748239 - protein, 106 aa, Homo sapiens
TWEAEVAVSRDRVIALQPGQKERNSVSKKEKTTPRLLPYNQPQASPSLIQGDQLPPQRWDLGVDPSLSRPLSTFDCTECAKTRSWLFWALADRRSSGVFQVHSWLE

SEQ ID NO: 748240 - protein, 321 aa, Homo sapiens
MERKNQTAITEFIILGFSNLNELQFLLFTIFFLTYFCTLGGNILIILTTVTDPHLHTPMYYFLGNLAFIDICYTTSNVPQMMVHLLSKKKSISYVGCVVQLFAFVFFVGSECLLLAAMAYDRYIAICNPLRYSVILSKVLCNQLAASCWAAGFLNSVVHTVLTFCLPFCGNNQINYFFCDIPPLLILSCGNTSVNELALLSTGVFIGWTPFLCIVLSYICIISTILRIQSSEGRRKAFSTCASHLAIVFLFYGSAIFTYVRPISTYSLKKDRLVSVLYSVVTPMLNPIIYTLRNKDIKEAVKTIGSKWQPPISSLDSKLTY

SEQ ID NO: 748241 - protein, 82 aa, Homo sapiens
RYIQESWLENHGQYPSLEFVALLYALHTCDQVSLFGFGEDNCKRWSHYWDDKYWFENTMQNFPAEYQIILKLQCERKIAVYG

SEQ ID NO: 748242 - protein, 376 aa, Homo sapiens
MRSCRTLSDRSLMEGSHPMERGPQHSRGLKPQWVLLRPPAPAWKGQVLPHLLSPKKSFGLTLRLWDVLILEGEQVLTAMAHASFKIHREHLMKLSWSTVWEFQERLSQSWALEDNSVLRNLQTSMKELTKKHWDLPSPGELERGSSRVSPGIRPLCEGDRLALPSPPAQLQGLMPSAPQDKSLVLPQPGLTGLSPWRRPRPSSTKGLPQNPGQQAALWVAQRIKMWPPCFPVRSGLVLHKNTCAGTLMPHLHTDLDAGIHGFLTTILNRATGPLSLQHVTWTALQPHDGPGPASPLGPRHQALPRLMTEEAGQETPQQQGSTCLRCPSVEERGMEGAQVAHAQLRRSPRWLLDLGSGPWKIPFSGAWSHQGLWREG

SEQ ID NO: 748243 - protein, 264 aa, Homo sapiens
HNMAFSNADSGFVDAQLVLTHKDLLSGSIMATDEPMQPIFCFIQEGPQEEASPVHALRLTMAGILLHVSDRQHQAILVLEVQALEPYLYVANGSGLKVPQGDQGTINMAELHLGTNLDIRSGDEVHYHITDSPVLGTVAPGHSASTAFAQKDLLVGAVLFGHNGSLSSRNTLAFSMDVGPSQWMWGLLNGCGASAHRQCTRCTLQVTIALEGPLAPLKLAWHKKIYIFLGEAAEIRRDQLETTEFIISEPLANLYSCGDQNTLM

SEQ ID NO: 748244 - protein, 377 aa, Homo sapiens
GRLLAAVGSARESAARAGGGDASLIGGTRMNMTQARVLVAAVVGLVAVLLYASIHKIEEGHLAVYYRGGALLTSPSGPGYHIMLPFITTFRSVQTTLQTDEVKNVPCGTSGGVMIYIDRIEVVNMLAPYAVFDIVRNYTADYDKTLIFNKIHHELNQFCSAHTLQEVYIELFDQIDENLKQALQKDLNLMAPGLTIQAVRVTKPKIPEAIRRNFELMEAEKTKLLIAAQKQKVVEKEAETERKKAVIEAEKIAQVAKIRFQQKVMEKETEKRISEIEDAAFLAREKAKADAEYYAAHKYATSNKHKLTPEYLELKKYQAIASNSKIYFGSNIPNMFVDSSCALKYSDIRTGRESSLPSKEALEPSGENVIQNKESTG

SEQ ID NO: 748245 - protein, 346 aa, Homo sapiens
MTQARVLVAAVVGLVAVLLYASIHKIEEGHLAVYYRGGALLTSPSGPGYHIMLPFITTFRSVQTTLQTDEVKNVPCGTSGGVMIYIDRIEVVNMLAPYAVFDIVRNYTADYDKTLIFNKIHHELNQFCSAHTLQEVYIELFDQIDENLKQALQKDLNLMAPGLTIQAVRVTKPKIPEAIRRNFELMEAEKTKLLIAAQKQKVVEKEAETERKKAVIEAEKIAQVAKIRFQQKVMEKETEKRISEIEDAAFLAREKAKADAEYYAAHKYATSNKHKLTPEYLELKKYQAIASNSKIYFGSNIPNMFVDSSCALKYSDIRTGRESSLPSKEALEPSGENVIQNKESTG

SEQ ID NO: 748246 - protein, 377 aa, Homo sapiens; identical to SEQ ID NO: 748244

SEQ ID NO: 748247 - protein, 377 aa, Homo sapiens; identical to SEQ ID NO: 748244

SEQ ID NO: 748248 - protein, 350 aa, Homo sapiens
MTQARVLVAAVVGLVAVLLYASIHKIEEGHLAVYYRGGALLTSPSGPGYHIMLPFITTFRSVQTTLQTDEVKNVPCGTSGGVMIYIDRIEVVNMLAPYAVFDIVRNYTADYDKTLIFNKIHHELNQFCSAHTLQEVYIELFDQIDENLKQALQKDLNLMAPGLTIQAVRVTKPKIPEAIRRNFELMEAEKTKLLIAAQKQKVVEKEAETERKKAVIEAEKIAQVAKIRFQQKVMEKETEKRISEIEDGCIPGPKTGKRMRQSWGHKSHRQKAEVDPGQWGAQKSTPRVKRVTIGDRTPQVRDPTVVVNTKSDRSEKRPPGGRAGDTHPQNSRDQQIAQTHGARGKTAIAA

SEQ ID NO: 748249 - protein, 256 aa, Homo sapiens
RPQSKRPRKDPPSAVGSGNAGGSGPRGKGAEGGGSSSGNVSGVAPAAPAGGSRSSSRNLGSSGGEKEEGKKVRRQWESWSTEDKNTFFEGLYEHGKDFEAIQNNIALKYKKKGKPASMVKNKEQVRHFYYRTWHKITKYIDFDHVFSRGLKKSSQELYGLICYGELRKKIGGCMDDKNATKLNELIQVGATTVRYKGRNLRIKAPMCRALKKLCDPDGLSDEEDQKPVRLPLKVPIELQPRNNHAWARVQSLAQNP

SEQ ID NO: 748250 - protein, 199 aa, Homo sapiens
RPQSKRPRKDPPSAVGSGNAGGSGPRGKGAEGGGSSSGNVSGVAPAAPAGGSRSSSRNLGSSGGEKEEGKKVRRQWESWSTEDKNTFFEGLYEHGKDFEAIQNNIALKYKKKGKPASMVKNKEQVRHFYYRTWHKITKYIDFDHVFSRGLKKSSQELYGLICYGELRKKIGGCEYADCGVAHGSSCPLSPLGFSAQSCF

SEQ ID NO: 748251 - protein, 233 aa, Homo sapiens
MLAPFLRAEGGGSSSGNVSGVAPAAPAGGSRSSSRNLGSSGGEKEEGKKVRRQWESWSTEDKNTFFEGLYEHGKDFEAIQNNIALKYKKKGKPASMVKNKEQVRHFYYRTWHKITKYIDFDHVFSRGLKKSSQELYGLICYGELRKKIGGCMDDKNATKLNELIQVGATTVRYKGRNLRIKAPMCRALKKLCDPDGLSDEEDQKPVRLPLKVPIELQPRNNHAWARVQSLAQN

SEQ ID NO: 748252 - protein, 44 aa, Homo sapiens
MASCARRLGAVSTLTVGLPTAPPVLCHLWALVLRVVSSFPLTFI

SEQ ID NO: 748253 - protein, 205 aa, Homo sapiens
MAAAAGGAASRRGAGRPCPFSIEHILSSLPERSLPARAACPPQPAGRQSPAKPEEPGAPEAAPCACCCCCGPRAAPCGPPEAAAGLGARLAWPLRLGPAVPLSLGAPAGGSGALPGAVGPGSQRRTRRHRTIFSEEQLQALEALFVQNQYPDVSTRERLAGRIRLREERVEVWFKNRRAKWRHQKRASASARLLPGVKKSPKGSC

SEQ ID NO: 748254 - protein, 199 aa, Homo sapiens
LVVFGQTSALSIEESCRPGDKVPPIKPNAGEESVTSLDKLRFADGRSIRTSELRLSMQKSTQNHAAVFRVGSLLQEGCGKISKLYGDLKHLKTFDRGMVWNTDLVETLELQNLMLCALQTVNGAEAGKESRGAHAGEDYKVRLLATPTCTCLFLPPGGTQPHPCIFSAFYVVSPKVYPKNAFFPLVTLIPGFSPFSGSL

SEQ ID NO: 748255 - protein, 160 aa, Homo sapiens
AVVQSQLTAASNSWAAQVIFPTQPSEQLGLQRQSFAMLPRLECSGVISAHCSLHLLGSSSPPTSTSLRAETTGVSHHAWLIFRDRVSPSCPGWSQTPGLKQSSCLSLPEYWDYRCEPLPEKRFLRQGRSYIIFKFFLMMSFLAVHSQRTTHHTQETVVLM

SEQ ID NO: 748256 - protein, 206 aa, Homo sapiens
LVVFGQTSALSIEESCRPGDKVPPIKPNAGEESVTSLDKLRFADGRSIRTSELRLSMQKSTQNHAAVFRVGSLLQEGCGKISKLYGDLKHLKTFDRGMVWNTDLVETLELQNLMLCALQTVNGAEAGKESRGAHAGEDYKVRIDEYDHSKPIQGQQKKPFEEHWRKHTLSYVDVSTGKVTVEYRPIIDKTLNEADCATVPPAIHSY

SEQ ID NO: 748257 - protein, 89 aa, Homo sapiens
GLARLRQPSTSASEELGLQEDYKVRIDEYDHSKPIQGQQKKPFEEHWRKHTLSYVDVSTGKVTVEYRPIIDKTLNEADCATVPPAIHSY

SEQ ID NO: 748258 - protein, 97 aa, Homo sapiens
NASYVTESRSVVPCRLAGADSKGTGRSLQYKDKNLKWLLWRTGVSGGSETEIDSEVISGLLKFAQPENNTSHTRNSCAHVMGASALGRSGLLAHAAA

SEQ ID NO: 748259 - protein, 499 aa, Homo sapiens
MVDRGPLLTSAIIFYLAIGAAIFEVLEEPHWKEAKKNYYTQKLHLLKEFPCLGQEGLDKILEVVSDAAGQGVAITGNQTFNNWNWPNAMIFAATVITTIGYGNVAPKTPAGRLFCVFYGLFGVPLCLTWISALGKFFGGRAKRLGQFLTKRGVSLRKAQITCTVIFIVWGVLVHLVIPPFVFMVTEGWNYIEGLYYSFITISTIGFGDFVAGVNPSANYHALYRYFVELWIYLGLAWLSLFVNWKVSMFVEVHKAIKKRRRRRKESFESSPHSRKALQVKGSTASKDVNIFSFLSKKEETYNDLIKQIGKKAMKTSGGGETGPGPGLGPQGGGLPALPPSLVPLVVYSKNRVPTLEEVSQTLRSKGHVSRSPDEEAVARAPEDSSPAPEVFMNQLDRISEECEPWDAQDYHPLIFQDASITFVNTEAGLSDEETSKSSLEDNLAGEESPQQGAEAKAPLNMGEFPSSSESTFTSTESELSVPYEQLMNEYNKANSPKGT

SEQ ID NO: 748260 - protein, 499 aa, Homo sapiens; identical to SEQ ID NO: 748259

SEQ ID NO: 748261 - protein, 499 aa, Homo sapiens; identical to SEQ ID NO: 748259

SEQ ID NO: 748262 - protein, 346 aa, Homo sapiens
MDTGPDQSYFSGNHWFVFSVYLLTFLVGLPLNLLALVVFVGKLRCRPVAVDVLLLNLTASDLLLLLFLPFRMVEAANGMHWPLPFILCPLSGFIFFTTIYLTALFLAAVSIERFLSVAHPLWYKTRPRLGQAGLVSVACWLLASAHCSVVYVIEFSGDISHSQGTNGTCYLEFWKDQLAILLPVRLEMAVVLFVVPLIITSYCYSRLVWILGRGGSHRRQRRVAGLVAATLLNFLVCFGPYNVSHVVGYICGESPVWRIYVTLLSTLNSCVDPFVYYFSSSGFQADFHELLRRLCGLWGQWQQESSMELKEQKGGEEQRADRPAERKTSEHSQGCGTGGQVACAEN

SEQ ID NO: 748263 - protein, 317 aa, Homo sapiens
MAVQGSQRRLLGSLNSTPTAIPQLGLAANQTGARCLEVSISDGLFLSLGLVSLVENALVVATIAKNRNLHSPMYCFICCLALSDLLVSGSNVLETAVILLLEAGALVARAAVLQQLDNVIDVITCSSMLSSLCFLGAIAVDRYISIFYALRYHSIVTLPRARRAVAAIWVASVVFSTLFIAYYDHVAVLLCLVVFFLAMLVLMAVLYVHMLARACQHAQGIARLHKRQRPVHQGFGLKGAVTLTILLGIFFLCWGPFFLHLTLIVLCPEHPTCGCIFKNFNLFLALIICNAIIDPLIYAFHSQELRRTLKEVLTCSW

SEQ ID NO: 748264 - protein, 317 aa, Homo sapiens; identical to SEQ ID NO: 748263

SEQ ID NO: 748265 - protein, 382 aa, Homo sapiens
MAVQGSQRRLLGSLNSTPTAIPQLGLAANQTGARCLEVSISDGLFLSLGLVSLVENALVVATIAKNRNLHSPMYCFICCLALSDLLVSGSNVLETAVILLLEAGALVARAAVLQQLDNVIDVITCSSMLSSLCFLGAIAVDRYISIFYALRYHSIVTLPRARRAVAAIWVASVVFSTLFIAYYDHVAVLLCLVVFFLAMLVLMAVLYVHMLARACQHAQGIARLHKRQRPVHQGFGLKGAVTLTILLGIFFLCWGPFFLHLTLIVLCPEHPTCGCIFKNFNLFLALIICNAIIDPLIYAFHSQELRRTLKEVLTCSCSQDRALVSWDVKSLGGSVCQELLPQQPQEKGLCDQKASSTALQRLLQKEVKSLPQAKGPGLQEPP

SEQ ID NO: 748266 - protein, 83 aa, Homo sapiens
PRVADAWANHASGGRVGSCWGPFFLHLTLIVLCPEHPTCGCIFKNFNLFLALIICNAIIDPLIYAFHSQELRRTLKEVLTCSW

SEQ ID NO: 748267 - protein, 69 aa, Homo sapiens
LCAHMLTDGCQPLGSFRTGLGTRRTQRDWRVRTFSYVCSGKLSSMAAAQSPRVSGYTAAVSSLLGGAKG

SEQ ID NO: 748268 - protein, 350 aa, Homo sapiens
FRSMDTIVGMLHNRSETPTFAKVQRGVQDMMRRRFEERNVGQIKTVYPASYRFRQERSVPTFKDGTRRSDYQLTIEPLLEQEADGAAPQLTASRLLQRRQIFSQKLVEHVKEHHKAFLASLSPAMVVPEDQLTRWHPRFNVDEVPDIEPAALPQPPATEKLTTAQEVLARARNLISPRMEKALSQLALRSAAPSSPGSPRPALPATPPATPPAASPSALKGVSQDLLERIRAKEAQKQLAQMTRCPEQEQRLQRLERLPELARVLRSVFVSERKPALSMEVACARMVGSCCTIMSPGEMEKHLLLLSELLPDWLSLHRIRTDTYVKLDKAADLAHITARLAHQTRAEEGL

SEQ ID NO: 748269 - protein, 350 aa, Homo sapiens; identical to SEQ ID NO: 748268

SEQ ID NO: 748270 - protein, 338 aa, Homo sapiens
FRSMDTIVGMLHNRSETPTFAKVQRGVQDMMRRRFEERNVGQIKTVYPASYRFRQERSVPTFKDGTRRSDYQLTIEPLLEQEADGAAPQLTASRLLQRRQIFSQKLVEHVKEHHKAFLASLSPAMVVPEDQLTRWHPRFNVDEVPDIEPAALPQPPATEKLTTAQEMEKALSQLALRSAAPSSPGSPRPALPATPPATPPAASPSALKGVSQDLLERIRAKEAQKQLAQMTRCPEQEQRLQRLERLPELARVLRSVFVSERKPALSMEVACARMVGSCCTIMSPGEMEKHLLLLSELLPDWLSLHRIRTDTYVKLDKAADLAHITARLAHQTRAEEGL

SEQ ID NO: 748271 - protein, 296 aa, Homo sapiens
MSDSKEPRVQQLGLLGCLGHGALVLQLLSFMLLAGVLVAILVQVSKVPSSLSQEQSEQDAIYQNLTQLKAAVGELSEKSKLQEIYQELTQLKAAVGELPEKSKLQEIYQELTRLKAAVGELPEKSKLQEIYQELTRLKAAVGELPEKSKLQEIYQELTRLKAAVGELPEKSKLQEIYQELTELKAAVGELPEKSKLQEIYQELTQLKAAVGELPDQSKQQQIYQELTDLKTAFERLCRHCPKDWTFFQGNCYFMSNSQRNWHDSVTACQEVRAQLVVIKTAEEQLPAVLEQWRTQQ

SEQ ID NO: 748272 - protein, 399 aa, Homo sapiens
MSDSKEPRVQQLGLLEEDPTTSGIRLFPRDFQFQQIHGHKSSTGCLGHGALVLQLLSFMLLAGVLVAILVQVSKVPSSLSQEQSEQDAIYQNLTQLKAAVGELSEKSKLQEIYQELTQLKAAVGELPEKSKLQEIYQELTRLKAAVGELPEKSKLQEIYQELTRLKAAVGELPEKSKLQEIYQELTRLKAAVGELPEKSKLQEIYQELTELKAAVGELPEKSKLQEIYQELTQLKAAVGELPDQSKQQQIYQELTDLKTAFERLCRHCPKDWTFFQGNCYFMSNSQRNWHDSVTACQEVRAQLVVIKTAEEQNFLQLQTSRSNRFSWMGLSDLNQEGTWQWVDGSPLSPSFQRYWNSGEPNNSGNEDCAEFSGSGWNDNRCDVDNYWICKKPAACFRDE

SEQ ID NO: 748273 - protein, 376 aa, Homo sapiens
MSDSKEPRVQQLGLLEEDPTTSGIRLFPRDFQFQQIHGHKSSTGCLGHGALVLQLLSFMLLAGVLVAILVQVSKVPSSLSQEQSEQDAIYQNLTQLKAAVGELSEKSKLQEIYQELTQLKAAVGELPEKSKLQEIYQELTRLKAAVGELPEKSKLQEIYQELTRLKAAVGELPEKSKLQEIYQELTELKAAVGELPEKSKLQEIYQELTQLKAAVGELPDQSKQQQIYQELTDLKTAFERLCRHCPKDWTFFQGNCYFMSNSQRNWHDSVTACQEVRAQLVVIKTAEEQNFLQLQTSRSNRFSWMGLSDLNQEGTWQWVDGSPLSPSFQRYWNSGEPNNSGNEDCAEFSGSGWNDNRCDVDNYWICKKPAACFRDE

SEQ ID NO: 748274 - protein, 216 aa, Homo sapiens
MSDSKEPRVQQLGLLVSKVPSSLSQEQSEQDAIYQNLTQLKAAVGELSEKSKLQEIYQELTQLKAAVGELPEKSKLQEIYQELTRLKAAVGELPEKSKLQEIYQELTRLKAAVGELPEKSKLQEIYQELTRLKAAVGELPEKSKLQEIYQELTELKAAVGELPEKSKLQEIYQELTQLKAAVGELPDQSKQQQIYQELTDLKTAFGEFLHIKGPWA

SEQ ID NO: 748275 - protein, 272 aa, Homo sapiens
MSDSKEPRVQQLGLLEEDPTTSGIRLFPRDFQFQQIHGHKSSTGCLGHGALVLQLLSFMLLAGVLVAILVQVSKVPSSLSQEQSEQDAIYQNLTQLKAAVGELSEKSKLQEIYQELTQLKAAVGELPEKSKLQEIYQELTRLKAAVGELPEKSKLQEIYQELTRLKAAVGELPEKSKLQEIYQELTRLKAAVGELPEKSKLQEIYQELTELKAAVGELPEKSKLQEIYQELTQLKAAVGELPDQSKQQQIYQELTDLKTAFGEFLHIKGPWA

SEQ ID NO: 748276 - protein, 272 aa, Homo sapiens; identical to SEQ ID NO: 748275

SEQ ID NO: 748277 - protein, 251 aa, Homo sapiens
MSDSKEPRVQQLGLLEEDPTTSGIRLFPRDFQFQQIHGHKSSTVPFLLGPVSKVPSSLSQEQSEQDAIYQNLTQLKAAVGELSEKSKLQEIYQELTQLKAAVGELPEKSKLQEIYQELTRLKAAVGELPEKSKLQEIYQELTRLKAAVGELPEKSKLQEIYQELTRLKAAVGELPEKSKLQEIYQELTELKAAVGELPEKSKLQEIYQELTQLKAAVGELPDQSKQQQIYQELTDLKTAFGEFLHIKGPWA

SEQ ID NO: 748278 - protein, 332 aa, Homo sapiens
MSDSKEPRVQQLGLLEEDPTTSGIRLFPRDFQFQQIHGHKSSTVPFLLGPVSKVPSSLSQEQSEQDAIYQNLTQLKAAVGELSEKSKLQEIYQELTQLKAAVGELPEKSKLQEIYQELTRLKAAVGELPEKSKLQEIYQELTRLKAAVGELPEKSKLQEIYQELTRLKAAVGELPEKSKLQEIYQELTELKAAVERLCRHCPKDWTFFQGNCYFMSNSQRNWHDSVTACQEVRAQLVVIKTAEEQNFLQLQTSRSNRFSWMGLSDLNQEGTWQWVDGSPLSPSFQRYWNSGEPNNSGNEDCAEFSGSGWNDNRCDVDNYWICKKPAACFRDE

SEQ ID NO: 748279 - protein, 263 aa, Homo sapiens
MSDSKEPRVQQLGLLEEDPTTSGIRLFPRDFQFQQIHGHKSSTVPFLLGPVSKVPSSLSQEQSEQDAIYQNLTQLKAAVGELSEKSKLQEIYQELTQLKAAVGELPEKSKLQEIYQELTRLKAAVERLCRHCPKDWTFFQGNCYFMSNSQRNWHDSVTACQEVRAQLVVIKTAEEQNFLQLQTSRSNRFSWMGLSDLNQEGTWQWVDGSPLSPSFQRYWNSGEPNNSGNEDCAEFSGSGWNDNRCDVDNYWICKKPAACFRDE

SEQ ID NO: 748280 - protein, 232 aa, Homo sapiens
MSDSKEPRVQQLGLLEEDPTTSGIRLFPRDFQFQQIHGHKSSTGCLGHGALVLQLLSFMLLAGVLVAILVQVSKVPSSLSQEQSEQDAIYQNLTQLKAAVGELSEKSKLQEIYQELTQLKAAVGELPEKSKLQEIYQELTRLKAAVGELPEKSKLQEIYQELTRLKAAVERLCRHCPKDWTFFQGNCYFMSNSQRNWHDSVTACQEVRAQLVVIKTAEEQLPAVLEQWRTQQ

SEQ ID NO: 748281 - protein, 272 aa, Homo sapiens; identical to SEQ ID NO: 748275

SEQ ID NO: 748282 - protein, 272 aa, Homo sapiens; identical to SEQ ID NO: 748275

SEQ ID NO: 748283 - protein, 371 aa, Homo sapiens
MSDSKEPRVQQLGLLEEDPTTSGIRLFPRDFQFQQIHGHKSSTVSKVPSSLSQEQSEQDAIYQNLTQLKAAVGELSEKSKLQEIYQELTQLKAAVGELPEKSKLQEIYQELTRLKAAVGELPEKSKLQEIYQELTRLKAAVGELPEKSKLQEIYQELTRLKAAVGELPEKSKLQEIYQELTELKAAVGELPEKSKLQEIYQELTQLKAAVGELPDQSKQQQIYQELTDLKTAFERLCRHCPKDWTFFQGNCYFMSNSQRNWHDSVTACQEVRAQLVVIKTAEEQNFLQLQTSRSNRFSWMGLSDLNQEGTWQWVDGSPLSPSFQRYWNSGEPNNSGNEDCAEFSGSGWNDNRCDVDNYWICKKPAACFRDE

SEQ ID NO: 748284 - protein, 831 aa, Homo sapiens
PGGREPAGGGGGGGGDAPRPAALGEPAPGARAAAMGTLGKAREAPRKPSHGCRAASKARLEAKPANSPFPSHPSLAHITQFRMMVSLGHLAKGASLDDLIDSCIQSFDADGNLCRSNQLLQVMLTMHRIVISSAELLQKVITLYKDALAKNSPGLCLKICYFVRYWITEFWVMFKMDASLTDTMEEFQELVKAKGEELHCRLIDTTQINARDWSRKLTQRIKSNTSKKRKVSLLFDHLEPEELSEHLTYLEFKSFRRISFSDYQNYLVNSCVKENPTMERSIALCNGISQWVQLMVLSRPTPQLRAEVFIKFIQVAQKLHQLQNFNTLMAVIGGLCHSSISRLKETSSHVPHEINKVLGEMTELLSSSRNYDNYRRAYGECTDFKIPILGVHLKDLISLYEAMPDYLGDGKVNVHKLLALYNHISELVQLQEVAPPLEANKDLVHLLTLSLDLYYTEDEIYELSYAREPRNHRAPPLTPSKPPVVVDWASGVSPKPDPKTISKHVQRMVDSVFKNYDHDQDGYISQEEFEKIAASFPFSFCVMDKDREGLISRDEITAYFMRASSIYSKLGLGFPHNFQETTYLKPTFCDNCAGFLWGVIKQGYRCKDCGMNCHKQCKDLVVFECKKRAKNPVAPTENNTSVGPVSNLCSLGAKDLLHAPEEGPFTFPNGEAVEHGEESKDRTIMLMGVSSQKISLRLKRAVAHKATQTESQPWIGSEGPSGPFVLSSPRKTAQDTLYVLPSPTSPCPSPVLVRKRAFVKWENKDSLIKSKEELRHLRLPTYQELEQEINTLKADNDALKIQLKYAQKKIESLQLEKSNHVLAQMEQGDCS

SEQ ID NO: 748285 - protein, 99 aa, Homo sapiens
RGSCGSAAGKGVPWEPLAQPVSRAEVEVDTHRKPSHGCRAASKARLEAKPANSPFPSHPSLAHITQFRMMVSLGHLAKGASLDDLIDSCIQSFGKLANC

SEQ ID NO: 748286 - protein, 848 aa, Homo sapiens
MKVVPTSPTPTDARRPRLGQIWITPVERTSTQAALVQGAGRRAQGTCLRPSPADGYLETPGHRKPSHGCRAASKARLEAKPANSPFPSHPSLAHITQFRMMVSLGHLAKGASLDDLIDSCIQSFDADGNLCRSNQLLQVMLTMHRIVISSAELLQKVITLYKDALAKNSPGLCLKICYFVRYWITEFWVMFKMDASLTDTMEEFQELVKAKGEELHCRLIDTTQINARDWSRKLTQRIKSNTSKKRKVSLLFDHLEPEELSEHLTYLEFKSFRRISFSDYQNYLVNSCVKENPTMERSIALCNGISQWVQLMVLSRPTPQLRAEVFIKFIQVAQKLHQLQNFNTLMAVIGGLCHSSISRLKETSSHVPHEINKVLGEMTELLSSSRNYDNYRRAYGECTDFKIPILGVHLKDLISLYEAMPDYLGDGKVNVHKLLALYNHISELVQLQEVAPPLEANKDLVHLLTLSLDLYYTEDEIYELSYAREPRNHRAPPLTPSKPPVVVDWASGVSPKPDPKTISKHVQRMVDSVFKNYDHDQDGYISQEEFEKIAASFPFSFCVMDKDREGLISRDEITAYFMRASSIYSKLGLGFPHNFQETTYLKPTFCDNCAGFLWGVIKQGYRCKDCGMNCHKQCKDLVVFECKKRAKNPVAPTENNTSVGPVSNLCSLGAKDLLHAPEEGPFTFPNGEAVEHGEESKDRTIMLMGVSSQKISLRLKRAVAHKATQTESQPWIGSEGPSGPFVLSSPRKTAQDTLYVLPSPTSPCPSPVLVRKRAFVKWENKDSLIKSKEELRHLRLPTYQELEQEINTLKADNDALKIQLKYAQKKIESLQLEKSNHVLAQMEQGDCS

SEQ ID NO: 748287 - protein, 114 aa, Homo sapiens
TKRWVRLLLLVMSGRGKGGKGLGKGGAKRHRKVLRDNIQGITKPAIRRLARRGGVKRISGLIYEETRGVLKVFLENVIRDAVTYTEHAKRKTVTAMDVVYALKRQGRTLYGFGG

SEQ ID NO: 748288 - protein, 131 aa, Homo sapiens [sequence omitted]

SEQ ID NO: 748289 - protein, 131 aa, Homo sapiens [sequence omitted]

SEQ ID NO: 748290 - protein, 131 aa, Homo sapiens [sequence omitted]

SEQ ID NO: 748291 - protein, 113 aa, Homo sapiens
MSLAQRVLLTWLFTLLFLIMLVLKLDEKAPWNWFLIFIPVWIFDTILLVLLIVKMAGRCKSGFDPRHGSHNIKNCAKLEQFTTMNLSYVFIPLWALLAGALTELGYNVFFVRD

SEQ ID NO: 748292 - protein, 637 aa, Homo sapiens
TPPPPREGATRAARRGQSERRGPRRRAAEGAQSQLRAPAPRAPARPREVSARKMAGGVDGPIGIPFPDHSSDILSGLNEQRTQGLLCDVVILVEGREFPTHRSVLAACSQYFKKLFTSGAVVDQQNVYEIDFVSAEALTALMDFAYTATLTVSTANVGDILSAARLLEIPAVSHVCADLLDRQILAADAGADAGQLDLVDQIDQRNLLRAKEYLEFFQSNPMNSLPPAAAAAAASFPWSAFGASDDDLDATKEAVAAAVAAVAAGDCNGLDFYGPGPPAERPPTGDGDEGDSNPGLWPERDEDAPTGGLFPPPVAPPAATQNGHYGRGGEEEAASLSEAAPEPGDSPGFLSGAAEGEDGDGPDVDGLAASTLLQQMMSSVGRAGAAAGDSDEESRADDKGVMDYYLKYFSGAHDGDVYPAWSQKVEKKIRAKAFQKCPICEKVIQGAGKLPRHIRTHTGEKPYECNICKVRFTRQDKLKVHMRKHTGEKPYLCQQCGAAFAHNYDLKNHMRVHTGLRPYQCDSCCKTFVRSDHLHRHLKKDGCNGVPSRRGRKPRVRGGAPDPSPGATATPGAPAQPSSPDARRNGQEKHFKDEDEDEDVASPDGLGRLNVAGAGGGGDSGGGPGAATDGNFTAGLA

SEQ ID NO: 748293 - protein, 637 aa, Homo sapiens; identical to SEQ ID NO: 748292

SEQ ID NO: 748294 - protein, 637 aa, Homo sapiens; identical to SEQ ID NO: 748292

SEQ ID NO: 748295 - protein, 156 aa, Homo sapiens [sequence omitted]

SEQ ID NO: 748296 - protein, 234 aa, Homo sapiens
DWGGLLISSHDGDVYPAWSQKVEKKIRAKAFQKCPICEKVIQGAGKLPRHIRTHTGEKPYECNICKVRFTRQDKLKVHMRKHTGEKPYLCQQCGAAFAHNYDLKNHMRVHTGLRPYQCDSCCKTFVRSDHLHRHLKKDGCNGVPSRRGRKPRVRGGAPDPSPGATATPGAPAQPSSPDARRNGQEKHFKDEDEDEDVASPDGLGRLNVAGAGGGGDSGGGPGAATDGNFTAGLA

SEQ ID NO: 748297 - protein, 637 aa, Homo sapiens; identical to SEQ ID NO: 748292

SEQ ID NO: 748298 - protein, 474 aa, Homo sapiens
TPPPPREGATRAARRGQSERRGPRRRAAEGAQSQLRAPAPRAPARPREVSARKMAGGVDGPIGIPFPDHSSDILSGLNEQRTQGLLCDVVILVEGREFPTHRSVLAACSQYFKKLFTSGAVVDQQNVYEIDFVSAEALTALMDFAYTATLTVSTANVGDILSAARLLEIPAVSHVCADLLDRQILAADAGADAGQLDLVDQIDQRNLLRAKEYLEFFQSNPMNSLPPAAAAAAASFPWSAFGASDDDLDATKEAVAAAVAAVAAGDCNGLDFYGPGPPAERPPTGDGDEGDSNPGLWPERDEDAPTGGLFPPPVAPPAATQNGHYGRGGEEEAASLSEAAPEPGDSPGFLSGAAEGEDGDGPDVDGLAASTLLQQMMSSVGRAGAAAGDSDEESRADDKGVMDYYLKYFSGAHDGDVYPAWSQKVEKKIRAKAFQKCPICEKVIQGAGKLPRHIRTHTGEKPYECNICKVRFTR

SEQ ID NO: 748299 - protein, 637 aa, Homo sapiens; identical to SEQ ID NO: 748292

SEQ ID NO: 748300 - protein, 637 aa, Homo sapiens; identical to SEQ ID NO: 748292

SEQ ID NO: 748301 - protein, 637 aa, Homo sapiens; identical to SEQ ID NO: 748292

SEQ ID NO: 748302 - protein, 106 aa, Homo sapiens
MARCKVWVVREREREREQKKFLKVDLFLYKIIKKKTHHKRRIHFCSPKSEKGGSGGSHRRGPGRRPEVFVLHPQTSASKAGLWGVRAVFPPLPLSVPFLGSDVKRS

SEQ ID NO: 748303 - protein, 138 aa, Homo sapiens
KPVNVKCRSSPAWHGCGPAARQARAGDTKVCPPTIVAMQSCHCLFASFRGGSPSLFQGLPLEVGGCREGGGQGSLHDSDPGAVAGAVTSQVVTLRQGPRGAPSRPATRMVGGKTERMKGKTEEKKILKTNKKSKNPIF

SEQ ID NO: 748304 - protein, 113 aa, Homo sapiens
MVLSQACQPLCSLVTKAALTGCQLVSGLQPPRHLLSYFPCSWGACKCQVLFGVHLCLVTQRRASSITTVDISKRGISTTFHSHWDLPCHLNTIIFGDCVKRLPNPHREHTVPS

SEQ ID NO: 748305 - protein, 113 aa, Homo sapiens
HIPHRENTFLTSKEDKTTSKQEGAAGGVLSRGCRADMRETRTPESNQCLGTTTNVFTSQTFRGSWAEPEPGLLTGLFGSHGVEILPSLNIQISYKYPDFQLLLENQKKTALNS

SEQ ID NO: 748306 - protein, 69 aa, Homo sapiens
  misc_feature (9)..(9): Xaa can be any naturally occurring amino acid
  misc_feature (18)..(18): Xaa can be any naturally occurring amino acid
NLDPNPPIXRFLVRVERXFEVPRRACLQGRDASSGNLCTEITQGICHMKMKAEFYKPRDAKDCQQTTRS

SEQ ID NO: 748307 - protein, 132 aa, Homo sapiens
DLKRKEFCDLDEATTPQHLLPTEVSQDSALCYKIQTMCKTVLKGYMAPKERKDETPTRAFIRMGRFNPIRDHGQGAMLAWSLNPSGCALSTFSFPHTGWVMGHLKFLNSQSFMGSSRGNKGRARDVLVPLLY

SEQ ID NO: 748308 - protein, 91 aa, Homo sapiens
MEIAHYAKVFTADGHLGCYILATMNYHSAKHCGSCLQSQLCKRLKQEDRLSPGFQGQLGQHSETSSLKTVIGPLAPSCHLADMKNWRWQQW

SEQ ID NO: 748309 - protein, 97 aa, Homo sapiens
MRIIALLAAILLVALQVRAGPLQARGDEAPGQEQRGPEDQDISISFAWDKSSALQVSGSTRGMVCSCRLVFCRRTELRVGNCLIGGVSFTYCCTRVD

SEQ ID NO: 748310 - protein, 1012 aa, Homo sapiens
MCLSESVDYGPVFVQEPDDIIFPTDSDEKKVALNCEVRGNPVPSYRWLRNGTEIDLESDYRYSLIDGTFIISNPSEAKDSGHYQCLATNTVGSILSREATLQFAYLGNFSGRTRSAVSVREGQGVVLMCSPPPHSPEIIYSWVFNEFPSFVAEDSRRFISQETGNLYISKVQTSDVGSYICLVKNTVTNARVLSPPTPLTLRNDGVMGEYEPKIEVHFPFTVTAAKGTTVKMECFALGNPVPTITWMKVNGYIPSKARLRKSQAVLEIPNVQLDDAGIYECRAENSRGKNSFRGQLQVYTYPHWVEKLNDTQLDSGSPLRWECKATGKPRPTYRWLKNGVPLSPQSRVEMVNGVLMIHNVNQSDAGMYQCLAENKYGAIYASAELKILASAPTFALNQLKKTIIVTKDQEVVIECKPQGSPKPTISWKKGDRAVRENKRIAILPDGSLRILNASKSDEGKYVCRGENVFGSAEIIASLSVKEPTRIELTPKRTELTVGESIVLNCKAIHDASLDVTFYWTLKGQPIDFEEEGGHFESIRAQASSADLMIRNILLMHAGRYGCRVQTTADSVSDEAELLVRGPPGPPGIVIVEEITESTATLSWSPAADNHSPISSYNLQARSPFSLGWQTVKTVPEIITGDMESAMAVDLNPWVEYEFRVVATNPIGTGDPSTPSRMIRTNEAVPKTAPTNVSGRSGRRHELVIAWEPVSEEFQNGEGFGYIVAFRPNGTRGWKEKMVTSSEASKFIYRDESVPPLTPFEVKVGVYNNKGDGPFSQIVVICSAEGEPSAAPTDVKATSVSVSEILVAWKHIKESLGRPQGFEVGYWKDMEQEDTAETVKTRGNESFVILTGLEGNTLYHFTVRAYNGAGYGPPSSEVSATTKKSPPSQAPSNLRWEQQGSQVSLGWEPVIPLANESEVVGYKVFYRQEGHSNSQVIETQKLQAVVPLPDAGVYIIEVRAYSEGGDGTASSQIRVPSYSGGKITSAQSTLHSLSTSSSSVTLLLALMIPSTSW

SEQ ID NO: 748311 - protein, 518 aa, Homo sapiens
MCLSEYSKSLPGLSTSYAALLRIKKSSSSSLFGSKTRPRYSSPSLGTLSASSPSWLGAAQNYYSPINLYHSSDAFKQDESVDYGPVFVQEPDDIIFPTDSDEKKVALNCEVRGNPVPSYRWLRNGTEIDLESDYRYSLIDGTFIISNPSEAKDSGHYQCLATNTVGSILSREATLQFAYLGNFSGRTRSAVSVREGQGVVLMCSPPPHSPEIIYSWVFNEFPSFVAEDSRRFISQETGNLYISKVQTSDVGSYICLVKNTVTNARVLSPPTPLTLRNDGVMGEYEPKIEVHFPFTVTAAKGTTVKMECFALGNPVPTITWMKVNGYIPSKARLRKSQAVLEIPNVQLDDAGIYECRAENSRGKNSFRGQLQVYTYPHWVEKLNDTQLDSGSPLRWECKATGKPRPTYRWLKNGVPLSPQSRVEMVNGVLMIHNVNQSDAGMYQCLAENKYGAIYASAELKILASAPTFALNQLKKTIIVTKDQEVVIECKPQGSPKPTISWKKGDRAVRENKRLESIL

SEQ ID NO: 748312 - protein, 1086 aa, Homo sapiens
MCLSEYSKSLPGLSTSYAALLRIKKSSSSSLFGSKTRPRYSSPSLGTLSASSPSWLGAAQNYYSPINLYHSSDAFKQDESVDYGPVFVQEPDDIIFPTDSDEKKVALNCEVRGNPVPSYRWLRNGTEIDLESDYRYSLIDGTFIISNPSEAKDSGHYQCLATNTVGSILSREATLQFAYLGNFSGRTRSAVSVREGQGVVLMCSPPPHSPEIIYSWVFNEFPSFVAEDSRRFISQETGNLYISKVQTSDVGSYICLVKNTVTNARVLSPPTPLTLRNDGVMGEYEPKIEVHFPFTVTAAKGTTVKMECFALGNPVPTITWMKVNGYIPSKARLRKSQAVLEIPNVQLDDAGIYECRAENSRGKNSFRGQLQVYTYPHWVEKLNDTQLDSGSPLRWECKATGKPRPTYRWLKNGVPLSPQSRVEMVNGVLMIHNVNQSDAGMYQCLAENKYGAIYASAELKILASAPTFALNQLKKTIIVTKDQEVVIECKPQGSPKPTISWKKGDRAVRENKRIAILPDGSLRILNASKSDEGKYVCRGENVFGSAEIIASLSVKEPTRIELTPKRTELTVGESIVLNCKAIHDASLDVTFYWTLKGQPIDFEEEGGHFESIRAQASSADLMIRNILLMHAGRYGCRVQTTADSVSDEAELLVRGPPGPPGIVIVEEITESTATLSWSPAADNHSPISSYNLQARSPFSLGWQTVKTVPEIITGDMESAMAVDLNPWVEYEFRVVATNPIGTGDPSTPSRMIRTNEAVPKTAPTNVSGRSGRRHELVIAWEPVSEEFQNGEGFGYIVAFRPNGTRGWKEKMVTSSEASKFIYRDESVPPLTPFEVKVGVYNNKGDGPFSQIVVICSAEGEPSAAPTDVKATSVSVSEILVAWKHIKESLGRPQGFEVGYWKDMEQEDTAETVKTRGNESFVILTGLEGNTLYHFTVRAYNGAGYGPPSSEVSATTKKSPPSQAPSNLRWEQQGSQVSLGWEPVIPLANESEVVGYKVFYRQEGHSNSQVIETQKLQAVVPLPDAGVYIIEVRAYSEGGDGTASSQIRVPSYSGGKITSAQSTLHSLSTSSSSVTLLLALMIPSTSW

SEQ ID NO: 748313 - protein, 350 aa, Homo sapiens
MCLSEYSKSLPGLSTSYAALLRIKKSSSSSLFGSKTRPRYSSPSLGTLSASSPSWLGAAQNYYSPINLYHSSDAFKQDESVDYGPVFVQEPDDIIFPTDSDEKKVALNCEVRGNPVPSYRWLRNGTEIDLESDYRYSLIDGTFIISNPSEAKDSGHYQCLATNTVGSILSREATLQFAYLGNFSGRTRSAVSVREGQGVVLMCSPPPHSPEIIYSWVFNEFPSFVAEDSRRFISQETGNLYISKVQTSDVGSYICLVKNTVTNARVLSPPTPLTLRNDGVMGEYEPKIEVHFPFTVTAAKGTTVKMECFALGNKYIKGSVKKTASLKKVSVYHLVSFLRNVTIMEKRNIL

SEQ ID NO: 748314 - protein, 112 aa, Homo sapiens
ANGSLWLNIVYHWRYSWYWKELEFHIDSVMEKVFWALAVLIQRTKDLSVMCGEPFPLVSLNAMGKAVGPVHSAGQLQSPRIGLANCHSLSSWQQQLKGQLVLICIFGCLCYL

SEQ ID NO: 748315 - protein, 194 aa, Homo sapiens
MDEDGLPLMGSGIDLTKVPAIQQKRTVAFLNQFVVHTVQFLNRFSTVCEEKLADLSLRIQQIETTLNILDAKLSSIPGLDDVTVEVSPLNVTSVTNGAHPEATSEQPQQNSTQDSGLQESEVSAENILTVAKDPRYARYLKMVQVGVPVMAIRNKMISEGLDPDLLERPDAPVPDGESEKTVEESSDSESSFSD

SEQ ID NO: 748316 - protein, 194 aa, Homo sapiens; identical to SEQ ID NO: 748315

SEQ ID NO: 748317 - protein, 93 aa, Homo sapiens
MDEDGLPLMGSGIDLTKVPAIQQKRTVAFLNQFVVHTVQFLNRFSTVCEEKLADLSLLANRGLVANRGLVANRGLVANRGLVANRDSSQPWTS

SEQ ID NO: 748318 - protein, 71 aa, Homo sapiens
LYCYLPSVRHPENGRHILVYCYHYHNAERGGGLSGSRRVISASYSTEKNGGFSKPICGAHCTVPQPLFYSL

SEQ ID NO: 748319 - protein, 145 aa, Homo sapiens
MKLADLSLRIQQIETTLNILDAKLSSIPGLDDVTVEVSPLNVTSVTNGAHPEATSEQPQQNSTQDSGLQESEVSAENILTVAKDPRYARYLKMVQVGVPVMAIRNKMISEGLDPDLLERPDAPVPDGESEKTVEESSDSESSFSD

SEQ ID NO: 748320 - protein, 175 aa, Homo sapiens
MDEDGLPLMGSGIDLTKASYSTEPLFYSFVRKLADLSLRIQQIETTLNILDAKLSSIPGLDDVTVEVSPLNVTSVTNGAHPEATSEQPQQNSTQDSGLQESEVSAENILTVAKDPRYARYLKMVQVGVPVMAIRNKMISEGLDPDLLERPDAPVPDGESEKTVEESSDSESSFSD

SEQ ID NO: 748321 - protein, 194 aa, Homo sapiens; identical to SEQ ID NO: 748315

SEQ ID NO: 748322 - protein, 174 aa, Homo sapiens
MDEDGLPLMGSGIDLTKVPAIQQKRTVAFLNQFVVHTVQFLNRFSTVCEEKLADLSLRIQQIETTLNILDAKLSSIPGLDDVTVEVSPLNVTSVTNGAHPEATSEQPQQNSTQDSGLQESEVSAENILTVAKDPRYARYLKMVQVGVPVMAIRNKMISEGLDPDLLEKIKKRKK

SEQ ID NO: 748323 - protein, 157 aa, Homo sapiens
MDEDGLPLMGSGIDLTKVPAIQQKRTVAFLNQFVVHTVQFLNRFSTVCEEKLADLSLRIQQIETTLNILDAKLSSIPGLDDVTVEVSPLNVTSVTNGAHPEATSEQPQGVPVMAIRNKMISEGLDPDLLERPDAPVPDGESEKTVEESSDSESSFSD

SEQ ID NO: 748324 - protein, 71 aa, Homo sapiens; identical to SEQ ID NO: 748318

SEQ ID NO: 748325 - protein, 202 aa, Homo sapiens
MKGNVEDFGLRDTLSIASTDSFASAAELAEHREVRHTYSLESLCHCPFYEEAMHLVEEGKIYSRVLRTEMLECLGDSDFLAKLHCIRQAFQVILSESANRIFLAESGRKILSALIVKARKNPKKFEDVFDEMIYFLEQTDHWGSTEMELAARGVKNLNFYDVVLDFILMDSFEDLENPPTSIQNVVNNRWLNSSFKETVSGG

SEQ ID NO: 748326 - protein, 200 aa, Homo sapiens
GIVSVETDLLQWCLESGSIPILCPIGETAARRSVLLDSLEVTASLAKALRPTKIIFLNNTGGLRDSSHKVLSNVNLPADLDLVCNAEWVSTKERQQMRLIVDVLSRLPHHSSAVITAASTLLTELFSNKGEGGGRAGDWVPGVSTGRGWVSAVRRSGFSSCPGAVGGGGGCHSNGSCCCRNPGEVREEETQCTGRELRRN

SEQ ID NO: 748327 - protein, 337 aa, Homo sapiens
GIVSVETDLLQWCLESGSIPILCPIGETAARRSVLLDSLEVTASLAKALRPTKIIFLNNTGGLRDSSHKVLSNVNLPADLDLVCNAEWVSTKERQQMRLIVDVLSRLPHHSSAVITAASTLLTELFSNKGSGTLFKNAERMLRVRSLDKLDQGRLVYLVNASFGKKLRDDYLASLRPRLHSIYVSEGYNAAAILTMEPVLGGTPYLDKFVVSSSRQGQGSGQMLWECLRRDLQTLFWRSRVTNPINPWYFKHSDGSFSNKQWIFFWFGLADIRDSYELVNHAKGLPDSFHKPASEPRQLTFTMDTTGPGMARVDQKPCQLGMTPGSQPQAEGGLLAE

SEQ ID NO: 748328 - protein, 317 aa, Homo sapiens
MVVMNSLRVILQASPGKLLWRKFQIPRFMPARPCSLYTCTYKTRNRALHPLWESVDLVPGGDRQSPINIRWRDSVYDPGLKPLTISYDPATCLHVWNNGYSFLVEFEDSTDKSVIKGGPLEHNYRLKQFHFHWGAIDAWGSEHTVDSKCFPAELHLVHWNAVKFENFEDAALEENGLAVIGVFLKLGKHHKELQKLVDTLPSIKHKDALVEFGSFDPSCLMPTCPDYWTYSGSLTTPPLSESVTWIIKKQPVEVDHDQLEQFRTLLFTSEGEKEKRMVDNFRPLQPLMNRTVRSSFRHDYVLNVQAKPKPATSQATP

SEQ ID NO: 748329 - protein, 184 aa, Homo sapiens [sequence omitted]

SEQ ID NO: 748330 - protein, 184 aa, Homo sapiens [sequence omitted]

SEQ ID NO: 748331 - protein, 184 aa, Homo sapiens [sequence omitted]

SEQ ID NO: 748332 - protein, 184 aa, Homo sapiens [sequence omitted]

SEQ ID NO: 748333 - protein, 184 aa, Homo sapiens [sequence omitted]

SEQ ID NO: 748334 - protein, 318 aa, Homo sapiens
EHMFSGPPVGCVTGHSHPYWLRINLFKYFTEFDSFRQHLVWPEKVHPLWESVDLVPGGDRQSPINIRWRDSVYDPGLKPLTISYDPATCLHVWNNGYSFLVEFEDSTDKSVIKGGPLEHNYRLKQFHFHWGAIDAWGSEHTVDSKCFPAELHLVHWNAVKFENFEDAALEENGLAVIGVFLKISETSGSPVSTGRPKPLARKLRPAQKHWVLQSRPFLSSQVQENCKVTYFHRKHWVRIRPLRTTPPSWDYTRICIQREMVPARIRVLREMVPEAWRCFPNRLPLLSNIRPDFSKAPLAYVKRWLWTARHPHSLSAAW

SEQ ID NO: 748335 - protein, 184 aa, Homo sapiens [sequence omitted]

SEQ ID NO: 748336 - protein, 184 aa, Homo sapiens [sequence omitted]

SEQ ID NO: 748337 - protein, 184 aa, Homo sapiens [sequence omitted]

SEQ ID NO: 748338 - protein, 89 aa, Homo sapiens
GQDWPEKRGVECMHPLWESVDLVPGGDRQSPINIRWRDSVYDPGLKPLTISYDPATCLHVWNNGYSFLVEFEDSTDKSAALSALERSQI

SEQ ID NO: 748339 - protein, 75 aa, Homo sapiens
LTSFLLVHPLWESVDLVPGGDRQSPINIRWRDSVYDPGLKPLTISYDPATCLHVWNNGYSFLVEFEDSTDKSGCT

SEQ ID NO: 748340 - protein, 89 aa, Homo sapiens; identical to SEQ ID NO: 748338

SEQ ID NO: 748341 - protein, 111 aa, Homo sapiens
SHCTRSNSLDNRLTSFLLVHPLWESVDLVPGGDRQSPINIRWRDSVYDPGLKPLTISYDPATCLHVWNNGYSFLVEFEDSTDKSGEGKIWWSCKELKKQCHVNRGHIKLSP

SEQ ID NO: 748342 - protein, 76 aa, Homo sapiens
WGSSGPPDTLSCMENSKGLLLICSVQHCLYFILMLLLVSLLGTLGTSLLTDPIPVKQVKCCQVGCSGVDPAVLGSH

SEQ ID NO: 748343 - protein, 94 aa, Homo sapiens
SVMGTEWTLWVFPPLKRLFLEKKLDTVGVFLDCEHGQISFYNVTEMSLIYNFSHCAFQGALRPVFSLCIPNGDTSPDSLTILQHGPSCDATVSP

SEQ ID NO: 748344 - protein, 101 aa, Homo sapiens
EAMHGLDWGAHRREPAGWARPVWGRAGGRQHAGGLARSAWSRSIQVVAVSQEGGTEASLGQGVWICGWIAGTLDSHSQENDIVGQSGHLAPGPVAASGLDM

SEQ ID NO: 748345 - protein, 332 aa, Homo sapiens
QLERGPPRRHLAQEESARESELRFSCCATRASGLGAEDRPGGGGKEAAGSEERLALEAADGTMSPGSGVKSEYMKRYQEPRWEEYGPCYRELLHYRLGRRLLEQAHAPWLWDDWGPAGSSEDSASSESSGAGGPAPRCAPPSPPPPVEPATQEEAERRARGAPEEQDAEAGDAEAEDAEDAALPALPVKDVEDKPEQQTRTRETDKSPTSTEPRQQPSALFARGNRKAVKSPQRSSSKIKENKHPFALYGWGEKQTDTGSQKTHNVCASAPVHEIHESALRAKNRRQVEKRKLVAQRQRAHSVDVEKNRKMKASSSENPWMTEYMRCYSARA

SEQ ID NO: 748346 - protein, 140 aa, Homo sapiens
MSPGSGVKSEYMKRYQEPRWEEYGPCYRELLHYRLGRRLLEQAHAPWLWDDWGPAGSSEDSASSESSGAGGPAPRCAPPSPPPPVEPATQEEAERRARGAPEEQDAEAGDAEAEDAEDAALPGTRPGGEREGPARRDGLL

SEQ ID NO: 748347 - protein, 182 aa, Homo sapiens
  misc_feature (1)..(1): Xaa can be any naturally occurring amino acid
XIKGATECGKPTQVPQFILDDFIQNAEQQSVNIVVTQPRRISAVSVAERVAFERGEEPGKSCGYSVRFESILPRPHASIMFCTVGVLLRKLEAGIRGISHVIVDEIHERDINTDFLLVVLRDVVQAYPEVRIVLMSATIDTSMFCEYFFNCPIIEVYGRTYPVQEYFLEDCIQMTHFVPPPK

SEQ ID NO: 748348 - protein, 487 aa, Homo sapiens
LWRGSIYKLLWRELLCFLGFYMALSAAYRFVLTEGQKRYFEKLVIYCDQYASLIPVSFVLGFYVTLVVNRWWSQYLCMPLPDALMCVVAGTVHGRDDRGRLYRRTLMRYAGLSAVLILRSVSTAVFKRFPTIDHVVEAGFMTREERKKFENLNSSYNKYWVPCVWFSNLAAQARREGRIRDNSALKLLLEELNVFRGKCGMLFHYDWISVPLVYTQVVTIALYSYFLACLIGRQFLDPAQGYKDHDLDLCVPIFTLLQFFFYAGWLKVAEQLINPFGEDDDDFETNFLIDRNFQVSMLAVDEMYDDLAVLEKDLYWDAAEARAPYTAATVFQLRQPSFQGSTFDITLAKEDMQFQRLDGLDGPMGGAPGDFLQRLLPAGAGMVAGGPLGRRLSFLLRKNSCVSEASTGASCSCAVVPEGAAPECSCGDPLLDPGLPEPEAPPPAGPEPLTLIPGPVEPFSIVTMPGPRGPAPPWLPSPIGEEEENLA

SEQ ID NO: 748349 - protein, 70 aa, Homo sapiens
MSNNMAKIAEARKTVEQLKLEVNIDRMKVSQAAAELLAFCETHAKDDPLVTPVPAAENPFRDKRLFCVLL

SEQ ID NO: 748350 - protein, 354 aa, Homo sapiens
MTTAILERLSTLSVSGQQLRRLPKILEDGLPKMPCTVPETDVPQLFREPYIRTGYRPTGHEWRYYFFSLFQKHNEVVNVWTHLLAALAVLLRFWAFAEAEALPWASTHSLPLLLFILSSITYLTCSLLAHLLQSKSELSHYTFYFVDYVGVSVYQYGSALAHFFYSSDQAWYDRFWLFFLPAAAFCGWLSCAGCCYAKYRYRRPYPVMRKICQVVPAGLAFILDISPVAHRVALCHLAGCQEQAAWYHTLQILFFLVSAYFFSCPVPEKYFPGSCDIVGHGHQIFHAFLSICTLSQLEAILLDYQGRQEIFLQRHGPLSVHMACLSFFFLAACSAATAALLRHKVKARLTKKDS

SEQ ID NO: 748351 - protein, 122 aa, Homo sapiens
FLTQYLILSPRLDCNGKILAHCSLDLSSSDPPTSASAPPPPQHPIRWDHRCMPPCPANFVYFEEMGFHHVTQAGLELLGSSNLPTSAQQSSGNTGVSHGARPINAFFFFNLKPPNSKLQGTR

SEQ ID NO: 748352 - protein, 595 aa, Homo sapiens
AGLRAGAAGRRRGPAPAGAGRRRGRASGQRPIAALGASSAGSGPRQPERGRGLEIHADSRRRRLCSAGSWRGSPPTAPGRRSAGPRPLPAAPLTMSETEFHHGAQAGLELLRSSNSPTSASQSAGMTVTDQAFVTLATNDIYCQGALVLGQSLRRHRLTRKLVVLITPQVSSLLRVILSKVFDEVIEVNLIDSADYIHLAFLKRPELGLTLTKLHCWTLTHYSKCVFLDADTLVLSNVDELFDRGEFSAAPDPGWPDCFNSGVFVFQPSLHTHKLLLQHAMEHGSFDGADQGLLNSFFRNWSTTDIHKHLPFIYNLSSNTMYTYSPAFKQFGSSAKVVHFLGSMKPWNYKYNPQSGSVLEQGSVSSSQHQAAFLHLWWTVYQNNVLPLYKSVQAGEARASPGHTLCHSDVGGPCADSASGVGEPCENSTPSAGVPCANSPLGSNQPAQGLPEPTQIVDETLSLPEGRRSEDMIACPETETPAVITCDPLSQPSPQPADFTETETILQPANKVESVSSEETFEPSQELPAEALRDPSLQDALEVDLAVSVSQISIEEKVKELSPEEERRKWEEGRIDYMGKDAFARIQEKLDRFLQ

SEQ ID NO: 748353 - protein, 399 aa, Homo sapiens
MSVTDQAFVTLATNDIYCQGALVLGQSLRRHRLTRKLVVLITPQVSSLLRVILSKVFDEVIEVNLIDSADYIHLAFLKRPELGLTLTKLHCWTLTHYSKCVFLDADTLVLSNVDELFDRGEFSAAPDPGWPDCFNSGVFVFQPSLHTHKLLLQHAMEHGSFDGADQGLLNSFFRNWSTTDIHKHLPFIYNLSSNTMYTYSPAFKQFGSSAKVVHFLGSMKPWNYKYNPQSGSVLEQGSVSSSQHQAAFLHLWWTVYQNNVLPLYKSVQAGEARASPGHTLCHSDVGGPCADSASGVGEPCENSTPSAGVPCANSPLGSNQPAQGLPEPTQIVDETLSLPEGRRSEDVDLAVSVSQISIEEKVKELSPEEERRKWEEGRIDYMGKDAFARIQEKLDRFLQ

SEQ ID NO: 748354 - protein, 471 aa, Homo sapiens
AGLRAGAAGRRRGPAPAGAGRRRGRASGQRPIAALGASSAGSGPRQPERGRGLEIHADSRRRRLCSAGSWRGSPPTAPGRRSAATNDIYCQGALVLGQSLRRHRLTRKLVVLITPQVSSLLRVILSKVFDEVIEVNLIDSADYIHLAFLKRPELGLTLTKLHCWTLTHYSKCVFLDADTLVLSNVDELFDRGEFSAAPDPGWPDCFNSGVFVFQPSLHTHKLLLQHAMEHGSFDGADQGLLNSFFRNWSTTDIHKHLPFIYNLSSNTMYTYSPAFKQFGSSAKVVHFLGSMKPWNYKYNPQSGSVLEQGSVSSSQHQAAFLHLWWTVYQNNVLPLYKSVQAGEARASPGHTLCHSDVGGPCADSASGVGEPCENSTPSAGVPCANSPLGSNQPAQGLPEPTQIVDETLSLPEGRRSEDVDLAVSVSQISIEEKVKELSPEEERRKWEEGRIDYMGKDAFARIQEKLDRFLQ

SEQ ID NO: 748355 - protein, 493 aa, Homo sapiens
AGLRAGAAGRRRGPAPAGAGRRRGRASGQRPIAALGASSAGSGPRQPERGRGLEIHADSRRRRLCSAGSWRGSPPTAPGRRSAGPRPLPAAPLTMSVTDQAFVTLATNDIYCQGALVLGQSLRRHRLTRKLVVLITPQVSSLLRVILSKVFDEVIEVNLIDSADYIHLAFLKRPELGLTLTKLHCWTLTHYSKCVFLDADTLVLSNVDELFDRGEFSAAPDPGWPDCFNSGVFVFQPSLHTHKLLLQHAMEHGSFDGADQGLLNSFFRNWSTTDIHKHLPFIYNLSSNTMYTYSPAFKQFGSSAKVVHFLGSMKPWNYKYNPQSGSVLEQGSVSSSQHQAAFLHLWWTVYQNNVLPLYKSVQAGEARASPGHTLCHSDVGGPCADSASGVGEPCENSTPSAGVPCANSPLGSNQPAQGLPEPTQIVDETLSLPEGRRSEDVDLAVSVSQISIEEKVKELSPEEERRKWEEGRIDYMGKDAFARIQEKLDRFLQ

SEQ ID NO: 748356 - protein, 532 aa, Homo sapiens
MGPGVAWMRVVHATMVLRPPLRPEKVDKDNEDFQKCIHSHRNSAGSWRGSPPTAPGRRSAGPRPLPAAPLTMSATNDIYCQGALVLGQSLRRHRLTRKLVVLITPQVSSLLRVILSKVFDEVIEVNLIDSADYIHLAFLKRPELGLTLTKLHCWTLTHYSKCVFLDADTLVLSNVDELFDRGEFSAAPDPGWPDCFNSGVFVFQPSLHTHKLLLQHAMEHGSFDGADQGLLNSFFRNWSTTDIHKHLPFIYNLSSNTMYTYSPAFKQFGSSAKVVHFLGSMKPWNYKYNPQSGSVLEQGSVSSSQHQAAFLHLWWTVYQNNVLPLYKSVQAGEARASPGHTLCHSDVGGPCADSASGVGEPCENSTPSAGVPCANSPLGSNQPAQGLPEPTQIVDETLSLPEGRRSEDMIACPETETPAVITCDPLSQPSPQPADFTETETILQPANKVESVSSEETFEPSQELPAEALRDPSLQDALEVDLAVSVSQISIEEKVKELSPEEERRKWEEGRIDYMGKDAFARIQEKLDRFLQ

SEQ ID NO: 748357 - protein, 564 aa, Homo sapiens
AGLRAGAAGRRRGPAPAGAGRRRGRASGQRPIAALGASSAGSGPRQPERGRGLEIHADSRRRRLCSAGSWRGSPPTAPGRRSAGPRPLPAAPLTMSVTDQAFVTLATNDIYCQGALVLGQSLRRHRLTRKLVVLITPQVSSLLRVILSKVFDEVIEVNLIDSADYIHLAFLKRPELGLTLTKLHCWTLTHYSKCVFLDADTLVLSNVDELFDRGEFSAAPDPGWPDCFNSGVFVFQPSLHTHKLLLQHAMEHGSFDGADQGLLNSFFRNWSTTDIHKHLPFIYNLSSNTMYTYSPAFKQFGSSAKVVHFLGSMKPWNYKYNPQSGSVLEQGSVSSSQHQAAFLHLWWTVYQNNVLPLYKSVQAGEARASPGHTLCHSDVGGPCADSASGVGEPCENSTPSAGVPCANSPLGSNQPAQGLPEPTQIVDETLSLPEGRRSEDMIACPETETPAVITCDPLSQPSPQPADFTETETILQPANKVESVSSEETFEPSQELPAEALRDPSLQDALEVDLAVSVSQISIEEKVKELSPEEERRKWEEGRIDYMGKDAFARIQEKLDRFLQ

SEQ ID NO: 748358 - protein, 334 aa, Homo sapiens
FIEHLREDDPEQAGHLRSDQHHQLHCWTLTHYSKCVFLDADTLVLSNVDELFDRGEFSAAPDPGWPDCFNSGVFVFQPSLHTHKLLLQHAMEHGSFDGADQGLLNSFFRNWSTTDIHKHLPFIYNLSSNTMYTYSPAFKQFGSSAKVVHFLGSMKPWNYKYNPQSGSVLEQGSVSSSQHQAAFLHLWWTVYQNNVLPLYKSVQAGEARASPGHTLCHSDVGGPCADSASGVGEPCENSTPSAGVPCANSPLGSNQPAQGLPEPTQIVDETLSLPEGRRSEDVDLAVSVSQISIEEKVKELSPEEERRKWEEGRIDYMGKDAFARIQEKLDRFLQ

SEQ ID NO: 748359 - protein, 434 aa, Homo sapiens
MSVTDQAFVTLATNDIYCQGALVLGQSLRRHRLTRKLVVLITPQVSSLLRVILSKVFDEVIEVNLIDSADYIHLAFLKRPELGLTLTKLHCWTLTHYSKCVFLDADTLVLSNVDELFDRGEFSAAPDPGWPDCFNSGVFVFQPSLHTHKLLLQHAMEHGSFDGADQGLLNSFFRNWSTTDIHKHLPFIYNLSSNTMYTYSPAFKQFGSSAKVVHFLGSMKPWNYKYNPQSGSVLEQGSVSSSQHQAAFLHLWWTVYQNNVLPLYKSVQAGEARASPGHTLCHSDVGGPCADSASGVGEPCENSTPSAGVPCANSPLGSNQPAQGLPEPTQIVDETLSLPEGRRSEDMIACPETETPAVITCDPLSQPSPQPADFTETETILVDLAVSVSQISIEEKVKELSPEEERRKWEEGRIDYMGKDAFARIQEKLDRFLQ

SEQ ID NO: 748360 - protein, 463 aa, Homo sapiens
MSVTDQAFVTLATNDIYCQGALVLGQSLRRHRLTRKLVVLITPQVSSLLRVILSKVFDEVIEVNLIDSADYIHLAFLKRPELGLTLTKLHCWTLTHYSKCVFLDADTLVLSNVDELFDRGEFSAAPDPGWPDCFNSGVFVFQPSLHTHKLLLQHAMEHGSFDGADQGLLNSFFRNWSTTDIHKHLPFIYNLSSNTMYTYSPAFKQFGSSAKVVHFLGSMKPWNYKYNPQSGSVLEQGSVSSSQHQAAFLHLWWTVYQNNVLPLYKSVQAGEARASPGHTLCHSDVGGPCADSASGVGEPCENSTPSAGVPCANSPLGSNQPAQGLPEPTQIVDETLSLPEGRRSEDMIACPETETPAVITCDPLSQPSPQPADFTETETILQPANKVESVSSEETFEPSQELPAEALRDPSLQDALEVVSKFFPLPKAPGGGHPPSLRSTACTQQLLIFQPHLTKNKNRLPSS

SEQ ID NO: 748361 - protein, 88 aa, Homo sapiens
PFPHLWGGTRPSLLDPARCRARASASLSSPCSAPSRGSPDAGTVCVQLDPFFSSIPFSFCYTTTHSVAAATMLSTQGAASRRCRGAGV

SEQ ID NO: 748362 - protein, 380 aa, Homo sapiens
MASLPVLQKESVFQSGAHAYRIPALLYLPGQQSLLAFAEQRASKKDEHAELIVLRRGDYDAPTHQVQWQAQEVVAQARLDGHRSMNPCPLYDAQTGTLFLFFIAIPGQVTEQQQLQTRANVTRLCQVTSTDHGRTWSSPRDLTDAAIGPAYREWSTFAVGPGHCLQLHDRARSLVVPAYAYRKLHPIQRPIPSAFCFLSHDHGRTWARGHFVAQDTLECQVAEVETGEQRVVTLNARSHLRARVQAQSTNDGLDFQESQLVKKLVEPPPQGCQGSVISFPSPRSGPGSPAQWLLYTHPTHSWQRADLGAYLNPRPPAPEAWSEPVLLAKGSCAYSDLQSMGTGPDGSPLFGCLYEANDYEEIVFLMFTLKQAFPAEYLPQ

SEQ ID NO: 748363 - protein, 904 aa, Homo sapiens
MRQTLPCIYFWGGLLPFGMLCASSTTKCTVSHEVADCSHLKLTQVPDDLPTNITVLNLTHNQLRRLPAANFTRYSQLTSLDVGFNTISKLEPELCQKLPMLKVLNLQHNELSQLSDKTFAFCTNLTELHLMSNSIQKIKNNPFVKQKNLITLDLSHNGLSSTKLGTQVQLENLQELLLSNNKIQALKSEELDIFANSSLKKLELSSNQIKEFSPGCFHAIGRLFGLFLNNVQLGPSLTEKLCLELANTSIRNLSLSNSQLSTTSNTTFLGLKWTNLTMLDLSYNNLNVVGNDSFAWLPQLEYFFLEYNNIQHLFSHSLHGLFNVRYLNLKRSFTKQSISLASLPKIDDFSFQWLKCLEHLNMEDNDIPGIKSNMFTGLINLKYLSLSNSFTSLRTLTNETFVSLAHSPLHILNLTKNKISKIESDAFSWLGHLEVLDLGLNEIGQELTGQEWRGLENIFEIYLSYNKYLQLTRNSFALVPSLQRLMLRRVALKNVDSSPSPFQPLRNLTILDLSNNNIANINDDMLEGLEKLEILDLQHNNLARLWKHANPGGPIYFLKGLSHLHILNLESNGFDEIPVEVFKDLFELKIIDLGLNNLNTLPASVFNNQVSLKSLNLQKNLITSVEKKVFGPAFRNLTELDMRFNPFDCTCESIAWFVNWINETHTNIPELSSHYLCNTPPHYHGFPVRLFDTSSCKDSAPFELFFMINTSILLIFIFIVLLIHFEGWRISFYWNVSVHRVLGFKEIDRQTEQFEYAAYIIHAYKDKDWVWEHFSSMEKEDQSLKFCLEERDFEAGVFELEAIVNSIKRSRKIIFVITHHLLKDPLCKRFKVHHAVQQAIEQNLDSIILVFLEEIPDYKLNHALCLRRGMFKSHCILNWPVQKERIGAFRHKLQVALGSKNSVH

SEQ ID NO: 748364 - protein, 904 aa, Homo sapiens; identical to SEQ ID NO: 748363

SEQ ID NO: 748365 - protein, 627 aa, Homo sapiens
MLDLSYNNLNVVGNDSFAWLPQLEYFFLEYNNIQHLFSHSLHGLFNVRYLNLKRSFTKQSISLASLPKIDDFSFQWLKCLEHLNMEDNDIPGIKSNMFTGLINLKYLSLSNSFTSLRTLTNETFVSLAHSPLHILNLTKNKISKIESDAFSWLGHLEVLDLGLNEIGQELTGQEWRGLENIFEIYLSYNKYLQLTRNSFALVPSLQRLMLRRVALKNVDSSPSPFQPLRNLTILDLSNNNIANINDDMLEGLEKLEILDLQHNNLARLWKHANPGGPIYFLKGLSHLHILNLESNGFDEIPVEVFKDLFELKIIDLGLNNLNTLPASVFNNQVSLKSLNLQKNLITSVEKKVFGPAFRNLTELDMRFNPFDCTCESIAWFVNWINETHTNIPELSSHYLCNTPPHYHGFPVRLFDTSSCKDSAPFELFFMINTSILLIFIFIVLLIHFEGWRISFYWNVSVHRVLGFKEIDRQTEQFEYAAYIIHAYKDKDWVWEHFSSMEKEDQSLKFCLEERDFEAGVFELEAIVNSIKRSRKIIFVITHHLLKDPLCKRFKVHHAVQQAIEQNLDSIILVFLEEIPDYKLNHALCLRRGMFKSHCILNWPVQKERIGAFRHKLQVALGSKNSVH

SEQ ID NO: 748366 - protein, 69 aa, Homo sapiens
MAIPTTPHPQPTSTSGGGSFSVASQELALQACVSSIEELADTGCCAPEALSFQKCQVLEQGAATITAPH

SEQ ID NO: 748367 - protein, 689 aa, Homo sapiens
MIEMAAEKEPFLVPAPPPPLKDESGGGGGPTVPPHQEAASGELRGGTERGPGRCAPSAGSPAAAVGRESPGAAATSSSGPQAQQHRGGGPQAQSHGEARLSDPPGRAAPPDVGEERRGGGGTELGPPAPPRPRNGYQPHRPPGGGGGKRRNSCNVGGGGGGFKHPAFKRRRRVNSDCDSVLPSNFLLGGNIFDPLNLNSLLDEEVSRTLNAETPKSSPLPAKGRDPVEILIPKDITDPLSLNTCTDEGHVVLASPLKTGRKRHRHRGQHHQQQQAAGGSESHPVPPTAPLTPLLHGEGASQQPRHRGQNRDAPQPYELNTAINCRDEVVSPLPSALQGPSGSLSAPPAASVISAPPSSSSRHRKRRRTSSKSEAGARGGGQGSKEKGRGSWGGRHHHHHPLPAAGFKKQQRKFQYGNYCKYYGYRNPSCEDGRLRVLKPEWFRGRDVLDLGCNVGHLTLSIACKWGPSRMVGLDIDSRLIHSARQNIRHYLSEELRLPPQTLEGDPGAEGEEGTTTVRKRSCFPASLTASRGPIAAPQVPLDGADTSVFPNNVVFVTGNYVLDRDDLVEAQTPEYDVVLCLSLTKWVHLNWGDEGLKRMFRRIYRHLRPGGILVLEPQPWSSYGKRKTLTETIYKNYYRIQLKPEQFSSYLTSPDVGFSSYELVATPHNTSKGFQRPVYLFHKARSPSH

SEQ ID NO: 748368 - protein, 689 aa, Homo sapiens; identical to SEQ ID NO: 748367

SEQ ID NO: 748369 - protein, 671 aa, Homo sapiens
MIEMAAEKEPFLVPAPPPPLKDESGGGGGPTVPPHQEAASGELRGGTERGPGRCAPSAGSPAAAVGRESPGAAATSSSGPQAQQHRGGGPQAQSHGEARLSDPPGRAAPPDVGEERRGGGGTELGPPAPPRPRNGYQPHRPPGGGGGKRRNSCNVGGGGGGFKHPAFKRRRRVNSDCDSVLPSNFLLGGNIFDPLNLNSLLDEEVSRTLNAETPKSSPLPAKGRDPVEILIPKDITDPLSLNTCTDEGHVVLASPLKTGRKRHRHRGQHHQQQQAAGGSESHPVPPTAPLTPLLHGEGASQQPRHRGQNRDAPQPYELNTAINCRDEVVSPLPSALQGPSGSLSAPPAASVISAPPSSSSRHRKRRRTSSKSEAGARGGGQGSKEKGRGSWGGRHHHHHPLPAAGFKKQQRKFQYGNYCKYYGYRNPSCEDGRLRVLKPEWFRGRDVLDLGCNVGHLTLSIACKWGPSRMVGLDIDSRLIHSARQRDPGAEGEEGTTTVRKRSCFPASLTASRGPIAAPQVPLDGADTSVFPNNVVFVTGNYVLDRDDLVEAQTPEYDVVLCLSLTKWVHLNWGDEGLKRMFRRIYRHLRPGGILVLEPQPWSSYGKRKTLTETIYKNYYRIQLKPEQFSSYLTSPDVGFSSYELVATPHNTSKGFQRPVYLFHKARSPSH

SEQ ID NO: 748370 - protein, 689 aa, Homo sapiens; identical to SEQ ID NO: 748367

SEQ ID NO: 748371 - protein, 689 aa, Homo sapiens; identical to SEQ ID NO: 748367

SEQ ID NO: 748372 - protein, 689 aa, Homo sapiens; identical to SEQ ID NO: 748367

SEQ ID NO: 748373 - protein, 220 aa, Homo sapiens
MVGLDIDSRLIHSARQNIRHYLSEELRLPPQTLEGDPGAEGEEGTTTVRKRSCFPASLTASRGPIAAPQVPLDGADTSVFPNNVVFVTGNYVLDRDDLVEAQTPEYDVVLCLSLTKWVHLNWGDEGLKRMFRRIYRHLRPGGILVLEPQPWSSYGKRKTLTETIYKNYYRIQLKPEQFSSYLTSPDVGFSSYELVATPHNTSKGFQRPVYLFHKARSPSH

SEQ ID NO: 748374 - protein, 220 aa, Homo sapiens; identical to SEQ ID NO: 748373

SEQ ID NO: 748375 - protein, 220 aa, Homo sapiens; identical to SEQ ID NO: 748373

SEQ ID NO: 748376 - protein, 815 aa, Homo sapiens
MIEMAAEKEPFLVPAPPPPLKDESGGGGGPTVPPHQEAASGELRGGTERGPGRCAPSAGSPAAAVGRESPGAAATSSSGPQAQQHRGGGPQAQSHGEARLSDPPGRAAPPDVGEERRGGGGTELGPPAPPRPRNGYQPHRPPGGGGGKRRNSCNVGGGGGGFKHPAFKRRRRVNSDCDSVLPSNFLLGGNIFDPLNLNSLLDEEVSRTLNAETPKSSPLPAKGRDPVEILIPKDITDPLSLNTCTDEGHVVLASPLKTGRKRHRHRGQHHQQQQAAGGSESHPVPPTAPLTPLLHGEGASQQPRHRGQNRDAPQPYELNTAINCRDEVVSPLPSALQGPSGSLSAPPAASVISAPPSSSSRHRKRRRTSSKSEAGARGGGQGSKEKGRGSWGGRHHHHHPLPAAGFKKQQRKFQYGNYCKYYGYRNPSCEDGRLRVLKPEWFRGRDVLDLGCNVGHLTLSIACKWGPSRMVGLDIDSRLIHSARQNIRHYLSEELRLPPQTLEGDPGAEGEEGTTTVRKRSCFPASLTASRGPIAAPQVPLDGADTSVFPNNVVFVTGNYVLDRDDLVEAQTPEYDVVLCLSLTKWVHLNWGDEGLKRMFRRIYRHLRPGGILVLEPQPWSSYGKRKTLTETIYKNYYRIQLKPEQFSSYLTSPDVGFSSYELVATPHNTSKGKAGLFCQGGWSWLKECRPPWGFLRCCQPLLITLSPLRLPASCVPVPQGPIPQPLSGPLNRKCEEAALAAHKDLGEEESVPRSFLSDSKNSFLSWICKESFSSVAASASSLCLWHLRSKAGCAGVTIIFLSPSLPGWMAWTVC

SEQ ID NO: 748377 - protein, 689 aa, Homo sapiens; identical to SEQ ID NO: 748367

SEQ ID NO: 748378 - protein, 689 aa, Homo sapiens; identical to SEQ ID NO: 748367

SEQ ID NO: 748379 - protein, 685 aa, Homo sapiens
MIEMAAEKEPFLVPAPPPPLKDESGGGGGPTVPPHQEAASGELRGGTERGPGRCAPSAGSPAAAVGRESPGAAATSSSGPQAQQHRGGGPQAQSHGEARLSDPPGRAAPPDVGEERRGGGGTELGPPAPPRPRNGYQPHRPPGGGGGKRRNSCNVGGGGGGFKHPAFKRRRRVNSDCDSVLPSNFLLGGNIFDPLNLNSLLDEEVSRTLNAETPKSSPLPAKGRDPVEILIPKDITDPLSLNTCTDEGHVVLASPLKTGRKRHRHRGQHHQQQQAAGGSESHPVPPTAPLTPLLHGEGASQQPRHRGQNRDAPQPYELNTAINCRDEVVSPLPSALQGPSGSLSAPPAASVISAPPSSSSRHRKRRRTSSKSEAGARGGGQGSKEKGRGSWGGRHHHHHPLPAAGFKKQQRKFQYGNYCKYYGYRNPSCEDGRLRVLKPEWFRGRDVLDLGCNVGHLTLSIACKWGPSRMVGLDIDSRLIHSARQNIRHYLSEELRLPPQTLEGDPGAEGEEGTTTVRKRSCFPASLTASRGPIAAPQVPLDGADTSVFPNNVVFVTGNYVLDRDDLVEAQTPEYDVVLCLSLTKWVHLNWGDEGLKRMFRRIYRHLRPGGILVLEPQPWSSYGKRKTLTETIYKNYYRIQLKPEQFSSYLTSPDVGFSSYELVATPHNTSKGFQRPATYEGSSD

SEQ ID NO: 748380 - protein, 164 aa, Homo sapiens
EEKDSYGNDLQELLPNPIEARAVFPNNVVFVTGNYVLDRDDLVEAQTPEYDVVLCLSLTKWVHLNWGDEGLKRMFRRIYRHLRPGGILVLEPQPWSSYGKRKTLTETIYKNYYRIQLKPEQFSSYLTSPDVGFSSYELVATPHNTSKGFQRPVYLFHKARSPSH

SEQ ID NO: 748381 - protein, 557 aa, Homo sapiens
MIEMAAEKEPFLVPAPPPPLKDESGGGGGPTVPPHQEAASGELRGGTERGPGRCAPSAGSPAAAVGRESPGAAATSSSGPQAQQHRGGGPQAQSHGEARLSDPPGRAAPPDVGEERRGGGGTELGPPAPPRPRNGYQPHRPPGGGGGKRRNSCNVGGGGGGFKHPAFKRRRRVNSDCDSVLPSNFLLGGNIFDPLNLNSLLDEEVSRTLNAETPKSSPLPAKGRDPVEILIPKDITDPLSLNTCTDEGHVVLASPLKTGRKRHRHRGQHHQQQQAAGGSESHPVPPTAPLTPLLHGEGASQQPRHRGQNRDAPQPYELNTAINCRDEVVSPLPSALQGPSGSLSAPPAASVISAPPSSSSRHRKRRRTSSKSEAGARGGGQGSKEKGRGSWGGRHHHHHPLPAAGFKKQQRKFQYGNYCKYYGYRNPSCEDGRLRVLKPEWFRGRDVLDLGCNVGHLTLSIACKWGPSRMVGLDIDSRLIHSARQNIRHYLSEELRLPPQTLEGDPGAEGEEGTTTVRKRSCFPASLTASRGPIAAPQVPLDGADTSVFPKKKKKKK

SEQ ID NO: 748382 - protein, 553 aa, Homo sapiens
MIEMAAEKEPFLVPAPPPPLKDESGGGGGPTVPPHQEAASGELRGGTERGPGRCAPSAGSPAAAVGRESPGAAATSSSGPQAQQHRGGGPQAQSHGEARLSDPPGRAAPPDVGEERRGGGGTELGPPAPPRPRNGYQPHRPPGGGGGKRRNSCNVGGGGGGFKHPAFKRRRRVNSDCDSVLPSNFLLGGNIFDPLNLNSLLDEEVSRTLNAETPKSSPLPAKGRDPVEILIPKDITDPLSLNTCTDEGHVVLASPLKTGRKRHRHRGQHHQQQQAAGGSESHPVPPTAPLTPLLHGEGASQQPRHRGQNRDAPQPYELNTAINCRDEVVSPLPSALQGPSGSLSAPPAASVISAPPSSSSRHRKRRRTSSKSEAGARGGGQGSKEKGRGSWGGRHHHHHPLPAAGFKKQQRKFQYGNYCKYYGYRNPSCEDGRLRVLKPEWFRGRDVLDLGCNVGHLTLSIACKWGPSRMVGLDIDSRLIHSARQNIRHYLSEELRLPPQTLEGDPGAEGEEGTTTVRKRSCFPASLTASRGPIAAPQVPLDGADWQGGTQVL

SEQ ID NO: 748383 - protein, 106 aa, Homo sapiens
MPFSRTEDGKIYQRAFGGHSLKFGKGRQAHRCCCVADRTGHSILHTSYGRSLRYDTSCFVEYFALDLLMENGECRGVFALCIQDGSIHRIRAKNTIVATGVKKLFF

SEQ ID NO: 748384 - protein, 402 aa, Homo sapiens
MPFSRTEDGKIYQRAFGGHSLKFGKGGQAHGCCCVADRTGHSILHTLYGRSLRYDTSCFVEYFALDLLMENGECRGVFALCIQDGSIHRIRAKNTIVATGLLAQLLELHVSHTSTSDGTAMITRAGLPCQDLEFVQFHPTGTYGAGCLITEGCRGEGGILINSQGERFMERYAPIAKDLASRDVVSRWMTLEIREGRGCGPEKDHVYLQLHHLPPEQLAMPLPGISETAMIFAGVDVTKEPIPVLPTVHYNMDGIPTSYEGQVLRHGNGQDQIVPGLYACGEAACASAHGVNASGQTRYWTWLSGQACALSIAESCRPGDKVPPIKPNAGEESVTNLDKLRFADGRSIRTSELRLSMQKSTQNHAAVFRVGSLLQEGCGKISKLYGDLKHLKTFDRGEQTVG

SEQ ID NO: 748385 - protein, 421 aa, Homo sapiens
MPFSRTEDGKIYQRAFGGHSLKFGKGGQAHGCCCVADRTGHSILHTLYGRSLRYDTSCFVEYFALDLLMENGECRGVFALCIQDGSIHRIRAKNTIVATGLLAQLLELHVSHTSTSDGTAMITRAGLPCQDLEFVQFHPTGTYGAGCLITEGCRGEGGILINSQGERFMERYAPIAKDLASRDVVSRWMTLEIREGRGCGPEKDHVYLQLHHLPPEQLAMPLPGISETAMIFAGVDVTKEPIPVLPTVHYNMDGIPTSYEGQVLRHGNGQDQIVPGLYACGEAACASAHGVNASGQTRYWTWLSGQACALSIAESCRPGDKVPPIKPNAGEESVTNLDKLRFADGRSIRTSELRLSMQKVRAWTRSGVSRLAAYLALHWFCFFKNRSRGMQVQLCVDVLGGGGVWAFHVPVTQVVCVVLSR

SEQ ID NO: 748386 - protein, 402 aa, Homo sapiens; identical to SEQ ID NO: 748384

SEQ ID NO: 748387 - protein, 402 aa, Homo sapiens; identical to SEQ ID NO: 748384

SEQ ID NO: 748388 - protein, 144 aa, Homo sapiens
MEEDNWRWHFYDTVKGSDWLGDQDAIHYVTEQAPTAMVEVENYGMPFSRTEDGKIYQRAFGGHSLKFGKGRQAHRCCCVADRTGHSILHTSYGRSLRYDTSCFVEYFALDLLMENGECRGVFALCIQDGSIHRIRAKNTIVATG

SEQ ID NO: 748389 - protein, 178 aa, Homo sapiens
MEEDNWRWHFYDTVKGSDWLGDQDAIHYVTEQAPTAMVAVMGGRLWVLWWSVSSTRVLEKMKAVEADVAAERMVENYGMPFSRTEDGKIYQRAFGGHSLKFGKGGQAHGCCCVADRTGHSILHTLYGRSLRYDTSCFVEYFALDLLMENGECRGVFALCIQDGSIHRIRAKNTIVATG

SEQ ID NO: 748390 - protein, 74 aa, Homo sapiens
RSLRRDWRDCAAATTDVSGVRGLSRLPSARRLALALAKAISAQYPVVDHEFDAVVVGAGGAGFASCIWPFRGRV

SEQ ID NO: 748391 - protein, 144 aa, Homo sapiens
RSLRRDWRDCAAATTDVSGVRGLSRLPSARRLALALAKAVENYGMPFSRTEDGKIYQRAFGGHSLKFGKGGQAHGCCCVADRTGHSILHTLYGRSLRYDTSCFVEYFALDLLMENGECRGVFALCIQDGSIHRIRAKNTIVATG

SEQ ID NO: 748392 - protein, 96 aa, Homo sapiens
AGITSVSHCMPDLLPSLSLTCSTDTLLREVGLWRNGHLDISPEIFLSTGPEAREWPGSDCARPVRLWGGRLCLCTWCQPPRGKLAIGPGCLVRHVP

SEQ ID NO: 748393 - protein, 280 aa, Homo sapiens
MGRAELLEGKMSTQDPSDLWSRSDGEAELLQDLGWYHGNLTRHAAEALLLSNGCDGSYLLRDSNETTGLYSLSVRAKDSVKHFHVEYTGYSFKFGFNEFSSLKDFVKHFANQPLIGSETGTLMVLKHPYPRKVEEPSIYESVRVHTAMQTGRTEDDLVPTAPSLGTKEGYLTKQGGLVKTWKTRWFTLHRNELKYFKDQMSPEPIRILDLTECSAVQFDYSQERVNCFCLVFPFRTFYLCAKTGVEADEWIKILRWKLSQIRKQLNQGEGTIRSRSFIFK

SEQ ID NO: 748394 - protein, 280 aa, Homo sapiens
MGRAELLEGKMSTQDPSDLWSRSDGEAELLQDLGWYHGNLTRHAAEALLLSNGCDGSYLLRDSNETTGLYSLSVRAKDSVKHFHVEYTGYSFKFGFNEFSSLKDFVKHFANQPLIGSETGTLMVLKHPYPRKVEEPSIYESVRVHTAMQTGRTEDDLVPTAPSLGTKEGYLTKQGGLVKTWKTRWFTLHRNELKYFKDQMSPEPIRILDLTECSAVQFDYSQERVNCFCLVFPFRTFYLCAKTGVEADEWIKILRWKLVKDKSCILSALCISPEEKTDHK

SEQ ID NO: 748395 - protein, 205 aa, Homo sapiens
MGRAELLEGKMSTQDPSDLWRAKDSVKHFHVEYTGYSFKFGFNEFSSLKDFVKHFANQPLIGSETGTLMVLKHPYPRKVEEPSIYESVRVHTAMQTGRTEDDLVPTAPSLGTKEGYLTKQGGLVKSPEPIRILDLTECSAVQFDYSQERVNCFCLVFPFRTFYLCAKTGVEADEWIKILRWKLSQIRKQLNQGEGTIRSRSFIFK

SEQ ID NO: 748396 - protein, 271 aa, Homo sapiens
SYTPASGTMASLWLLSCFSLVGAAFGCGVPAIHPVLSGLSRIVNGEDAVPGSWPWQVSLQDKTGFHFCGGSLISEDWVVTAAHCGVRTSDVVVAGEFDQGSDEENIQVLKIAKVFKNPKFSILTVNNDITLLKLATPARFSQTVSAVCLPSADDDFPAGTLCATTGWGKTKYNANKTPDKLQQAALPLLSNAECKKSWGRRITDVMICAGASGVSSCMGDSGGPLVCQKDGAWTLVGIVSWGSRTCSTTTPAVYARVTKLIPWVQKILAAN

SEQ ID NO: 748397 - protein, 153 aa, Homo sapiens
  misc_feature (9)..(9): Xaa can be any naturally occurring amino acid
  misc_feature (32)..(32): Xaa can be any naturally occurring amino acid
  misc_feature (39)..(40): Xaa can be any naturally occurring amino acid
WGQKKTLAXVFFSQGTSVPAGCCLGPKAPGRXEFSRRGXXVCQPNRVGARTKVTNANKTPDKLQQAALPLLSNAECKKSWGRRITDVMICAGASGVSSCMGDSGGPLVCQKDGAWTLVGIVSWGSRTCSTTTPAVYARVTKLIPWVQKILAAN

SEQ ID NO: 748398 - protein, 93 aa, Homo sapiens
HACERHGFLWLLSCFSLVGAAFGCGVPAIHPVLSGLSRIVNGEDAVPGSWPWQVSLQDKTGFHFCGGSLISEDWVVTAAHCGVRTPTWSWLGK

SEQ ID NO: 748399 - protein, 271 aa, Homo sapiens; identical to SEQ ID NO: 748396

SEQ ID NO: 748400 - protein, 263 aa, Homo sapiens
SYTPASGTMASLWLLSCFSLVGAAFGCGVPAIHPVLSGLSRIVNGEDAVPGSWPWQVSLQDKTGFHFCGGSLISEDWVVTAAHCGVRTSDVVVAGEFDQGSDEENIQVLKIAKVFKNPKFSILTVNNDITLLKLATPARFSQTVSAVCLPSADDDFPAGTLCATTGWGKTKYNANKTPDKLQQAALPLLSNAECKKSWGRRITDVMICAGGDSGGPLVCQKDGAWTLVGIVSWGSRTCSTTTPAVYARVTKLIPWVQKILAAN

SEQ ID NO: 748401 - protein, 171 aa, Homo sapiens
HACERHGFLWLLSCFSLVGAAFGCGVPAIHPVLSGLSRIVNGEDAVPGSWPWQVSLQDKTGFHFCGGSLISEDWVVTAAHCGVRTSDVVVAGEFDQGSDEENIQVLKIAKVFKNPKFSILTVNNDITLLKLATPARFSQTVSAVCLPSADDDFPAGTLCATTGWGKTKYNG

SEQ ID NO: 748402 - protein, 268 aa, Homo sapiens
HACERHGFLWLLSCFSLVGAAFGCGVPAIHPVLSGLSRIVNGEDAVPGSWPWQVSLQDKTGFHFCGGSLISEDWVVTAAHCGVRTSDVVVAGEFDQGSDEENIQVLKIAKVFKNPKFSILTVNNDITLLKLATPARFSQTVSAVCLPSADDDFPAGTLCATTGWGKTKYNANKTPDKLQQAALPLLSNAECKKSWGRRITDVMICAGASGVSSCMGDSGGPLVCQKDGAWTLVGIVSWGSRTCSTTTPAVYARVTKLIPWVQKILAAN

SEQ ID NO: 748403 - protein, 271 aa, Homo sapiens; identical to SEQ ID NO: 748396

SEQ ID NO: 748404 - protein, 174 aa, Homo sapiens
SYTPASGTMASLWLLSCFSLVGAAFGCGVPAIHPVLSGLSRIVNGEDAVPGSWPWQVSLQDKTGFHFCGGSLISEDWVVTAAHCGVRTSDVVVAGEFDQGSDEENIQVLKIAKVFKNPKFSILTVNNDITLLKLATPARFSQTVSAVCLPSADDDFPAGTLCATTGWGKTKYNG

SEQ ID NO: 748405 - protein, 282 aa, Homo sapiens
GTRRFSLPEQRPYTHRGMGLPGLFCLAVLAASSFSKAREEEITPVVSIAYKVLEVFPKGRWVLITCCAPQPPPPITYSLCGTKNIKVAKKVVKTHEPASFNLNVTLKSSPDLLTYFCRASSTSGAHVDSARLQMHWELWSKPVSELRANFISAGQRGRPRVEMICQASSGSPPITNSLIGKDGQVHLQQRPCHRQPANFSFLPSQTSDWFWCQAANNANVQHSALTVVPPGGDQKMEDWQGPLESPILALPLYRSTRRLSEEEFGGFRIGNGEVRGRKAAAM

SEQ ID NO: 748406 - protein, 90 aa, Homo sapiens
PPPRRVPQGTPPIVLVGSLASHCGPSPPRMLGWTHVGPGGDQKMEDWQGPLESPILALPLYRSTRRLSEEEFGGFRIGNGEVRGRKAAAM

SEQ ID NO: 748407 - protein, 252 aa, Homo sapiens
GKIFGPFPPFGCGESRCHERVCTEITPVVSIAYKVLEVFPKGRWVLITCCAPQPPPPITYSLCGTKNIKVAKKVVKTHEPASFNLNVTLKSSPDLLTYFCRASSTSGAHVDSARLQMHWELWSRQRGRPRVEMICQASSGSPPITNSLIGKDGQVHLQQRPCHRQPANFSFLPSQTSDWFWCQAANNANVQHSALTVVPPGGDQKMEDWQGPLESPILALPLYRSTRRLSEEEFGGFRIGNGEVRGRKAAAM

SEQ ID NO: 748408 - protein, 137 aa, Homo sapiens [sequence omitted]

SEQ ID NO: 748409 - protein, 563 aa, Homo sapiens
RHSHFSRSRSTMDTSSEMLVRFGRRCGRAKESTEIRNSEEDQVLYLPLLPSKVDLQQVTIIPHDEWKRIQDSLDRLTREAACLRAERKAKKEMHLRSQEVVKHWTNTYAGMKEQKLEAKKKRDEEIEAERQILDLEEEIYKQGKRKKAIENAKQYQFYQTERVKNFHSGLLLSRVMKERDAQIEFRKSKIKSDKKWEEQLKLNIEKAFKEEQEKAEKRHRERVALAKDHLKQIKEHEEEEERRKKYEEKDAEEIKRQNALYEIEMRKKLEKKREEMHESRRRFLEHMQDKHIIKAVEQQQQEEEDEKMRKFIKAKKRLIQMGKEKEAETHRLMEKRRERIHNFLSELLKEKLDNEDMIIARDIAEAEAEWEKREREKDEKNKAELKTIAEYRAIVMKNKEEEERQRKIEAKEQLLAVMKADQIFWEHEKEKKCKADKEHQEVQDAHIQQMAKNKFNAKQAKQAELDYCRLTEALVAEKEKEFQDYAREVIELESETTNKYIYPLVKAVQEGPGGGRGPVFVDRGGLRPSYQANDVTGVQLPFYNSQGPKYNFQKSKRRLGFTW

SEQ ID NO: 748410 - protein, 563 aa, Homo sapiens
RHSHFSRSRSTMDTSSEMLVRFGRRCGRAKESTVIMPISELLRRISLKLFPKVDLQQVTIIPHDEWKRIQDSLDRLTREAACLRAERKAKKEMHLRSQEVVKHWTNTYAGMKEQKLEAKKKRDEEIEAERQILDLEEEIYKQGKRKKAIENAKQYQFYQTERVKNFHSGLLLSRVMKERDAQIEFRKSKIKSDKKWEEQLKLNIEKAFKEEQEKAEKRHRERVALAKDHLKQIKEHEEEEERRKKYEEKDAEEIKRQNALYEIEMRKKLEKKREEMHESRRRFLEHMQDKHIIKAVEQQQQEEEDEKMRKFIKAKKRLIQMGKEKEAETHRLMEKRRERIHNFLSELLKEKLDNEDMIIARDIAEAEAEWEKREREKDEKNKAELKTIAEYRAIVMKNKEEEERQRKIEAKEQLLAVMKADQIFWEHEKEKKCKADKEHQEVQDAHIQQMAKNKFNAKQAKQAELDYCRLTEALVAEKEKEFQDYAREVIELESETTNKYIYPLVKAVQEGPGGGRGPVFVDRGGLRPSYQANDVTGVQLPFYNSQGPKYNFQKSKRRLGFTW

SEQ ID NO: 748411 - protein, 418 aa, Homo sapiens
RHSHFSRSRSTMDTSSEMLVRFGRRCGRAKESTEIRNSEEDQVLYLPLLPSKVDLQQVTIIPHDEWKRIQDSLDRLTREAACLRAERKAKKEMHLRSQEVVKHWTNTYAGMKEQKLEAKKKRDEEIEAERQILDLEEEIYKQGKRKKAIENAKQYQFYQTERVKNFHSGLLLSRVMKERDAQIEFRKSKIKSDKKWEEQLKLNIEKAFKEEQEKAEKRHRERVALAKDHLKQIKEHEEEEERRKKYEEKDAEEIKRQNALYEIEMRKKLEKKREEMHESRRRFLEHMQDKHIIKAVEQQQQEEEDEKMRKFIKAKKRLIQMGKEKEAETHRLMEKRRERIHNFLSELLKEKLDNEDMIIARDIAEAEAEWEKREREKDEKNKAELKTIAEYRAIVMKINEEAPAPLREGNPEPRSLTA

SEQ ID NO: 748412 - protein, 114 aa, Homo sapiens
MRLLILALLGICSLTAYIVEGVGSEVSHRRTCVSLTTQRLPVSRIKTYTITEGSLRAVIFITKRGLKVCADPQATWVRDVVRSMDRKSNTRNNMIQTKPTGTQQSTNTAVTLTG

SEQ ID NO: 748413 - protein, 72 aa, Homo sapiens
MELTAWLIKKTPHLHTQYPDPCEGPCRPFLSDISKATGITAVSMGMARKTTGLMTTLGSGGSNPNAKASLKI

SEQ ID NO: 748414 - protein, 398 aa, Homo sapiens
QRAGRALGGALCACVECPAAPSWRGTSLLQVASCVSKQANMDRDSYHHYFYDYDGGEDFYRSTTPSEDIWKKFELVPPPWDLGPAAGNPALSFGLLEPWPVGCAGDETESQDYWKAWDANYASLIRRDCMWSGFSTQEPLERAVSDLLAVGAPSGYSPKEFATPDYTPELEAGNLAPIFPCLLGEPKIQACSRSESPSDSEGEEIDVTVKKRQSLSTRKPVIIAVRADLLDPRMNLFHISIHQQQHNYAAPFPPESCFQEGAPKRMPPKEALEREAPGGKDDKEDEEIVSLPPVESEAAQSCQPKPIHYDTENWTKKKYHSYLERKRRNDQRSRFLALRDEVPALASCSRVSKVMILVKATEYLHELAEAEERMATEKRQLECQRRQLQKRIEYLSSY

SEQ ID NO: 748415 - protein, 169 aa, Homo sapiens
GSQPRSPAAAVRCSQGQQPAPCHPPQTLTEPVATTMTRDQNGTWEMESNENFEGYMKALDIDFATRKIAVRLTQTKVIDQDGDNFKTKTTSTFRNYDVDFTVGVEFDEYTKSLDNRHVKALVTWEGDVLVCVQKGEKENRGWKQWIEGDKLYLELTCGDQVCRQVFKKK

SEQ ID NO: 748416 - protein, 169 aa, Homo sapiens; identical to SEQ ID NO: 748415

SEQ ID NO: 748417 - protein, 521 aa, Homo sapiens
LYPTCLRSQGPRWIFSSTSAKPGGLFPSETMERDSHGNASPARTPSAGASPAQASPAGTPPGRASPAQASPAQASPAGTPPGRASPAQASPAGTPPGRASPGRASPAQASPAQASPARASPALASLSRSSSGRSSSARSASVTTSPTRVYLVRATPVGAVPIRSSPARSAPATRATRESPGTSLPKFTWREGQKQLPLIGCVLLLIALVVSLIILFQFWQGHTGIRYKEQRESCPKHAVRCDGVVDCKLKSDELGCVRFDWDKSLLKIYSGSSHQWLPICSSNWNDSYSEKTCQQLGFESAHRTTEVAHRDFANSFSILRYNSTIQESLHRSECPSQRYISLQCSHCGLRAMTGRIVGGALASDSKWPWQVSLHFGTTHICGGTLIDAQWVLTAAHCFFVTREKVLEGWKVYAGTSNLHQLPEAASIAEIIINSNYTDEEDDYDIALMRLSKPLTLSGEGICTPRSPAPQPQHPLQPSHLSASVNSYPGPKASAGQKSKTLKDPYMEHFCFIIRETEAQGL

SEQ ID NO: 748418 - protein, 611 aa, Homo sapiens
LYPTCLRSQGPRWIFSSTSAKPGGLFPSETMERDSHGNASPARTPSAGASPAQASPAGTPPGRASPAQASPAQASPAGTPPGRASPAQASPAGTPPGRASPGRASPAQASPARASPALASLSRSSSGRSSSARSASVTTSPTRVYLVRATPVGAVPIRSSPARSAPATRATRESPGTSLPKFTWREGQKQLPLIGCVLLLIALVVSLIILFQFWQGHTGIRYKEQRESCPKHAVRCDGVVDCKLKSDELGCVRFDWDKSLLKIYSGSSHQWLPICSSNWNDSYSEKTCQQLGFESAHRTTEVAHRDFANSFSILRYNSTIQESLHRSECPSQRYISLQCSHCGLRAMTGRIVGGALASDSKWPWQVSLHFGTTHICGGTLIDAQWVLTAAHCFFVTREKVLEGWKVYAGTSNLHQLPEAASIAEIIINSNYTDEEDDYDIALMRLSKPLTLSAHIHPACLPMHGQTFSLNETCWITGFGKTRETDDKTSPFLREVQVNLIDFKKCNDYLVYDSYLTPRMMCAGDLRGGRDSCQGDSGGPLVCEQNNRWYLAGVTSWGTGCGQRNKPGVYTKVTEVLPWIYSKMEVRSLQQDTAPSRLGTSSGGDPGGAPRL

SEQ ID NO: 748419 - protein, 466 aa, Homo sapiens
LYPTCLRSQGPRWIFSSTSAKPGGLFPSETMERDSHGNASPARTPSAGASPAQASPAGTPPGRASPAQASLSRSSSGRSSSARSASVTTSPTRVYLVRATPVGAVPIRSSPARSAPATRATRESPGTSLPKFTWREGQKQLPLIGCVLLLIALVVSLIILFQFWQGHTGIRYKEQRESCPKHAVRCDGVVDCKLKSDELGCVRFDWDKSLLKIYSGSSHQWLPICSSNWNDSYSEKTCQQLGFESAHRTTEVAHRDFANSFSILRYNSTIQESLHRSECPSQRYISLQCSHCGLRAMTGRIVGGALASDSKWPWQVSLHFGTTHICGGTLIDAQWVLTAAHCFFVTREKVLEGWKVYAGTSNLHQLPEAASIAEIIINSNYTDEEDDYDIALMRLSKPLTLSGEGICTPRSPAPQPQHPLQPSHLSASVNSYPGPKASAGQKSKTLKDPYMEHFCFIIRETEAQGL

SEQ ID NO: 748420 - protein, 104 aa, Homo sapiens
WGCHVSDSGDVMGGHRSVAGYWEFPLSFLSSLHPFSMGCLPRSRSPSSPSPQQWKKPVIDTAVGGRLCKSLTFGALEGFLHFIFTQAPAPHSSCPPLSFPPTSS

SEQ ID NO: 748421 - protein, 104 aa, Homo sapiens; identical to SEQ ID NO: 748420

SEQ ID NO: 748422 - protein, 98 aa, Homo sapiens
NHPLSRESRDYAPLSRDYAYHDYGHSSWDEHFSRGYSDCDGCGEVMLEIILNVQVEVLIEMHFRDRGPLMVHHLQECLCCLMVEAATMIIAINEIDMA

SEQ ID NO: 748423 - protein, 126 aa, Homo sapiens
GTPPGVRVAGPDDVAWQRPYRRCFPGNLAPPELIAAESRRVCASEPEPATAAVAARPAGARRGLCHGGVTRLHPLFRGSGETEETPRQGQRRRLVSPGMEEKYGGDVLAGPGGGGGLGRWTYPALD

SEQ ID NO: 748424 - protein, 765 aa, Homo sapiens
MEEKYGGDVLAGPGGGGGLGPVDVPSARLTKYIVLLCFTKFLKAVGLFESYDLLKAVHIVQFIFILKLGTAFFMVCFKSHFLLGKLLPNTSGSKYLNMQLLGAIISLLWFFGLTLCGPLRTLLLFEHSDIVVISLLSVLFTSSGGGPAKTRGAAFFIIAVICLLLFDNDDLMAKMAEHPEGHHDSALTHMLYTAIAFLGVADHKGGVLLLVLALCCKVGFHTASRKLSVDVGGAKRLQALSHLVSVLLLCPWVIVLSVTTESKVESWFSLIMPFATVIFFVMILDFYVDSICSVKMEVSKCARYGSFPIFISALLFGNFWTHPITDQLRAMNKAAHQESTEHVLSGGVVVSAIFFILSANILSSPSKRGQKGTLIGYSPEGTPLYNFMGDAFQHSSQSIPRFIKESLKQILEESDSRQIFYFLCLNLLFTFVELFYGVLTNSLGLISDGFHMLFDCSALVMGLFAALMSRWKATRIFSYGYGRIEILSGFINGLFLIVIAFFVFMESVARLIDPPELDTHMLTPVSVGGLIVNLIGICAFSHAHSHAHGASQGSCHSSDHSHSHHMHGHSDHGHGHSHGSAGGGMNANMRGVFLHVLADTLGSIGVIVSTVLIEQFGWFIADPLCSLFIAILIFLSVVPLIKDACQVLLLRLPPEYEKELHIALEKIQKIEGLISYRDPHFWRHSASIVAGTIHIQVTSDVLEQRIVQQVTGILKDAGVNNLTIQVEKEAYFQHMSGLSTGFHDVLAMTKQMESMKYCKDGTYIM

SEQ ID NO: 748425 - protein, 765 aa, Homo sapiens; identical to SEQ ID NO: 748424

SEQ ID NO: 748426 - protein, 400 aa, Homo sapiens
DSQQDPHEAPGYSPEGTPLYNFMGDAFQHSSQSIPRFIKESLKQILEESDSRQIFYFLCLNLLFTFVELFYGVLTNSLGLISDGFHMLFDCSALVMGLFAALMSRWKATRIFSYGYGRIEILSGFINGLFLIVIAFFVFMESVARLIDPPELDTHMLTPVSVGGLIVNLIGICAFSHAHSHAHGASQGSCHSSDHSHSHHMHGHSDHGHGHSHGSAGGGMNANMRGVFLHVLADTLGSIGVIVSTVLIEQFGWFIADPLCSLFIAILIFLSVVPLIKDACQVLLLRLPPEYEKELHIALEKIQKIEGLISYRDPHFWRHSASIVAGTIHIQVTSDVLEQRIVQQVTGILKDAGVNNLTIQVEKEAYFQHMSGLSTGFHDVLAMTKQMESMKYCKDGTYIM

SEQ ID NO: 748427 - protein, 671 aa, Homo sapiens
MEEKYGGDVLAGPGGGGGLGPVDVPSARLTKYIVLLCFTKFLKAVGLFESYDLLKAVHIVQFIFILKLGTAFFMVCFKSHFLLGKLLPNTSGSKYLNMQLLGAIISLLWFFGLTLCGPLRTLLLFEHSDIVVISLLSVLFTSSGGGPAKTRGAAFFIIAVICLLLFDNDDLMAKMAEHPEGHHDSALTHMLYTAIAFLGVADHKGGVLLLVLALCCKVGFHTASRKLSVDVGGAKRLQALSHLVSVLLLCPWVIVLSVTTESKVESWFSLIMPFATVIFFVMILDFYVDSICSVKMEVSKCARYGSFPIFISALLFGNFWTHPITDQLRAMNKAAHQESTEHVLSGGVVVSAIFFILSANILSSPSKRGQKGTLIGYSPEGTPLYNFMGDAFQHSSQSIPRFIKESLKQILEESDSRQIFYFLCLNLLFTFVELFYGVLTNSLGLISDGFHMLFDCSALVMGLFAALMSRWKATRIFSYGYGRIEILSGFINGLFLIVIAFFVFMESVARLIDPPELDTHMLTPVSVGGLIVNLIGICAFSHAHSHAHGASQGSCHSSDHSHSHHMHGHSDHGHGHSHGSAGGGMNANMRGVFLHVLADTLGSIGVIVSTVLIEQFGWFIADPLCSLFIAILIFLSVVPLIKDACQVLLLRLPPEYEKELHIALEKIRYCM

SEQ ID NO: 748428 - protein, 526 aa, Homo sapiens
MEEKYGGDVLAGPGGGGGLGPVDVPSARLTKYIVLLCFTKFLKAVGLFESYDLLKAVHIVQFIFILKLGTAFFMVCFKSHFLLGKLLPNTSGSKYLNMQLLGAIISLLWFFGLTLCGPLRTLLLFEHSDIVVISLLSVLFTSSGGGPAKTRGAAFFIIAVICLLLFDNDDLMAKMAEHPEGHHDSALTHMLYTAIAFLGVADHKGGVLLLVLALCCKVGFHTASRKLSVDVGGAKRLQALSHLVSVLLLCPWVIVLSVTTESKVESWFSLIMPFATVIFFVMILDFYVDSICSVKMEVSKCARYGSFPIFISALLFGNFWTHPITDQLRAMNKAAHQESTEHVLSGGVVVSAIFFILSANILSSPSKRGQKGTLIGYSPEGTPLYNFMGDAFQHSSQSIPRFIKESLKQILEESDSRQIFYFLCLNLLFTFVELFYGVLTNSLGLISDGFHMLFDCSALVMGLFAALMSRWKATRIFSYGYGRIEILSGFINGLFLIVIAFFVFMESVARLIDPPELDTHMLTPCP

SEQ ID NO: 748429 - protein, 92 aa, Homo sapiens
FPDLTARSPYPRLKSEREEVAVPEFQLRIRPSSALRASVPALHCVRPALAGACRRQPCRNPPGLTPSSPDPTKQQWISTRHAFPSTFTRSVF

SEQ ID NO: 748430 - protein, 113 aa, Homo sapiens
MYLAFFHSFSGGLCSPRHSGHVSVHLPKCWLLANVSSIGMQHLCLLEGTAASWQVQSLILRQVGLSVLASLNSGNVSLPCVYQHNSQHAREFKKGSWGDTYLIRCFQISEFHP

SEQ ID NO: 748431 - protein, 444 aa, Homo sapiens
MKFPASVLASVFLFVAETTAALSLSSTYRSGGDRMWQALTLLFSLLPCALVQLTLLFVHRDLSRDRPLVLLLHLLQLGPLFRCFEVFCIYFQSGNNEEPYVSITKKRQMPKNGLSEEIEKEVGQAEGKLITHRSAFSRASVIQAFLGSAPQLTLQLYISVMQQDVTVGRSLLMTISLLSIVYGALRCNILAIKIKYDEYEVKVKPLAYVCIFLWRSFEIATRVVVLVLFTSVLKTWVVVIILINFFSFFLYPWILFWCSGSPFPENIEKALSRVGTTIVLCFLTLLYTGINMFCWSAVQLKIDSPDLISKSHNWYQLLVYYMIRFIENAILLLLWYLFKTDIYMYVCAPLLVLQLLIGYCTAILFMLVFYQFFHPCKKLFSSSVSEGFQRWLRCFCWACRQQKPCEPIGKEDLQSSRDRDETPSSSKTSPEPGQFLNAEDLCSA

SEQ ID NO: 748432 - protein, 209 aa, Homo sapiens [sequence omitted]

SEQ ID NO: 748433 - protein, 131 aa, Homo sapiens
SWTGVSKKQLMWLLNRLQGLQELVLSGCSWLSVSALGSAPLPALRLLDLRWIEDVKDSQLRELLLPPPDTKPAERPGPEPLRPRRGPQCSPPHGPHVPTPRDPGAPQSCWLPPPNGPLHSSLGDRVRLSLL

SEQ ID NO: 748434 - protein, 295 aa, Homo sapiens [sequence omitted]

SEQ ID NO: 748435 - protein, 295 aa, Homo sapiens [sequence omitted]

SEQ ID NO: 748436 - protein, 295 aa, Homo sapiens [sequence omitted]

SEQ ID NO: 748437 - protein, 217 aa, Homo sapiens [sequence omitted]

SEQ ID NO: 748438 - protein, 195 aa, Homo sapiens
VDGRMWICDSVGIMVSTCLLPHIEAVSNIHNLNSVHQSPHQRLHRYVELAWGFSTALGTFLFLAEVVLVGWVKFVPIGAPLDTPTPMVPTSRVPGTLAPVATSLSPASNLPRSSASAAPSQAEPACPPRQACGGGGAHGPGWQAAMASTAIMVPVGLVFVAFALHFYRSLVAHKTDRYKQELEELNRLQGELQAV

SEQ ID NO: 748439 - protein, 204 aa, Homo sapiens
SWTGVSKKQLMWLLNRLQGLQELVLSGCSWLSVSALGSAPLPALRLLDLRWIEDVKDSQLRELLLPPPDTKPGQTESRGRLQGVAELRLAGLELTDASLRLLLRHAPQLSALDLSHCAHVGDPSVHLLTAPTSPLRETLVHLNLAGCHRLTDHCLPLFRRCPRLRRLDLRSCRQLSPEACARLAAAGPPGPFRCPEEKLLLKDS

SEQ ID NO: 748440 - protein, 169 aa, Homo sapiens [sequence omitted]

SEQ ID NO: 748441 - protein, 204 aa, Homo sapiens; identical to SEQ ID NO: 748439

SEQ ID NO: 748442 - protein, 204 aa, Homo sapiens; identical to SEQ ID NO: 748439

SEQ ID NO: 748443 - protein, 204 aa, Homo sapiens; identical to SEQ ID NO: 748439

SEQ ID NO: 748444 - protein, 204 aa, Homo sapiens; identical to SEQ ID NO: 748439

SEQ ID NO: 748445 - protein, 564 aa, Homo sapiens
PASSSLPSFLAFAAHSAAMEQRRVTDFFARRRPGPPRIAPPKLACRTPSPARPALRAPASATSGSRKRARPPAAPGRDQARPPARRRLRLSVDEVSSPSTPEAPDIPACPSPGQKIKKSTPAAGQPPHLTSAQDQDTISELASCLQRARELGARVRALKASAQDAGESCTPEAEGRPEEPCGEKAPAYQRFHALAQPGLPGLVLPYKYQVLAEMFRSMDTIVGMLHNRSETPTFAKVQRGVQDMMRRRFEERNVGQIKTVYPASYRFRQERSVPTFKDGARRSDYQLTIEPLLEQEADGAAPQLTASRLLQRRQIFSQKLVEHVKEHHKAFLASLSPAMVVPEDQLTRWHPRFNVDEVPDIEPAALPQPPATEKLTTAQEVLARARNLISPRMEKALSQLALRSAAPSSPGSPRPALPATPPATPPAASPSALKGVSQDLLERIRAKEAQKQLAQMTRCPEQEQRLQRLERLPELARVLRSVFVSERKPALSMEVACARMVGSCCTIMSPGEMEKHLLLLSELLPDWLSLHRIRTDTYVKLDKAADLAHITARLAHQTRAEEGL

SEQ ID NO: 748446 - protein, 576 aa, Homo sapiens
KPTTTQKHNKTKNLRLGTRLGVAFAAHSAAMEQRRVTDFFARRRPGPPRIAPPKLACRTPSPARPALRAPASATSGSRKRARPPAAPGRDQARPPARRRLRLSVDEVSSPSTPEAPDIPACPSPGQKIKKSTPAAGQPPHLTSAQDQDTISELASCLQRARELGARVRALKASAQDAGESCTPEAEGRPEEPCGEKAPAYQRFHALAQPGLPGLVLPYKYQVLAEMFRSMDTIVGMLHNRSETPTFAKVQRGVQDMMRRRFEERNVGQIKTVYPASYRFRQERSVPTFKDGARRSDYQLTIEPLLEQEADGAAPQLTASRLLQRRQIFSQKLVEHVKEHHKAFLASLSPAMVVPEDQLTRWHPRFNVDEVPDIEPAALPQPPATEKLTTAQEVLARARNLISPRMEKALSQLALRSAAPSSPGSPRPALPATPPATPPAASPSALKGVSQDLLERIRAKEAQKQLAQMTRCPEQEQRLQRLERLPELARVLRSVFVSERKPALSMEVACARMVGSCCTIMSPGEMEKHLLLLSELLPDWLSLHRIRTDTYVKLDKAADLAHITARLAHQTRAEEGL

SEQ ID NO: 748447 - protein, 576 aa, Homo sapiens; identical to SEQ ID NO: 748446

SEQ ID NO: 748448 - protein, 293 aa, Homo sapiens
SWYPPGMGYVDHAVGSPSSLLLEQEADGAAPQLTASRLLQRRQIFSQKLVEHVKEHHKAFLASLSPAMVVPEDQLTRWHPRFNVDEVPDIEPAALPQPPATEKLTTAQEVLARARNLISPRMEKALSQLALRSAAPSSPGSPRPALPATPPATPPAASPSALKGVSQDLLERIRAKEAQKQLAQMTRCPEQEQRLQRLERLPELARVLRSVFVSERKPALSMEVACARMVGSCCTIMSPGEMEKHLLLLSELLPDWLSLHRIRTDTYVKLDKAADLAHITARLAHQTRAEEGL

SEQ ID NO: 748449 - protein, 269 aa, Homo sapiens
MGNCCWTQCFGLLRKEAGRLQRVGGGGGSKYFRTCSRGEHLTIEFENLVESDEGESPGSSHRPLTEEEIVDLRERHYDSIAEKQKDLDKKIQKEQERQRIVQQYHPSNNGEYQSSGPEDDFESCLRNMKSQYEVFRSSRLSSDATVLTPNTESSCDLMTKTKSTSGNDDSTSLDLEWEDEEGMNRMLPMRERSKTEEDILRAALKYSNKKTGSNPTSASDDSNGLEWENDFVSAEMDDNGNSEYSGFVNPVLELSDSGIRHSDTDQQTR

SEQ ID NO: 748450 - protein, 269 aa, Homo sapiens; identical to SEQ ID NO: 748449

SEQ ID NO: 748451 - protein, 217 aa, Homo sapiens
MGNCCWTQCFGLLRKEAGRLQRVGGGGGSKYFRTCSRGEHLTIEFENLVESDEGESPGSSHRPLTEEEIVDLRERHYDSIAEKQKDLDKKIQKELALQEEKLRLEEEALYAAQREAARAAKQRKLLEQERQRIVQQYHPSNNGEYQSSGPEDDFESCLRNMKSQYEVFRSSRLSSDATVLTPNTESSCDLMTKTKSTSGNDDSTSLDLEWEDEEGIL

SEQ ID NO: 748452 - protein, 302 aa, Homo sapiens
MGNCCWTQCFGLLRKEAGRLQRVGGGGGSKYFRTCSRGEHLTIEFENLVESDEGESPGSSHRPLTEEEIVDLRERHYDSIAEKQKDLDKKIQKELALQEEKLRLEEEALYAAQREAARAAKQRKLLEQERQRIVQQYHPSNNGEYQSSGPEDDFESCLRNMKSQYEVFRSSRLSSDATVLTPNTESSCDLMTKTKSTSGNDDSTSLDLEWEDEEGMNRMLPMRERSKTEEDILRAALKYSNKKTGSNPTSASDDSNGLEWENDFVSAEMDDNGNSEYSGFVNPVLELSDSGIRHSDTDQQTR

SEQ ID NO: 748453 - protein, 245 aa, Homo sapiens
MHVIWPLTEEEIVDLRERHYDSIAEKQKDLDKKIQKELALQEEKLRLEEEALYAAQREAARAAKQRKLLEQERQRIVQQYHPSNNGEYQSSGPEDDFESCLRNMKSQYEVFRSSRLSSDATVLTPNTESSCDLMTKTKSTSGNDDSTSLDLEWEDEEGMNRMLPMRERSKTEEDILRAALKYSNKKTGSNPTSASDDSNGLEWENDFVSAEMDDNGNSEYSGFVNPVLELSDSGIRHSDTDQQTR

SEQ ID NO: 748454 - protein, 36 aa, Homo sapiens
MFLITERLKYQRLNQSPQNSISWVVKGTNKATRKIK

SEQ ID NO: 748455 - protein, 194 aa, Homo sapiens
MAAAAPNAGGSAPETAGSAEAPLQYSLLLQYLVGDKRQPRLLEPGSLGGIPSPAKSEEQKMIEKAMESCAFKAALACVGGFVLGGAFGVFTAGIDTNVGFDPKDPYRTPTAKEVLKDMGQRGMSYAKNFAIVGAMFSCTECLIESYRGTSDWKNSVISGCITGGAIGFRAGLKAGAIGCGGFAAFSAAIDYYLR

SEQ ID NO: 748456 - protein, 205 aa, Homo sapiens
LRLGTRPGVAVMAAAAPNAGGSAPETAGSAEAPLQYSLLLQYLVGDKRQPRLLEPGSLGGIPSPAKSEEQKMIEKAMESCAFKAALACVGGFVLGGAFGVFTAGIDTNVGFDPKDPYRTPTAKEVLKDMGQRGMSYAKNFAIVGAMFSCTECLIESYRGTSDWKNSVISGCITGGAIGFRAGLKAGAIGCGGFAAFSAAIDYYLR

SEQ ID NO: 748457 - protein, 197 aa, Homo sapiens
MYARMLRDPNAGGSAPETAGSAEAPLQYSLLLQYLVGDKRQPRLLEPGSLGGIPSPAKSEEQKMIEKAMESCAFKAALACVGGFVLGGAFGVFTAGIDTNVGFDPKDPYRTPTAKEVLKDMGQRGMSYAKNFAIVGAMFSCTECLIESYRGTSDWKNSVISGCITGGAIGFRAGLKAGAIGCGGFAAFSAAIDYYLR

SEQ ID NO: 748458 - protein, 79 aa, Homo sapiens
LFEDPRRMSYAKNFAIVGAMFSCTECLIESYRGTSDWKNSVISGCITGGAIGFRAGLKAGAIGCGGFAAFSAAIDYYLR

SEQ ID NO: 748459 - protein, 200 aa, Homo sapiens
MAAAAPNAGGSAPETAGSAEAPLQYSLLLQYLVGDKRQPRLLEPGSLGGIPSPAKSEEQKMIEKAMESCAFKAALACVGGFVLGGAFGVFTAGIDTNVGFDPKDPYRTPTAKEVLKDMGQRGMSYAKNFAIVGAMFSCTECLIESYRGTSDWKNSVISGCITGGAIGFRAGLKAGAIGCGGFAAFFFGPLLCPLKKYFFG

SEQ ID NO: 748460 - protein, 107 aa, Homo sapiens
IPQDTHWKGSLAVLLSPSGALSQDAHLRIGHIPKVSDVWARACFRDCDTWNYSRWPDARVLWFGCVPTQISSGILFPIIHACGGRDPVGGNLIMVGGFPHPVHVTVS

SEQ ID NO: 748461 - protein, 346 aa, Homo sapiens
CLCPWPYAPTSGGEFSPSVDGRPCSSPSELPAKLLLGATLPRAPRLPRRLAWCSIDWEQVCLLQRLGAGGFGSVYKATYRGVPVAIKQVNKCTKNRLASRRSFWAELNVARLRHDNIVRVVAASTRTPAGSNSLGTIIMEFGGNVTLHQVIYGAAGHPEGDAGEPHCRTGGQLSLGKCLKYSLDVVNGLLFLHSQSIVHLDLKPANILISEQDVCKISDFGCSEKLEDLLCFQTPSYPLGGTYTHRAPELLKGEGVTPKADIYSFAITLWQMTTKQAPYSGERQHILYAVVAYDLRPSLSAAVFEDSLPGQRLGDVIQRCWRPSAAQRPSARLLLVDLTSLKAELG

SEQ ID NO: 748462 - protein, 146 aa, Homo sapiens
MLSAVWGAGGPGAGGAARGQPSRKELLLRHHLWSGPRCLSFPLGSLPASLLGLPGATSHRSCLSPNLASGLAARGTQTQSVLFGEVRLPLDGGVRGARKRSLLRAHPRTGILPGRCGMVWKDKKLQPSGCHEKAGGVFCGPSRGGV

SEQ ID NO: 748463 - protein, 144 aa, Homo sapiens
MLSAVWGAGGPGAGGAARGQPSRKELLLRHHLWSGPRCLSFPLGSLPASLLGLPGATSHRSCLSPNLASGLAARGTQTQSVLFGEEAESTTSTFSGAWGGQPPGQSKERMRSDMGVAVSGEGDGRFQHDAISNKFQHSSISFHK

SEQ ID NO: 748464 - protein, 612 aa, Homo sapiens
PPAAGQPRARDSGDVRSQPRPLFQWSKWKKRMGSSMSAATARRPVFDDKEDVNFDHFQILRAIGKGSFGKVCIVQKRDTEKMYAMKYMNKQQCIERDEVRNVFRELEILQEIEHVFLVNLWYSFQDEEDMFMVVDLLLGGDLRYHLQQNVQFSEDTVRLYICEMALALDYLRGQHIIHRDVKPDNILLDERGHAHLTDFNIATIIKDGERATALAGTKPYMAPEIFHSFVNGGTGYSFEVDWWSVGVMAYELLRGWRPYDIHSSNAVESLVQLFSTVSVQYVPTWSKEMVALLRKLLTVNPEHRLSSLQDVQAAPALAGVLWDHLSEKRVEPGFVPNKGRLHCDPTFELEEMILESRPLHKKKKRLAKNKSRDNSRDSSQSENDYLQDCLDAIQQDFVIFNREKLKRSQDLPREPLPAPESRDAAEPVEDEAERSALPMCGPIVPLGRERLGRDARGPHPLSCFGDSAARGRAMGRGLAFTFPPSLAGGAHSAPDTFHTSGSWWCRGQEAVGAGDTCGGHFPWAPETRLDGGSAAGRPLTAHGELGPWMGQESLSLLSPEAVHGPRHKVTLAAQAAGAPGSAQFLEVKGMGWGSGWGGECFLEIQTAPAISV

SEQ ID NO: 748465 - protein, 528 aa, Homo sapiens
MKYMNKQQCIERDEVRNVFRELEILQEIEHVFLVNLWYSFQDEEDMFMVVDLLLGGDLRYHLQQNVQFSEDTVRLYICEMALALDYLRGQHIIHRDVKPDNILLDERGHAHLTDFNIATIIKDGERATALAGTKPYMAPEIFHSFVNGGTGYSFEVDWWSVGVMAYELLRGWRPYDIHSSNAVESLVQLFSTVSVQYVPTWSKEMVALLRKLLTVNPEHRLSSLQDVQAAPALAGVLWDHLSEKRVEPGFVPNKGRLHCDPTFELEEMILESRPLHKKKKRLAKNKSRDNSRDSSQSENDYLQDCLDAIQQDFVIFNREKLKRSQDLPREPLPAPESRDAAEPVEDEAERSALPMCGPIVPLGRERLGRDARGPHPLSCFGDSAARGRAMGRGLAFTFPPSLAGGAHSAPDTFHTSGSWWCRGQEAVGAGDTCGGHFPWAPETRLDGGSAAGRPLTAHGELGPWMGQESLSLLSPEAVHGPRHKVTLAAQAAGAPGSAQFLEVKGMGWGSGWGGECFLEIQTAPAISV

SEQ ID NO: 748466 - protein, 498 aa, Homo sapiens
MTFSVTLYSFQDEEDMFMVVDLLLGGDLRYHLQQNVQFSEDTVRLYICEMALALDYLRGQHIIHRDVKPDNILLDERGHAHLTDFNIATIIKDGERATALAGTKPYMAPEIFHSFVNGGTGYSFEVDWWSVGVMAYELLRGWRPYDIHSSNAVESLVQLFSTVSVQYVPTWSKEMVALLRKLLTVNPEHRLSSLQDVQAAPALAGVLWDHLSEKRVEPGFVPNKGRLHCDPTFELEEMILESRPLHKKKKRLAKNKSRDNSRDSSQSENDYLQDCLDAIQQDFVIFNREKLKRSQDLPREPLPAPESRDAAEPVEDEAERSALPMCGPIVPLGRERLGRDARGPHPLSCFGDSAARGRAMGRGLAFTFPPSLAGGAHSAPDTFHTSGSWWCRGQEAVGAGDTCGGHFPWAPETRLDGGSAAGRPLTAHGELGPWMGQESLSLLSPEAVHGPRHKVTLAAQAAGAPGSAQFLEVKGMGWGSGWGGECFLEIQTAPAISV

SEQ ID NO: 748467 - protein, 102 aa, Homo sapiens
MLSAVWGAGGPGAGGAARGQPSRKELLLRHHLWSGPRCLSFPLGSLPASLLGLPGATSHRSCLSPNLASGLAARGTQTQSVLFGEVRLPLDGGVRGARKRRS

SEQ ID NO: 748468 - protein, 108 aa, Homo sapiens
MLSAVWGAGGPGAGGAARGQPSRKELLLRHHLWSGPRCLSFPLGSLPASLLGLPGATSHRSCLSPNLASGLAARGTQTQSVLFGEVRLPLDGGVRGARKRSECPEEGF

SEQ ID NO: 748469 - protein, 102 aa, Homo sapiens; identical to SEQ ID NO: 748467

SEQ ID NO: 748470 - protein, 681 aa, Homo sapiens
MLSAVWGAGGPGAGGAARGQPSRKELLLRHHLWSGPRCLSFPLGSLPASLLGLPGATSHRSCLSPNLASGLAARGTQTQSVLFGEVRLPLDGGVRGARKRMNFDHFQILRAIGKGSFGKVSPRVPRRPQASCRTALALQVCIVQKRDTEKMYAMKYMNKQQCIERDEVRNVFRELEILQEIEHVFLVNLWYSFQDEEDMFMVVDLLLGGDLRYHLQQNVQFSEDTVRLYICEMALALDYLRGQHIIHRDVKPDNILLDERGHAHLTDFNIATIIKDGERATALAGTKPYMAPEIFHSFVNGGTGYSFEVDWWSVGVMAYELLRGWRPYDIHSSNAVESLVQLFSTVSVQYVPTWSKEMVALLRKLLTVNPEHRLSSLQDVQAAPALAGVLWDHLSEKRVEPGFVPNKGRLHCDPTFELEEMILESRPLHKKKKRLAKNKSRDNSRDSSQSENDYLQDCLDAIQQDFVIFNREKLKRSQDLPREPLPAPESRDAAEPVEDEAERSALPMCGPICPSAEERLGRDARGPHPLSCFGDSAARGRAMGRGLAFTFPPSLAGGAHSAPDTFHTSGSWWCRGQEAVGAGDTCGGHFPWAPETRLDGGSAAGRPLTAHGELGPWMGQESLSLLSPEAVHGPRHKVTLAAQAAGAPGSAQFLEVKGMGWGSGWGGECFLEIQTAPAISV

SEQ ID NO: 748471 - protein, 106 aa, Homo sapiens
MEPPEQFSHAIFQQLGQLPVTLSCTTSVTRSSDFHIHVDDPSSTRASQFLDILSSLILCSAYPSHCSVGHSLNFVINKAPSVTSISSNSCSTSFLISSSSPIPITC

SEQ ID NO: 748472 - protein, 187 aa, Homo sapiens
MVAATVAAAWLLLWAAACAQQEQDFYDFKAVNIRGKLVSLEKYRGSVSLVVNVASECGFTDQHYRALQQLQRDLGPHHFNVLAFPCNQFGQQEPDSNKEIESFARRTYSVSFPMFSKIAVTGTGAHPAFKYLAQTSGKEPTWNFWKYLVAPDGKVVGAWDPTVSVEEVRPQITALVRKLILLKREDL

SEQ ID NO: 748473 - protein, 187 aa, Homo sapiens; identical to SEQ ID NO: 748472

SEQ ID NO: 748474 - protein, 187 aa, Homo sapiens; identical to SEQ ID NO: 748472

SEQ ID NO: 748475 - protein, 151 aa, Homo sapiens [sequence omitted]

SEQ ID NO: 748476 - protein, 104 aa, Homo sapiens
MDKKEKSLGSWTTALLQAGLVILLEAAILLSLVKCNWLYLNDVALRFCQSRYYFNLLRPASTSRSREVSAHINGLALLKGISGPGVVAHACNPNTLGGRGGQIT

SEQ ID NO: 748477 - protein, 1046 aa, Homo sapiens
PGGAGVSSGPVGPGRGAMASEAVKVVVRCRPMNQRERELRCQPVVTVDCARAQCCIQNPGAADEPPKQFTFDGAYHVDHVTEQIYNEIAYPLVEGVTEGYNGTIFAYGQTGSGKSFTMQGLPDPPSQRGIIPRAFEHVFESVQCAENTKFLVRASYLEIYNEDVRDLLGADTKQKLELKEHPEKGVYVKGLSMHTVHSVAQCEHIMETGWKNRSVGYTLMNKDSSRSHSIFTISIEMSAVDERGKDHLRAGKLNLVDLAGSERQSKTGATGERLKEATKINLSLSALGNVISALVDGRCKHVPYRDSKLTRLLQDSLGGNTKTLMVACLSPADNNYDETLSTLRYANRAKNIRNKPRINEDPKDALLREYQEEIKKLKAILTQQMSPSSLSALLSRQVPPDPVQVEEKLLPQPVIQHDMEAEKQLIREEYEERLARLKADYKAEQESRARLEEDITAMRNSYDVRLSTLEENLRKETEAVLQVGVLYKAEVMSRAEFASSAEYPPAFQYETVVKPKVFSTTDTLPSDDVSKTQVSSRFAELPKVEPSKSEISLGSSESSSLEETSVSEAFPGPEEPSNVEVSMPTEESRSRYFLDECLGQEAAGHLLGEQNYLPQEEPQEVPLQGLLGLQDPFAEVEAKLARLSSTVARTDAPQADVPKVPVQVPAPTDLLEPSDARPEAEAADDFPPRPEVDLASEVALEVVRTAEPGVWLEAQAPVALVAQPEPLPATAGVKRESVGMEVAVLTDDPLPVVDQQQVLARLQLLEQQVVGGEQAKNKDLKEKHKRRKRYADERRKQLVAALQNSDEDSGDWVLLNVYDSIQEEVRAKSKLLEKMQRKLRAAEVEIKDLQSEFQLEKIDYLATIRRQERDSMLLQQLLEQVQPLIRRDCNYSNLEKILRESCWDEDNGFWKIPHPVITKTSLPVAVSTGPQNKPARKTSAADNGEPNMEEDRYRLMLSRSNSENIASNYFRSKRASQILSTDARKSLTHHNSPPGLSCPLSNNSAIPPTQAPEMPQPRPFRLESLDIPFTKAKRKKSKSNFGSEPL

SEQ ID NO: 748478 - protein, 412 aa, Homo sapiens
KNSTGRVFVSLVSLAGGDLSGLQQAEWPRLGLSHLGAVGGGWGGLPTSTWVSLHTQEVDLASEVALEVVRTAEPGVWLEAQAPVALVAQPEPLPATAGVKRESVGMEVAVLTDDPLPVVDQQQVLARLQLLEQQVVGGEQAKNKDLKEKHKRRKRYADERRKQLVAALQNSDEDSGDWVLLNVYDSIQEEVRAKSKLLEKMQRKLRAAEVEIKDLQSEFQLEKIDYLATIRRQERDSMLLQQLLEQVQPLIRRDCNYSNLEKILRESCWDEDNGFWKIPHPVITKTSLPVAVSTGPQNKPARKTSAADNGEPNMEEDRYRLMLSRSNSENIASNYFRSKRASQILSTDARKSLTHHNSPPGLSCPLSNNSAIPPTQAPEMPQPRPFRLESLDIPFTKAKRKKSKSNFGSEPL

SEQ ID NO: 748479 - protein, 816 aa, Homo sapiens
PGGAGVSSGPVGPGRGAMASEAVKVVVRCRPMNQRERELRCQPVVTVDCARAQCCIQNPGAADEPPKQFTFDGAYHVDHVTEQIYNEIAYPLVEGVTEGYNGTIFAYGQTGSGKSFTMQGLPDPPSQRGIIPRAFEHVFESVQCAENTKFLVRASYLEIYNEDVRDLLGADTKQKLELKEHPEKGVYVKGLSMHTVHSVAQCEHIMETGWKNRSVGYTLMNKDSSRSHSIFTISIEMSAVDERGKDHLRAGKLNLVDLAGSERQSKTGATGERLKEATKINLSLSALGNVISALVDGRCKHVPYRDSKLTRLLQDSLGGNTKTLMVACLSPADNNYDETLSTLRYANRAKNIRNKPRINEDPKDALLREYQEEIKKLKAILTQQMSPSSLSALLSRQVPPDPVQVEEKLLPQPVIQHDMEAEKQLIREEYEERLARLKADYKAEQESRARLEEDITAMRNSYDVRLSTLEENLRKEKVPAPTDLLEPSDARPEAEAADDFPPRPEVDLASEVALEVVRTAEPGVWLEAQAPVALVAQPEPLPATAGVKRESVGMEVAVLTDDPLPVVDQQQVLARLQLLEQQVVGGEQAKNKDLKEKHKRRKRYADERRKQLVAALQNSDEDSGDWVLLNVYDSIQEEVRAKSKLLEKMQRKLRAAEVEIKDLQSEFQLEKIDYLATIRRQERDSMLLQQLLEQVQPLIRRDCNYSNLEKILRESCWDEDNGFWKIPHPVITKTSLPVAVSTGPQNKPARKTSAADNGEPNMEEDRYRLMLSRSNSENIASNYFRSKRASQILSTDARKSLKPTPMPTSVGLCLKA

SEQ ID NO: 748480 - protein, 175 aa, Homo sapiens
MLLQQLLEQVQPLIRRDCNYSNLEKILRESCWDEDNGFWKIPHPVITKTSLPVAVSTGPQNKPARKTSAADNGEPNMEEDRYRLMLSRSNSENIASNYFRSKRASQILSTDARKSLTHHNSPPGLSCPLSNNSAIPPTQAPEMPQPRPFRLESLDIPFTKAKRKKSKSNFGSEPL

SEQ ID NO: 748481 - protein, 860 aa, Homo sapiens
PGGAGVSSGPVGPGRGAMASEAVKVVVRCRPMNQRERELRCQPVVTVDCARAQCCIQNPGAADEPPKQFTFDGAYHVDHVTEQIYNEIAYPLVEGVTEGYNGTIFAYGQTGSGKSFTMQGLPDPPSQRGIIPRAFEHVFESVQCAENTKFLVRASYLEIYNEDVRDLLGADTKQKLELKEHPEKGVYVKGLSMHTVHSVAQCEHIMETGWKNRSVGYTLMNKDSSRSHSIFTISIEMSAVDERGKDHLRAGKLNLVDLAGSERQSKTGATGERLKEATKINLSLSALGNVISALVDGRCKHVPYRDSKLTRLLQDSLGGNTKTLMVACLSPADNNYDETLSTLRYANRAKNIRNKPRINEDPKDALLREYQEEIKKLKAILTQQMSPSSLSALLSRQVPPDPVQVEEKLLPQPVIQHDMEAEKQLIREEYEERLARLKADYKAEQESRARLEEDITAMRNSYDVRLSTLEENLRKEKVPAPTDLLEPSDARPEAEAADDFPPRPEVDLASEVALEVVRTAEPGVWLEAQAPVALVAQPEPLPATAGVKRESVGMEVAVLTDDPLPVVDQQQVLARLQLLEQQVVGGEQAKNKDLKEKHKRRKRYADERRKQLVAALQNSDEDSGDWVLLNVYDSIQEEVRAKSKLLEKMQRKLRAAEVEIKDLQSEFQLEKIDYLATIRRQERDSMLLQQLLEQVQPLIRRDCNYSNLEKILRESCWDEDNGFWKIPHPVITKTSLPVAVSTGPQNKPARKTSAADNGEPNMEEDRYRLMLSRSNSENIASNYFRSKRASQILSTDARKSLTHHNSPPGLSCPLSNNSAIPPTQAPEMPQPRPFRLESLDIPFTKAKRKKSKSNFGSEPL

SEQ ID NO: 748482 - protein, 860 aa, Homo sapiens; identical to SEQ ID NO: 748481

SEQ ID NO: 748483 - protein, 202 aa, Homo sapiens [sequence omitted]

SEQ ID NO: 748484 - protein, 108 aa, Homo sapiens
MRGTLRQPPRPWRQKGPGRTTDWEETEKAEESQAAGVWMGPAQADAVSYPLSPLLPGPGLVSLRSLGMRQKQRLFSCGTTGCNQSTQCCFRNLNRLPIFLNWQHRLPH

SEQ ID NO: 748485 - protein, 120 aa, Homo sapiens
MPLHSSLGERNSVSKKTVGVDCRSQGRDTRHSICSMCPIHNSQCVSRDAAPSSGFPAHGGSSRAGASDGKLQAAKGGDGETPCFTFGLSCNSAHAPSAANRPWETVSSSPKLGQCLPGGA

SEQ ID NO: 748486 - protein, 236 aa, Homo sapiens
SLLFTSQRGWAPAAPLNHRFQKSSAEVLPSLISRTTIPRDFGFTTFLFLPDLSRSWLGFGRPEAHSDDVIRRERVPGFPRRPFFLSPRSSPLQAVAAGLSGDLAGRACALPCFLPGWWRRPFCSSSSSSCSSWLERSVRSGLGGESPRAGFGAFSSVPSRCPEPHKKRTRRRKKACGKLGAHEEQSKQVRRITTHNPEAENNPQKEFTNKRQLNKCPAQPEKKRAPGEKQNGVKNT

SEQ ID NO: 748487 - protein, 205 aa, Homo sapiens
SLLFTSQRGWAPAAPLNHRFQKSSAEVLPSLISRTTIPRDFGFTTFLFLPDLSRSWLGFGRPEAHSDDVIRRERVPGFPRRPFFLSPRSSPLQAVAAGLSGDLAGRACALPCFLPGWWRRPFCSSSSSSCSSWLERSVRSGLGGESPRAGFGAFSSVPSRCPEPPSPSSPPPPLPNPALPLVPGSLRRTHHDGRRRAAPDSTHTS

SEQ ID NO: 748488 - protein, 110 aa, Homo sapiens
MRPWSSIRIVCLRPPVWSGSREVAEPRPRPSPRVSRAARWRLVSSVPWRVSLVATWALPTQSEFSGRPPSSLSPEAASWHSLPLPLAVGTSRLITGSLDLLLVSLDFCLH

SEQ ID NO: 748489 - protein, 163 aa, Homo sapiens
KVEAWKEKLVTTVQNMQQGAAQSQEELCQLQAKLLIDSDDDSQCQMNHRDLIQKYEGSETQLKNLGQELAHTQHSIRQLCDGKDSLFPQLDILPQLPREALSSHTAESLHASESALSSESSKLLQQEIEKLRKSLQEKDATIRSLQGDNQRLYDSIAAISERE

SEQ ID NO: 748490 - protein, 614 aa, Homo sapiens
VALTAQACYGSSSLCGISCHIGKMKNSRTWAWRAPVELFLLCAALGCLSLPGSRGERPHSFGSNAVNKSFAKSRQMRSVDVTLMPIDCELSSWSSWTTCDPCQKKRYRYAYLLQPSQFHGEPCNFSDKEVEDCVTNRPCRSQVRCEGFVCAQTGRCVNRRLLCNGDNDCGDQSDEANCRRIYKKCQHEMDQYWGIGSLASGINLFTNSFEGPVLDHRYYAGGCSPHYILNTRFRKPYNVESYTPQTQGKYEFILKEYESYSDFERNVTEKMASKSGFSFGFKIPGIFELGISSQSDRGKHYIRRTKRFSHTKSVFLHARSDLEVAHYKLKPRSLMLHYEFLQRVKRLPLEYSYGEYRDLFRDFGTHYITEAVLGGIYEYTLVMNKEAMERGDYTLNNVHACAKNDFKIGGAIEEVYVSLGVSVGKCRGILNEIKDRNKRDTMVEDLVVLVRGGASEHITTLAYQELPTADLMQEWGDAVQYNPAIIKVKVEPLYELVTATDFAYSSTVRQNMKQALEEFQKEVSSCHCAPCQGNGVPVLKGSRCDCICPVGSQGLACEVSYRKNTPIDGKWNCWSNWSSCSGRRKTRQRQCNNPPPQNGGSPCSGPASETLDCS

SEQ ID NO: 748491 - protein, 596 aa, Homo sapiens
VALTAQACYGSSSLCGISCHIGKMKNSRTWAWRAPVELFLLCAALGCLSLPGSRGERPHSFGSNAVNKSFAKSRQMRSVDVTLMPIDCELSSWSSWTTCDPCQKKRYRYAYLLQPSQFHGEPCNFSDKEVEDCVTNRPCRSQVRCEGFVCAQTGRCVNRRLLCNGDNDCGDQSDEANCRRIYKKCQHEMDQYWGIGSLASGINLFTNSFEGPVLDHRYYAGGCSPHYILNTRFRKPYNVESYTPQTQGKYEFILKEYESYSDFERNVTEKMASKSGFSFGFKIPGIFELGISSQSDRGKHYIRRTKRFSHTKSVFLHARSDLEVAHYKLKPRSLMLHYEFLQRVKRLPLEYSYGEYRDLFRDFGTHYITEAVLGGIYEYTLVMNKEAMERGDYTLNNVHACAKNDFKIGGAIEEVYVSLGVSVGKCRGILNEIKGASEHITTLAYQELPTADLMQEWGDAVQYNPAIIKVKVEPLYELVTATDFAYSSTVRQNMKQALEEFQKEVSSCHCAPCQGNGVPVLKGSRCDCICPVGSQGLACEVSYRKNTPIDGKWNCWSNWSSCSGRRKTRQRQCNNPPPQNGGSPCSGPASETLDCS

SEQ ID NO: 748492 - protein, 596 aa, Homo sapiens
VALTAQACYGSSSLCGISCHIGKMKNSRTWAWRAPVELFLLCAALGCLSLPGSRGERPHSFGSNAVNKSFAKSRQMRSVDVTLMPIDCELSSWSSWTTCDPCQKKRYRYAYLLQPSQFHGEPCNFSDKEVEDCVTNRPCRSQVRCEGFVCAQTGRCVNRRLLCNGDNDCGDQSDEANCRRIYKINLFTNSFEGPVLDHRYYAGGCSPHYILNTRFRKPYNVESYTPQTQGKYEFILKEYESYSDFERNVTEKMASKSGFSFGFKIPGIFELGISSQSDRGKHYIRRTKRFSHTKSVFLHARSDLEVAHYKLKPRSLMLHYEFLQRVKRLPLEYSYGEYRDLFRDFGTHYITEAVLGGIYEYTLVMNKEAMERGDYTLNNVHACAKNDFKIGGAIEEVYVSLGVSVGKCRGILNEIKDRNKRDTMVEDLVVLVRGGASEHITTLAYQELPTADLMQEWGDAVQYNPAIIKVKVEPLYELVTATDFAYSSTVRQNMKQALEEFQKEVSSCHCAPCQGNGVPVLKGSRCDCICPVGSQGLACEVSYRKNTPIDGKWNCWSNWSSCSGRRKTRQRQCNNPPPQNGGSPCSGPASETLDCS

SEQ ID NO: 748493 - protein, 497 aa, Homo sapiens
FFMLLSQYRYAYLLQPSQFHGEPCNFSDKEVEDCVTNRPCRSQVRCEGFVCAQTGRCVNRRLLCNGDNDCGDQSDEANCRRIYKINLFTNSFEGPVLDHRYYAGGCSPHYILNTRFRKPYNVESYTPQTQGKYEFILKEYESYSDFERNVTEKMASKSGFSFGFKIPGIFELGISSQSDRGKHYIRRTKRFSHTKSVFLHARSDLEVAHYKLKPRSLMLHYEFLQRVKRLPLEYSYGEYRDLFRDFGTHYITEAVLGGIYEYTLVMNKEAMERGDYTLNNVHACAKNDFKIGGAIEEVYVSLGVSVGKCRGILNEIKDRNKRDTMVEDLVVLVRGGASEHITTLAYQELPTADLMQEWGDAVQYNPAIIKVKVEPLYELVTATDFAYSSTVRQNMKQALEEFQKEVSSCHCAPCQGNGVPVLKGSRCDCICPVGSQGLACEVSYRKNTPIDGKWNCWSNWSSCSGRRKTRQRQCNNPPPQNGGSPCSGPASETLDCS

SEQ ID NO: 748494 - protein, 515 aa, Homo sapiens
FFMLLSQYRYAYLLQPSQFHGEPCNFSDKEVEDCVTNRPCRSQVRCEGFVCAQTGRCVNRRLLCNGDNDCGDQSDEANCRRIYKKCQHEMDQYWGIGSLASGINLFTNSFEGPVLDHRYYAGGCSPHYILNTRFRKPYNVESYTPQTQGKYEFILKEYESYSDFERNVTEKMASKSGFSFGFKIPGIFELGISSQSDRGKHYIRRTKRFSHTKSVFLHARSDLEVAHYKLKPRSLMLHYEFLQRVKRLPLEYSYGEYRDLFRDFGTHYITEAVLGGIYEYTLVMNKEAMERGDYTLNNVHACAKNDFKIGGAIEEVYVSLGVSVGKCRGILNEIKDRNKRDTMVEDLVVLVRGGASEHITTLAYQELPTADLMQEWGDAVQYNPAIIKVKVEPLYELVTATDFAYSSTVRQNMKQALEEFQKEVSSCHCAPCQGNGVPVLKGSRCDCICPVGSQGLACEVSYRKNTPIDGKWNCWSNWSSCSGRRKTRQRQCNNPPPQNGGSPCSGPASETLDCS

SEQ ID NO: 748495 - protein, 344 aa, Homo sapiens
MASKSGFSFGFKIPGIFELGISSQSDRGKHYIRRTKRFSHTKSVFLHARSDLEVAHYKLKPRSLMLHYEFLQRVKRLPLEYSYGEYRDLFRDFGTHYITEAVLGGIYEYTLVMNKEAMERGDYTLNNVHACAKNDFKIGGAIEEVYVSLGVSVGKCRGILNEIKDRNKRDTMVEDLVVLVRGGASEHITTLAYQELPTADLMQEWGDAVQYNPAIIKVKVEPLYELVTATDFAYSSTVRQNMKQALEEFQKEVSSCHCAPCQGNGVPVLKGSRCDCICPVGSQGLACEVSYRKNTPIDGKWNCWSNWSSCSGRRKTRQRQCNNPPPQNGGSPCSGPASETLDCS

SEQ ID NO: 748496 - protein, 559 aa, Homo sapiens
VALTAQACYGSSSLCGISCHIGKMKNSRTWAWRAPVELFLLCAALGCLSLPGSRGERPHSFGSNAVNKSFAKSRQMRSVDVTLMPIDCELSSWSSWTTCDPCQKKRYRYAYLLQPSQFHGEPCNFSDKEVEDCVTNRPCRSQVRCEGFVCAQTGRCVNRRLLCNGDNDCGDQSDEANCRRIYKKCQHEMDQYWGIGSLASGINLFTNSFEGPVLDHRYYAGGCSPHYILNTRFRKPYNVESYTPQTQGKYEFILKEYESYSDFERNVTEKMASKSGFSFGFKIPGIFELGISSQSDRGKHYIRRTKRFSHTKSVFLHARSDLEVAHYKLKPRSLMLHYEFLQRVKRLPLEYSYGEYRDLFRDFGTHYITEAVLGGIYEYTLVMNKEAMERGDYTLNNVHACAKNDFKIGGAIEEVYVSLGVSVGKCRGILNEIKGASEHITTLAYQELPTADLMQEWGDAVQYNPAIIKVKVEPLYELVTATDFAYSSTVRQNMKQALEEFQKEVSSCHCAPCQGNGVPVLKGSRCDCICPVGSQGLACEVSYRKSKLIGKGTLGRSRE

SEQ ID NO: 748497 - protein, 234 aa, Homo sapiens
VALTAQACYGSSSLCGISCHIGKMKNSRTWAWRAPVELFLLCAALGCLSLPGSRGERPHSFGSNAVNKSFAKSRQMRSVDVTLMPIDCELSSWSSWTTCDPCQKKRYRYAYLLQPSQFHGEPCNFSDKEVEDCVTNRPCRSQVRCEGFVCAQTGRCVNRRLLCNGDNDCGDQSDEANCRRIYKINLFTNSFEGPVLDHRYYAGGCSPHYILNTRFRKPYNVESYTPQTQGYVHI

SEQ ID NO: 748498 - protein, 301 aa, Homo sapiens
MSYPTKEGSDTAGNAHKNSENEPPNDCSTDIESPSADPNMIYQVETNPINREPGTATSQEDVVPQAAENSELETEIQKDQREEDLKEELLLLQTPIPRKLVSHKPLNDRSRSHSGKVEMKANNFPINHKTRFRLSTSWRVPFINSHEIRSMILHLLCDRYFSQAAGCQNTMWVKRKYIACLYHPNSFTHHERAITFRRPSRVHYYRPLTERMTSGKFCKSTDTKGKCRFRAIVRSVLFVSQIQIESIFNIKGFVDILTYIHTMNVMITNTNNGWKYFCPICGRLFNTYSELRQHSCSSSGN

SEQ ID NO: 748499 - protein, 301 aa, Homo sapiens; identical to SEQ ID NO: 748498

SEQ ID NO: 748500 - protein, 95 aa, Homo sapiens
SLGSRCLSQKQCGAREGSSRGLSLLVREPGTRCPLLTHGNVGTASTGYPRTVPRATAASVLPTPGPQTPCSQCWDISQCVRQCFLIFPGFLGLTP

SEQ ID NO: 748501 - protein, 131 aa, Homo sapiens
PPPTTTKFAAGRRACCEPDTQLLRSPEPPMKQRLSSTHFTEEAERGEVGFTPRNARARAASGHPTPGPPCCVGRKASVLQISTGSLQTPGLSRVPQLEVTGVEANMQTSQHSASGLPNSMSPTWNWELNQM

SEQ ID NO: 748502 - protein, 1161 aa, Homo sapiens [sequence omitted]

SEQ ID NO: 748503 - protein, 338 aa, Homo sapiens
  misc_feature (6)..(6): Xaa can be any naturally occurring amino acid
YYYYIXGRSTFKYLKNLLMIHGAWNYNRVSKCILYCFYKNIVLYIIEIWFAFVNGFSGQILFERWCIGLYNVMFTAMPPLTLGIFERSCRKENMLKYPELYKTSQNALDFNTKVFWVHCLNGLFHSVILFWFPLKALQYGTAFGNGKTSDYLLLGNFVYTFVVITVCLKAGLETSYWTWFSHIAIWGSIALWVVFFGIYSSLWPAIPMAPDMSGEAAMLFSSGVFWMGLLFIPVASLLLDVVYKVIKRTAFKTLVDEVQELEAKSQDPGAVVLGKSLTERAQLLKNVFKKNHVNLYRSESLQQNLLHGYAFSQDENGIVSQSEVIRAYDTTKQRPDEW

SEQ ID NO: 748504 - protein, 885 aa, Homo sapiens
MRRTVSEIRSRAEGYEKTDDVSEKTSLADQEEVRTIFINQPQLTKFCNNHVSTAKYNIITFLPRFLYSQFRRAANSFFLFIALLQQIPDVSPTGRYTTLVPLLFILAVAAIKEIIEDIKRHKADNAVNKKQTQVLRNGAWEIVHWEKVAVGEIVKVTNGEHLPADLISLSSSEPQAMCYIETSNLDGETNLKIRQGLPATSDIKDVDSLMRISGRIECESPNRHLYDFVGNIRLDGHGTVPLGADQILLRGAQLRNTQWVHGIVVYTGHDTKLMQNSTSPPLKLSNVERITNVQILILFCILIAMSLVCSVGSAIWNRRHSGKDWYLNLNYGGASNFGLNFLTFIILFNNLIPISLLVTLEVVKFTQAYFINWDLDMHYEPTDTAAMARTSNLNEELGQVKYIFSDKTGTLTCNVMQFKKCTIAGVAYGHVPEPEDYGCSPDEWQNSQFGDEKTFSDSSLLENLQNNHPTAPIICEFLTMMAVCHTAVPEREGDKIIYQAASPDEGALVRAAKQLNFVFTGRTPDSVIIDSLGQEERYELLNVLEFTSARKRMSVIVRTPSGKLRLYCKGADTVIYDRLAETSKYKEITLKHLEQFATEGLRTLCFAVAEISESDFQEWRAVYQRASTSVQNRLLKLEESYELIEKNLQLLGATAIEDKLQDQVPETIETLMKADIKIWILTGDKQETAINIGHSCKLLKKNMGMIVINEGSLDGTRETLSRHCTTLGDALRKENDFALIIDGKTLKYALTFGVRQYFLDLALSCKAVICCRVSPLQKSEVVEMVKKQVKVVTLAIGDGANDVSMIQTAHVGVGISGNEGLQAANSSDYSIAQFKYLKNLLMIHGAWNYNRVSKCILYCFYKNIVLYIIENTDIQANNNLYSLFT

SEQ ID NO: 748505 - protein, 548 aa, Homo sapiens
MRRTVSEIRSRAEGYEKTDDVSEKTSLADQEEVRTIFINQPQLTKFCNNHVSTAKYNIITFLPRFLYSQFRRAANSFFLFIALLQQIPDVSPTGRYTTLVPLLFILAVAAIKEIIEDIKRHKADNAVNKKQTQVLRNGAWEIVHWEKVAVGEIVKVTNGEHLPADLISLSSSEPQAMCYIETSNLDGETNLKIRQGLPATSDIKDVDSLMRISGRIECESPNRHLYDFVGNIRLDGHGTVPLGADQILLRGAQLRNTQWVHGIVVYTGHDTKLMQNSTSPPLKLSNVERITNVQILILFCILIAMSLVCSVGSAIWNRRHSGKDWYLNLNYGGASNFGLNFLTFIILFNNLIPISLLVTLEVVKFTQAYFINWDLDMHYEPTDTAAMARTSNLNEELGQVKYIFSDKTGTLTCNVMQFKKCTIAGVAYGHVPEPEDYGCSPDEWQNSQFGDEKTFSDSSLLENLQNNHPTAPIICEFLTMMAVCHTAVPEREGDKIIYQAASPDEGALVRAAKQLNFVFTGRTPDSVIIDSLGQEERYELLNVLEFTR

SEQ ID NO: 748506 - protein, 186 aa, Homo sapiens
MAGLGLGSAVPVWLAEDDLGCIICQGLLDWPATLPCGHSFCRHCLEALWGARDARRWACPTCRQGAAQQPHLRKNTLLQDLADKYRRAAREIQAGSDPAHCPCPGSSSLSSAAARPRRRPELQRVAVEKSITEVAQELTELVEHLVDIVRSLQNQRPLSESGPDNELSILGKRTPGSPVFLLMPIA

SEQ ID NO: 748507 - protein, 432 aa, Homo sapiens
MAGLGLGSAVPVWLAEDDLGCIICQGLLDWPATLPCGHSFCRHCLEALWGARDARRWACPTCRQGAAQQPHLRKNTLLQDLADKYRRAAREIQAGSDPAHCPCPGSSSLSSAAARPRRRPELQRVAVEKSITEVAQELTELVEHLVDIVRSLQNQRPLSESGPDNELSILGKAFSSGVDLSMASPKLVTSDTAAGKIRDILHDLEEIQEKLQESVTWKEAPEAQMQGELLEAPSSSSCPLPDQSHPALRRASRFAQWAIHPTFNLKSLSCSLEVSKDSRTVTVSHRPQPYRWSCERFSTSQVLCSQALSSGKHYWEVDTRNCSHWAVGVASWEMSRDQVLGRTMDSCCVEWKGTSQLSAWHMVKETVLGSDRPGVVGIWLNLEEGKLAFYSVDNQEKLLYECTISASSPLYPAFWLYGLHPGNYLIIKQVKV

SEQ ID NO: 748508 - protein, 164 aa, Homo sapiens
MAGLGLGSAVPVWLAEDDLGCIICQGLLDWPATLPCGHSFCRHCLEALWGARDARRWACPTCRQGAAQQPHLRKNTLLQDLADKYRRAAREIQAGSDPAHCPCPGSSSLSSAAARPRRRPELQRVGRPGPQLPWLPRAARRLTLSHVARTPFLSRSTFTFLFSV

SEQ ID NO: 748509 - protein, 555 aa, Homo sapiens
MAGSGLDLIGRGPTSAPRPPVGHGGPGPGLRRSRVAGRGRPRLHHLPGAAGLARHAALRPQLLPPLPGGPVGRPRRPPLGLPHLPPGRRAAAAPAEEHATAGPGRQVPPRRTRDTGGLRPCPLPLPGLQFPLQRGREAPAPPGTAAGREAGPAAPLAPPGCPPPDPFPCGSNPFPQPFYFYVPFLSLKVEFRSSEALWKVHKKYEEVEKNKFPIFRKLVNLAVTQLGIFQLLPNRSSVSFSETCKIVVAVEKSITEVAQELTELVEHLVDIVRSLQNQRPLSESGPDNELSILGKAFSSGVDLSMASPKLVTSDTAAGKIRDILHDLEEIQEKLQESVTWKEAPEAQMQGELLEAPSSSSCPLPDQSHPALRRASRFAQWAIHPTFNLKSLSCSLEVSKDSRTVTVSHRPQPYRWSCERFSTSQVLCSQALSSGKHYWEVDTRNCSHWAVGVASWEMSRDQVLGRTMDSCCVEWKGTSQLSAWHMVKETVLGSDRPGVVGIWLNLEEGKLAFYSVDNQEKLLYECTISASSPLYPAFWLYGLHPGNYLIIKQVKV

SEQ ID NO: 748510 - protein, 138 aa, Homo sapiens
MAGLGLGSAVPVWLAEDDLGCIICQGLLDWPATLPCGHSFCRHCLEALWGARDARRWACPTCRQGAAQQPHLRKNTLLQDLADKYRRAAREIQAGSDPAHCPCPGSSSLSSAAARPRRRPELQRRTPGSPVFLLMPIA

SEQ ID NO: 748511 - protein, 432 aa, Homo sapiens; identical to SEQ ID NO: 748507

SEQ ID NO: 748512 - protein, 251 aa, Homo sapiens
MASPKLVTSDTAAGKIRDILHDLEEIQEKLQESVTWKEAPEAQMQGELLEAPSSSSCPLPDQSHPALRRASRFAQWAIHPTFNLKSLSCSLEVSKDSRTVTVSHRPQPYRWSCERFSTSQVLCSQALSSGKHYWEVDTRNCSHWAVGVASWEMSRDQVLGRTMDSCCVEWKGTSQLSAWHMVKETVLGSDRPGVVGIWLNLEEGKLAFYSVDNQEKLLYECTISASSPLYPAFWLYGLHPGNYLIIKQVKV

SEQ ID NO: 748513 - protein, 217 aa, Homo sapiens
LSISAVAPTTANCLFPNLLRYFCICAVATNYSQLPLPKPAQWAIHPTFNLKSLSCSLEVSKDSRTVTVSHRPQPYRWSCERFSTSQVLCSQALSSGKHYWEVDTRNCSHWAVGVASWEMSRDQVLGRTMDSCCVEWKGTSQLSAWHMVKETVLGSDRPGVVGIWLNLEEGKLAFYSVDNQEKLLYECTISASSPLYPAFWLYGLHPGNYLIIKQVKV

SEQ ID NO: 748514 - protein, 164 aa, Homo sapiens; identical to SEQ ID NO: 748508

SEQ ID NO: 748515 - protein, 350 aa, Homo sapiens
MLEGAELYFNVDHGYLEGLVRGCKASLLTQQDYINLVQCETLEDLKIHLQTTDYGNFLANHTNPLTVSKIDTEMRKRLCGEFEYFRNHSLEPLSTFLTYMTCSYMIDNVILLMNGALQKKSVKEILGKCHPLGRFTEMEAVNIAETPSDLFNAILIETPLAPFFQDCMSENALDELNIELLRNKLYKSYLEAFYKFCKNHGDVTAEVMCPILEFEADRRAFIITLNSFGTELSKEDRETLYPTFGKLYPEGLRLLAQAEDFDQMKNVADHYGVYKPLFEAVGGSGGKTLEDVFYEREVQMNVLAFNRQFHYGVFYAYVKLKEQEIRNIVWIAECISQRHRTKINSYIPIL

SEQ ID NO: 748516 - protein, 350 aa, Homo sapiens; identical to SEQ ID NO: 748515

SEQ ID NO: 748517 - protein, 160 aa, Homo sapiens
MAKMEVKTSLLDNMIGVGDMVLLEPLNEETFINNLKKRFDHSEIYTYIGSVVISVNPYRSLPIYSPEKVEEYRNRNFYELSPHIFALSDEAYRSLRDQDKDQCILITGESGAGKTEASKLVMSYVAAVCGKGAEVNQVKEQLLQSNPVLEAFGNAKTVRE

SEQ ID NO: 748518 - protein, 160 aa, Homo sapiens; identical to SEQ ID NO: 748517

SEQ ID NO: 748519 - protein, 218 aa, Homo sapiens
QSARRAVGRQPRDSLGRTAAAGAPQPRAGPASRSATGERGRRGGGVAPGEVAPGELETMAKMEVKTSLLDNMIGVGDMVLLEPLNEETFINNLKKRFDHSEIYTYIGSVVISVNPYRSLPIYSPEKVEEYRNRNFYELSPHIFALSDEAYRSLRDQDKDQCILITGESGAGKTEASKLVMSYVAAVCGKGAEVNQVKEQLLQSNPVLEAFGNAKTVRE

SEQ ID NO: 748520 - protein, 160 aa, Homo sapiens; identical to SEQ ID NO: 748517

SEQ ID NO: 748521 - protein, 104 aa, Homo sapiens
  misc_feature (2)..(2): Xaa can be any naturally occurring amino acid
  misc_feature (5)..(5): Xaa can be any naturally occurring amino acid
TXSTXRHLRSDCHRRLELLNIVEGIYQLKKACRRELQTEQGQLLTPEEVVDRIFLLVDENGDGQLSLNEFVEGARRDKWVMKMLQMDMNPSSWLAQQRRKSAMF

SEQ ID NO: 748522 - protein, 51 aa, Homo sapiens
MTTSPPPCSGQLSLNEFVEGARRDKWVMKMLQMDMNPSSWLAQQRRKSAMF

SEQ ID NO: 748523 - protein, 75 aa, Homo sapiens
ILSLCRNISNFFTITIEPVFTYHSENPRALKDCAKSTLGVPYKCNSKAWMIVQLFTTWFTEYFKPTIETNSSEKK

SEQ ID NO: 748524 - protein, 520 aa, Homo sapiens
GTQSLLLCSSLGRGSQSFRLLCAEGVELRGLVASQFLFCEQPRSRAPPQPPVPPRSPSPPLPSPSLLMQGAQEASASEMLPLLLPLLWAGALAQERRFQLEGPESLTVQEGLCVLVPCRLPTTLPASYYGYGYWFLEGADVPVATNDPDEEVQEETRGRFHLLWDPRRKNCSLSIRDARRRDNAAYFFRLKSKWMKYGYTSSKLSVRVMALTHRPNISIPGTLESGHPSNLTCSVPWVCEQGTPPIFSWMSAAPTSLGPRTTQSSVLTITPRPQDHSTNLTCQVTFPGAGVTMERTIQLNVSYAPQKVAISIFQGNSAAFKILQNTSSLPVLEGQALRLLCDADGNPPAHLSWFQGFPALNATPISNTGVLELPQVGSAEEGDFTCRAQHPLGSLQISLSLFVHWKPEGRAGGVLGAVWGASITTLVFLCVCFIFRVKTRRKKAAQPVQNTDDVNPVMVSGSRGHQHQFQTGIVSDHPAEAGPISEDEQELHYAVLHFHKVQPQEPKVTDTEYSEIKIHK

SEQ ID NO: 748525 - protein, 520 aa, Homo sapiens; identical to SEQ ID NO: 748524

SEQ ID NO: 748526 - protein, 420 aa, Homo sapiens
GTQSLLLCSSLGRGSQSFRLLCAEGVELRGLVASQFLFCEQPRSRAPPQPPVPPRSPSPPLPSPSLLMQGAQEASASEMLPLLLPLLWAGALAQERRFQLEGPESLTVQEGLCVLVPCRLPTTLPASYYGYGYWFLEGADVPVATNDPDEEVQEETRGRFHLLWDPRRKNCSLSIRDARRRDNAAYFFRLKSKWMKYGYTSSKLSVRVMALTHRPNISIPGTLESGHPSNLTCSVPWVCEQGTPPIFSWMSAAPTSLGPRTTQSSVLTITPRPQDHSTNLTCQVTFPGAGVTMERTIQLNVSYAPQKVAISIFQGNSAAFKILQNTSSLPVLEGQALRLLCDADGNPPAHLSWFQGFPALNATPISNTGVLELPQVGSAEEGDFTCRAQHPLGSLQISLSLFVHWSSAPVPDRHSFRPPC

SEQ ID NO: 748527 - protein, 368 aa, Homo sapiens
GTQSLLLCSSLGRGSQSFRLLCAEGVELRGLVASQFLFCEQPRSRAPPQPPVPPRSPSPPLPSPSLLMQGAQEASASEMLPLLLPLLWAASYYGYGYWFLEGADVPVATNDPDEEVQEETRGRFHLLWDPRRKNCSLSIRDARRRDNAAYFFRLKSKWMKYGYTSSKLSVRVMALTHRPNISIPGTLESGHPSNLTCSVPWVCEQGTPPIFSWMSAAPTSLGPRTTQSSVLTITPRPQDHSTNLTCQVTFPGAGVTMERTIQLNVSSFKILQNTSSLPVLEGQALRLLCDADGNPPAHLSWFQGFPALNATPISNTGVLELPQVGSAEEGDFTCRAQHPLGSLQISLSLFVHWSSAPVPDRHSFRPPC

SEQ ID NO: 748528 - protein, 409 aa, Homo sapiens
GTQSLLLCSSLGRGSQSFRLLCAEGVELRGLVASQFLFCEQPRSRAPPQPPVPPRSPSPPLPSPSLLMQGAQEASASEMLPLLLPLLWAGALAQERRFQLEGPESLTVQEGLCVLVPCRLPTTLPASYYGYGYWFLEGADVPVATNDPDEEVQEETRGRFHLLWDPRRKNCSLSIRDARRRDNAAYFFRLKSKWMKYGYTSSKLSVRVMGTLESGHPSNLTCSVPWVCEQGTPPIFSWMSAAPTSLGPRTTQSSVLTITPRPQDHSTNLTCQVTFPGAGVTMERTIQLNVSYAPQKVAISIFQGNSAAFKILQNTSSLPVLEGQALRLLCDADGNPPAHLSWFQGFPALNATPISNTGVLELPQVGSAEEGDFTCRAQHPLGSLQISLSLFVHWSSAPVPDRHSFRPPC

SEQ ID NO: 748529 - protein, 134 aa, Homo sapiens
  misc_feature (8)..(8): Xaa can be any naturally occurring amino acid
SPPLPSPXLQISLSLFVHWKPEGRAGGVLGAVWGASITTLVFLCVCFIFRVKTRRKKAAQPVQNTDDVNPVMVSGSRGHQHQFQTGIVSDHPAEAGPISEDEQELHYAVLHFHKVQPQEPKVTDTEYSEIKIHK

SEQ ID NO: 748530 - protein, 120 aa, Homo sapiens
TDESVDPISPCAGPRGPWHSWFETRVSFRPLGVPKSGQKAHEGKVTHLGQREKKTTTVPRISGAWVPHRRNCLPISTCTAPRGHWYPWLEPSMLLGLLGVPQDRQKAHEGKVRHLGQRRK

SEQ ID NO: 748531 - protein, 103 aa, Homo sapiens
FDGDSLPQVSFRPLGVPKSGQKAHEGKVTHLGQREKKTTTVPRISGAWVPHRRNCLPISTCTAPRGHWYPWLEPSMLLGLLGVPQDRQKAHEGKVRHLGQRRK

SEQ ID NO: 748532 - protein, 102 aa, Homo sapiens
MFNTSCSILGFSPGASPESLCVRASQGCFCEGGNPNSKASRKSTLCASQITPASWPSDSALLGVSLMERHSNGWRPTHSFCLFVLCFEMESSSVARLECSGA

SEQ ID NO: 748533 - protein, 116 aa, Homo sapiens
DHHASFPRTEGYPYVGLLVPKAGKSGANQDKLVTLPMTIIQVNEHCALRVHLRLNPLGSSNYFSTFCSLSYFETFFPLIVYSPVECFFERESHSVAQAGVQWCDLCSLWPLPPGFK

SEQ ID NO: 748534 - protein, 581 aa, Homo sapiens
MLENYSNLVSVGYQASKPDALFKLEQGEPWTVENEIHSQICPEIKKVDNHLQMHSQKQRCLKRVEQCHKHNAFGNIIHQRKSDFPLRQNHDTFDLHGKILKSNLSLVNQNKRYEIKNSVGVNGDGKSFLHAKHEQFHNEMNFPEGGNSVNTNSQFIKHQRTQNIDKPHVCTECGKAFLKKSRLIYHQRVHTGEKPHGCSICGKAFSRKSGLTEHQRNHTGEKPYECTECDKAFRWKSQLNAHQKIHTGEKSYICSDCGKGFIKKSRLINHQRVHTGEKPHGCSLCGKAFSKRSRLTEHQRTHTGEKPYECTECDKAFRWKSQLNAHQKAHTGEKSYICRDCGKGFIQKGNLIVHQRIHTGEKPYICNECGKGFIQKGNLLIHRRTHTGEKPYVCNECGKGFSQKTCLISHQRFHTGKTPFVCTECGKSCSHKSGLINHQRIHTGEKPYTCSDCGKAFRDKSCLNRHRRTHTGERPYGCSDCGKAFSHLSCLVYHKGMLHAREKCVGSVKLENPCSESHSLSHTRDLIQDKDSVNMVTLQMPSVAAQTSLTNSAFQAESKVAIVSQPVARSSVSADSRICTE

SEQ ID NO: 748535 - protein, 109 aa, Homo sapiens [sequence omitted]

SEQ ID NO: 748536 - protein, 1017 aa, Homo sapiens
MTSRRLEESMGAVQMGLVNMFKGFQSKVLPPLSPKVVTEEEVNRMLTPSEFLKEMSLTTEQRLAKTRLMCRPQIIELLDMGETTHQKFSGIDLDQALFQPFPSEIIFQNYTPCEVYEVPLILRNNDKIPRLVKVVEESSPYFKVISPKDIGHKVAPGVPSIFRILFTPEENKDYAHTLTCVTEREKFIVPIKARGARAILDFPDKLNFSTCPVKYSTQKILLVRNIGNKNAVFHIKTCRPFSIEPAIGTLNVGESMQLEVEFEPQSVGDHSGRLIVCYDTGEKVFVSLYGAAIDMNIRLDKNSLTIEKTYISLANQRTITIHNRSNIIAHFLWKVFATQQEEDREKYRACDDLIKEEKDETDEFFEECITDPLLREHLSVLSRTFANQRRLVQGDSKLFFNNVFTVEPLEGDVWPNSSAEITVYFNPLEAKLYQQTIYCDILGREIRLPLRIKGEGMGPTIHFNFELLDIGKVFTGSAHCYEAILYNKGSIDALFNMTPPTSALGACFVFSPKEGIIEPSGVQAIQISFSSTILGNFEEEFLVNVNGSPEPVKLTIRGCVIGPTFHFNVPALHFGDVSFGFPHTLICSLNNTSLIPMTYKLRIPGDGLGHKSISYCEQHVDYKRPSWTKEEISSMKPKEFTISPDCGTIRPQGFAAIRVTLCSNTVQKYELALVVDVEGIGEEVLALLITARCVVPALHLVNTEVDFGHCFLKYPYEKTLQLANQDDLPGFYEVQPQVCEEVPTVLFSSPTPSGVISPSSTIHIPLVLETQVTGEHRSTVYISIFGSQDPPLVCHLKSAGEGPVIYVHPNQVDFGNIYVLKDSSRILNLCNQSFIPAFFQAHMAHKKSLWTIEPNEGMVPPETDVQLALTANLNDTLTFKDCVILDIENSSTYRIPVQASGTGSTIVSDKPFAPELNLGAHFSLDTHYYHFKLINKGRRIQQLFWMNDSFRPQAKLSKKGRVKKGHAHVQPQPSGSQEPRDPQSPVFHLHPASMELYPGQAIDVILEGYSATPRVRG

SEQ ID NO: 748537 - protein, 121 aa, Homo sapiens
QIVKEKLVCHAIIGAQKGKSLVMAVNITCEFVAPLIQLSTKQLIYRLEKKPNSILKPDYQPLAVKNISTLPVNLLLSTSGPFFICETDKSLLPATPEPIKLEIDEEKNLLIKFDPSYRNDL

SEQ ID NO: 748538 - protein, 1017 aa, Homo sapiens; identical to SEQ ID NO: 748536

SEQ ID NO: 748539 - protein, 1059 aa, Homo sapiens
MTSRRLEESMGAVQMGLVNMFKGFQSKVLPPLSPKVVTEEEVNRMLTPSEFLKEMSLTTEQRLAKTRLMCRPQIIELLDMGETTHQKFSGIDLDQALFQPFPSEIIFQNYTPCEVYEVPLILRNNDKLRRLKFRPDQGHTSSEVVDGFQSVFNSAFSHARCSSSCVSLQIPRLVKVVEESSPYFKVISPKDIGHKVAPGVPSIFRILFTPEENKDYAHTLTCVTEREKFIVPIKARGARAILDFPDKLNFSTCPVKYSTQKILLVRNIGNKNAVFHIKTCRPFSIEPAIGTLNVGESMQLEVEFEPQSVGDHSGRLIVCYDTGEKVFVSLYGAAIDMNIRLDKNSLTIEKTYISLANQRTITIHNRSNIIAHFLWKVFATQQEEDREKYRACDDLIKEEKDETDEFFEECITDPLLREHLSVLSRTFANQRRLVQGDSKLFFNNVFTVEPLEGDVWPNSSAEITVYFNPLEAKLYQQTIYCDILGREIRLPLRIKGEGMGPTIHFNFELLDIGKVFTGSAHCYEAILYNKGSIDALFNMTPPTSALGACFVFSPKEGIIEPSGVQAIQISFSSTILGNFEEEFLVNVNGSPEPVKLTIRGCVIGPTFHFNVPALHFGDVSFGFPHTLICSLNNTSLIPMTYKLRIPGDGLGHKSISYCEQHVDYKRPSWTKEEISSMKPKEFTISPDCGTIRPQGFAAIRVTLCSNTVQKYELALVVDVEGIGEEVLALLITARCVVPALHLVNTEVDFGHCFLKYPYEKTLQLANQDDLPGFYEVQPQVCEEVPTVLFSSPTPSGVISPSSTIHIPLVLETQVTGEHRSTVYISIFGSQDPPLVCHLKSAGEGPVIYVHPNQVDFGNIYVLKDSSRILNLCNQSFIPAFFQAHMAHKKSLWTIEPNEGMVPPETDVQLALTANLNDTLTFKDCVILDIENSSTYRIPVQASGTGSTIVSDKPFAPELNLGAHFSLDTHYYHFKLINKGRRIQQLFWMNDSFRPQAKLSKKGRVKKGHAHVQPQPSGSQEPRDPQSPVFHLHPASMELYPGQAIDVILEGYSATPRVRG

SEQ ID NO: 748540 - protein, 951 aa, Homo sapiens
MTSRRLEESMGAVQMGLVNMFKGFQSKVLPPLSPKVVTEEEVNRMLTPSEFLKEMSLTTEQRLAKTRLMCRPQIIELLDMGETTHQKFSGIDLDQALFQPFPSEIIFQNYTPCEVYEVPLILRNNDKIPRLVKVVEESSPYFKVISPKDIGHKVAPGVPSIFRILFTPEENKGPFSIEPAIGTLNVGESMQLEVEFEPQSVGDHSGRLIVCYDTGEKVFVSLYGAAIDMNIRLDKNSLTIEKTYISLANQRTITIHNRSNIIAHFLWKVFATQQEEDREKYRACDDLIKEEKDETDEFFEECITDPLLREHLSVLSRTFANQRRLVQGDSKLFFNNVFTVEPLEGDVWPNSSAEITVYFNPLEAKLYQQTIYCDILGREIRLPLRIKGEGMGPTIHFNFELLDIGKVFTGSAHCYEAILYNKGSIDALFNMTPPTSALGACFVFSPKEGIIEPSGVQAIQISFSSTILGNFEEEFLVNVNGSPEPVKLTIRGCVIGPTFHFNVPALHFGDVSFGFPHTLICSLNNTSLIPMTYKLRIPGDGLGHKSISYCEQHVDYKRPSWTKEEISSMKPKEFTISPDCGTIRPQGFAAIRVTLCSNTVQKYELALVVDVEGIGEEVLALLITARCVVPALHLVNTEVDFGHCFLKYPYEKTLQLANQDDLPGFYEVQPQVCEEVPTVLFSSPTPSGVISPSSTIHIPLVLETQVTGEHRSTVYISIFGSQDPPLVCHLKSAGEGPVIYVHPNQVDFGNIYVLKDSSRILNLCNQSFIPAFFQAHMAHKKSLWTIEPNEGMVPPETDVQLALTANLNDTLTFKDCVILDIENSSTYRIPVQASGTGSTIVSDKPFAPELNLGAHFSLDTHYYHFKLINKGRRIQQLFWMNDSFRPQAKLSKKGRVKKGHAHVQPQPSGSQEPRDPQSPVFHLHPASMELYPGQAIDVILEGYSATPRVRG

SEQ ID NO: 748541 - protein, 332 aa, Homo sapiens
MRLIFNKCVVPALHLVNTEVDFGHCFLKYPYEKTLQLANQDDLPGFYEVQPQVCEEVPTVLFSSPTPSGVISPSSTIHIPLVLETQVTGEHRSTVYISIFGSQDPPLVCHLKSAGEGPVIYVHPNQVDFGNIYVLKDSSRILNLCNQSFIPAFFQAHMAHKKSLWTIEPNEGMVPPETDVQLALTANLNDTLTFKDCVILDIENSSTYRIPVQASGTGSTIVSDKPFAPELNLGAHFSLDTHYYHFKLINKGRRIQQLFWMNDSFRPQAKLSKKGRVKKGHAHVQPQPSGSQEPRDPQSPVFHLHPASMELYPGQAIDVILEGYSATPRVRG

SEQ ID NO: 748542 - protein, 365 aa, Homo sapiens
MTSRRLEESMGAVQMGLVNMFKGFQSKVLPPLSPKVVTEEEVNRMLTPSEFLKEMSLTTEQRLAKTRLMCRPQIIELLDMGETTHQKFSGIDLDQALFQPFPSEIIFQNYTPCEVYEVPLILRNNDKIPRLVKVVEESSPYFKVISPKDIGHKVAPGVPSIFRILFTPEENKDYAHTLTCVTEREKFIVPIKARGARAILDFPDKLNFSTCPVKYSTQKILLVRNIGNKNAVFHIKTCRPFSIEPAIGTLNVGESMQLEVEFEPQSVGDHSGRLIVCYDTGEKVFVSLYGAAIDMNIRLDKNSLTIEKTYISLANQRTITIHNRSNIIAHFLWKVFATQQEEDREKYRWMAPFVPGQVWTWEYFL

SEQ ID NO: 748543 - protein, 708 aa, Homo sapiens
MTSRRLEESMGAVQMGLVNMFKGFQSKVLPPLSPKVVTEEEVNRMLTPSEFLKEMSLTTEQRLAKTRLMCRPQIIELLDMGETTHQKFSGIDLDQALFQPFPSEIIFQNYTPCEVYEVPLILRNNDKIPRLVKVVEESSPYFKVISPKDIGHKVAPGVPSIFRILFTPEENKDYAHTLTCVTEREKFIVPIKARGARAILDFPDKLNFSTCPVKYSTQKILLVRNIGNKNAVFHIKTCRPFSIEPAIGTLNVGESMQLEVEFEPQSVGDHSGRLIVCYDTGEKVFVSLYGAAIDMNIRLDKNSLTIEKTYISLANQRTITIHNRSNIIAHFLWKVFATQQEEDREKYRACDDLIKEEKDETDEFFEECITDPLLREHLSVLSRTFANQRRLVQGDSKLFFNNVFTVEPLEGDVWPNSSAEITVYFNPLEAKLYQQTIYCDILGREIRLPLRIKGEGMGPTIHFNFELLDIGKVFTGSAHCYEAILYNKGSIDALFNMTPPTSALGACFVFSPKEGIIEPSGVQAIQISFSSTILGNFEEEFLVNVNGSPEPVKLTIRGCVIGPTFHFNVPALHFGDVSFGFPHTLICSLNNTSLIPMTYKLRIPGDGLGHKSISYCEQHVDYKRPSWTKEEISSMKPKEFTISPDCGTIRPQGFAAIRVTLCSNTVQKYELALVVDVEGIGEEVLALLITARYCSPACSSPESPPSLQ

SEQ ID NO: 748544 - protein, 71 aa, Homo sapiens
  misc_feature (8)..(8): Xaa can be any naturally occurring amino acid
STLPALFXAPMGYRCEVTSMSLARILSLLAASGPTWDQVPPFQWSTSPFSGLLHMGQPDLWKFAPVKVSWD

SEQ ID NO: 748545 - protein, 171 aa, Homo sapiens
MSGRGSAPMLLPQAPPHPTPGLPLTSGPYPQRPDGGTRPQAVPPLNKSGCGPMLCFLGWQGRWGQRFFSSQVWVLRHPPCSLLCSPLSVLLSIHSSANILTHHPSAQPSTHPSVFHHPSIHLPIHLSSIHSPIQPPIQPFSHLHLSIFFLLLFFLFLFFLSGSFTPAWERE

SEQ ID NO: 748546 - protein, 495 aa, Homo sapiens
RADGVPGALRSSGRPRPRRPAQYPARPRRPASTAGSAPFPEGWMMGCFALQTVDTELTADSVEWCPLQGCRHLLACGTYQLRRPEDRPAGPQNKGGMEVKEPQVRLGRLFLYSFNDNNSIHPLVEVQRKDTSAILDMKWCHIPVAGHALLGLADASGSIQLLRLVESEKSHVLEPLSSLALEEQCLALSLDWSTGKTGRAGDQPLKIISSDSTGQLHLLMVNETRPRLQKVASWQAHQFEAWIAAFNYWHPEIVYSGGDDGLLRGWDTRVPGKFLFTSKRHTMGVCSIQSSPHREHILATGSYDEHILLWDTRNMKQPLADTPVQGGVWRIKWHPFHHHLLLAACMHSGFKILNCQKAMEERQEATVLTSHTLPDSLVYGADWSWLLFRSLQRAPSWSFPSNLGTKTADLKGASELPTPCHECREDNDGEGHARPQSGMKPLTEGMRKNGTWLQATAATTRDCGVNPEEADSAFSLLATCSFYDHALHLWEWEGN

SEQ ID NO: 748547 - protein, 107 aa, Homo sapiens
RADGVPGALRSSGRPRPRRPAQYPARPRRPASTAGSAPFPEGWMMGCFALQTVDTELTADSVEWCPLQGCRHLLACGTYQLRRPEDRPAGPQNKIYNHFLLCHTCLQ

SEQ ID NO: 748548 - protein, 366 aa, Homo sapiens
RADGVPGALRSSGRPRPRRPAQYPARPRRPASTAGSAPFPEGWMMGCFALQTVDTELTADSVEWCPLQGCRHLLACGTYQLRRPEDRPAGPQNKGGMEVKEPQVRLGRLFLYSFNDNNSIHPLVEVQRKDTSAILDMKWCHIPVAGHALLGLADASGSIQLLRLVESEKSHVLEPLSSLALEEQCLALSLDWSTGKTGRAGDQPLKIISSDSTGQLHLLMVNETRPRLQKVASWQAHQFEAWIAAFNYWHPEIVYSGGDDGLLRGWDTRVPGKFLFTSKRHTMGVCSIQSSPHREHILATGSYDEHILLWDTRNMKQPLADTPVQGGVWRIKWHPFHHHLLLAACMHSGFKILNCQKAMGCGSLRA

SEQ ID NO: 748549 - protein, 138 aa, Homo sapiens
RADGVPGALRSSGRPRPRRPAQYPARPRRPASTAGSAPFPEGWMMGCFALQTVDTELTADSVEWCPLQGCRHLLACGTYQLRRPEDRPAGPQNKGGMEVKEPQVRLGRLFLYSFNDNNSIHPLVEVQRKDTSAILDMK

SEQ ID NO: 748550 - protein, 138 aa, Homo sapiens; identical to SEQ ID NO: 748549

SEQ ID NO: 748551 - protein, 276 aa, Homo sapiens
MVNETRPRLQKVASWQAHQFEAWIAAFNYWHPEIVYSGGDDGLLRGWDTRVPGKFLFTSKRHTMGVCSIQSSPHREHILATGSYDEHILLWDTRNMKQPLADTPVQGGVWRIKWHPFHHHLLLAACMHSGFKILNCQKAMEERQEATVLTSHTLPDSLVYGADWSWLLFRSLQRAPSWSFPSNLGTKTADLKGASELPTPCHECREDNDGEGHARPQSGMKPLTEGMRKNGTWLQATAATTRDCGVNPEEADSAFSLLATCSFYDHALHLWEWEGN

SEQ ID NO: 748552 - protein, 276 aa, Homo sapiens; identical to SEQ ID NO: 748551

SEQ ID NO: 748553 - protein, 122 aa, Homo sapiens
RADGVPGALRSSGRPRPRRPAQYPARPRRPASTAGSAPFPEGWMMGCFALQTVDTELTADSVEWCPLQGCRHLLACGTYQLRRPEDRPAGPQNKVSHPGGWTCPLGLGRCQWIHTTAPPGGI

SEQ ID NO: 748554 - protein, 172 aa, Homo sapiens
MAERIDYAGQELETKCSVTNSGPLFSIMEQRPRLQKVASWQAHQFEAWIAAFNYWHPEIVYSGGDDGLLRGWDTRVPGKFLFTSKRHTMGVCSIQSSPHREHILATGSYDEHILLWDTRNMKQPLADTPVQGGVWRIKWHPFHHHLLLAACMHSGFKILNCQKAMGCGSLRA

SEQ ID NO: 748555 - protein, 158 aa, Homo sapiens
MLLEGPLWLSLNIQHLTPPRSHLCPVEALGPGLGLPGPGPYNLGTFCNPVRSCSALSPSSISTHSGSDSGHCWHQSLYFRGSDGSPFRAQVATQPCSPWLTFHLLSATAPASPGLASWTPDRLGFGHASSFPLLLCALGGSCGLFPVAVATSIKKLLT

SEQ ID NO: 748556 - protein, 235 aa, Homo sapiens
HRQSPRGASSQTVTQGSFLTDRVIQGSFLTDRVTQGSFLTDRVTQGSFLTDSHPGELPHRQSPRGASSQTESPRGASSQTVTPGSFLTDINGLTENTHFLSLVVLMLLFLHTGGDDGLLRGWDTRVPGKFLFTSKRHTMGVCSIQSSPHREHILATGSYDEHILLWDTRNMKQPLADTPVQGGVWRIKWHPFHHHLLLAACMHSGFKILNCQKAMAVEEVLLARVDVLSDCWMKD

SEQ ID NO: 748557 - protein, 495 aa, Homo sapiens; identical to SEQ ID NO: 748546

SEQ ID NO: 748558 - protein, 495 aa, Homo sapiens; identical to SEQ ID NO: 748546

SEQ ID NO: 748559 - protein, 88 aa, Homo sapiens
ARYPGYTSDSGNVGDVREDNDGEGHARPQSGMKPLTEGMRKNGTWLQATAATTRDCGVNPEEADSAFSLLATCSFYDHALHLWEWEGN

SEQ ID NO: 748560 - protein, 495 aa, Homo sapiens; identical to SEQ ID NO: 748546

SEQ ID NO: 748561 - protein, 366 aa, Homo sapiens; identical to SEQ ID NO: 748548

SEQ ID NO: 748562 - protein, 360 aa, Homo sapiens
RADGVPGALRSSGRPRPRRPAQYPARPRRPASTAGSAPFPEGWMMGCFALQTVDTELTADSVEWCPLQGCRHLLACGTYQLRRPEDRPAGPQNKGGMEVKEPQVRLGRLFLYSFNDNNSIHPLVEVQRKDTSAILDMKWCHIPVAGHALLGLADASGSIQLLRLVESEKSHVLEPLSSLALEEQCLALSLDWSTGKTGRAGDQPLKIISSDSTGQLHLLMVNETRPRLQKVASWQAHQFEAWIAAFNYWHPEIVYSGGDDGLLRGWDTRVPGKFLFTSKRHTMGVCSIQSSPHREHILATGSYDEHILLWDTRNMKQPLADTPVQGGVWRIKWHPFHHHLLLATCSFYDHALHLWEWEGN

SEQ ID NO: 748563 - protein, 371 aa, Homo sapiens
RADGVPGALRSSGRPRPRRPAQYPARPRRPASTAGSAPFPEGWMMGCFALQTVDTELTADSVEWCPLQGCRHLLACGTYQLRRPEDRPAGPQNKGGMEVKEPQVRLGRLFLYSFNDNNSIHPLVEVQRKDTSAILDMKWCHIPVAGHALLGLADASGSIQLLRLVESEKSHVLEPLSSLALEEQCLALSLDWSTGKTGRAGDQPLKIISSDSTGQLHLLMVNETRPRLQKVASWQAHQFEAWIAAFNYWHPEIVYSGGDDGLLRGWDTRVPGKFLFTSKRHTMGVCSIQSSPHREHILATGSYDEHILLWDTRNMKQPLADTPVQGGVWRIKWHPFHHHLLLAACMHSGFKILNCQKAMGEWGPVAAGPQG

SEQ ID NO: 748564 - protein, 309 aa, Homo sapiens
RADGVPGALRSSGRPRPRRPAQYPARPRRPASTAGSAPFPEGWMMGCFALQTVDTELTADSVEWCPLQGCRHLLACGTYQLRRPEDRPAGPQNKGGMEVKEPQVRLGRLFLYSFNDNNSIHPLVEVQRKDTSAILDMKWCHIPVAGHALLGLADASGSIQLLRLVESEKSHVLEPLSSLALEEQCLALSLDWSTGKTGRAGDQPLKIISSDSTGQLHLLMVNETRPRLQKVASWQAHQFEAWIAAFNYWHPEIVYSGGDDGLLRGWDTRVPGKFLFTSKRHTMACVSIARAATCMREHTPRTSRRYSTD

SEQ ID NO: 748565 - protein, 138 aa, Homo sapiens; identical to SEQ ID NO: 748549

SEQ ID NO: 748566 - protein, 138 aa, Homo sapiens; identical to SEQ ID NO: 748549

SEQ ID NO: 748567 - protein, 138 aa, Homo sapiens; identical to SEQ ID NO: 748549

SEQ ID NO: 748568 - protein, 104 aa, Homo sapiens
VCWTLVQKPPLLADTPWVCAASRAALIGSTSWPREGESPGGSRALLVSFAVPGGLLGPSSLFRCLSSWHHCSISSASASPECRYMGLVKGTLSSRDAWDRSLGD

SEQ ID NO: 748569 - protein, 1301 aa, Homo sapiens
MVNPEMYKLLNGELKQLYTAITRARVNLWIFDENREKRAPAFKYFIRRDFVQVVKTDENKDFDDSMFVKTSTPAEWIAQGDYYAKHQCWKVAAKCYQKGGAFEKEKLALAHDTALSMKSKKVSPKEKQLEYLELAKTYLECKEPTLSLKCLSYAKEFQLSAQLCERLGKIRDAAYFYKRSQCYKDAFRCFEQIQEFDLALKMYCQEELFEEAAIAVEKYEEMLKTKTLPISKLSYSASQFYLEAAAKYLSANKMKEMMAVLSKLDIEDQLVFLKSRKRLAEAADLLNREGRREEAALLMKQHGCLLEAARLTADKDFQASCLLGAARLNVARDSDIEHTKDILREALDICYQTGQLSGIAEAHFLQGVILRDFQKLRDAFFKFDTLNHSAGVVEALYEAASQCEAEPEKILGLAPGGLEILLSLVRALKRVTNNAEKEMVKSCFEFFGISQVDAKYCQIAQNDPGPILRIIFDLDLNLREKKTKDHFLIMTDQVKLALNKHLLGRLCQITRSLLGKTYRGVCMRFIVGLKCEDENCEHFHRPLRRCEAKCLVQSKMNLVAINGLLLEAKKVFPKILAEELKEIDYILSTDMYGLCKSILDVLFPKHFHQRVLSENPMACKEILKPNYKSFRFYRFALKEYIHFLFENESARNRRESTDLWLSAMQAFLLSSNYPEEFEKLLHQEEDNYNRELKALESEKDERGRGRGSRIKGIEGKFGMLAPNRDDENMDKTHLCFIRLLENCIDQFYVYRNPEDYKRLFFRFMNVLIKRCKEPLIPSIGNTVALLEFQFIHCGVVLARLWKNVILCLPKSYIALLHYWEFLFSKKDKELGDVFSIIQEYKPKDVTRAIQDFRFHLSYLAKVLCGYENVNFNVLLDAFSEIDYVVSGEAERTLVLCLVMLVNAEEILQPYCKPLLYRHFREIESRLQLMSMDCPGQVPERLLKVVKRVLVAVNVKSVAEALQDLLFERDEEYLMDCDWRWDPVHTKGSIVRGLYYEEVRLNRLLCLDPVDYFAEPECEFGQDEMDELALEDRDHVLATILSQKQRKASIQRKLRRACLVVSLCISWRRRVGTQMERVREEAREPRAGNFKKADVDRTQCDLCGVKFTRGPENYFSPSKAFEGAASEVAVLSRAELEREECQERNSESYEQHIHLEHHQRQQVAYQKYSEFFHEKVDPAIDEGKLVVQDIEQSVWIHSHVGSKEHSHMLQKVQEHIKRVSDMVEDLYRRKAWAGAEEAMTRLVNILILSVRDARDWLMKTETRLKKEGIVQEDDYENEVEDFGELRPRRRSRKCGNKVHVGL

SEQ ID NO: 748570 - protein, 1299 aa, Homo sapiens [sequence omitted]

SEQ ID NO: 748571 - protein, 112 aa, Homo sapiens
MSSQAGRDVSNPSGPGIAVCTENRWTQHTRTLSVWSGGGYTGPKWKDKPGIGFLLFGLSEICLQDRPTAQNFSCSMLTNVHCSIYDSKAWSKTGSPINANSRGPVRQTTAPQ

SEQ ID NO: 748572 - protein, 34 aa, Homo sapiens
VRVKGSTIKTNLFPSHSSSSYAIADNAYRMMCAE

SEQ ID NO: 748573 - protein, 101 aa, Homo sapiens
TNLQAHLHTHTPHVLSSLLFRWKECLCSYKVQLSTWALITSTPTSPGPSAAVTRVIAGFLMSITNMLEELPRLKRKKFSLILPLPPSNYSSSLCSAFSTIS

SEQ ID NO: 748574 - protein, 229 aa, Homo sapiens
MKLDPVLTPRKEFPVQWGGGSGEADEDERLVWSGLQQGAGMRHCENPGGKDFQFCLGTKKDEFPGGDIGMLGCEGHTESLPSGKAVARLHSRWTEQYVQGEEMGTSQIKKQRAQCGSVLGVGGGTWPLLLSRHKTLRPISDSCCHSAAPTIAGLIIAGLGSRPTFKCSKLPPFTLELDTRQPCSGPWFPHLENGDESSFLKGLLLRFLSVSIMKPGRIPSTSVCWIGEE

SEQ ID NO: 748575 - protein, 37 aa, Homo sapiens
MVSCNMVALRIHRFHMCGFNQLCTENKIASLQTRRLF

SEQ ID NO: 748576 - protein, 119 aa, Homo sapiens
GCGILKSAPCLLLGFEAFLSVLPDLQVTTMKFLAVLVLLGVSIFLVSAQNPTTAAPADTYPATGPADDEAPDAETTAAATTATTAAPTTATTAASTTARKDIPVLPKWVGDLPNGRVCP

SEQ ID NO: 748577 - protein, 100 aa, Homo sapiens
QYFIYWIEQFRLLASMGGDHGYQLAVTKAENPTTAAPADTYPATGPADDEAPDAETTAAATTATTAAPTTATTAASTTARKDIPVLPKWVGDLPNGRVCP

SEQ ID NO: 748578 - protein, 105 aa, Homo sapiens
KSPLIILSDCDMNNAVKGALMANFLTQGQVCCNGTRVFVQKEILDKFTEEVVKQTQRIKSGDPLVEDTRMGPLINRPLLVKTFQFYPNGLGISRMVECVPEMESA

SEQ ID NO: 748579 - protein, 1258 aa, Homo sapiens
MALTSINATPTQLSSSSNCLSDTNQNKQSSESAVSSTVNPVAIHKRSKVKTEPEGLRPASPLALTQGQVLDTAHVGVPFPSPQEQLADLKEDLDRDDCKQEAEVVIYETNCHWEDCTKEYDTQEQLVHHINNEHIHGEKKEFVCRWQACTREQKPFKAQYMLVVHMRRHTGEKPHKCTFEGCSKAYSRLENLKTHLRSHTGEKPYVCEHEGCNKAFSNASDRAKHQNRTHSNEKPYICKIPGCTKRYTDPSSLRKHVKTVHGPDAHVTKKQRNDVHLRTPLLKENGDSEAGTEPGGPESTEASSTSQAVEDCLHVRAIKTESSGLCQSSPGAQSSCSSEPSPLGSAPNNDSGVEMPGTGPGSLGDLTALDDTPPGADTSALAAPSAGGLQLRKHMTTMHRFEQLKKEKLKSLKDSCSWAGPTPHTRNTKLPPLPGSGSILENFSGSGGGGPAGLLPNPRLSELSASEVTMLSQLQERRDSSTSTVSSAYTVSRRSSGISPYFSSRRSSEASPLGAGRPHNASSADSYDPISTDASRRSSEASQCSGGSGLLNLTPAQQYSLRAKYAAATGGPPPTPLPGLERMSLRTRLALLDAAEGTLPAGCPRPLGPRRGSDGPTYGHGHAGAAPAFPHEAPGGGTRRASDPVRRPDALSLPRVQRFHSTHNVNPGPLPPCADRRGLRLQSHPSTDGGLARGAYSPRPPSISENVAMEAVAAGVDGAGPEADLGLPEDDLVLPDDVVQYIKAHASGALDEGTGQVYPTESTGFSDNPRLPSPGLHGQRRMVAADSNVGPSAPMLGGCQLGFGAPSSLNKNNMPVQWNEVSSGTVDSLASQVKPPPFPQGNLAVVQQKPAFGQYPGYSPQGLQASPGGLDSTQPHLQPRSGAPSQGIPRVNYMQQLRQPVAGSQCPGMTTTMSPHACYGQVHPQLSPSTISGALNQFPQSCSNMPAKPGHLGHPQQTEVAPDPTTMGNRHRELGVPNSALAGVPPPHPVQSYPQQSHHLAASMSQEGYHQVPSLLPARQPGFMEPQTGPMGVATAGFGLVQPRPPLEPSPTGRHRGVRAVQQQLAYARATGHAMAAMPSSQETAEAVPKGAMGNMGSVPPQPPPQDAGGAPDHSMLYYYGQIHMYEQDGGLENLGSCQVMRSQPPQPQACQDSIQPQPLPSPGVNQVSSTVDSQLLEAPQIDFDAIMDDGDHSSLFSGALSPSLLHSLSQNSSRLTTPRNSLTLPSIPAGISNMAVGDMSSMLTSLAEESKFLNMMT

SEQ ID NO: 748580 - protein, 1241 aa, Homo sapiens
MALTSINATPTQLSSSSNCLSDTNQNKQSSESAVSSTVNPVAIHKRSKVKTEPEGLRPASPLALTQEQLADLKEDLDRDDCKQEAEVVIYETNCHWEDCTKEYDTQEQLVHHINNEHIHGEKKEFVCRWQACTREQKPFKAQYMLVVHMRRHTGEKPHKCTFEGCSKAYSRLENLKTHLRSHTGEKPYVCEHEGCNKAFSNASDRAKHQNRTHSNEKPYICKIPGCTKRYTDPSSLRKHVKTVHGPDAHVTKKQRNDVHLRTPLLKENGDSEAGTEPGGPESTEASSTSQAVEDCLHVRAIKTESSGLCQSSPGAQSSCSSEPSPLGSAPNNDSGVEMPGTGPGSLGDLTALDDTPPGADTSALAAPSAGGLQLRKHMTTMHRFEQLKKEKLKSLKDSCSWAGPTPHTRNTKLPPLPGSGSILENFSGSGGGGPAGLLPNPRLSELSASEVTMLSQLQERRDSSTSTVSSAYTVSRRSSGISPYFSSRRSSEASPLGAGRPHNASSADSYDPISTDASRRSSEASQCSGGSGLLNLTPAQQYSLRAKYAAATGGPPPTPLPGLERMSLRTRLALLDAAEGTLPAGCPRPLGPRRGSDGPTYGHGHAGAAPAFPHEAPGGGTRRASDPVRRPDALSLPRVQRFHSTHNVNPGPLPPCADRRGLRLQSHPSTDGGLARGAYSPRPPSISENVAMEAVAAGVDGAGPEADLGLPEDDLVLPDDVVQYIKAHASGALDEGTGQVYPTESTGFSDNPRLPSPGLHGQRRMVAADSNVGPSAPMLGGCQLGFGAPSSLNKNNMPVQWNEVSSGTVDSLASQVKPPPFPQGNLAVVQQKPAFGQYPGYSPQGLQASPGGLDSTQPHLQPRSGAPSQGIPRVNYMQQLRQPVAGSQCPGMTTTMSPHACYGQVHPQLSPSTISGALNQFPQSCSNMPAKPGHLGHPQQTEVAPDPTTMGNRHRELGVPNSALAGVPPPHPVQSYPQQSHHLAASMSQEGYHQVPSLLPARQPGFMEPQTGPMGVATAGFGLVQPRPPLEPSPTGRHRGVRAVQQQLAYARATGHAMAAMPSSQETAEAVPKGAMGNMGSVPPQPPPQDAGGAPDHSMLYYYGQIHMYEQDGGLENLGSCQVMRSQPPQPQACQDSIQPQPLPSPGVNQVSSTVDSQLLEAPQIDFDAIMDDGDHSSLFSGALSPSLLHSLSQNSSRLTTPRNSLTLPSIPAGISNMAVGDMSSMLTSLAEESKFLNMMT

SEQ ID NO: 748581 - protein, 829 aa, Homo sapiens
MALTSINATPTQLSSSSNCLSDTNQNKQSSESAVSSTVNPVAIHKRSKVKTEPEGLRPASPLALTQGQVLDTAHVGVPFPSPQEQLADLKEDLDRDDCKQEAEVVIYETNCHWEDCTKEYDTQEQLVHHINNEHIHGEKKEFVCRWQACTREQKPFKAQYMLVVHMRRHTGEKPHKCTFEGCSKAYSRLENLKTHLRSHTGEKPYVCEHEGCNKAFSNASDRAKHQNRTHSNEKPYICKIPGCTKRYTDPSSLRKHVKTVHGPDAHVTKKQRNDVHLRTPLLKENGDSEAGTEPGGPESTEASSTSQAVEDCLHVRAIKTESSGLCQSSPGAQSSCSSEPSPLGSAPNNDSGVEMPGTGPGSLGDLTALDDTPPGADTSALAAPSAGGLQLRKHMTTMHRFEQLKKEKLKSLKDSCSWAGPTPHTRNTKLPPLPGSGSILENFSGSGGGGPAGLLPNPRLSELSASEVTMLSQLQERRDSSTSTVSSAYTVSRRSSGISPYFSSRRSSEASPLGAGRPHNASSADSYDPISTDASRRSSEASQCSGGSGLLNLTPAQQYSLRAKYAAATGGPPPTPLPGLERMSLRTRLALLDAAEGTLPAGCPRPLGPRRGSDGPTYGHGHAGAAPAFPHEAPGGGTRRASDPVRRPDALSLPRVQRFHSTHNVNPGPLPPCADRRGLRLQSHPSTDGGLARGAYSPRPPSISENVAMEAVAAGVDGAGPEADLGLPEDDLVLPDDVVQYIKAHASGALDEGTGQVYPTESTGFSDNPRLPSPGLHGQRRMVAADSNVGPSAPMLGGCQLGFGAPSSLNKNNMPVQWNEASATWLSGT

SEQ ID NO: 748582 - protein, 812 aa, Homo sapiens
MALTSINATPTQLSSSSNCLSDTNQNKQSSESAVSSTVNPVAIHKRSKVKTEPEGLRPASPLALTQEQLADLKEDLDRDDCKQEAEVVIYETNCHWEDCTKEYDTQEQLVHHINNEHIHGEKKEFVCRWQACTREQKPFKAQYMLVVHMRRHTGEKPHKCTFEGCSKAYSRLENLKTHLRSHTGEKPYVCEHEGCNKAFSNASDRAKHQNRTHSNEKPYICKIPGCTKRYTDPSSLRKHVKTVHGPDAHVTKKQRNDVHLRTPLLKENGDSEAGTEPGGPESTEASSTSQAVEDCLHVRAIKTESSGLCQSSPGAQSSCSSEPSPLGSAPNNDSGVEMPGTGPGSLGDLTALDDTPPGADTSALAAPSAGGLQLRKHMTTMHRFEQLKKEKLKSLKDSCSWAGPTPHTRNTKLPPLPGSGSILENFSGSGGGGPAGLLPNPRLSELSASEVTMLSQLQERRDSSTSTVSSAYTVSRRSSGISPYFSSRRSSEASPLGAGRPHNASSADSYDPISTDASRRSSEASQCSGGSGLLNLTPAQQYSLRAKYAAATGGPPPTPLPGLERMSLRTRLALLDAAEGTLPAGCPRPLGPRRGSDGPTYGHGHAGAAPAFPHEAPGGGTRRASDPVRRPDALSLPRVQRFHSTHNVNPGPLPPCADRRGLRLQSHPSTDGGLARGAYSPRPPSISENVAMEAVAAGVDGAGPEADLGLPEDDLVLPDDVVQYIKAHASGALDEGTGQVYPTESTGFSDNPRLPSPGLHGQRRMVAADSNVGPSAPMLGGCQLGFGAPSSLNKNNMPVQWNEASATWLSGT

SEQ ID NO: 748583 - protein, 71 aa, Homo sapiens
MGLTATSFQGQVLDTAHVGVPFPSPQEQLADLKEDLDRDDCKQEAEVVIYETNCHWEDCTKEYDTQEQLVH

SEQ ID NO: 748584 - protein, 91 aa, Homo sapiens
NLSQVSILSIIRMYIFWPSGNDEFSERMTLRFWDDLCLTQGCLGKGEQKQVEGAGLLNPIQPRFPAKPWDEDLRRLLPPTALRIAQKSGCW

SEQ ID NO: 748585 - protein, 403 aa, Homo sapiens
MAAFLKMSVSVNFFRPFTRFLVPFTLHRKRNNLTILQRYMSSKIPAVTYPKNESTPPSEELELDKWKTTMKSSVQEECVSTISSSKDEDPLAATREFIEMWRLLGREVPEHITEEELKTLMECVSNTAKKKYLKYLYTKEKVKKARQIKKEMKAAAREEAKNIKLLETTEEDKQKNFLFLRLWDRNMDIAMGWKGAQAMQFGQPLVFDMAYENYMKRKELQNTVSQLLESEGWNRRNVDPFHIYFCNLKIDGALHRELVKRYQEKWDKLLLTSTEKSHVDLFPKDSIIYLTADSPNVMTTFRHDKVYVIGSFVDKSMQPGTSLAKAKRLNLATECLPLDKYLQWEIGNKNLTLDQMIRILLCLKNNGNWQEALQFVPKRKHTGFLEISQHSQEFINRLKKAKT

SEQ ID NO: 748586 - protein, 403 aa, Homo sapiens; identical to SEQ ID NO: 748585

SEQ ID NO: 748587 - protein, 308 aa, Homo sapiens
IPVISFLLLGREVPEHITEEELKTLMECVSNTAKKKYLKYLYTKEKVKKARQIKKEMKAAAREEAKNIKLLETTEEDKQKNFLFLRLWDRNMDIAMGWKGAQAMQFGQPLVFDMAYENYMKRKELQNTVSQLLESEGWNRRNVDPFHIYFCNLKIDGALHRELVKRYQEKWDKLLLTSTEKSHVDLFPKDSIIYLTADSPNVMTTFRHDKVYVIGSFVDKSMQPGTSLAKAKRLNLATECLPLDKYLQWEIGNKNLTLDQMIRILLCLKNNGNWQEALQFVPKRKHTGFLEISQHSQEFINRLKKAKT

SEQ ID NO: 748588 - protein, 150 aa, Homo sapiens
LVTIVGRRYQEKWDKLLLTSTEKSHVDLFPKDSIIYLTADSPNVMTTFRHDKVYVIGSFVDKSMQPGTSLAKAKRLNLATECLPLDKYLQWEIGNKNLTLDQMIRILLCLKNNGNWQEALQFVPKRKHTGFLEISQHSQEFINRLKKAKT

SEQ ID NO: 748589 - protein, 403 aa, Homo sapiens; identical to SEQ ID NO: 748585

SEQ ID NO: 748590 - protein, 385 aa, Homo sapiens
MAAFLKMSVSVNFFRPFTRFLVPFTLHRKRNNLTILQRYMSSKIPAVTYPKNESTPPSEELELDKWSKDEDPLAATREFIEMWRLLGREVPEHITEEELKTLMECVSNTAKKKYLKYLYTKEKVKKARQIKKEMKAAAREEAKNIKLLETTEEDKQKNFLFLRLWDRNMDIAMGWKGAQAMQFGQPLVFDMAYENYMKRKELQNTVSQLLESEGWNRRNVDPFHIYFCNLKIDGALHRELVKRYQEKWDKLLLTSTEKSHVDLFPKDSIIYLTADSPNVMTTFRHDKVYVIGSFVDKSMQPGTSLAKAKRLNLATECLPLDKYLQWEIGNKNLTLDQMIRILLCLKNNGNWQEALQFVPKRKHTGFLEISQHSQEFINRLKKAKT

SEQ ID NO: 748591 - protein, 126 aa, Homo sapiens
MGLPAPSLHATSTLRPDQFSPHTNPSLSLPCLKSFPVSLWPWGRASLLCHLSRLFVCHRPLTPTSQAPNMFSCVSSSLTLAASSAWPASHLPISHSPFLPPHLLRSQLSVTSSREPRLSLPLQLGQ

SEQ ID NO: 748592 - protein, 79 aa, Homo sapiens
LPAALSGNEQEKQLTEQPPGTKTVRPHRLQGAGPTAPLPQGTRTGLFRDFAVLRTLENKIPGSCLNAERRWRDPPDESG

SEQ ID NO: 748593 - protein, 138 aa, Homo sapiens
TIGYVRGPVLSAEGFLKGCTEDPQPPAKPKPPRRSVRSGPLLPPVRLPIPRMSTSVPQGHTWTQRVKKDDEEEDPLDQLISRSGCAASHFAVQECMAQHQDWRQCQPQVQAFKDCMSEQQARRQEELQRRQEQAGAHH

SEQ ID NO: 748594 - protein, 137 aa, Homo sapiens
NYSDAWALPTRGWFLKGCTEDPQPPAKPKPPRRSVRSGPLLPPVRLPIPRMSTSVPQGHTWTQRVKKDDEEEDPLDQLISRSGCAASHFAVQECMAQHQDWRQCQPQVQAFKDCMSEQQARRQEELQRRQEQAGAHH

SEQ ID NO: 748595 - protein, 138 aa, Homo sapiens
TIGYVRGPVVIGRGSLHDPAANHLAYPESLSRGRRHFTPEETEAKRLPIPRMSTSVPQGHTWTQRVKKDDEEEDPLDQLISRSGCAASHFAVQECMAQHQDWRQCQPQVQAFKDCMSEQQARRQEELQRRQEQAGAHH

SEQ ID NO: 748596 - protein, 57 aa, Homo sapiens
MRGAVKAEGTGLDRQPTGAARTHRVRKHGQARVRSRYTPLERASLHTLHRHTSAIAT

SEQ ID NO: 748597 - protein, 96 aa, Homo sapiens
MFYRLPIPRMSTSVPQGHTWTQRVKKDDEEEDPLDQLISRSGCAASHFAVQECMAQHQDWRQCQPQVQAFKDCMSEQQARRQEELQRRQEQAGAHH

SEQ ID NO: 748598 - protein, 140 aa, Homo sapiens
MLVQKLNTNDLQSERTPFDGTMVYAQNKRQQVVLTERWAQGHPAIHFSSMHPGWADTPGVRQAMPGFHARFGDRLRSEAQGADTMLWLALSSAAAAQPSGRFFQDRKPVSTHLPLATASSSPAEEEKLIEILEQLAQTFK

SEQ ID NO: 748599 - protein, 291 aa, Homo sapiens
MSLYRSVVWFAKGLREYTKSGYESACKDFVPHDLEVQIPGRVFLVTGGNSGIGKATALEIAKRGGTVHLVCRDQAPAEDARGEIIRESGNQNIFLHIVDLSDPKQIWKFVENFKQEHKLHVLINNAGCMVNKRELTEDGLEKNFAANTLGVYILTTGLIPVLEKEHDPRVITVSSGGMLVQKLNTNDLQSERTPFDGTMVYAQNKRQQVVLTERWAQGHPAIHFSSMHPGWADTPGVRQAMPGFHARFGDRLRSEAQGADTMLWLALSSAAAAQPSGRFFQGDFLPGCEGS

SEQ ID NO: 748600 - protein, 342 aa, Homo sapiens
RGVEWRSRESFQAQSEGRAETVSWNRTPRVACARGGRRPRSLSSTERGYWRFVVDSDEVLVIHNRCISVERSLDFRIVEMKTSCSRGTAVMRPHVWRLCGRLSSRLFDYSDKQQRGTVHLVCRDQAPAEDARGEIIRESGNQNIFLHIVDLSDPKQIWKFVENFKQEHKLHVLINNAGCMVNKRELTEDGLEKNFAANTLGVYILTTGLIPVLEKEHDPRVITVSSGGMLVQKLNTNDLQSERTPFDGTMVYAQNKRQQVVLTERWAQGHPAIHFSSMHPGWADTPGVRQAMPGFHARFGDRLRSEAQGADTMLWLALSSAAAAQPSGRFFQGDFLPGCEGS

SEQ ID NO: 748601 - protein, 368 aa, Homo sapiens
MSLYRSVVWFAKGLREYTKSGYESACKDFVPHDLEVQIPGRVFLVTGGNSGIGKATALEIAKRGGTVHLVCRDQAPAEDARGEIIRESGNQNIFLHIVDLSDPKQIWKFVENFKQEHKLHVLINNAGCMVNKRELTEDGLEKNFAANTLVWHLFLSVHEALRHLSSSPGKRNIWLEGSSEGGTAPQVATCPLVGGGCGQTVPTSVLQDPLSWGFLQPPHGMLCAASGVYILTTGLIPVLEKEHDPRVITVSSGGMLVQKLNTNDLQSERTPFDGTMVYAQNKRQQVVLTERWAQGHPAIHFSSMHPGWADTPGVRQAMPGFHARFGDRLRSEAQGADTMLWLALSSAAAAQPSGRFFQGDFLPGCEGS

SEQ ID NO: 748602 - protein, 158 aa, Homo sapiens [sequence omitted]

SEQ ID NO: 748603 - protein, 272 aa, Homo sapiens
MSLYRSVVWFAKGLREYTKSGYESACKDFVPHDLEVQIPGRVFLVTGGNSGIGKATALEIAKRGGTVHLVCRDQAPAEDARGEIIRESGNQNIFLHIVDLSDPKQIWKFVENFKQEHKLHVLINNAGCMVNKRELTEDGLEKNFAANTLGVYILTTGLIPVLEKEHDPRVITVSSGGMLVQKLNTNDLQSERTPFDGTMVYAQNKGSQPHLLENAVLIRLTLPSPRCEAGDAGVPRQVRGPPALRGPGRGHHAVAGPLLCRSRTAQRPLLSR

SEQ ID NO: 748604 - protein, 136 aa, Homo sapiens
APPQTSGLQNHRRIHITVSSGGMLVQKLNTNDLQSERTPFDGTMVYAQNKRQQVVLTERWAQGHPAIHFSSMHPGWADTPGVRQAMPGFHARFGDRLRSEAQGADTMLWLALSSAAAAQPSGRFFQGDFLPGCEGS

SEQ ID NO: 748605 - protein, 159 aa, Homo sapiens
EYNVLLQATNFVVIGHNSKKHCSTGGEEWKGSQALVCKSLLPLLQITVSSGGMLVQKLNTNDLQSERTPFDGTMVYAQNKRQQVVLTERWAQGHPAIHFSSMHPGWADTPGVRQAMPGFHARFGDRLRSEAQGADTMLWLALSSAAAAQPSGRFFQVGS

SEQ ID NO: 748606 - protein, 242 aa, Homo sapiens
MNLHVKTLSLMTWRSRFLEESFWSLEETAALAKQLPLKSPSENIFLHIVDLSDPKQIWKFVENFKQEHKLHVLINNAGCMVNKRELTEDGLEKNFAANTLGVYILTTGLIPVLEKEHDPRVITVSSGGMLVQKLNTNDLQSERTPFDGTMVYAQNKRQQVVLTERWAQGHPAIHFSSMHPGWADTPGVRQAMPGFHARFGDRLRSEAQGADTMLWLALSSAAAAQPSGRFFQGDFLPGCEGS

SEQ ID NO: 748607 - protein, 297 aa, Homo sapiens
MNLHVKTLSLMTWRSRFLEESFWSLEETAALAKQLPLKSPSENIFLHIVDLSDPKQIWKFVENFKQEHKLHVLINNAGCMVNKRELTEDGLEKNFAANTLGVYILTTGLIPVLEKEHDPRVITVSSGGMLVQKLNTNDLQSERTPFDGTMVYAQNKRQQVVLTERWAQGHPAIHFSSMHPGWADTPDRNEQELRKVVGEAQTASPLPRFLEIMMHEGKCQHKDTARMIWKRVGAAVEGSRILFRIGLTNSMTSGSSPGLSAALSSSTNKGTESSSSHSTHPRVHPRRQELVSALSAD

SEQ ID NO: 748608 - protein, 132 aa, Homo sapiens
MSGRATPGGRDQGGGRAGSAVGLGVGRSRHVPVPQRRVVRQGAARVHQVRRRGGARGPGLSRGPPRRGRAGLAGTRPRLLRPLAGPTKRVQNDGCARRLATHGWAWGSRQTPAAQCPRPRLAPEGRGCGAPK

SEQ ID NO: 748609 - protein, 313 aa, Homo sapiens
MSLYRSVVWFAKGLREYTKSGYESACKDFVPHDLEVQIPGRVFLVTGGNSGIGKATALEIAKRGGTVHLVCRDQAPAEDARGEIIRESGNQNIFLHIVDLSDPKQIWKFVENFKQEHKLHVLINNAGCMVNKRELTEDGLEKNFAANTLGVYILTTGLIPVLEKEHDPRVKGLGSCSSVQGLGMRSVSWSIQITVSSGGMLVQKLNTNDLQSERTPFDGTMVYAQNKRQQVVLTERWAQGHPAIHFSSMHPGWADTPGVRQAMPGFHARFGDRLRSEAQGADTMLWLALSSAAAAQPSGRFFQGDFLPGCEGS

SEQ ID NO: 748610 - protein, 114 aa, Homo sapiens
MLVQKLNTNDLQSERTPFDGTMVYAQNKRQQVVLTERWAQGHPAIHFSSMHPGWADTPGVRQAMPGFHARFGDRLRSEAQGADTMLWLALSSAAAAQPSGRFFQGDFLPGCEGS

SEQ ID NO: 748611 - protein, 166 aa, Homo sapiens
EYNVLLQATNFVVIGHNSKKHCSTGGEEWKGSQALVCKSLLPLLQITVSSGGMLVQKLNTNDLQSERTPFDGTMVYAQNKRQQVVLTERWAQGHPAIHFSSMHPGWADTPGVRQAMPGFHARFGDRLRSEAQGADTMLWLALSSAAAAQPSGRFFQGDFLPGCEGS

SEQ ID NO: 748612 - protein, 158 aa, Homo sapiens [sequence omitted]

SEQ ID NO: 748613 - protein, 232 aa, Homo sapiens
MSLYRSVVWFAKGLREYTKSGYESACKDFVPHDLEVQIPGRVFLVTGGNSGIGKATALEIAKRGGTVHLVCRDQAPAEDARGEIIRESGNQNIFLHIVDLSDPKQIWKFVENFKQEHKLHVLINNAGCMVNKRELTEDGLEKNFAANTLGVYILTTGLIPVLEKEHDPRVITVSSGGMLVQKLNTNDLQSERTPFDGTMVYAQNKGAHIVCKAASTLRLPCRCCVPSEGGPV

SEQ ID NO: 748614 - protein, 551 aa, Homo sapiens
MVKLSLWTLPDILIIHLKRFCQVGERRNKLSTLVKFPLSGLNMAPHVAQRSTSPEAGLGPWPSWKQPDCLPTSYPLDFLYDLYAVCNHHGNLQGGHYTAYCRNSLDGQWYSYDDSTVEPLREDEVNTRGAYILFYQKRNSIPPWSASSSMRGSTSSSLSDHWLLRLGSHAGSTRGSLLSWSSAPCPSLPQVPDSPIFTNSLCNQEKGGLEPRRLVRGVKGRSISMKAPTTSRAKQGPFKTMPLRWSFGSKEKPPGASVELVEYLESRRRPRSTSQSIVSLLTGTAGEDEKSASPRSNVALPANSEDGGRAIERGPAGVPCPSAQPNHCLAPGNSDGPNTARKLKENAGQDIKLPRKFDLPLTVMPSVEHEKPARPEGQKAMNWKESFQMGSKSSPPSPYMGFSGNSKDSRRGTSELDRPLQGTLTLLRSVFRKKENRRNERAEVSPQVPPVSLVSGGLSPAMDGQAPGSPPALRIPEGLARGLGSRLERDVWSAPSSLRLPRKASRAPRGSALGMSQRTVPGEQASYGTFQRVKYHTLSLGRKKTLPESSF

SEQ ID NO: 748615 - protein, 101 aa, Homo sapiens
CVDVSISSEYLPGGGIAGSRGDNFFEELPDCFPKQLHHFTFPPAVYEGSSFSTSSPALIAGSLFFVFFLNEMYTPMPCLFSFLLTSIKNDAVSPGCSGSRL

SEQ ID NO: 748616 - protein, 106 aa, Homo sapiens
MASPLVERGRRPRGCGAASKRGEPGVSKHLLLDMPALNGGCAGLQTHLAGALWQGRGTLLQILCWLRFCIQCFSECIHSPTEIEPCALGVTVICLILNKISEKQKK

SEQ ID NO: 748617 - protein, 322 aa, Homo sapiens
MEGISNFKTPSKLSEKKKSVLCSTPTINIPASPFMQKLGFGTGVNVYLMKRSPRGLSHSPWAVKKINPICNDHYRSVYQKRLMDEAKILKSLHHPNIVGYRAFTEANDGSLCLAMEYGGEKSLNDLIEERYKASQDPFPAAIILKVALNMARGLKYLHQEKKLLHGDIKSSNVVIKGDFETIKICDVGVSLPLDENMTVTDPEACYIGTEPWKPKEAVEENGVITDKADIFAFGLTLWEMMTLSIPHINLSNDDDDEDKTFDESDFDDEAYYAALGTRPPINMEELDESYQKVIELFSVCTNEDPKDRPSAAHIVEALETDV

SEQ ID NO: 748618 - protein, 322 aa, Homo sapiens; identical to SEQ ID NO: 748617

SEQ ID NO: 748619 - protein, 322 aa, Homo sapiens; identical to SEQ ID NO: 748617

SEQ ID NO: 748620 - protein, 322 aa, Homo sapiens; identical to SEQ ID NO: 748617

SEQ ID NO: 748621 - protein, 277 aa, Homo sapiens [sequence omitted]

SEQ ID NO: 748622 - protein, 197 aa, Homo sapiens
MFNSNYKYPGLSVYAEAWLWYWGKCVPNEKYLHQEKKLLHGDIKSSNVVIKGDFETIKICDVGVSLPLDENMTVTDPEACYIGTEPWKPKEAVEENGVITDKADIFAFGLTLWEMMTLSIPHINLSNDDDDEDKTFDESDFDDEAYYAALGTRPPINMEELDESYQKVIELFSVCTNEDPKDRPSAAHIVEALETDV

SEQ ID NO: 748623 - protein, 322 aa, Homo sapiens; identical to SEQ ID NO: 748617

SEQ ID NO: 748624 - protein, 68 aa, Homo sapiens
HRVLVLSVVAELEDALELGAHSTDLLWYLCSEIEGRITRMEHRSCRITENLLGVVLTPLMSSVWVLVG

SEQ ID NO: 748625 - protein, 868 aa, Homo sapiens
MRGAASASVREPTPLPGRGAPRTKPRAGRGPTVGTPATLALPARGRPRSRNGLASKGQRGAAPTGPGHRALPSRDTALPQERNKKLEAVGTGIEPKAMSQGLVTFGDVAVDFSQEEWEWLNPIQRNLYRKVMLENYRNLASLGLCVSKPDVISSLEQGKEPWTVKRKMTRAWCPDLKAVWKIKELPLKKDFCEGKLSQAVITERLTSYNLEYSLLGEHWDYDALFETQPGLVTIKNLAVDFRQQLHPAQKNFCKNGIWENNSDLGSAGHCVAKPDLVSLLEQEKEPWMVKRELTGSLFSGQRSVHETQELFPKQDSYAEGVTDRTSNTKLDCSSFRENWDSDYVFGRKLAVGQETQFRQEPITHNKTLSKERERTYNKSGRWFYLDDSEEKVHNRDSIKNFQKSSVVIKQTGIYAGKKLFKCNECKKTFTQSSSLTVHQRIHTGEKPYKCNECGKAFSDGSSFARHQRCHTGKKPYECIECGKAFIQNTSLIRHWRYYHTGEKPFDCIDCGKAFSDHIGLNQHRRIHTGEKPYKCDVCHKSFRYGSSLTVHQRIHTGEKPYECDVCRKAFSHHASLTQHQRVHSGEKPFKCKECGKAFRQNIHLASHLRIHTGEKPFECAECGKSFSISSQLATHQRIHTGEKPYECKVCSKAFTQKAHLAQHQKTHTGEKPYECKECGKAFSQTTHLIQHQRVHTGEKPYKCMECGKAFGDNSSCTQHQRLHTGQRPYECIECGKAFKTKSSLICHRRSHTGEKPYECSVCGKAFSHRQSLSVHQRIHSGKKPYECKECRKTFIQIGHLNQHKRVHTGERSYNYKKSRKVFRQTAHLAHHQRIHTGESSTCPSLPSTSNPVDLFPKFLWNPSSLPSP

SEQ ID NO: 748626 - protein, 848 aa, Homo sapiens
MRGAASASVREPTPLPGRGAPRTKPRAGRGPTVGTPATLALPARGRPRSRNGLASKGQRGAAPTGPGHRALPSRDTALPQERNKKLEAVGTGIEPKAMSQGLVTFGDVAVDFSQEEWEWLNPIQRNLYRKVMLENYRNLASLGLCVSKPDVISSLEQGKEPWTVKRKMTRAWCPDLKAVWKIKELPLKKDFCEGKLSQAVITERLTSYNLEYSLLGEHWDYDALFETQPGLVTIKNLAVDFRQQLHPAQKNFCKNGIWENNSDLGSAGHCVAKPDLVSLLEQEKEPWMVKRELTGSLFSGQRSVHETQELFPKQDSYAEGVTDRTSNTKLDCSSFRENWDSDYVFGRKLAVGQETQFRQEPITHNKTLSKERERTYNKSGRWFYLDDSEEKVHNRDSIKNFQKSSVVIKQTGIYAGKKLFKCNECKKTFTQSSSLTVHQRIHTGEKPYKCNECGKAFSDGSSFARHQRCHTGKKPYECIECGKAFIQNTSLIRHWRYYHTGEKPFDCIDCGKAFSDHIGLNQHRRIHTGEKPYKCDVCHKSFRYGSSLTVHQRIHTGEKPYECDVCRKAFSHHASLTQHQRVHSGEKPFKCKECGKAFRQNIHLASHLRIHTGEKPFECAECGKSFSISSQLATHQRIHTGEKPYECKVCSKAFTQKAHLAQHQKTHTGEKPYECKECGKAFSQTTHLIQHQRVHTGEKPYKCMECGKAFGDNSSCTQHQRLHTGQRPYECIECGKAFKTKSSLICHRRSHTGEKPYECSVCGKAECKECRKTFIQIGHLNQHKRVHTGERSYNYKKSRKVFRQTAHLAHHQRIHTGESSTCPSLPSTSNPVDLFPKFLWNPSSLPSP

SEQ ID NO: 748627 - protein, 349 aa, Homo sapiens
MRGAASASVREPTPLPGRGAPRTKPRAGRGPTVGTPATLALPARGRPRSRNGLASKGQRGAAPTGPGHRALPSRDTALPQERNKKLEAVGTGIEPKAMSQGLVTFGDVAVDFSQEEWEWLNPIQRNLYRKVMLENYRNLASLGLCVSKPDVISSLEQGKEPWTVKRKMTRAWCPDLKAVWKIKELPLKKDFCEGKLSQAVITERLTSYNLEYSLLGEHWDYDALFETQPGLVTIKNLAVDFRQQLHPAQKNFCKNGIWENNSDLGSAGHCVAKPDLVSLLEQEKEPWMVKRELTGSLFSGECRRAWCGKSTARESGAFTKKAASSLIYSRKLYPGSLGLERKLNSGSSK

SEQ ID NO: 748628 - protein, 106 aa, Homo sapiens
MRGAASASVREPTPLPGRGAPRTKPRAGRGPTVGTPATLALPARGRPRSRNGLASKGQRGAAPTGPGHRALPSRDTALPQERNKKLEAVGTGIEPKAMSQKNFADT

SEQ ID NO: 748629 - protein, 119 aa, Homo sapiens
VAPRGRTLRLGRPPRGGSRSARETSGAPARILLRDPEGPSTSRPPAQQLSRRPWGGPHPSQTHTHWSLHGQDTVKHPPGLPVIGLEYGPSRSLLPHSPPPPTPPTPNRDAETIPPPTKT

SEQ ID NO: 748630 - protein, 119 aa, Homo sapiens
IERGEGLLQGECLTVDSFFSEYSWDGVMYSTDVFSSRARDELAPQMSVQWEKGRSCLIAPYEYCLPHVPVKDLKHQQESPLGSDGRNAFTNQDPSGSPDMFRSIPLLHQGPDRIVWQAQ

SEQ ID NO: 748631 - protein, 100 aa, Homo sapiens
RPAFLLAARCLLYPCLPLPPLFFSLPSLSDPLPLPPDPFPPPLIFPLSLRSSSSPTPPFLLSPPLLPLPLSSVSFHRLPCLPVFQSLFFSPVSLSVSLPH

SEQ ID NO: 748632 - protein, 489 aa, Homo sapiens
APAPPRSFCMTVTKMSWRPQYRSSKFRNVYGKVANREHCFDGIPITKNVHDNHFCAVNTRFLAIVTESAGGGSFLVIPLEQTGRIEPNYPKVCGHQGNVLDIKWNPFIDNIIASCSEDTSVRIWEIPEGGLKRNMTEALLELHGHSRRVGLVEWHPTTNNILFSAGYDYKVLIWNLDVGEPVKMIDCHTDVILCMSFNTDGSLLTTTCKDKKLRVIEPRSGRVLQEANCKNHRVNRVVFLGNMKRLLTTGVSRWNTRQIALWDQEDLSMPLIEEEIDGLSGLLFPFYDADTHMLYLAGKGDGNIRYYEISTEKPYLSYLMEFRSPAPQKGLGVMPKHGLDVSACEVFRFYKLVTLKGLIEPISMIVPRRSDSYQEDIYPMTPGTEPALTPDEWLGGINRDPVLMSLKEGYKKSSKMVFKAPIKEKKSVVVNGIDLLENVPPRTENELLRMFFRQQDEIRRLKEELAQKDIRIRQLQLELKNLRNSPKNC

SEQ ID NO: 748633 - protein, 475 aa, Homo sapiens
MSWRPQYRSSKFRNVYGKVANREHCFDGIPITKNVHDNHFCAVNTRFLAIVTESAGGGSFLVIPLEQTGRIEPNYPKVCGHQGNVLDIKWNPFIDNIIASCSEDTSVRIWEIPEGGLKRNMTEALLELHGHSRRVGLVEWHPTTNNILFSAGYDYKVLIWNLDVGEPVKMIDCHTDVILCMSFNTDGSLLTTTCKDKKLRVIEPRSGRVLQEANCKNHRVNRVVFLGNMKRLLTTGVSRWNTRQIALWDQEDLSMPLIEEEIDGLSGLLFPFYDADTHMLYLAGKGDGNIRYYEISTEKPYLSYLMEFRSPAPQKGLGVMPKHGLDVSACEVFRFYKLVTLKGLIEPISMIVPRRSDSYQEDIYPMTPGTEPALTPDEWLGGINRDPVLMSLKEGYKKSSKMVFKAPIKEKKSVVVNGIDLLENVPPRTENELLRMFFRQQDEIRRLKEELAQKDIRIRQLQLELKNLRNSPKNC

SEQ ID NO: 748634 - protein, 489 aa, Homo sapiens; identical to SEQ ID NO: 748632

SEQ ID NO: 748635 - protein, 489 aa, Homo sapiens; identical to SEQ ID NO: 748632

SEQ ID NO: 748636 - protein, 38 aa, Homo sapiens
MGSSVRAFPLPSLDPVLMSLKEGYKKSSKMVFKAPIKE

SEQ ID NO: 748637 - protein, 657 aa, Homo sapiens
RTSGAGAVRATSRANNCAARGTRVGKLELLRGPRGSLGGGAMVGQLSEGAIAAIMQKGDTNIKPILQVINIRPITTGNSPPRYRLLMSDGLNTLSSFMLATQLNPLVEEEQLSSNCVCQIHRFIVNTLKDGRRVVILMELEVLKSAEAVGVKIGNPVPYNEGLGQPQVAPPAPAASPAASSRPQPQNGSSGMGSTVSKAYGASKTFGKAAGPSLSHTSGGTQSKVVPIASLTPYQSKWTICARVTNKSQIRTWSNSRGEGKLFSLELVDESGEIRATAFNEQVDKFFPLIEVNKVYYFSKGTLKIANKQFTAVKNDYEMTFNNETSVMPCEDDHHLPTVQFDFTGIDDLENKSKDSLVDIIGICKSYEDATKITVRSNNREVAKRNIYLMDTSGKVVTATLWGEDADKFDGSRQPVLAIKGARVSDFGGRSLSVLSSSTIIANPDIPEAYKLRGWFDAEGQALDGVSISDLKSGGVGGSNTNWKTLYEVKSENLGQGDKPDYFSSVATVVYLRKENCMYQACPTQDCNKKVIDQQNGLYRCEKCDTEFPNFKYRMILSVNIADFQENQWVTCFQESAEAILGQNAAYLGELKDKNEQAFEEVFQNANFRSFIFRVRVKVETYNDESRIKATVMDVKPVDYREYGRRLVMSIRRSALM

SEQ ID NO: 748638 - protein, 606 aa, Homo sapiens
MRKGESQRRPRTTTYDVINIRPITTGNSPPRYRLLMSDGLNTLSSFMLATQLNPLVEEEQLSSNCVCQIHRFIVNTLKDGRRVVILMELEVLKSAEAVGVKIGNPVPYNEGLGQPQVAPPAPAASPAASSRPQPQNGSSGMGSTVSKAYGASKTFGKAAGPSLSHTSGGTQSKVVPIASLTPYQSKWTICARVTNKSQIRTWSNSRGEGKLFSLELVDESGEIRATAFNEQVDKFFPLIEVNKVYYFSKGTLKIANKQFTAVKNDYEMTFNNETSVMPCEDDHHLPTVQFDFTGIDDLENKSKDSLVDIIGICKSYEDATKITVRSNNREVAKRNIYLMDTSGKVVTATLWGEDADKFDGSRQPVLAIKGARVSDFGGRSLSVLSSSTIIANPDIPEAYKLRGWFDAEGQALDGVSISDLKSGGVGGSNTNWKTLYEVKSENLGQGDKPDYFSSVATVVYLRKENCMYQACPTQDCNKKVIDQQNGLYRCEKCDTEFPNFKYRMILSVNIADFQENQWVTCFQESAEAILGQNAAYLGELKDKNEQAFEEVFQNANFRSFIFRVRVKVETYNDESRIKATVMDVKPVDYREYGRRLVMSIRRSALM

SEQ ID NO: 748639 - protein, 657 aa, Homo sapiens; identical to SEQ ID NO: 748637

SEQ ID NO: 748640 - protein, 657 aa, Homo sapiens; identical to SEQ ID NO: 748637

SEQ ID NO: 748641 - protein, 445 aa, Homo sapiens
MQLGGEKFIQSKVVPIASLTPYQSKWTICARVTNKSQIRTWSNSRGEGKLFSLELVDESGEIRATAFNEQVDKFFPLIEVNKVYYFSKGTLKIANKQFTAVKNDYEMTFNNETSVMPCEDDHHLPTVQFDFTGIDDLENKSKDSLVDIIGICKSYEDATKITVRSNNREVAKRNIYLMDTSGKVVTATLWGEDADKFDGSRQPVLAIKGARVSDFGGRSLSVLSSSTIIANPDIPEAYKLRGWFDAEGQALDGVSISDLKSGGVGGSNTNWKTLYEVKSENLGQGDKPDYFSSVATVVYLRKENCMYQACPTQDCNKKVIDQQNGLYRCEKCDTEFPNFKYRMILSVNIADFQENQWVTCFQESAEAILGQNAAYLGELKDKNEQAFEEVFQNANFRSFIFRVRVKVETYNDESRIKATVMDVKPVDYREYGRRLVMSIRRSALM

SEQ ID NO: 748642 - protein, 657 aa, Homo sapiens; identical to SEQ ID NO: 748637

SEQ ID NO: 748643 - protein, 613 aa, Homo sapiens
RTSGAGAVRATSRANNCAARGTRVGKLELLRGPRGSLGGGAMVGQLSEGAIAAIMQKGDTNIKPILQVINIRPITTGNSPPRYRLLMSDGLNTLSSFMLATQLNPLVEEEQLSSNCVCQIHRFIVNTLKDGRRVVILMELEVLKSAEAVGVKIGNPVPYNEGLGQPQVAPPAPAASPAASSRPQPQNGSSGMGSTVSKAYGASKTFGKAAGPSLSHTSGGTQSKVVPIASLTPYQSKWTICARVTNKSQIRTWSNSRGEGKLFSLELVDESGEIRATAFNEQVDKFFPLIEVNKVYYFSKGTLKIANKQFTAVKNDYEMTFNNETSVMPCEDDHHLPTVQFDFTGIDDLENKSKDSLVDIIGICKSYEDATKITVRSNNREVAKRNIYLMDTSGKVVTATLWGEDADKFDGSRQPVLAIKGARVSDFGGRSLSVLSSSTIIANPDIPEAYKLRGWFDAEGQALDGVSISDLKSGGVGGSNTNWKTLYEVKSENLGQGDKPDYFSSVATVVYLRKENCMYQACPTQDCNKKVIDQQNGLYRCEKCDTEFPNFKYRMILSVNIADFQENQWVTCFQESAEAILGQNAAYLGELKDKIFHIQSQGQSGDLQRRVSN

SEQ ID NO: 748644 - protein, 281 aa, Homo sapiens
MTIPTSYPTNIYLMDTSGKVVTATLWGEDADKFDGSRQPVLAIKGARVSDFGGRSLSVLSSSTIIANPDIPEAYKLRGWFDAEGQALDGVSISDLKSGGVGGSNTNWKTLYEVKSENLGQGDKPDYFSSVATVVYLRKENCMYQACPTQDCNKKVIDQQNGLYRCEKCDTEFPNFKYRMILSVNIADFQENQWVTCFQESAEAILGQNAAYLGELKDKNEQAFEEVFQNANFRSFIFRVRVKVETYNDESRIKATVMDVKPVDYREYGRRLVMSIRRSALM

SEQ ID NO: 748645 - protein, 98 aa, Homo sapiens
  misc_feature (6)..(6): Xaa can be any naturally occurring amino acid
GMQGIXTSMWVTCFQESAEAILGQNAAYLGELKDKNEQAFEEVFQNANFRSFIFRVRVKVETYNDESRIKATVMDVKPVDYREYGRRLVMSIRRSALM

SEQ ID NO: 748646 - protein, 657 aa, Homo sapiens; identical to SEQ ID NO: 748637

SEQ ID NO: 748647 - protein, 186 aa, Homo sapiens
RTSGAGAVRATSRANNCAARGTRVGKLELLRGPRGSLGGGAMVGQLSEGAIAAIMQKGDTNIKPILQVINIRPITTGNSPPRYRLLMSDGLNTLSSFMLATQLNPLVEEEQLSSNCVCQIHRFIVNTLKDGRRVVILMELEVLKSAEAVGVKIGNPVPYNEEAEKKVITSDNSRERQKESSNHWPH

SEQ ID NO: 748648 - protein, 227 aa, Homo sapiens
MSHTEVKLKIPFGNKLLDAVCLVPNKSLTYGIILTHGASGDMNLPHLMSLASHLASHGFFCLRFTCKGLNIVHRIKAYKSVLNYLKTSGEYKLAGVFLGGRSMGSRAAASVMCHIEPDDGDDFVRGLICISYPLHHPKQQHKLRDEDLFRLKEPVLFVSGSADEMCEKNLLEKVAQKMQAPHKIHWIEKANHSMAVKGRSTNDVFKEINTQILFWIQEITEMDKKCH

SEQ ID NO: 748649 - protein, 265 aa, Homo sapiens
PARACVVAERCGGAGEAVASSALVSSLKGVTAVGCPRPLLPSRVKLKIPFGNKLLDAVCLVPNKSLTYGIILTHGASGDMNLPHLMSLASHLASHGFFCLRFTCKGLNIVHRIKAYKSVLNYLKTSGEYKLAGVFLGGRSMGSRAAASVMCHIEPDDGDDFVRGLICISYPLHHPKQQHKLRDEDLFRLKEPVLFVSGSADEMCEKNLLEKVAQKMQAPHKIHWIEKANHSMAVKGRSTNDVFKEINTQILFWIQEITEMDKKCH

SEQ ID NO: 748650 - protein, 151 aa, Homo sapiens
PARACVVAERCGGAGEAVASSALVSSLKGVTAVGCPRPLLPSRVKLKIPFGNKLLDAVCLVPNKSLTYGIILTHGASGDMNLPHLMSLASHLASHGFFCLRFTCKGLNIVHRIKAYKSVLNYLKTSGEYKLAGVFLGELVGESGTENASSP

SEQ ID NO: 748651 - protein, 227 aa, Homo sapiens; identical to SEQ ID NO: 748648

SEQ ID NO: 748652 - protein, 227 aa, Homo sapiens; identical to SEQ ID NO: 748648

SEQ ID NO: 748653 - protein, 227 aa, Homo sapiens; identical to SEQ ID NO: 748648

SEQ ID NO: 748654 - protein, 227 aa, Homo sapiens; identical to SEQ ID NO: 748648

SEQ ID NO: 748655 - protein, 227 aa, Homo sapiens; identical to SEQ ID NO: 748648

SEQ ID NO: 748656 - protein, 113 aa, Homo sapiens
MSHTEVKLKIPFGNKLLDAVCLVPNKSLTYGIILTHGASGDMNLPHLMSLASHLASHGFFCLRFTCKGLNIVHRIKAYKSVLNYLKTSGEYKLAGVFLGELVGESGTENASSP

SEQ ID NO: 748657 - protein, 210 aa, Homo sapiens
MSHTEVKLKIPFGNKLLDAVCLVPNKSLTYGIILTHGASGDMNLPHLMSLASHLASHGFFCLRFTCKGLNIVHRIKAYKSVLNYLKTSGEYKLAGVFLGGRSMGSRAAASVMCHIEPDDGDDFVRGLICISYPLHHPKQQHKLRDEDLFRLKEPVLFVSGSADEMCEKWIEKANHSMAVKGRSTNDVFKEINTQILFWIQEITEMDKKCH

SEQ ID NO: 748658 - protein, 113 aa, Homo sapiens; identical to SEQ ID NO: 748656

SEQ ID NO: 748659 - protein, 113 aa, Homo sapiens; identical to SEQ ID NO: 748656

SEQ ID NO: 748660 - protein, 46 aa, Homo sapiens
MGSDTTEHVHGAWGLGQQQSDTETPAGTEFIVPGEVCYSKCTSQFC

SEQ ID NO: 748661 - protein, 166 aa, Homo sapiens
PKAYPSFIKGPAPRSQYKNTKSPISLITIKKPKSGKLRGQGKRPLGQGHRGALLMAPGLAAGSPGIAVATRLGGSDCPVGTTVLLGRGPSLLLGCAQLLHAPDLVQQTRNEGLCGFVTVNQQLLDRGSPGIVTLHVQELIHVNLQFWDLLFLAVVEARELLQDPLL

SEQ ID NO: 748662 - protein, 72 aa, Homo sapiens
LTSSGEFREGFPAEVVFKWRPKSIEGMHKKERNKDKMEREDKKREKRKKSKRKTHTGQAQWLTPVILALWEA

SEQ ID NO: 748663 - protein, 76 aa, Homo sapiens
TKASEVLIVHLQECAHRASRRWFSLLSPFALIEKATHSYTLGRRRKLATRWGKHVCHSNAGLPGLVTHLAHFPGCP

SEQ ID NO: 748664 - protein, 286 aa, Homo sapiens
ITLFNIVYTSLPVLAMGIFDQDVSDQNSVDCPQLYKPGQLNLLFNKRKFFICVLHGIYTSLVLFFIPYGAFYNVAGEDGQHIADYQSFAVTMATSLVIVVSVQIALDTSYWTFINHVFIWGSIAIYFSILFTMHSNGIFGIFPNQFPFVGNARHSLTQKCIWLVILLTTVASVMPVVAFRFLKVDLYPTLSDQIRRWQKAQKKARPPSSRRPRTRRSSSRRSGYAFAHQEGYGELITSGKNMRAKNPPPTSGLEKTHYNSTSWIENLCKKTTDTVSSFSQDKTVKL

SEQ ID NO: 748665 - protein, 154 aa, Homo sapiens [sequence omitted]

SEQ ID NO: 748666 - protein, 154 aa, Homo sapiens [sequence omitted]

SEQ ID NO: 748667 - protein, 154 aa, Homo sapiens [sequence omitted]

SEQ ID NO: 748668 - protein, 108 aa, Homo sapiens
ITLFNIVYTSLPVLAMGIFDQDVSDQNSVDCPQLYKPGQLNLLFNKRKFFICVLHGIYTSLVLFFIPYGAFYNVAGEDGQHIADYQSFAVTMATSLVIVVSVQVTLSV

SEQ ID NO: 748669 - protein, 312 aa, Homo sapiens
KVRKRKVTTYINHHDKINGKRKTARKQKMFQRAQELRRRAEDYHKCKIPPSARKALCNWVRMAAAEHRHSSGLPYWPYLTAETLKNRMGHQPPPPTQQHSITDNSLSLKTPPECLLTPLPPSADDNLKTPPECVLTPLPPSADDNLKTPPECVLTPLPPSADDNLKTPPECLLTPLPPSADDNLKTPPECLLTPLPPSALPSAPPSADDNLKTRAECLLHPLPPSADDNLKTPSERQLTPLPPSAPPSADDNIKTPAERLRGPLPPSADDNLKTPSERQLTPLPPSAPPSADDNIKTPAERLRGPLPPSADD

SEQ ID NO: 748670 - protein, 128 aa, Homo sapiens
ASYVPEIIELIGNRKKYGGSYSAVSGRKHIVVCGHITLESVSNFLKDFLHKDRDDVNVEIVFLHNISPNLELEALFKRHFTQVEFYQGSVLNPHDLARVKIESADACLILANKYCADPDAEDASNIMR

SEQ ID NO: 748671 - protein, 342 aa, Homo sapiens [sequence omitted]

SEQ ID NO: 748672 - protein, 126 aa, Homo sapiens [sequence omitted]

SEQ ID NO: 748673 - protein, 223 aa, Homo sapiens
MAAEEEDEVEWVVESIAGFLRGPDWSIPILDFVEQKCEVFDDEEESKLTYTEIHQEYKELVEKLLEGYLKEIGINEDQFQEACTSPLAKTHTSQAILQPVLAAEDFTIFKAMMVQKNIEMQLQAIRIIQERNGVLPDCLTDGSDVVSDLEHEEMKILREVLRKSKEEYDQEEERKRKKQVPTEHITEVFYCCYLLLSLHLDLTIKIYTYVELHNFKYNVNIDQ

SEQ ID NO: 748674 - protein, 140 aa, Homo sapiens
MAAEEEDEVEWVVESIAGFLRGPDWSIPILDFVEQKCEVFDDEEESKLTYTEIHQEYKELVEKLLEGYLKEIGINEDQFQEACTSPLAKTHTSQAILQPVLAAEDFTIFKAMMVQKNIEMQLQAIRIIQERNGKMLKLEI

SEQ ID NO: 748675 - protein, 106 aa, Homo sapiens
MAAEEEDEVEWVVESIAGFLRGPDWSIPILDFVEQKCEVFDDEEESKLTYTEIHQEYKELVEKLLEGYLKEIGINEDQFQEACTSPLAKTHTSQVFALCYSANIQF

SEQ ID NO: 748676 - protein, 189 aa, Homo sapiens
MKILREVLRKSKEEYDQEEERKRKKQLSEAKTEEPTVHSSEAAIMNNSQGDGEHFAHPPSEVKMHFANQSIEPLGRKVERSETSSLPQKGLKIPGLEHASIEGPIANLSVLGTEELRQREHYLKQKRDKLMSMRKDMRTKQIQNMEQKGKPTGEVEEMTEKPEMTAEEKQTLLKRRLLAEKLKEEVINK

SEQ ID NO: 748677 - protein, 299 aa, Homo sapiens
MAAEEEDEVEWVVESIAGFLRGPDWSIPILDFVEQKCEVFDDEEESKLTYTEIHQEYKELVEKLLEGYLKEIGINEDQFQEACTSPLAKTHTSQAILQPVLAAEDFTIFKAMMVQKNIEMQLQAIRIIQERNGVLPDCLTDGSDVVSDLEHEEMKILREVLRKSKEEYDQEEERKRKKQLSEAKTEEPTVHSSEAAIMNNSQGDGEHFAHPPSEVKMHFANQSIEPLGRKVERSETSSLPQKGLKIPGLEHASIEGPIAVSKRHHLRTISKMTRYWEIKLRIESLSGHLCYLLNGFEFR

SEQ ID NO: 748678 - protein, 114 aa, Homo sapiens
LEDPVHRTSSLPQKGLKIPGLEHASIEGPIANLSVLGTEELRQREHYLKQKRDKLMSMRKDMRTKQIQNMEQKGKPTGEVEEMTEKPEMTAEEKQTLLKRRLLAEKLKEEVINK

SEQ ID NO: 748679 - protein, 223 aa, Homo sapiens; identical to SEQ ID NO: 748673

SEQ ID NO: 748680 - protein, 169 aa, Homo sapiens
MAAEEEDEVEWVVESIAGFLRGPDWSIPILDFVEQKCEVFDDEEESKLTYTEIHQEYKELVEKLLEGYLKEIGINEDQFQEACTSPLAKTHTSQAILQPVLAAEDFTIFKAMMVQKNIEMQLQAIRIIQERNGVLPDCLTDGSDVVSDLEHEEMKILREVLRYHSLIVF

SEQ ID NO: 748681 - protein, 379 aa, Homo sapiens
TSKAGLMDEGGRCGRRFDSRAVRPSSHKAPAAIAPCTPAVTAAVQPLPRGLRGGSHTPRPVYALCTCLPENMLQTPESRGLPVPQAEGEKDGGHDGETRAPTASQERPKEELGAGREEGAAEPALTRKGARALAAKSLARRRAYRRLNRTVAELVQFLLVKDKKKSPITRSEMVKYVIGDLKILFPDIIARAAEHLRYVFGFELKQFDRKHHTYILINKLKPLEEEEEEEDLGGDGPRLGLLMMILGLIYMRGNSAREAQVWEMLRRLGVQPSKYHFLFGYPKRLIMEDFVQQRYLSYRRVPHTNPPEYEFSWGPRSNLEISKMEVLGFVAKLHKKEPQHWPVQYREALADEADRARAKARAEASMRARASARAGIHLW

SEQ ID NO: 748682 - protein, 389 aa, Homo sapiens
GSGPSRGRGLRLRAAGSGCWRRCGRRFDSRAVRPSSHKAPAAIAPCTPAVTAAVQPLPRGLRGGSHTPRPVYALCTCLPENMLQTPESRGLPVPQAEGEKDGGHDGETRAPTASQERPKEELGAGREEGAAEPALTRKGARALAAKSLARRRAYRRLNRTVAELVQFLLVKDKKKSPITRSEMVKYVIGDLKILFPDIIARAAEHLRYVFGFELKQFDRKHHTYILINKLKPLEEEEEEEDLGGDGPRLGLLMMILGLIYMRGNSAREAQVWEMLRRLGVQPSKYHFLFGYPKRLIMEDFVQQRYLSYRRVPHTNPPEYEFSWGPRSNLEISKMEVLGFVAKLHKKEPQHWPVQYREALADEADRARAKARAEASMRARASARAGIHLW

SEQ ID NO: 748683 - protein, 389 aa, Homo sapiens; identical to SEQ ID NO: 748682

SEQ ID NO: 748684 - protein, 357 aa, Homo sapiens
DWLGRGWVAAIAPCTPAVTAAVQPLPRGLRGGSHTPRPVYALCTCLPENMLQTPESRGLPVPQAEGEKDGGHDGETRAPTASQERPKEELGAGREEGAAEPALTRKGARALAAKSLARRRAYRRLNRTVAELVQFLLVKDKKKSPITRSEMVKYVIGDLKILFPDIIARAAEHLRYVFGFELKQFDRKHHTYILINKLKPLEEEEEEEDLGGDGPRLGLLMMILGLIYMRGNSAREAQVWEMLRRLGVQPSKYHFLFGYPKRLIMEDFVQQRYLSYRRVPHTNPPEYEFSWGPRSNLEISKMEVLGFVAKLHKKEPQHWPVQYREALADEADRARAKARAEASMRARASARAGIHLW

SEQ ID NO: 748685 - protein, 363 aa, Homo sapiens
NKLKYEAGCSIESEGAIAPCTPAVTAAVQPLPRGLRGGSHTPRPVYALCTCLPENMLQTPESRGLPVPQAEGEKDGGHDGETRAPTASQERPKEELGAGREEGAAEPALTRKGARALAAKSLARRRAYRRLNRTVAELVQFLLVKDKKKSPITRSEMVKYVIGDLKILFPDIIARAAEHLRYVFGFELKQFDRKHHTYILINKLKPLEEEEEEEDLGGDGPRLGLLMMILGLIYMRGNSAREAQVWEMLRRLGVQPSKYHFLFGYPKRLIMEDFVQQRYLSYRRVPHTNPPEYEFSWGPRSNLEISKMEVLGFVAKLHKKEPQHWPVQYREALADEADRARAKARAEASMRARASARAGIHLW

SEQ ID NO: 748686 - protein, 207 aa, Homo sapiens
MVKYVIGDLKILFPDIIARAAEHLRYVFGFELKQFDRKHHTYILINKLKPLEEEEEEEDLGGDGPRLGLLMMILGLIYMRGNSAREAQVWEMLRRLGVQPSKYHFLFGYPKRLIMEDFVQQRYLSYRRVPHTNPPEYEFSWGPRSNLEISKMEVLGFVAKLHKKEPQHWPVQYREALADEADRARAKARAEASMRARASARAGIHLW

SEQ ID NO: 748687 - protein, 290 aa, Homo sapiens
GSGPSRGRGLRLRAAGSGCWRRCGRRFDSRAVRPSSHKAPAAIAPCTPAVTAAVQPLPRGLRGGSHTPRPVYALCTCLPENMLQTPESRGLPVPQAEGEKDGGHDGETRAPTASQERPKEELGAGREEGAAEPALTRKGARALAAKSLARRRAYRRLNRTVAELVQFLLVKDKKKSPITRSEMVKYVIGDLKILFPDIIARAAEHLRYVFGFELKQFDRKHHTYILINKLKPLEEEEEEEDLGGDAASVGGATLKVSFPLWVSEEAYYGRFCAAAISQLQAGASHQSTRI

SEQ ID NO: 748688 - protein, 227 aa, Homo sapiens
LFPDIIFKSPITYFTISERVMVKYVIGDLKILFPDIIARAAEHLRYVFGFELKQFDRKHHTYILINKLKPLEEEEEEEDLGGDGPRLGLLMMILGLIYMRGNSAREAQVWEMLRRLGVQPSKYHFLFGYPKRLIMEDFVQQRYLSYRRVPHTNPPEYEFSWGPRSNLEISKMEVLGFVAKLHKKEPQHWPVQYREALADEADRARAKARAEASMRARASARAGIHLW

SEQ ID NO: 748689 - protein, 174 aa, Homo sapiens
  misc_feature (14)..(14): Xaa can be any naturally occurring amino acid
RTFKAEMLIGLVCXAGGMAEGELSQVGGDLVEGWVILIMVEMYLSSGQHLRFGNSKAEMLRRLGVQPSKYHFLFGYPKRLIMEDFVQQRYLSYRRVPHTNPPEYEFSWGPRSNLEISKMEVLGFVAKLHKKEPQHWPVQYREALADEADRARAKARAEASMRARASARAGIHLW

SEQ ID NO: 748690 - protein, 641 aa, Homo sapiens
MWKSWKLRTDVRVREGAGGSPCASSQPGSRGPCFLPGLSSQEVSRRRQFLREHAAPFSAFLTDSFGRQHSYLRISLTEKCNLRCQYCMPEEGVPLTPKANLLTTEEILTLARLFVKEGIDKIRLTGGEPLIRPDVVDIVAQLQRLEGLRTIGVTTNGINLARLLPQLQKAGLSAINISLDTLVPAKFEFIVRRKGFHKVMEGIHKAIELGYNPVKVNCVVMRGLNEDELLDFAALTEGLPLDVRFIEYMPFDGNKWNFKKMVSYKEMLDTVRQQWPELEKVPEEESSTAKAFKIPGFQGQISFITSMSEHFCGTCNRLRITADGNLKVCLFGNSEVSLRDHLRAGASEQELLRIIGAAVGRKKRQHAGMFSISQMKNRPMILIGGGPIKLFLMFPNSPPANPSIFSWDPLHVQGLRPRMSFSSQVATLWKGCRVPQTPPLAQQRLGSGSFQRHYTSRADSDANSKCLSPGSWASAAPSGPQLTSEQLTHVDSEGRAAMVDVGRKPDTERVAVASAVVLLGPVAFKLVQQNQLKKGDALVVAQLAGVQAAKVTSQLIPLCHHVALSHIQVQLELDSTRHAVKIQASCRARGPTGVEMEALTSAAVAALTLYDMCKAVSRDIVLEEIKLISKTGGQRGDFHRA

SEQ ID NO: 748691 - protein, 672 aa, Homo sapiens
APPRPCWDDPGGECPASVLPKRAAVPLVSGFMAARPLSRMLRRLLRSSARSCSSGAPVTQPCPGESARAASEEVSRRRQFLREHAAPFSAFLTDSFGRQHSYLRISLTEKCNLRCQYCMPEEGVPLTPKANLLTTEEILTLARLFVKEGIDKIRLTGGEPLIRPDVVDIVAQLQRLEGLRTIGVTTNGINLARLLPQLQKAGLSAINISLDTLVPAKFEFIVRRKGFHKVMEGIHKAIELGYNPVKVNCVVMRGLNEDELLDFAALTEGLPLDVRFIEYMPFDGNKWNFKKMVSYKEMLDTVRQQWPELEKVPEEESSTAKAFKIPGFQGQISFITSMSEHFCGTCNRLRITADGNLKVCLFGNSEVSLRDHLRAGASEQELLRIIGAAVGRKKRQHAGMFSISQMKNRPMILIGGGPIKLFLMFPNSPPANPSIFSWDPLHVQGLRPRMSFSSQVATLWKGCRVPQTPPLAQQRLGSGSFQRHYTSRADSDANSKCLSPGSWASAAPSGPQLTSEQLTHVDSEGRAAMVDVGRKPDTERVAVASAVVLLGPVAFKLVQQNQLKKGDALVVAQLAGVQAAKVTSQLIPLCHHVALSHIQVQLELDSTRHAVKIQASCRARGPTGVEMEALTSAAVAALTLYDMCKAVSRDIVLEEIKLISKTGGQRGDFHRA

SEQ ID NO: 748692 - protein, 672 aa, Homo sapiens; identical to SEQ ID NO: 748691

SEQ ID NO: 748693 - protein, 651 aa, Homo sapiens
APPRPCWDDPGGECPASVLPKRAAVPLVSGFMAARPLSRMLRRLLRSSARSCSSGAPVTQPCPGESARAASEEVSRRRQFLREHAAPFSAFLTDSFGRQHSYLRISLTEKCNLRCQYCMPEEGVPLTPKANLLTTEEILTLARLFVKEGIDKIRLTGGEPLIRPDVVDIVAQLQRLEGLRTIGVTTNGINLARLLPQLQKAGLSAINISLDTLVPAKFEFIVRRKGFHKVMEGIHKAIELGYNPVKVNCVVMRGLNEDELLDFAALTEGLPLDVRFIEYMPFDGNKWNFKKMVSYKEMLDTVRQQWPELEKVPEEESSTAKAFKIPGFQGQISFITSMSEHFCGTCNRLRITADGNLKVCLFGNSEVSLRDHLRAGASEQELLRIIGAAVGRKKRQHAELFLMFPNSPPANPSIFSWDPLHVQGLRPRMSFSSQVATLWKGCRVPQTPPLAQQRLGSGSFQRHYTSRADSDANSKCLSPGSWASAAPSGPQLTSEQLTHVDSEGRAAMVDVGRKPDTERVAVASAVVLLGPVAFKLVQQNQLKKGDALVVAQLAGVQAAKVTSQLIPLCHHVALSHIQVQLELDSTRHAVKIQASCRARGPTGVEMEALTSAAVAALTLYDMCKAVSRDIVLEEIKLISKTGGQRGDFHRA

SEQ ID NO: 748694 - protein, 554 aa, Homo sapiens
MPEEGVPLTPKANLLTTEEILTLARLFVKEGIDKIRLTGGEPLIRPDVVDIVAQLQRLEGLRTIGVTTNGINLARLLPQLQKAGLSAINISLDTLVPAKFEFIVRRKGFHKVMEGIHKAIELGYNPVKVNCVVMRGLNEDELLDFAALTEGLPLDVRFIEYMPFDGNKWNFKKMVSYKEMLDTVRQQWPELEKVPEEESSTAKAFKIPGFQGQISFITSMSEHFCGTCNRLRITADGNLKVCLFGNSEVSLRDHLRAGASEQELLRIIGAAVGRKKRQHAGMFSISQMKNRPMILIGGGPIKLFLMFPNSPPANPSIFSWDPLHVQGLRPRMSFSSQVATLWKGCRVPQTPPLAQQRLGSGSFQRHYTSRADSDANSKCLSPGSWASAAPSGPQLTSEQLTHVDSEGRAAMVDVGRKPDTERVAVASAVVLLGPVAFKLVQQNQLKKGDALVVAQLAGVQAAKVTSQLIPLCHHVALSHIQVQLELDSTRHAVKIQASCRARGPTGVEMEALTSAAVAALTLYDMCKAVSRDIVLEEIKLISKTGGQRGDFHRA

SEQ ID NO: 748695 - protein, 615 aa, Homo sapiens
MGEGTETCLEETQGEEVSRRRQFLREHAAPFSAFLTDSFGRQHSYLRISLTEKCNLRCQYCMPEEGVPLTPKANLLTTEEILTLARLFVKEGIDKIRLTGGEPLIRPDVVDIVAQLQRLEGLRTIGVTTNGINLARLLPQLQKAGLSAINISLDTLVPAKFEFIVRRKGFHKVMEGIHKAIELGYNPVKVNCVVMRGLNEDELLDFAALTEGLPLDVRFIEYMPFDGNKWNFKKMVSYKEMLDTVRQQWPELEKVPEEESSTAKAFKIPGFQGQISFITSMSEHFCGTCNRLRITADGNLKVCLFGNSEVSLRDHLRAGASEQELLRIIGAAVGRKKRQHAGMFSISQMKNRPMILIGGGPIKLFLMFPNSPPANPSIFSWDPLHVQGLRPRMSFSSQVATLWKGCRVPQTPPLAQQRLGSGSFQRHYTSRADSDANSKCLSPGSWASAAPSGPQLTSEQLTHVDSEGRAAMVDVGRKPDTERVAVASAVVLLGPVAFKLVQQNQLKKGDALVVAQLAGVQAAKVTSQLIPLCHHVALSHIQVQLELDSTRHAVKIQASCRARGPTGVEMEALTSAAVAALTLYDMCKAVSRDIVLEEIKLISKTGGQRGDFHRA

SEQ ID NO: 748696 - protein, 223 aa, Homo sapiens
MSFSSQVATLWKGCRVPQTPPLAQQRLGSGSFQRHYTSRADSDANSKCLSPGSWASAAPSGPQLTSEQLTHVDSEGRAAMVDVGRKPDTERVAVASAVVLLGPVAFKLVQQNQLKKGDALVVAQLAGVQAAKVTSQLIPLCHHVALSHIQVQLELDSTRHAVKIQASCRARGPTGVEMEALTSAAVAALTLYDMCKAVSRDIVLEEIKLISKTGGQRGDFHRA

SEQ ID NO: 748697 - protein, 402 aa, Homo sapiens
APPRPCWDDPGGECPASVLPKRAAVPLVSGFMAARPLSRMLRRLLRSSARSCSSGAPVTQPCPGESARAASEEVSRRRQFLREHAAPFSAFLTDSFGRQHSYLRISLTEKCNLRCQYCMPEEGVPLTPKANLLTTEEILTLARLFVKEGIDKIRLTGGEPLIRPDVVDIVAQLQRLEGLRTIGVTTNGINLARLLPQLQKAGLSAINISLDTLVPAKFEFIVRRKGFHKVMEGIHKAIELGYNPVKVNCVVMRGLNEDELLDFAALTEGLPLDVRFIEYMPFDGNKWNFKKMVSYKEMLDTVRQQWPELEKVPEEESSTAKAFKIPGFQGQISFITSMSEHFCGTCNRLRITADGNLKVCLFGNSEVSLRDHLRAGASEQELLTSSLLLPKSVSHQTCSLSA

SEQ ID NO: 748698 - protein, 323 aa, Homo sapiens
APPRPCWDDPGGECPASVLPKRAAVPLVSGFMAARPLSRMLRRLLRSSARSCSSGAPVTQPCPGESARAASEEVSRRRQFLREHAAPFSAFLTDSFGRQHSYLRISLTEKCNLRCQYCMPEEGVPLTPKANLLTTEEILTLARLFVKEGIDKIRLTGGEPLIRPDVVDIVAQLQRLEGLRTIGVTTNGINLARLLPQLQKAGLSAINISLDTLVPAKFEFIVRRKGFHKVMEGIHKAIELGYNPVKVNCVVMRGLNEDELLDFAALTEGLPLDVRFIEYMPFDGNKWNFKKMVSYEGDARHCPAAVARAGEGARGGIQHSQGL

SEQ ID NO: 748699 - protein, 65 aa, Homo sapiens
PPVGWKHFALWPFEVTQLFEGQGQLDSNEIKVTGSCCPQESGRWSSVVQAVALLQGWEVERCGQR

SEQ ID NO: 748700 - protein, 102 aa, Homo sapiens
WAELGNCVSIALSSDCLHYVKLQAPRQGPRCFVPGCSSEPRTTVMPVSPLLQRFSFCSEGQYPQRLAVRSVTYRMSSAQSTLPGQGSRSCCVLGLQDLRALQ

SEQ ID NO: 748701 - protein, 805 aa, Homo sapiens
MNAVGSPEGQELHKLGSGAWDNPAYSGPPSPHGTLRVCTISSTGPLQPQPKKPEDEPQETAYRTQVSSCCLHICQGIRGLWGTTLTENTAENRELYIKTTLRELLVYIVFLVDICLLTYGMTSSSAYYYTKVMSELFLHTPSDTGVSFQAISSMADFWDFAQGPLLDSLYWTKWYNNQSLGHGSHSFIYYENMLLGVPRLRQLKVRNDSCVVHEDFREDILSCYDVYSPDKEEQLPFGPFNGTAWTYHSQDELGGFSHWGRLTSYSGGGYYLDLPGSRQGSAEALRALQEGLWLDRGTRVVFIDFSVYNANINLFCVLRLVVEFPATGGAIPSWQIRTVKLIRYVSNWDFFIVGCEVIFCVFIFYYVVEEILELHIHRLRYLSSIWNILDLVVILLSIVAVGFHIFRTLEVNRLMGKLLQQPNTYADFEFLAFWQTQYNNMNAVNLFFAWIKIFKYISFNKTMTQLSSTLARCAKDILGFAVMFFIVFFAYAQLGYLLFGTQVENFSTFIKCIFTQFRIILGDFDYNAIDNANRILGPAYFVTYVFFVFFVLLNMFLAIINDTYSEVKEELAGQKDELQLSDLLKQGYNKTLLRLRLRKERVSDVQKVLQGGEQEIQFEDFTNTLRELGHAEHEITELTATFTKFDRDGNRILDEKEQEKMRQDLEEERVALNTEIEKLGRSIVSSPQGKSGPEAARAGGWVSGEEFYMLTRRVLQLETVLEGVVSQIDAVGSKLKMLERKGWLAPSPGVKEQAIWKHPQPAPAVTPDPWGVQGGQESEVPYKREEEALEERRLSRGEIPTLQRS

SEQ ID NO: 748702 - protein, 105 aa, Homo sapiens
MNAVGSPEGQELHKLGSGAWDNPAYSGPPSPHGTLRVCTISSTGPLQPQPKKPEDEPQETAYRTQVSSCCLHICQGIREVPYKREEEALEERRLSRGEIPTLQRS

SEQ ID NO: 748703 - protein, 392 aa, Homo sapiens
MVLLSILRILFLCELVLFMEHRAQMAEGGQSSIALLAEAPTLPLIEELLEESPGEQPRKPRLLGHSLRYMLELYRRSADSHGHPRENRTIGATMVRLVKPLTNVARPHRGTWHIQILGFPLRPNRGLYQLVRATVVYRHHLQLTRFNLSCHVEPWVQKNPTNHFPSSEGDSSKPSLMSNAWKEMDITQLVQQRFWNNKGHRILRLRFMCQQQKDSGGLELWHGTSSLDIAFLLLYFNDTHKSIRKAKFLPRGMEEFMERESLLRRTRQADGISAEVTASSSKHSGPENNQCSLHPFQISFRQLGWDHWIIAPPFYTPNYCKGTCLRVLRDGLNSPNHAIIQNLINQLVDQSVPRPSCVPYKYVPISVLMIEANGSILYKEYEGMIAESCTCR

SEQ ID NO: 748704 - protein, 364 aa, Homo sapiens
MAQQWSLQRLAGRHPQDSYEDSTQSSIFTYTNSNSTRGPFEGPNYHIAPRWVYHLTSVWMIFVVIASVFTNGLVLAATMKFKKLRHPLNWILVNLAVADLAETVIASTISVVNQVYGYFVLGHPMCVLEGYTVSLCGITGLWSLAIISWERWMVVCKPFGNVRFDAKLAIVGIAFSWIWAAVWTAPPIFGWSRYWPHGLKTSCGPDVFSGSSYPGVQSYMIVLMVTCCITPLSIIVLCYLQVWLAIRAVAKQQKESESTQKAEKEVTRMVVVMVLAFCFCWGPYAFFACFAAANPGYPFHPLMAALPAFFAKSATIYNPVIYVFMNRQFRNCILQLFGKKVDDGSELSSASKTEVSSVSSVSPA

SEQ ID NO: 748705 - protein, 527 aa, Homo sapiens
MILSSYNTIQSVFCCCCCCSVQKRQMRTQISLSTDEELPEKYTQHRRPWLSQLSNKKQSNTGRVQPSKRKPLPPLPPSEVAEEKIQVKALYDFLPREPCNLALRRAEEYLILEKYNPHWWKARDRLGNEGLIPSNYVTENKITNLEIYEWYHRNITRNQAEHLLRQESKEGAFIVRDSRHLGSYTISVFMGARRSTEAAIKHYQIKKNDSGQWYVAERHAFQSIPELIWYHQHNAAGLMTRLRYPVGLMGSCLPATAGFSYEKWEIDPSELAFIKEIGSGQFGVVHLGEWRSHIQVAIKAINEGSMSEEDFIEEAKVMMKLSHSKLVQLYGVCIQRKPLYIVTEFMENGCLLNYLRENKGKLRKEMLLSVCQDICEGMEYLERNGYIHRDLAARNCLVSSTCIVKISDFGMTRYVLDDEYVSSFGAKFPIKWSPPEVFLFNKYSSKSDVWSFGVLMWEVFTEGKMPFENKSNLQVVEAISEGFRLYRPHLAPMSIYEVMYSCWHEKPEGRPTFAELLRAVTEIAETW

SEQ ID NO: 748706 - protein, 214 aa, Homo sapiens
MFFFTRKLSHSKLVQLYGVCIQRKPLYIVTEFMENGCLLNYLRENKGKLRKEMLLSVCQDICEGMEYLERNGYIHRDLAARNCLVSSTCIVKISDFGMTRYVLDDEYVSSFGAKFPIKWSPPEVFLFNKYSSKSDVWSFGVLMWEVFTEGKMPFENKSNLQVVEAISEGFRLYRPHLAPMSIYEVMYSCWHEKPEGRPTFAELLRAVTEIAETW

SEQ ID NO: 748707 - protein, 428 aa, Homo sapiens
MLEGDLVSKMLRAVLQSHKNGVALPRLQGEYRSLTGDWIPFKQLGFPTLEAYLRSVPAVVRIETSRSGEITCYAMACTETARIAQLVARQRSSKRKTGRQVNCQMRVKKTMPFFLEGKPKATLRQPGFASNFSVGKKPNPAPLRDKGNSVGVKPDAEMSPYMLHTTLGNEAFKDIPVQRHVTMSTNNRFSPKASLQPPLQMHLSRTSTKEMSDNLNQTVEKPNVKPPASYTYKMDEVQNRIKEILNKHNNGIWISKLPHFYKELYKEDLNQGILQQFEHWPHICTVEKPCSGGQDLLLYPAKRKQLLRSELDTEKVPLSPLPGPKQTPPLKGCPTVMAGDFKEKVADLLVKYTSGLWASALPKAFEEMYKVKFPEDALKNLASLSDVCSIDYISGNPQKAILYAKLPLPTDKIQKDAGQAHGDNDIKA

SEQ ID NO: 748708 - protein, 156 aa, Homo sapiens
MVPKVKKEAPAPPKAEAKAKALKAKKAVLKGVHSHKKKKIRTSPTFRRPKTLRLRRQPKYPRKSAPRRNKLDHYAIIKFPLTTESAMKKIEDNNTLVFIVDVKANKHQIKQAVKKLYDIDVAKVNTLIRPDGEKKAYVRLAPDYDALDVANKIGII

SEQ ID NO: 748709 - protein, 124 aa, Homo sapiens
TGSTQHGDSHRLLLVTTCAKCEGHLQVTPCVQTIMATHICILKGYGGRAWFLPGYMNNTPGQANPLGPMQTRYCLLQPPDIRDCLSVAHRVYLCSFPMSQYGGAVLFFLPSYLLLNFSLLKTTP

SEQ ID NO: 748710 - protein, 511 aa, Homo sapiens
MDVCGWKEMEVALVNFDNSDEIQEEPGYATDFDSTSPKGRPGGSSFSNGKILISESTNHETAFSKLPGDYADPPGPEPVVLNEGNQRVIINIAGLRFETQLRTLSQFPETLLGDREKRMQFFDSMRNEYFFDRNRPSFDGILYYYQSGGKIRRPANVPIDIFADEISFYELGSEAMDQFREDEGFIKDPETLLPTNDIHRQFWLLFEYPESSSAARAVAVVSVLVVVISITIFCLETLPEFREDRELKVVRDPNLNMSKTVLSQTMFTDPFFMVESTCIVWFTFELVLRFVVCPSKTDFFRNIMNIIDIISIIPYFATLITELVQETEPSAQQNMSLAILRIIRLVRVFRIFKLSRHSKGLQILGQTLKASMRELGLLIFFLFIGVILFSSAVYFAEVDEPESHFSSIPDGFWWAVVTMTTVGYGDMCPTTPGGKIVGTLCAIAGVLTIALPVPVIVSNFNYFYHRETENEEKQNIPGEIERILNSVGSRMGSTDSLNKTNGGCSTEKSRK

SEQ ID NO: 748711 - protein, 286 aa, Homo sapiens
MWASLARATDHPRASTIFLSKSQTDVREKRKSNHLNHVSPGQLTKKYSSCSTIFLDDSTVSQPNLRTTVKCVTLAIYYHIKNRDANRSLDIFDERSHPLTREKVPEEYFKHDPEHKFIYRFVRTLFSAAQLTAECAIVTLVYLERLLTYAEIDICPTNWKRIVLGAILLASKVWDDQAVWNVDYCQILKDITVEDMNEMERHFLELLQFNINVPASVYAKYYFDLRSLADDNNLNFLFAPLSKERAQNLEAISRLCEDKDLCRAAMRRSFSADNFIGIQRSKAILS

SEQ ID NO: 748712 - protein, 126 aa, Homo sapiens
GTLKNEARVSSTSASEAVTFNLHPSSRVLGCRRDHKNEMERHFLELLQFNINVPASVYAKYYFDLRSLADDNNLNFLFAPLSKERAQNLEAISRLCEDKDLCRAAMRRSFSADNFIGIQRSKAILS

SEQ ID NO: 748713 - protein, 286 aa, Homo sapiens; identical to SEQ ID NO: 748711

SEQ ID NO: 748714 - protein, 286 aa, Homo sapiens; identical to SEQ ID NO: 748711

SEQ ID NO: 748715 - protein, 286 aa, Homo sapiens; identical to SEQ ID NO: 748711

SEQ ID NO: 748716 - protein, 264 aa, Homo sapiens
MWASLARATDHPRASTIFLSKSQTDVREKRKSNHLNHVSPGQLTKKYSSCSTIFLDDSTVSQPNLRTTVKCVTLAIYYHIKNRDANRSLDIFDERSHPLTREKVPEEYFKHDPEHKFIYRFVRTLFSAAQLTAECAIVTLVYLERLLTYAEIDICPTNWKRIVLGAILLASKVWDDQAVWNVDYCQILKDITVEDMNEMERHFLELLQFNINVPASVYAKYYFDLRSLADDNNLNFLFAPLSKERAQNLELVTLPFAPFSNGEK

SEQ ID NO: 748717 - protein, 326 aa, Homo sapiens
MGPPSACPHRECIPWQGLLLTASLLTFWNAPTTAWLFIASAPFEVAEGENVHLSVVYLPENLYSYGWYKGKTVEPNQLIAAYVIDTHVRTPGPAYSGRETISPSGDLHFQNVTLEDTGYYNLQVTYRNSQIEQASHHLRVYGECSKFDSEISEDAAWPQDTFCWSLYATESVAQPSIQASSTTVTEKGSVVLTCHTNNTGTSFQWIFNNQRLQVTKRMKLSWFNHVLTIDPIRQEDAGEYQCEVSNPVSSNRSDPLKLTVKYDNTLGILIGVLVGSLLVAALVCFLLLRKTGRASDQSDFREQQPPASTPGHGPSDSSISYGIATL

SEQ ID NO: 748718 - protein, 298 aa, Homo sapiens
MGPPSACPHRECIPWQGLLLTASLLTFWNAPTTAWLFIASAPFEVAEGENVHLSVVYLPENLYSYGWYKGKTVEPNQLIAAYVIDTHVRTPGPAYSGRETISPSGDLHFQNVTLEDTGYYNLQVTYRNSQIEQASHHLRVYESVAQPSIQASSTTVTEKGSVVLTCHTNNTGTSFQWIFNNQRLQVTKRMKLSWFNHVLTIDPIRQEDAGEYQCEVSNPVSSNRSDPLKLTVKYDNTLGILIGVLVGSLLVAALVCFLLLRKTGRASDQSDFREQQPPASTPGHGPSDSSISYGIATL

SEQ ID NO: 748719 - protein, 103 aa, Homo sapiens
SRAPTQTRRGHPCSRCTANPCQAQLPHPFWEKHGLQNEEGDQEPLWERLRPEAVPTLAPPALADWVPGPCAFHWAMGSTSPCIPSWSDPCQGPFLPAHGLQVA

SEQ ID NO: 748720 - protein, 359 aa, Homo sapiens
METQLSNGPTCNNTANGPTTINNNCSSPVDSGNTEDSKTNLIVNYLPQNMTQEELKSLFGSIGEIESCKLVRDKITGQSLGYGFVNYIDPKDAEKAINTLNGLRLQTKTIKVSYARPSSASIRDANLYVSGLPKTMTQKELEQLFSQYGRIITSRILVDQVTGISRGVGFIRFDKRIEAEEAIKGLNGQKPPGATEPITVKFANNPSQKTNQAILSQLYQSPNRRYPGPLAQQAQRFRLDNLLNMAYGVKRFSPMTIDGMTSLAGINIPGHPGTGWCIFVYNLAPDADESILWQMFGPFGAVTNVKVIRDFNTNKCKGFGFVTMTNYDEAAMAIRSLNGYRLGDRVLQVSFKTNKTHKA

SEQ ID NO: 748721 - protein, 492 aa, Homo sapiens
SPASPCRHGPEGRSGRARAGGGRGAANSPPAPPPGALPSKPLLPAPLQTAGPRRLGVTEAVAGRVRRAVAGAARRGAGGAGVPPASSPLSRRRRRHRLSAELAPSDSSAAVLTASGTSRSSCSFESQQQVIAAMETQLSNGPTCNNTANGPTTINNNCSSPVDSGNTEDSKTNLIVNYLPQNMTQEELKSLFGSIGEIESCKLVRDKITGQSLGYGFVNYIDPKDAEKAINTLNGLRLQTKTIKVSYARPSSASIRDANLYVSGLPKTMTQKELEQLFSQYGRIITSRILVDQVTGISRGVGFIRFDKRIEAEEAIKGLNGQKPPGATEPITVKFANNPSQKTNQAILSQLYQSPNRRYPGPLAQQAQRFRLDNLLNMAYGVKRFSPMTIDGMTSLAGINIPGHPGTGWCIFVYNLAPDADESILWQMFGPFGAVTNVKVIRDFNTNKCKGFGFVTMTNYDEAAMAIRSLNGYRLGDRVLQVSFKTNKTHKA

SEQ ID NO: 748722 - protein, 359 aa, Homo sapiens; identical to SEQ ID NO: 748720

SEQ ID NO: 748723 - protein, 224 aa, Homo sapiens
MTQKELEQLFSQYGRIITSRILVDQVTGISRGVGFIRFDKRIEAEEAIKGLNGQKPPGATEPITVKFANNPSQKTNQAILSQLYQSPNRRYPGPLAQQAQRFRLDNLLNMAYGVKRFSPMTIDGMTSLAGINIPGHPGTGWCIFVYNLAPDADESILWQMFGPFGAVTNVKVIRDFNTNKCKGFGFVTMTNYDEAAMAIRSLNGYRLGDRVLQVSFKTNKTHKA

SEQ ID NO: 748724 - protein, 346 aa, Homo sapiens [sequence omitted]

SEQ ID NO: 748725 - protein, 373 aa, Homo sapiens
MTKQYEVAVQVIAAMETQLSNGPTCNNTANGPTTINNNCSSPVDSGNTEDSKTNLIVNYLPQNMTQEELKSLFGSIGEIESCKLVRDKITGQSLGYGFVNYIDPKDAEKAINTLNGLRLQTKTIKVSYARPSSASIRDANLYVSGLPKTMTQKELEQLFSQYGRIITSRILVDQVTGISRGVGFIRFDKRIEAEEAIKGLNGQKPPGATEPITVKFANNPSQKTNQAILSQLYQSPNRRYPGPLAQQAQRFRLDNLLNMAYGVKRFSPMTIDGMTSLAGINIPGHPGTGWCIFVYNLAPDADESILWQMFGPFGAVTNVKVIRDFNTNKCKGFGFVTMTNYDEAAMAIRSLNGYRLGDRVLQVSFKTNKTHKA

SEQ ID NO: 748726 - protein, 359 aa, Homo sapiens; identical to SEQ ID NO: 748720

SEQ ID NO: 748727 - protein, 30 aa, Homo sapiens
MGTLRAAGQTTKAGHNTGDPQRRGFHQATH

SEQ ID NO: 748728 - protein, 343 aa, Homo sapiens
MPNPASRVEIQAGCGRVGLSSWGSAQLSHLASRTPTAGATGTQGGLEDGLALPVCYTHRGHARNAEGDAAATFQSTKTPRRPVHLPRECQPGRDTHTAEAGPDPRANPWVPLEGARQEEMAHKHWGRNRRGGSKGTRPLTSDPTTSREAISVVMVVPGLALPAPTPTTQSLHPVTPPSCDLPLPSISHAFPSPPSGSLPSLWPPVPTSHAPSRGNLCQGSLHFLAPASLPGTQAGPGTLVLNKGTRLNDVGGNLPSVGTGANTTHCQHGPRATPPQASTSSPEEARGSTGHAPEWEVTHGEGSLVPRGLAVSLLRCRAHYGPRRGLSRVISSFTAAVGPADIS

SEQ ID NO: 748729 - protein, 170 aa, Homo sapiens
MGPCAPIQAAQTRRAQVSRTHDGSLPSLWPPVPTSHAPSRGNLCQGSLHFLAPASLPGTQAGPGTLVLNKGTRLNDVGGNLPSVGTGANTTHCQHGPRATPPQASTSSPEEARGSTGHAPEWEVTHGEGSLVPRGLAVSLLRCRAHYGPRRGLSRVISSFTAAVGPADIS

SEQ ID NO: 748730 - protein, 329 aa, Homo sapiens
MPNPASRVEIQAGCGRVGLSSWGSAQLSHLASRTPTAGATGTQGGLEDGLALPVCYTHRGHARNAEGDAAATFQSTKTPRRPVHLPRECQPGRDTHTAEAGPDPRANPWVPLEGARQEEMAHKHWGRNRRGGSKGTRPLTSDPTTSREAISVVMVVPGLALPAPTPTTQSLHPVTPPSCDLPLPSISHAFPSPPSGSLPSLWPPVPTSHAPSRGNLCQGSLHFLAPASLPGTQAGPGTLVLNKGTRLNDVGGNLPSVGTGANTTHCQHGPRATPPQASTSSPEEARGSTGHAPEWEVTHGAYNGIGLIREKEEILTHAPAWRNLEDDAE

SEQ ID NO: 748731 - protein, 149 aa, Homo sapiens
  misc_feature (13)..(13): Xaa can be any naturally occurring amino acid
  misc_feature (25)..(25): Xaa can be any naturally occurring amino acid
  misc_feature (50)..(50): Xaa can be any naturally occurring amino acid
RTCWSCSDPLGNXIDGKGPIGSKDXVGDWSETPRYHSSEFQLREPMQDCXKAVDSLVPIGRGQRELIIGDRQTGKTSIAIDTIINQKRFNDGSDEKKKLYCIYVAIGQKRSTVAQLVKRLTDADAMKYTIVVSATASDAAPLQYLAPYS

SEQ ID NO: 748732 - protein, 119 aa, Homo sapiens
MGNVLQSSSDAIYLARHVGLRVGIPKETPALTINRLCGSGFQSIVNGCQEICVKEAEVVLCGGTESMSQAPYCVRNVRFGTKLGSDIKFLTWPFWKLKGMGLKRIYADFSHQTHLRYLL

SEQ ID NO: 748733 - protein, 104 aa, Homo sapiens
CSWSTGMQLRYNISQLEEWLRGRNLHQSGAVQTMEPLIQAAQLLQLKKKTQEDAEAICSLCTSLSTQQIVKILNLYTPLNEFEERVTVAFIRTIQGSFSGGTNP

SEQ ID NO: 748734 - protein, 397 aa, Homo sapiens
MALLRGVFVVAAKRTPFGAYGGLLKDFTATDLSEFAAKAALSAGKVSPETVDSVIMGNVLQSSSDAIYLARHVGLRVGIPKETPALTINRLCGSGFQSIVNGCQEICVKEAEVVLCGGTESMSQAPYCVRNVRFGTKLGSDIKLEDSLWVSLTDQHVQLPMAMTAENLAVKHKISREECDKYALQSQQRWKAANDAGYFNDEMAPIEVKTKKGKQTMQVDEHARPQTTLEQLQKLPPVFKKDGTVTAGNASGVADGAGAVIIASEDAVKKHNFTPLARIVGYFVSGCDPSIMGIGPVPAISGALKKAGLSLKDMDLVEVNEAFAPQYLAVERSLDLDISKTNVNGGAIALGHPLGGSGSRITAHLVHELRRRGGKYAVGSACIGGGQGIAVIIQSTA

SEQ ID NO: 748735 - protein, 397 aa, Homo sapiens; identical to SEQ ID NO: 748734

SEQ ID NO: 748736 - protein, 397 aa, Homo sapiens; identical to SEQ ID NO: 748734

SEQ ID NO: 748737 - protein, 397 aa, Homo sapiens; identical to SEQ ID NO: 748734

SEQ ID NO: 748738 - protein, 397 aa, Homo sapiens; identical to SEQ ID NO: 748734

SEQ ID NO: 748739 - protein, 236 aa, Homo sapiens
MALLRGVFVVAAKRTPFGAYGGLLKDFTATDLSEFAAKAALSAGKVSPETVDSVIMGNVLQSSSDAIYLARHVGLRVGIPKETPALTINRLCGSGFQSIVNGCQEICVKEAEVVLCGGTESMSQAPYCVRNVRFGTKLGSDIKLEDSLWVSLTDQHVQLPMAMTAENLAVKHKISREECDKYALQSQQRWKAANDAGYFNDEMAPIEVKTKKGVTETSSSIQERWNCYCRECIGCS

SEQ ID NO: 748740 - protein, 342 aa, Homo sapiens
MGNVLQSSSDAIYLARHVGLRVGIPKETPALTINRLCGSGFQSIVNGCQEICVKEAEVVLCGGTESMSQAPYCVRNVRFGTKLGSDIKLEDSLWVSLTDQHVQLPMAMTAENLAVKHKISREECDKYALQSQQRWKAANDAGYFNDEMAPIEVKTKKGKQTMQVDEHARPQTTLEQLQKLPPVFKKDGTVTAGNASGVADGAGAVIIASEDAVKKHNFTPLARIVGYFVSGCDPSIMGIGPVPAISGALKKAGLSLKDMDLVEVNEAFAPQYLAVERSLDLDISKTNVNGGAIALGHPLGGSGSRITAHLVHELRRRGGKYAVGSACIGGGQGIAVIIQSTA

SEQ ID NO: 748741 - protein, 394 aa, Homo sapiens
MMGVFVVAAKRTPFGAYGGLLKDFTATDLSEFAAKAALSAGKVSPETVDSVIMGNVLQSSSDAIYLARHVGLRVGIPKETPALTINRLCGSGFQSIVNGCQEICVKEAEVVLCGGTESMSQAPYCVRNVRFGTKLGSDIKLEDSLWVSLTDQHVQLPMAMTAENLAVKHKISREECDKYALQSQQRWKAANDAGYFNDEMAPIEVKTKKGKQTMQVDEHARPQTTLEQLQKLPPVFKKDGTVTAGNASGVADGAGAVIIASEDAVKKHNFTPLARIVGYFVSGCDPSIMGIGPVPAISGALKKAGLSLKDMDLVEVNEAFAPQYLAVERSLDLDISKTNVNGGAIALGHPLGGSGSRITAHLVHELRRRGGKYAVGSACIGGGQGIAVIIQSTA

SEQ ID NO: 748742 - protein, 264 aa, Homo sapiens
MWRNRKHEPSSLLCQKCAFWNQAWIRYQAGRFFMGIINRSACPAPHGNDCRESCCKTQNTNDAGYFNDEMAPIEVKTKKGKQTMQVDEHARPQTTLEQLQKLPPVFKKDGTVTAGNASGVADGAGAVIIASEDAVKKHNFTPLARIVGYFVSGCDPSIMGIGPVPAISGALKKAGLSLKDMDLVEVNEAFAPQYLAVERSLDLDISKTNVNGGAIALGHPLGGSGSRITAHLVHELRRRGGKYAVGSACIGGGQGIAVIIQSTA

SEQ ID NO: 748743 - protein, 342 aa, Homo sapiens; identical to SEQ ID NO: 748740

SEQ ID NO: 748744 - protein, 342 aa, Homo sapiens; identical to SEQ ID NO: 748740

SEQ ID NO: 748745 - protein, 414 aa, Homo sapiens
PGVNRRGQTRAATTSSRMALLRGVFVVAAKRTPFGAYGGLLKDFTATDLSEFAAKAALSAGKVSPETVDSVIMGNVLQSSSDAIYLARHVGLRVGIPKETPALTINRLCGSGFQSIVNGCQEICVKEAEVVLCGGTESMSQAPYCVRNVRFGTKLGSDIKLEDSLWVSLTDQHVQLPMAMTAENLAVKHKISREECDKYALQSQQRWKAANDAGYFNDEMAPIEVKTKKGKQTMQVDEHARPQTTLEQLQKLPPVFKKDGTVTAGNASGVADGAGAVIIASEDAVKKHNFTPLARIVGYFVSGCDPSIMGIGPVPAISGALKKAGLSLKDMDLVEVNEAFAPQYLAVERSLDLDISKTNVNGGAIALGHPLGGSGSRITAHLVHELRRRGGKYAVGSACIGGGQGIAVIIQSTA

SEQ ID NO: 748746 - protein, 360 aa, Homo sapiens
MALLRGVFVVAAKRTPFGAYGGLLKDFTATDLSEFAAKAALSAGKVSPETVDSVIMGNVLQSSSDAIYLARHVGLRVGIPKETPALTINRLCGSGFQSIVNGCQEICVKEAEVVLCGGTESMSQAPYCVRNVRFGTKLGSDIKLEDSLWVSLTDQHVQLPMAMTAENLAVKHKISREECDKYALQSQQRWKAANDAGYFNDEMAPIEVKTKKGKQTMQVDEHARPQTTLEQLQKLPPVFKKDGTVTAGNASGVAGGAGTGTHKLVEELWYETYISPHGQELGARYEILEVIPSNRRMGQSRQQGAMSSERFMTRIASAEHDPKGVQRGHRHKHRRSWKDQERQTAGRHTENKREVDNEHA

SEQ ID NO: 748747 - protein, 354 aa, Homo sapiens
MALLRGVFVVAAKRTPFGAYGGLLKDFTATDLSEFAAKAALSAGKVSPETVDSVIMGNVLQEICVKEAEVVLCGGTESMSQAPYCVRNVRFGTKLGSDIKLEDSLWVSLTDQHVQLPMAMTAENLAVKHKISREECDKYALQSQQRWKAANDAGYFNDEMAPIEVKTKKGKQTMQVDEHARPQTTLEQLQKLPPVFKKDGTVTAGNASGVADGAGAVIIASEDAVKKHNFTPLARIVGYFVSGCDPSIMGIGPVPAISGALKKAGLSLKDMDLVEVNEAFAPQYLAVERSLDLDISKTNVNGGAIALGHPLGGSGSRITAHLVHELRRRGGKYAVGSACIGGGQGIAVIIQSTA

SEQ ID NO: 748748 - protein, 276 aa, Homo sapiens [sequence omitted]

SEQ ID NO: 748749 - protein, 171 aa, Homo sapiens
MVLELLQKLPPVFKKDGTVTAGNASGVADGAGAVIIASEDAVKKHNFTPLARIVGYFVSGCDPSIMGIGPVPAISGALKKAGLSLKDMDLVEVNEAFAPQYLAVERSLDLDISKTNVNGGAIALGHPLGGSGSRITAHLVHELRRRGGKYAVGSACIGGGQGIAVIIQSTA

SEQ ID NO: 748750 - protein, 173 aa, Homo sapiens
MALLRGVFVVAAKRTPFGAYGGLLKDFTATDLSEFAAKAALSAGKVSPETVDSVIMGNVLQSSSDAIYLARHVGLRVGIPKETPALTINRLCGSGFQSIVNGCQEICVKEAEVVLCGGTESMSQAPYCVRNVRFGTKLGSDIKGFLMVIKLDKLWSRFSLSMNWRGFVCTTFS

SEQ ID NO: 748751 - protein, 139 aa, Homo sapiens
MALLRGVFVVAAKRTPFGAYGGLLKDFTATDLSEFAAKAALSAGKVSPETVDSVIMGNVLQSSSDAIYLARHVGLRVGIPKETPALTINRLCGSGFQSIVNGCQEICVKEAEVVLCGGTESMSQAPYCVITDNMPAPME

SEQ ID NO: 748752 - protein, 145 aa, Homo sapiens
CSWSTGMQLRYNISQLEEWLRGRNLHQSGAVQTMEPLIQAAQLLQLKKKTQEDAEAICSLCTSLSTQQIVKILNLYTPLNEFEERVTVAFIRTIQAQLQERNDPQQLLLDAKHMFPVLFPFNPSSLTMDSIHIPACLNLEFLNEV

SEQ ID NO: 748753 - protein, 565 aa, Homo sapiens
LRAAGGGRTMPSFDEALQRVGEFGRFQRRVFLLLCLTGVTFAFLFVGVVFLGTQPDHYWCRGPSAAALAERCGWSPEEEWNRTAPASRGPEPPERRGRCQRYLLEAANDSASATSALSCADPLAAFPNRSAPLVPCRGGWRYAQAHSTIVSEFDLVCVNAWMLDLTQAILNLGFLTGAFTLGYAADRYGRIVIYLLSCLGVGVTGVVVAFAPNFPVFVIFRFLQGVFGKGTWMTCYVIVTEIVGSKQRRIVGIVIQMFFTLGIIILPGIAYFIPNWQGIQLAITLPSFLFLLYYWVVPESPRWLITRKKGDKALQILRRIAKCNGKYLSSNYSEITVTDEEVSNPSFLDLVRTPQMRKCTLILMFAWFTSAVVYQGLVMRLGIIGGNLYIDFFISGVVELPGALLILLTIERLGRRLPFAASNIVAGVACLVTAFLPEGIAWLRTTVATLGRLGITMAFEIVYLVNSELYPTTLRNFGVSLCSGLCDFGGIIAPFLLFRLAAVWLELPLIIFGILASICGGLVMLLPETKGIALPETVDDVEKLGSPHSCKCGRNKKTPVSRSHL

SEQ ID NO: 748754 - protein, 565 aa, Homo sapiens; identical to SEQ ID NO: 748753

SEQ ID NO: 748755 - protein, 656 aa, Homo sapiens
VLSDIKSIGLYLRSQKIPLYEECQLLVRKGFDFQRKQYGKLKKFTTVNPEFYNEPKTKLYLKLSRKERSSAYSKNDLWVVSKTLDFELDTFIACSAFFGPSSINEIEILPLKGYFPSNWPTNMVVHALLVCNASTELTTLKNIQDYFNPATLPLTQYLLTTSSPTIVSNKRVSKRKFIPPAFTNVSTKFELLSLGATLKLASELIQVHKLNKDQATALIQIAQMMASHESIEEVKELQTHTFPITIIHGVFGAGKSYLLAVVILFFVQLFEKSEAPTIGNARPWKLLISSSTNVAVDRVLLGLLSLGFENFIRVGSVRKIAKPILPYSLHAGSENESEQLKELHALMKEDLTPTERVYVRKSIEQHKLGTNRTLLKQVWCEKLILVGDPKQLPPTIQGSDAAHENGLEQTLFDRLCLMGHKPILLRTQYRCHPAISAIANDLFYKGALMNGVTEIERSPLLEWLPTLCFYNVKGLEQIERDNSFHNVAEATFTLKLIQSLIASGIAGSMIGVITLYKSQMYKLCHLLSAVDFHHPDIKTVQVSTVDAFQGAEKEIIILSCVRTRQVGFIDSEKRMNVALTRGKRHLLIVGNLACLRKNQLWGRVIQHCEGREDGLQHANQYEPQLNHLLKDYFEKQVEEKQKKKSEKEKSKDKSHS

SEQ ID NO: 748756 - protein, 510 aa, Homo sapiens
MPLFLKLFICFIFIRSSPTIVSNKRVSKRKFIPPAFTNVSTKFELLSLGATLKLASELIQVHKLNKDQATALIQIAQMMASHESIEEVKELQTHTFPITIIHGVFGAGKSYLLAVVILFFVQLFEKSEAPTIGNARPWKLLISSSTNVAVDRVLLGLLSLGFENFIRVGSVRKIAKPILPYSLHAGSENESEQLKELHALMKEDLTPTERVYVRKSIEQHKLGTNRTLLKQVWCEKLILVGDPKQLPPTIQGSDAAHENGLEQTLFDRLCLMGHKPILLRTQYRCHPAISAIANDLFYKGALMNGVTEIERSPLLEWLPTLCFYNVKGLEQIERDNSFHNVAEATFTLKLIQSLIASGIAGSMIGVITLYKSQMYKLCHLLSAVDFHHPDIKTVQVSTVDAFQGAEKEIIILSCVRTRQVGFIDSEKRMNVALTRGKRHLLIVGNLACLRKNQLWGRVIQHCEGREDGLQHANQYEPQLNHLLKDYFEKQVEEKQKKKSEKEKSKDKSHS

SEQ ID NO: 748757 - protein, 161 aa, Homo sapiens
VLSDIKSIGLYLRSQKIPLYEECQLLVRKGFDFQRKQYGKLKKFTTVNPEFYNEPKTKLYLKLSRKERSSAYSKNDLWVVSKTLDFELDTFIACSAFFGPSSINEIEILPLKGYFPSNWPTNMVVHALLVCNASTELTTLKNIQDYFNPATLPLTQYLLTT

SEQ ID NO: 748758 - protein, 510 aa, Homo sapiens; identical to SEQ ID NO: 748756

SEQ ID NO: 748759 - protein, 448 aa, Homo sapiens
RSERPVHVQAAADHIPSSTMAQPGTLNLNNEVVKMRKEVKRIRVLVIRKLVRSVGRLKSKKGTEDALLKNQRRAQRLLEEIHAMKELKPDIVTKSALGDDINFEKIFKKPDSTATERAIARLAVHPLLKKKIDVLKAAVQAFKEARQNVAEVESSKNASEDNHSENTLYSNDNGSNLQREATVISEQKVKETKILAKKPIHNSKEKIAKMEHGPKAVTIANSPSKPSEKDSVVSLESQKTPADPKLKTLSQTKKNKGSDSSLSGNSDGGEEFCEEEKEYFDDSTEERFYKQSSMSEDSDSGDDFFIGKVRRTRKKESSCHSSVKEQKPLEKVFLKEDTGETHGDTRNDKIKPSTETRKLESVFFHSLSGSKSSRRNFKEQAPKTRSLDFPQNEPQIKNQFNKKLSGRLENTKQQLQLPLHPSWEASRRRKEQQSNIAVFQGKKITFDD

SEQ ID NO: 748760 - protein, 592 aa, Homo sapiens
AASPPALQTWRGGTRWALPRVLGRLSDTKMSDDAGDTLATGDKAEVTEMPNSDSLPEDAEVHCDSAAVSHEPTPADPRGEGHENAAVQGAGAAAIGPPVQPQDANALEPPLNGDVTEDTLAECIDSVSLEAEPRSEIPLQEQNYLAVDSPPSGGGWAGWGSWGKSLLSSASATVGHGLTAVKEKAGATLRIHGVNSGSSEGAQPNTENGVPEITDAATDQGPAESPPTSPSSASRGMLSAITNVVQNTGKSVLTGGLDALEFIGKKTMNVLAESDPGFKRTKTLMERTVSLSQMLREAKEKEKQRLAQQLTMERTAHYGMLFDEYQGLSHLEALEILSNESESKVQSFLASLDGEKLELLKNDLISIKDIFAAKELENEENQEEQGLEEKGEEFARMLTELLFELHVAATPDKLNKAMKRAHDWVEEDQTVVSVDVAKVSEEETKKEEKEEKSQDPQEDKKEEKKTKTIEEVYMSSIESLAEVTARCIEQLHKVAELILHGQEEEKPAQDQAKVLIKLTTAMCNEVASLSKKFTNSLTTVGSNKKAEVLNPMISSVLLEGCNSTTYIQDAFQLLLPVLQVSHIQTSCLKAQP

SEQ ID NO: 748761 - protein, 563 aa, Homo sapiens
MSDDAGDTLATGDKAEVTEMPNSDSLPEDAEVHCDSAAVSHEPTPADPRGEGHENAAVQGAGAAAIGPPVQPQDANALEPPLNGDVTEDTLAECIDSVSLEAEPRSEIPLQEQNYLAVDSPPSGGGWAGWGSWGKSLLSSASATVGHGLTAVKEKAGATLRIHGVNSGSSEGAQPNTENGVPEITDAATDQGPAESPPTSPSSASRGMLSAITNVVQNTGKSVLTGGLDALEFIGKKTMNVLAESDPGFKRTKTLMERTVSLSQMLREAKEKEKQRLAQQLTMERTAHYGMLFDEYQGLSHLEALEILSNESESKVQSFLASLDGEKLELLKNDLISIKDIFAAKELENEENQEEQGLEEKGEEFARMLTELLFELHVAATPDKLNKAMKRAHDWVEEDQTVVSVDVAKVSEEETKKEEKEEKSQDPQEDKKEEKKTKTIEEVYMSSIESLAEVTARCIEQLHKVAELILHGQEEEKPAQDQAKVLIKLTTAMCNEVASLSKKFTNSLTTVGSNKKAEVLNPMISSVLLEGCNSTTYIQDAFQLLLPVLQVSHIQTSCLKAQP

SEQ ID NO: 748762 - protein, 592 aa, Homo sapiens; identical to SEQ ID NO: 748760

SEQ ID NO: 748763 - protein, 221 aa, Homo sapiens
MKNKSRFFCRVLFLGLEEKGEEFARMLTELLFELHVAATPDKLNKAMKRAHDWVEEDQTVVSVDVAKVSEEETKKEEKEEKSQDPQEDKKEEKKTKTIEEVYMSSIESLAEVTARCIEQLHKVAELILHGQEEEKPAQDQAKVLIKLTTAMCNEVASLSKKFTNSLTTVGSNKKAEVLNPMISSVLLEGCNSTTYIQDAFQLLLPVLQVSHIQTSCLKAQP

SEQ ID NO: 748764 - protein, 130 aa, Homo sapiens
LACVYSFQEVYMSSIESLAEVTARCIEQLHKVAELILHGQEEEKPAQDQAKVLIKLTTAMCNEVASLSKKFTNSLTTVGSNKKAEVLNPMISSVLLEGCNSTTYIQDAFQLLLPVLQVSHIQTSCLKAQP

SEQ ID NO: 748765 - protein, 119 aa, Homo sapiens [sequence omitted]

SEQ ID NO: 748766 - protein, 67 aa, Homo sapiens
DAWVDPRVRNSLTTVGSNKKAEVLNPMISSVLLEGCNSTTYIQDAFQLLLPVLQVSHIQTSCLKAQP

SEQ ID NO: 748767 - protein, 592 aa, Homo sapiens; identical to SEQ ID NO: 748760

SEQ ID NO: 748768 - protein, 561 aa, Homo sapiens
AASPPALQTWRGGTRWALPRVLGRLSDTKMSDDAGDTLATGDKAEVTEMPNSDSLPEDAEVHCDSAAVSHEPTPADPRGEGHENAAVQGAGAAAIGPPVQPQDANALEPPLNGDVTEDTLAECIDSVSLEAEPRSEIPLQEQNYLAVDSPPSGGGWAGWGSWGKSLLSSASATVGHGLTAVKEKAGATLRIHGVNSGSSEGAQPNTENGVPEITDAATDQGPAESPPTSPSSASRGMLSAITNVVQNTGKSVLTGGLDALEFIGKKTMNVLAESDPGFKRTKTLMERTVSLSQMLREAKEKEKQRLAQQLTMERTAHYGMLFDEYQGLSHLEALEILSNESESKVQSFLASLDGEKLELLKNDLISIKDIFAAKELENEENQEEQGLEEKGEEFARMLTELLFELHVAATPDKLNKAMKRAHDWVEEDQTVVSVDVAKVSEEETKKEEKEEKSQDPQEDKKEEKKTKTIEEVYMSSIESLAEVTARCIEQLHKVAELILHGQEEEKPAQDQAKVLIKLTTAMCNEVASLSKKFTNSLTTVGAFSNRASLYTSRMTREVEAH

SEQ ID NO: 748769 - protein, 376 aa, Homo sapiens
AASPPALQTWRGGTRWALPRVLGRLSDTKMSDDAGDTLATGDKAEVTEMPNSDSLPEDAEVHCDSAAVSHEPTPADPRGEGHENAAVQGAGAAAIGPPVQPQDANALEPPLNGDVTEDTLAECIDSVSLEAEPRSEIPLQEQNYLAVDSPPSGGGWAGWGSWGKSLLSSASATVGHGLTAVKEKAGATLRIHGVNSGSSEGAQPNTENGVPEITDAATDQGPAESPPTSPSSASRGMLSAITNVVQNTGKSVLTGGLDALEFIGKKTMNVLAESDPGFKRTKTLMERTVSLSQMLREAKEKEKQRLAQQLTMERTAHYGMLFDEYQGLSHLEALEILSNESESKVLLHYSFEMACLVMCCLNMKETGKSAIKRSHF

SEQ ID NO: 748770 - protein, 101 aa, Homo sapiens
THICPVVRIQFSRALWVSTCLVLAITPGKWLLPEDRALSLMLLASLQCCPPPFGAWWIQVLTHKGRQAGLGPGCPPGPSDGRDQRDLGKLHSLCLSVLSGD

SEQ ID NO: 748771 - protein, 372 aa, Homo sapiens
GTGPKVRKSEGSEGFCCANAVTEGSAHARLILPEDGATGGCGIRAPCPALCLPAQAGHSAGRPPSAAHRASHAARNHYEVLVLGGGSGGITMAARMKRKVGAENVAIVEPSERHFYQPIWTLVGAGAKQLSSSGRPTASVIPSGVEWIKARVTELNPDKNCIHTDDDEKISYRYLIIALGIQLDYEKIKGLPEGFAHPKIGSNYSVKTVEKTWKALQDFKEGNAIFTFPNTPVKCAGAPQKIMYLSEAYFRKTGKRSKANIIFNTSLGAIFGVKKYADALQEIIQERNLTVNYKKNLILKCFMFTPPMSPPDVLKTSPVADAAGWVDVDKETLATQEVPQLCLGLGAAPTFLRQRPLLAVACPSQEYLIEQF

SEQ ID NO: 748772 - protein, 363 aa, Homo sapiens
MVPLVAVVSGPRAQLFACLLRLGTQQVGPLQLHTGASHAARNHYEVLVLGGGSGGITMAARMKRKVGAENVAIVEPSERHFYQPIWTLVGAGAKQLSSSGRPTASVIPSGVEWIKARVTELNPDKNCIHTDDDEKISYRYLIIALGIQLDYEKIKGLPEGFAHPKIGSNYSVKTVEKTWKALQDFKEGNAIFTFPNTPVKCAGAPQKIMYLSEAYFRKTGKRSKANIIFNTSLGAIFGVKKYADALQEIIQERNLTVNYKKNLIEVRADKQEAVFENLDKPGETQVIFILKCFMFTPPMSPPDVLKTSPVADAAGWVDVDKETLATQEVPQLCLGLGAAPTFLRQRPLLAVACPSQEYLIEQF

SEQ ID NO: 748773 - protein, 153 aa, Homo sapiens [sequence omitted]

SEQ ID NO: 748774 - protein, 266 aa, Homo sapiens
YVALAQRKEECQAHLTNQYMQRMASVRAVPNLEINPYQPAPPSGYFMAAIPQTQNGAAYYPPSQIAQLRPSPRWTAEGARPHPFQNRPSAIRPAAPRPPFSTMRPASSQVPGVMSTQRVANTSTQTMGPRPAAAAAATPHYNYAAGVRSPQKHLNAQPQVTMQQPAAHVQGQEPLTASMLVSAHAQEQKQMLGERLFPLIQAMHLTLAGKITGMLLEIGNSELLHMLESPESLRSKVNETVAVLQAHQAEVAAQKAVNRATGVPTV

SEQ ID NO: 748775 - protein, 109 aa, Homo sapiens
MRAAHPGLTLLQLIHKQKGGYTESQRPMGRDQHSTESIRSNSKLFIMNTECGQTHDCACPRRFAEGNCFLTPSSLRLSIGTSRECSLASLLWTEQLTPSSTSLHTISFA

SEQ ID NO: 748776 - protein, 125 aa, Homo sapiens
MRAAHPGLTLLQLIHKQKGGYTESQRPMGRDQHSTESIRSNSKLFIMNTECGQTHDCACPRRFAEGNCFLTPSSLRLSIGTSRECSLASLLWTEQLTPSSTSLLSSSPLLSSSPLLSSFSPSVVF

SEQ ID NO: 748777 - protein, 113 aa, Homo sapiens [sequence omitted]

SEQ ID NO: 748778 - protein, 76 aa, Homo sapiens
  misc_feature (9)..(9): Xaa can be any naturally occurring amino acid
PPVNLPPPXPPPNVGLPGVKPPPVPRPSNPGFTKMAWVIPHASLKYENLIPVEELKPNNLPHQNYGGEGVGIRYVR

SEQ ID NO: 748779 - protein, 487 aa, Homo sapiens
MGCLWGLALPLFFFCWEVGVSGSSAGPSTRRADTAMTTDDTEVPAMTLAPGHAALETQTLSAETSSRASTPAGPIPEAETRGAKRISPARETRSFTKTSPNFMVLIATSVETSAASGSPEGAGMTTVQTITGSDPEEAIFDTLCTDDSSEEAKTLTMDILTLAHTSTEAKGLSSESSASSDGPHPVITPSRASESSASSDGPHPVITPSRASESSASSDGPHPVITPSWSPGSDVTLLAEALVTVTNIEVINCSITEIETTTSSIPGASDIDLIPTEGVKASSTSDPPALPDSTEAKPHITEVTASAETLSSALSVETPSYVKVSGAAPVSIEAGSAVGKTTSFAGSSASSYSPSEAALKNFTPSETPTMDIATKGPFPTSRDPLPSVPPTTTNSSRGTNSTLAKITTSAKTTMKPPTATPTTARTRPTTDVSAGENGGFLLLRLSVASPEDLTDPRVAERLMQQLHRELHAHAPHFQVSLLRVRRG

SEQ ID NO: 748780 - protein, 75 aa, Homo sapiens
LWRAHGPDGLKGQLALLLSSSTGNSTPTRLTSRSPYCVSGEANGHQLQPGMSRMPKEGAAPSLGPHRQTAAALLC

SEQ ID NO: 748781 - protein, 107 aa, Homo sapiens
VLLLLLWLSLGVKTGSCSQPQNLCCLGTDHHCKRGSCYCDEFCHVAPDCHPDHSVLCNPASQMTKMVLQMVLRMENPPSPARSHLDWMQSMIVKIVPGEQQEEDGDP

SEQ ID NO: 748782 - protein, 538 aa, Homo sapiens
MGCLWGLALPLFFFCWEVGVSGSSAGPSTRRADTAMTTDDTEVPAMTLAPGHAALETQTLSAETSSRASTPAGPIPEAETRGAKRISPARETRSFTKTSPNFMVLIATSVETSAASGSPEGAGMTTVQTITGSDPEEAIFDTLCTDDSSEEAKTLTMDILTLAHTSTEAKGLSSESSASSDGPHPVITPSRASESSASSDGPHPVITPSRASESSASSDGPHPVITPSWSPGSDVTLLAEALVTVTNIEVINCSITEIETTTSSIPGASDIDLIPTEGVKASSTSDPPALPDSTEAKPHITEVTASAETLSTAGTTESAAPHATVGTPLPTNSATEREVTAPGATTLSGALVTVSRNPLEETSALSVETPSYVKVSGAAPVSIEAGSAVGKTTSFAGSSASSYSPSEAALKNFTPSETPTMDIATKGPFPTSRDPLPSVPPTTTNSSRGTNSTLAKITTSAKTTMKPPTATPTTARTRPTTDVSAGENGGFLLLRLSVASPEDLTDPRVAERLMQQLHRELHAHAPHFQVSLLRVRRG

SEQ ID NO: 748783 - protein, 503 aa, Homo sapiens
MTTDDTEVPAMTLAPGHAALETQTLSAETSSRASTPAGPIPEAETRGAKRISPARETRSFTKTSPNFMVLIATSVETSAASGSPEGAGMTTVQTITGSDPEEAIFDTLCTDDSSEEAKTLTMDILTLAHTSTEAKGLSSESSASSDGPHPVITPSRASESSASSDGPHPVITPSRASESSASSDGPHPVITPSWSPGSDVTLLAEALVTVTNIEVINCSITEIETTTSSIPGASDIDLIPTEGVKASSTSDPPALPDSTEAKPHITEVTASAETLSTAGTTESAAPHATVGTPLPTNSATEREVTAPGATTLSGALVTVSRNPLEETSALSVETPSYVKVSGAAPVSIEAGSAVGKTTSFAGSSASSYSPSEAALKNFTPSETPTMDIATKGPFPTSRDPLPSVPPTTTNSSRGTNSTLAKITTSAKTTMKPPTATPTTARTRPTTDVSAGENGGFLLLRLSVASPEDLTDPRVAERLMQQLHRELHAHAPHFQVSLLRVRRG

SEQ ID NO: 748784 - protein, 503 aa, Homo sapiens; identical to SEQ ID NO: 748783

SEQ ID NO: 748785 - protein, 538 aa, Homo sapiens; identical to SEQ ID NO: 748782

SEQ ID NO: 748786 - protein, 522 aa, Homo sapiens
MTTDDTEVPAMTLAPGHAALETQTLSAETSSRASTPAGPIPEAETRGAKRISPARETRSFTKTSPNFMVLIATSVETSAASGSPEGAGMTTVQTITGSDPEEAIFDTLCTDDSSEEAKTLTMDILTLAHTSTEAKGLSSESSASSDGPHPVITPSRASESSASSDGPHPVITPSRASESSASSDGPHPVITPSRASESSASSDGPHPVITPSWSPGSDVTLLAEALVTVTNIEVINCSITEIETTTSSIPGASDIDLIPTEGVKASSTSDPPALPDSTEAKPHITEVTASAETLSTAGTTESAAPHATVGTPLPTNSATEREVTAPGATTLSGALVTVSRNPLEETSALSVETPSYVKVSGAAPVSIEAGSAVGKTTSFAGSSASSYSPSEAALKNFTPSETPTMDIATKGPFPTSRDPLPSVPPTTTNSSRGTNSTLAKITTSAKTTMKPPTATPTTARTRPTTDVSAGENGGFLLLRLSVASPEDLTDPRVAERLMQQLHRELHAHAPHFQVSLLRVRRG

SEQ ID NO: 748787 - protein, 503 aa, Homo sapiens; identical to SEQ ID NO: 748783

SEQ ID NO: 748788 - protein, 557 aa, Homo sapiens
MGCLWGLALPLFFFCWEVGVSGSSAGPSTRRADTAMTTDDTEVPAMTLAPGHAALETQTLSAETSSRASTPAGPIPEAETRGAKRISPARETRSFTKTSPNFMVLIATSVETSAASGSPEGAGMTTVQTITGSDPEEAIFDTLCTDDSSEEAKTLTMDILTLAHTSTEAKGLSSESSASSDGPHPVITPSRASESSASSDGPHPVITPSRASESSASSDGPHPVITPSRASESSASSDGPHPVITPSWSPGSDVTLLAEALVTVTNIEVINCSITEIETTTSSIPGASDIDLIPTEGVKASSTSDPPALPDSTEAKPHITEVTASAETLSTAGTTESAAPHATVGTPLPTNSATEREVTAPGATTLSGALVTVSRNPLEETSALSVETPSYVKVSGAAPVSIEAGSAVGKTTSFAGSSASSYSPSEAALKNFTPSETPTMDIATKGPFPTSRDPLPSVPPTTTNSSRGTNSTLAKITTSAKTTMKPPTATPTTARTRPTTDVSAGENGGFLLLRLSVASPEDLTDPRVAERLMQQLHRELHAHAPHFQVSLLRVRRG

SEQ ID NO: 748789 - protein, 503 aa, Homo sapiens; identical to SEQ ID NO: 748783

SEQ ID NO: 748790 - protein, 538 aa, Homo sapiens
MGCLWGLALPLFFFCWEVGVSGSSAGPSTRRADTAMTTDDTEVPAMTLAPGHAALETQTLSAVIVYMPAIWGRKNMFIPKTGAKRISPARETRSFTKTSPNFMVLIATSVETSAASGSPEGAGMTTVQTITGSDPEEAIFDTLCTDDSSEEAKTLTMDILTLAHTSTEAKGLSSESSASSDGPHPVITPSRASESSASSDGPHPVITPSRASESSASSDGPHPVITPSWSPGSDVTLLAEALVTVTNIEVINCSITEIETTTSSIPGASDIDLIPTEGVKASSTSDPPALPDSTEAKPHITEVTASAETLSTAGTTESAAPHATVGTPLPTNSATEREVTAPGATTLSGALVTVSRNPLEETSALSVETPSYVKVSGAAPVSIEAGSAVGKTTSFAGSSASSYSPSEAALKNFTPSETPTMDIATKGPFPTSRDPLPSVPPTTTNSSRGTNSTLAKITTSAKTTMKPPTATPTTARTRPTTDVSAGENGGFLLLRLSVASPEDLTDPRVAERLMQQLHRELHAHAPHFQVSLLRVRRG

SEQ ID NO: 748791 - protein, 586 aa, Homo sapiens
MGCLWGLALPLFFFCWEVGVSGSSAGPSTRRADTAMTTDDTEVPAMTLAPGHAALETQTLSAETSSRASTPAGPIPEAETRGAKRISPARETRSFTKTSPNFMVLIATSVETSAASGSPEGAGMTTVQTITGSDPEEAIFDTLCTDDSSEEAKTLTMDILTLAHTSTEAKGLSSESSASSDGPHPVITPSRASESSASSDGPHPVITPSRASESSASSDGPHPVITPSWSPGSDVTLLAEALVTVTNIEVINCSITEIETTTSSIPGASDIDLIPTEGVKASSTSDPPALPDSTEAKPHITEVTASAETLSTAGTTESAAPHATVGTPLPTNSATEREVTAPGATTLSGALVTVSRNPLEETSALSVETPSYVKVSGAAPVSIEAGSAVGKTTSFAGSSASSYSPSEAALKNFTPSETPTMDIATKGPFPTSRDPLPSVPPTTTNSSRGTNSTLAKITTSAKTTMKPPTATPTTARTRPTTDVSAGENGGFLLLRLSVASPEDLTDPRVAERLMQQVSGHFPGQGSRGRGEVRRGCREDPQDTEEQLPHLEGSLVSYGELGAESEDLCLALLLPAFSEFFISFSAM

SEQ ID NO: 748792 - protein, 280 aa, Homo sapiens
RPDVDFGAGASDIDLIPTEGVKASSTSDPPALPDSTEAKPHITEVTASAETLSTAGTTESAAPHATVGTPLPTNSATEREVTAPGATTLSGALVTVSRNPLEETSALSVETPSYVKVSGAAPVSIEAGSAVGKTTSFAGSSASSYSPSEAALKNFTPSETPTMDIATKGPFPTSRDPLPSVPPTTTNSSRGTNSTLAKITTSAKTTMKPPTATPTTARTRPTTDVSAGENGGFLLLRLSVASPEDLTDPRVAERLMQQLHRELHAHAPHFQVSLLRVRRG

SEQ ID NO: 748793 - protein, 414 aa, Homo sapiens
MGCLWGLALPLFFFCWEVGVSGSSAGPSTRRADTAMTTDDTEVPAMTLAPGHAALETQTLSAETSSRASTPAGPIPEAETRGAKRISPARETRSFTKTSPNFMVLIATSVETSAASGSPEGAGMTTVQTITGSDPEEAIFDTLCTDDSSEEAKTLTMDILTLAHTSTEAKGLSSESSASSDGPHPVITPSRASESSASSDGPHPVITPSRASESSASSDGPHPVITPSWSPGSDVTLLAEALVTVTNIEVINCSITEIETTTSSIPGASDIDLIPTEGVKASSTSDPPALPDSTEAKPHITEVTASAETLSTAGTTESAAPHATVGTPLPTNSATEREVTAPGATTLSGALVTVSRNPLEETSALSVETPSYVKVSGAAPVSIEAGSAVGKTTSFAGSSASSYSPPKVKIRAEY

SEQ ID NO: 748794 - protein, 118 aa, Homo sapiens
MDIATKGPFPTSRDPLPSVPPTTTNSSRGTNSTLAKITTSAKTTMKPPTATPTTARTRPTTDVSAGENGGFLLLRLSVASPEDLTDPRVAERLMQQLHRELHAHAPHFQVSLLRVRRG

SEQ ID NO: 748795 - protein, 194 aa, Homo sapiens
APPLSGAVKGVRPPRLSAGAHQSLAKQPRFRSCQGLLCQPGNARILVVNSFAGSSASSYSPSEAALKNFTPSETPTMDIATKGPFPTSRDPLPSVPPTTTNSSRGTNSTLAKITTSAKTTMKPPTATPTTARTRPTTDVSAGENGGFLLLRLSVASPEDLTDPRVAERLMQQLHRELHAHAPHFQVSLLRVRRG

SEQ ID NO: 748796 - protein, 324 aa, Homo sapiens
MGCLWGLALPLFFFCWEVGVSGSSAGPSTRRADTAMTTDDTEVPAMTLAPGHAALETQTLSAETSSRASTPAGPIPEAETRGAKRISPARETRSFTKTSPNFMVLIATSVETSAASGSPEGAGMTTVQTITGSDPEEAIFDTLCTDDSSEEAKTLTMDILTLAHTSTEAKGLSSESSASSDGPHPVITPSRASESSASSDGPHPVITPSRASESSASSDGPHPVITPSWSPGSDVTLLAEALVTVTNIEVINCSITEIETTTSSIPGASDIDLIPTEGVKASSTSDPPALPEAPGMLEVVGPISVMLQLITSRLVTVTRASREE

SEQ ID NO: 748797 - protein, 193 aa, Homo sapiens
MLCTEGVENASYVTESRSVVPCRLAGADSKGTGRSLQAAAPNPRTFAVLGRITTARGEVATVMNSAMWHQTATQTTVSSATLVTHIQARFHRQQSWMLWLAEANPLPALQAKAGMWPRWFLRSLTILRSCILSISGPSQMTKMVLQMVLRMENPPSPARSHLDWMQSMVQRVLQTSLPGMPFTMAVRRIKKRA

SEQ ID NO: 748798 - protein, 402 aa, Homo sapiens [sequence omitted]

SEQ ID NO: 748799 - protein, 587 aa, Homo sapiens
ARVSALCSAAGSGSGAAAAAGPEPRALRPAAGCVRPRSPASRLGAPTRPRSGAGTRAGAEGGPGPGRRRGRSSRRRQQPRQPRRRRQRQRQRQQRARRSQPGLVGPAPARPPARTASGRPLHCARYKEMVELVISPSLTVNSDCLDKLKFNRADAAVWTLSDRQGITKSAPLRVSQLFSRSCPRVLPRQPSTAMAAYGQTQYSAGIQQATPYTAYPPPAQAYGIPSYSIKTEDSLNHSPGQSGFLSYGSSFSTSPTGQSPYTYQMHGTTGFYQGGNGLGNAAGFGSVHQDYPSYPGFPQSQYPQYYGSSYNPPYVPASSICPSPLSTSTYVLQEASHNVPNQSSESLAGEYNTHNGPSTPAKEGDTDRPHRASDGKLRGRSKRSSDPSPAGDNEIERVFVWDLDETIIIFHSLLTGTFASRYGKDTTTSVRIGLMMEEMIFNLADTHLFFNDLEDCDQIHVDDVSSDDNGQDLSTYNFSADGFHSSAPGANLCLGSGVHGGVDWMRKLAFRYRRVKEMYNTYKNNVGGKESCFERIMQRFGRKAVYVVIGDGVEEEQGAKKHNMPFWRISCHADLEALRHALELEYL

SEQ ID NO: 748800 - protein, 666 aa, Homo sapiens
ARVSALCSAAGSGSGAAAAAGPEPRALRPAAGCVRPRSPASRLGAPTRPRSGAGTRAGAEGGPGPGRRRGRSSRRRQQPRQPRRRRQRQRQRQQRARRSQPGLVGPAPARPPARTASGRPLHCARYKEMVELVISPSLTVNSDCLDKLKFNRADAAVWTLSDRQGITKSAPLRVSQLFSRSCPRVLPRQPSTAMAAYGQTQYSAGIQQATPYTAYPPPAQAYGIPSYSIKTEDSLNHSPGQSGFLSYGSSFSTSPTGQSPYTYQMHGTTGFYQGGNGLGNAAGFGSVHQDYPSYPGFPQSQYPQYYGSSYNPPYVPASSICPSPLSTSTYVLQEASHNVPNQSSESLAGEYNTHNGPSTPAKEGDTDRPHRASDGKLRGRSKRSSDPSPAGDNEIERVFVWDLDETIIIFHSLLTGTFASRYGKDTTTSVRIGLMMEEMIFNLADTHLFFNDLEDCDQIHVDDVSSDDNGQDLSTYNFSADGFHSSAPGANLCLGSGVHGGVDWMRKLAFRYRRVKEMYNTYKNNVGGLIGTPKRETWLQLRAELEALTDLWLTHSLKALNLINSRPNCVNVLVTTTQLIPALAKVLLYGLGSVFPIENIYSATKTGKESCFERIMQRFGRKAVYVVIGDGVEEEQGAKKHNMPFWRISCHADLEALRHALELEYL

SEQ ID NO: 748801 - protein, 538 aa, Homo sapiens
MVELVISPSLTVNSDCLDKLKFNRADAAVWTLSDRQGITKSAPLRVSQLFSRSCPRVLPRQPSTAMAAYGQTQYSAGIQQATPYTAYPPPAQAYGIPSYSIKTEDSLNHSPGQSGFLSYGSSFSTSPTGQSPYTYQMHGTTGFYQGGNGLGNAAGFGSVHQDYPSYPGFPQSQYPQYYGSSYNPPYVPASSICPSPLSTSTYVLQEASHNVPNQSSESLAGEYNTHNGPSTPAKEGDTDRPHRASDGKLRGRSKRSSDPSPAGDNEIERVFVWDLDETIIIFHSLLTGTFASRYGKDTTTSVRIGLMMEEMIFNLADTHLFFNDLEDCDQIHVDDVSSDDNGQDLSTYNFSADGFHSSAPGANLCLGSGVHGGVDWMRKLAFRYRRVKEMYNTYKNNVGGLIGTPKRETWLQLRAELEALTDLWLTHSLKALNLINSRPNCVNVLVTTTQLIPALAKVLLYGLGSVFPIENIYSATKTGKESCFERIMQRFGRKAVYVVIGDGVEEEQGAKKHNMPFWRISCHADLEALRHALELEYL

SEQ ID NO: 748802 - protein, 402 aa, Homo sapiens [sequence omitted]

SEQ ID NO: 748803 - protein, 412 aa, Homo sapiens
GTRQLFSRSCPRVLPRQPSTAMAAYGQTQYSAGIQQATPYTAYPPPAQAYGIPSYSIKTEDSLNHSPGQSGFLSYGSSFSTSPTGQSPYTYQMHGEYNTHNGPSTPAKEGDTDRPHRASDGKLRGRSKRSSDPSPAGDNEIERVFVWDLDETIIIFHSLLTGTFASRYGKDTTTSVRIGLMMEEMIFNLADTHLFFNDLEDCDQIHVDDVSSDDNGQDLSTYNFSADGFHSSAPGANLCLGSGVHGGVDWMRKLAFRYRRVKEMYNTYKNNVGGLIGTPKRETWLQLRAELEALTDLWLTHSLKALNLINSRPNCVNVLVTTTQLIPALAKVLLYGLGSVFPIENIYSATKTGKESCFERIMQRFGRKAVYVVIGDGVEEEQGAKKHNMPFWRISCHADLEALRHALELEYL

SEQ ID NO: 748804 - protein, 170 aa, Homo sapiens
FNFYTIKTKHREGPRRVLTDALFVQFLHNVGGLIGTPKRETWLQLRAELEALTDLWLTHSLKALNLINSRPNCVNVLVTTTQLIPALAKVLLYGLGSVFPIENIYSATKTGKESCFERIMQRFGRKAVYVVIGDGVEEEQGAKKHNMPFWRISCHADLEALRHALELEYL

SEQ ID NO: 748805 - protein, 672 aa, Homo sapiens
ARVSALCSAAGSGSGAAAAAGPEPRALRPAAGCVRPRSPASRLGAPTRPRSGAGTRAGAEGGPGPGRRRGRSSRRRQQPRQPRRRRQRQRQRQQRARRSQPGLVGPAPARPPARTASGRPLHCARYKEMVELVISPSLTVNSDCLDKLKFNRADAAVWTLSDRQGITKSAPLRVSQLFSRSCPRVLPRQPSTAMAAYGQTQYSAGIQQATPYTAYPPPAQAYGIPSYSIKTEDSLNHSPGQSGFLSYGSSFSTSPTGQSPYTYQMHGTTGFYQGGNGLGNAAGFGSVHQDYPSYPGFPQSQYPQYYGSSYNPPYVPASSICPSPLSTSTYVLQEASHNVPNQSSESLAGEYNTHNGPSTPAKEGDTDRPHRASDGKLRGRSKRSSDPSPAGDNEIERVFVWDLDETIIIFHSLLTGTFASRYGKDTTTSVRIGLMMEEMIFNLADTHLFFNDLEDCDQIHVDDVSSDDNGQDLSTYNFSADGFHSSAPGANLCLGSGVHGGVDWMRKLAFRYRRVKEMYNTYKNNVGGLIGTPKRETWLQLRAELEALTDLWLTHSLKALNLINSRPNCVNVLVTTTQLIPALAKVLLYGLGSVFPIENIYSATKTAAISPSDPLAFPTSPPRIRNYALVPVWLGFLVVGLVWFFELVCGVVHSSNVSTLFSKLCFVGTIIL

SEQ ID NO: 748806 - protein, 666 aa, Homo sapiens
  misc_feature (645)..(645): Xaa can be any naturally occurring amino acid
  misc_feature (647)..(647): Xaa can be any naturally occurring amino acid
ARVSALCSAAGSGSGAAAAAGPEPRALRPAAGCVRPRSPASRLGAPTRPRSGAGTRAGAEGGPGPGRRRGRSSRRRQQPRQPRRRRQRQRQRQQRARRSQPGLVGPAPARPPARTASGRPLHCARYKEMVELVISPSLTVNSDCLDKLKFNRADAAVWTLSDRQGITKSAPLRVSQLFSRSCPRVLPRQPSTAMAAYGQTQYSAGIQQATPYTAYPPPAQAYGIPSYSIKTEDSLNHSPGQSGFLSYGSSFSTSPTGQSPYTYQMHGTTGFYQGGNGLGNAAGFGSVHQDYPSYPGFPQSQYPQYYGSSYNPPYVPASSICPSPLSTSTYVLQEASHNVPNQSSESLAGEYNTHNGPSTPAKEGDTDRPHRASDGKLRGRSKRSSDPSPAGDNEIERVFVWDLDETIIIFHSLLTGTFASRYGKDTTTSVRIGLMMEEMIFNLADTHLFFNDLEDCDQIHVDDVSSDDNGQDLSTYNFSADGFHSSAPGANLCLGSGVHGGVDWMRKLAFRYRRVKEMYNTYKNNVGGLIGTPKRETWLQLRAELEALTDLWLTHSLKALNLINSRPNCVNVLVTTTQLIPALAKVLLYGLGSVFPIENIYSATKTGKESCFERIMQRFGRKAVYVVIGDGVEEEQGAKKHNMPXLXSEFGTSFFFFFFFFFFFSC

SEQ ID NO: 748807 - protein, 606 aa, Homo sapiens
ARVSALCSAAGSGSGAAAAAGPEPRALRPAAGCVRPRSPASRLGAPTRPRSGAGTRAGAEGGPGPGRRRGRSSRRRQQPRQPRRRRQRQRQRQQRARRSQPGLVGPAPARPPARTASGRPLHCARYKEMVELVISPSLTVNSDCLDKLKFNRADAAVWTLSDRQGITKSAPLRVSQLFSRSCPRVLPRQPSTAMAAYGQTQYSAGIQQATPYTAYPPPAQAYGIPSYSIKTEDSLNHSPGQSGFLSYGSSFSTSPTGQSPYTYQMHGTTGFYQGGNGLGNAAGFGSVHQDYPSYPGFPQSQYPQYYGSSYNPPYVPASSICPSPLSTSTYVLQEASHNVPNQSSESLAGEYNTHNGPSTPAKEGDTDRPHRASDGKLRGRSKRSSDPSPAGDNEIERVFVWDLDETIIIFHSLLTGTFASRYGKDTTTSVRIGLMMEEMIFNLADTHLFFNDLEDCDQIHVDDVSSDDNGQDLSTYNFSADGFHSSAPGANLCLGSGVHGGVDWMRKLAFRYRRVKEMYNTYKNNVGGEYCEPWASEEGKLIGMDAVSAPGREVHKFSTSPLNATLTTPFGIEHWDFVTFTLGVGKLRDGGCIWSKILQATNGAGW

SEQ ID NO: 748808 - protein, 429 aa, Homo sapiens
ARVSALCSAAGSGSGAAAAAGPEPRALRPAAGCVRPRSPASRLGAPTRPRSGAGTRAGAEGGPGPGRRRGRSSRRRQQPRQPRRRRQRQRQRQQRARRSQPGLVGPAPARPPARTASGRPLHCARYKEMVELVISPSLTVNSDCLDKLKFNRADAAVWTLSDRQGITKSAPLRVSQLFSRSCPRVLPRQPSTAMAAYGQTQYSAGIQQATPYTAYPPPAQAYGIPSYSIKTEDSLNHSPGQSGFLSYGSSFSTSPTGQSPYTYQMHGTTGFYQGGNGLGNAAGFGSVHQDYPSYPGFPQSQYPQYYGSSYNPPYVPASSICPSPLSTSTYVLQEASHNVPNQSSESLAGEYNTHNGPSTPAKEGDTDRPHRASDGKLRGRSKRSSDPSPAGDNEIEEKQLKDVFKQNKEENQGRETWDPENSGSNPEIQ

SEQ ID NO: 748809 - protein, 102 aa, Homo sapiens
MPLTKSRLTFPEYHPRDRAVPVQVCALALHGGQRGRNKGSCGLGGHSVRTHKPHKEVSRRPPIPFHSPAEQDRERSVLRKVFHSTRQSLQLLCCIVLSPVTL

SEQ ID NO: 748810 - protein, 123 aa, Homo sapiens
REFWRGLREGKGAASFTGRVQLTSLPLCRLEKNGPDPLDSSDERIQREAFESVLAETFFTKEPLRCWCPWRAWVENELIYEEVSEWTKPGAMDSKDVEVSSIQVRRKPQHGVCSQLLGNYRCL

SEQ ID NO: 748811 - protein, 102 aa, Homo sapiens; identical to SEQ ID NO: 748809

SEQ ID NO: 748812 - protein, 102 aa, Homo sapiens; identical to SEQ ID NO: 748809

SEQ ID NO: 748813 - protein, 175 aa, Homo sapiens
MTVNMPSAHASPVSGSRTWVNTLAESLTGVLSWLLSCLLMERCLASGPDLDESSWHMLEAWNVIPQFHCHQFSANPTVAFSANFMVFILVSVSSPERGHLKGIERVCLVCCCSPSTESDALLCPCSWKAWLRQFPCLFPFQGHPLIRFLEEETSRISGLPSLHLSPNLPFLDPCA

SEQ ID NO: 748814 - protein, 175 aa, Homo sapiens; identical to SEQ ID NO: 748813

SEQ ID NO: 748815 - protein, 394 aa, Homo sapiens
KCDVCGKIFNQKQYIVYHHRCHTGEKTYKCNECGKTFTQMSSLVCHRRLHTGEKPYKCNECGKTFSEKSSLRCHRRLHTGEKPYKCNECGKTFGRNSALVIHKAIHTGEKPYKCNECGKTFSQKSSLQCHHILHTGEKPYKCEECDNVYIRRSHLERHRKIHTGEGSYKCKVCDKVFRSDSYLAEHQRVHTGEKPYKCNKCGRSFSRKSSLQYHHTLHTGEKPYTCNECGKVFSRRENLARHHRLHAGEKPYKCEECDKVFSRRSHLERHRRIHTGEKPYKCKVCDKAFRSDSCLANHTRVHTGEKPYKCNKCAKVFNQKGILAQHQRVHTGEKPYKCNECGKVFNQKASLAKHQRVHTAEKPYKCNECGKAFTGQSTLIHHQAIHGCRETLQM

SEQ ID NO: 748816 - protein, 123 aa, Homo sapiens
MSSGGSPGCLRLAEGCPNHRAWVRWNRRQPHSAFLIASHLFLSVLVWFNSFQGLELESENPRHLLWNVCLVVLVCPSSSLACRFQVYQRTFCSVESHRTKRKILQLFANILPYLYKQPYTKKH

SEQ ID NO: 748817 - protein, 307 aa, Homo sapiens
RAGGGGRRATGRAQDEGGHCWGSASGRRTLRRRRAAQRCGGGARADAGPMARTTSQLYDAVPIQSSVVLCSCPSPSMVRTQTESSTPPGIPGGSRQGPAMDGTAAEPRPGAGSLQHAQPPPQPRKKRPEDFKFGKILGEGSFSTVVLARELATSREYAIKILEKRHIIKENKVPYVTRERDVMSRLDHPFFVKLYFTFQDDEKLYFGLSYAKNGELLKYIRKIGSFDETCTRFYTAEIVSALEYLHGKGIIHRDLKPENILLNEDMHIQITDFGTAKVLSPESKQGLLKQHVLGLVGRVDLVLSLGL

SEQ ID NO: 748818 - protein, 238 aa, Homo sapiens
RAGGGGRRATGRAQDEGGHCWGSASGRRTLRRRRAAQRCGGGARADAGPMARTTSQLYDAVPIQSSVVLCSCPSPSMVRTQTESSTPPGIPGGSRQGPAMDGTAAEPRPGAGSLQHAQPPPQPRKKRPEDFKFGKILGEGSFSTVVLARELATSREYATRANSFVGTAQYVSPELLTEKSACKSSDLWALGCIIYQLVAGLPPFRAGNEYLIFQKIIKLEYDFPEKFFPKARDLVEKL

SEQ ID NO: 748819 - protein, 352 aa, Homo sapiens
RAGGGGRRATGRAQDEGGHCWGSASGRRTLRRRRAAQRCGGGARADAGPMARTTSQLYDAVPIQSSVVLCSCPSPSMVRTQTESSTPPGIPGGSRQGPAMDGTAAEPRPGAGSLQHAQPPPQPRKKRPEDFKFGKILGEGSFSTVVLARELATSREYAIKILEKRHIIKENKVPYVTRERDVMSRLDHPFFVKLYFTFQDDEKLYFGLSYAKNGELLKYIRKIGSFDETCTRFYTAEIVSALEYLHGKGIIHRDLKPENILLNEDMHIQITDFGTAKVLSPESKQARANSFVGTAQYVSPELLTEKSACKSSDLWALGCIIYQLVAGLPPFRAGKEYLNSEDYKGICFRKFS

SEQ ID NO: 748820 - protein, 340 aa, Homo sapiens
MVRTQTESSTPPGIPGGSRQGPAMDGTAAEPRPGAGSLQHAQPPPQPRKKRPEDFKFGKILGEGSFSTVVLARELATSREYAIKILEKRHIIKENKVPYVTRERDVMSRLDHPFFVKLYFTFQDDEKLYFGLSYAKNGELLKYIRKIGSFDETCTRFYTAEIVSALEYLHGKGIIHRDLKPENILLNEDMHIQITDFGTAKVLSPESKQARANSFVGTAQYVSPELLTEKSACKSSDLWALGCIIYQLVAGLPPFRAGKEYLNSEDYKGICFRKFSWEDWGNWVDAHRVRSSQKNSRTGDAWDRRDKKSRFEHTPVPDREVDHKHRKKRSSEDTYYTMRV

SEQ ID NO: 748821 - protein, 367 aa, Homo sapiens
RGGGLDAPYDAVPIQSSVVLCSCPSPSMVRTQTESSTPPGIPGGSRQGPAMDGTAAEPRPGAGSLQHAQPPPQPRKKRPEDFKFGKILGEGSFSTVVLARELATSREYAIKILEKRHIIKENKVPYVTRERDVMSRLDHPFFVKLYFTFQDDEKLYFGLSYAKNGELLKYIRKIGSFDETCTRFYTAEIVSALEYLHGKGIIHRDLKPENILLNEDMHIQITDFGTAKVLSPESKQARANSFVGTAQYVSPELLTEKSACKSSDLWALGCIIYQLVAGLPPFRAGKEYLNSEDYKGICFRKFSSGRTGGTGLTPTGCVAVRRTLEPVTRGIGEIRSLVFNTRLYLTEKRPQTQEKEKQRGHLLTMRV

SEQ ID NO: 748822 - protein, 110 aa, Homo sapiens [sequence omitted]

SEQ ID NO: 748823 - protein, 800 aa, Homo sapiens
MAVRELCFPRQRQVLFLFLFWGVSLAGSGFGRYSVTEETEKGSFVVNLAKDLGLAEGELAARGTRVVSDDNKQYLLLDSHTGNLLTNEKLDREKLCGPKEPCMLYFQILMDDPFQIYRAELRVRDINDHAPVFQDKETVLKISENTAEGTAFRLERAQDPDGGLNGIQNYTISPNSFFHINISGGDEGMIYPELVLDKALDREEQGELSLTLTALDGGSPSRSGTSTVRIVVLDVNDNAPQFAQALYETQAPENSPIGFLIVKVWAEDVDSGVNAEVSYSFFDASENIRTTFQINPFSGEIFLRELLDYELVNSYKINIQAMDGGGLSARCRVLVEVLDTNDNPPELIVSSFSNSVAENSPETPLAVFKINDRDSGENGKMVCYIQENLPFLLKPSVENFYILITEGALDREIRAEYNITITVTDLGTPRLKTEHNITVLVSDVNDNAPAFTQTSYTLFVRENNSPALHIGSVSATDRDSGTNAQVTYSLLPPQDPHLPLASLVSINADNGHLFALRSLDYEALQAFEFRVGATDRGSPALSREALVRVLVLDANDNSPFVLYPLQNGSAPCTELVPRAAEPGYLVTKVVAVDGDSGQNAWLSYQLLKATEPGLFGVWAHNGEVRTARLLSERDAAKHRLVVLVKDNGEPPRSATATLHLLLVDGFSQPYLPLPEAAPAQAQAEADLLTVYLVVALASVSSLFLLSVLLFVAVRLCRRSRAASVGRCSVPEGPFPGHLVDVRGAETLSQSYQYEVCLTGGPGTSEFKFLKPVISDIQAQGPGRKGEENSTFRNSFGFNIQ

SEQ ID NO: 748824 - protein, 262 aa, Homo sapiens
MDGKQGGMDGSKPAGPRDFPGIRLLSNPLMGDAVSDWSPMHEAAIHGHQLSLRNLISQGWAVNIITADHVSPLHEACLGGHLSCVKILLKHGAQVNGVTADWHTPLFNACVSGSWDCVNLLLQHGASVQPESDLASPIHEAARRGHVECVNSLIAYGGNIDHKISHLGTPLYLACENQQRACVKKLLESGADVNQGKGQDSPLHAVARTASEELACLLMDFGADTQAKNAEGKRPVELVPPESPLAQLFLEREGASLPKPKP

SEQ ID NO: 748825 - protein, 294 aa, Homo sapiens
MDGKQGGMDGSKPAGPRDFPGIRLLSNPLMGDAVSDWSPMHEAAIHGHQLSLRNLISQGWAVNIITADHVSPLHEACLGGHLSCVKILLKHGAQVNGVTADWHTPLFNACVSGSWDCVNLLLQHGASVQPESDLASPIHEAARRGHVECVNSLIAYGGNIDHKISHLGTPLYLACENQQRACVKKLLESGADVNQGKGQDSPLHAVARTASEELACLLMDFGADTQAKNAEGKRPVELVPPESPLAQLFLEREGPPSLMQLCRLRIRKCFGIQQHHKITKLVLPEDLKQFLLHL

SEQ ID NO: 748826 - protein, 262 aa, Homo sapiens; identical to SEQ ID NO: 748824

SEQ ID NO: 748827 - protein, 252 aa, Homo sapiens
MDGKQGGMDGSKPAGPRDFPGIRLLSNPLMGDAVSDWSPMHEAAIHGHQLSLRNLISQGWAVNIITADHVSPLHEACLGGHLSCVKILLKHGAQVNGVTADWHTPLFNACVSGSWDCVNLLLQHGASVQPESDLASPIHEAARRAYGGNIDHKISHLGTPLYLACENQQRACVKKLLESGADVNQGKGQDSPLHAVARTASEELACLLMDFGADTQAKNAEGKRPVELVPPESPLAQLFLEREGASLPKPKP

SEQ ID NO: 748828 - protein, 233 aa, Homo sapiens
MDGKQGGMDGSKPAGPRDFPGIRLLSNPLMGDAVSDWSPMHEAAIHGHQLSLRNLISQGWAVNIITADHVSPLHEACLGGHLSCVKILLKHGAQHGASVQPESDLASPIHEAARRGHVECVNSLIAYGGNIDHKISHLGTPLYLACENQQRACVKKLLESGADVNQGKGQDSPLHAVARTASEELACLLMDFGADTQAKNAEGKRPVELVPPESPLAQLFLEREGASLPKPKP

SEQ ID NO: 748829 - protein, 262 aa, Homo sapiens; identical to SEQ ID NO: 748824

SEQ ID NO: 748830 - protein, 265 aa, Homo sapiens
MDGKQGGMDGSKPAGPRDFPGIRLLSNPLMGDAVSDWSPMHEAAIHGHQLSLRNLISQGWAVNIITADHVSPLHEACLGGHLSCVKILLKHGAQHGASVQPESDLASPIHEAARRGHVECVNSLIAYGGNIDHKISHLGTPLYLACENQQRACVKKLLESGADVNQGKGQDSPLHAVARTASEELACLLMDFGADTQAKNAEGKRPVELVPPESPLAQLFLEREGPPSLMQLCRLRIRKCFGIQQHHKITKLVLPEDLKQFLLHL

SEQ ID NO: 748831 - protein, 322 aa, Homo sapiens
MDGKQGGMDGSKPAGPRDFPGIRLLSNPLMGDAVSDWSPMHEAAIHGHQLSLRNLISQGWAVNIITADHVSPLHEACLGGHLSCVKILLKHGAQVNGVTADWHTPLFNACVSGSWDCVNLLLQHGASVQPESDLASPIHEAARRGHVECVNSLIAYGGNIDHKISHLGTPLYLACENQQRACVKKLLESGADVNQGKGQDSPLHAVARTASEELACLLMDFGADTQAKNAEGKRPVELVPPESPLAQLFLEREDGVTLCRPGWSAVARSRLIATSASRNSDKMCSPGQQSFMLLVIRRKEYGESSIDANQPLLVGRPLLAGT

SEQ ID NO: 748832 - protein, 120 aa, Homo sapiens
MDGKQGGMDGSKPAGPRDFPGIRLLSNPLMGDAVSDWSPMHEAAIHGHQLSLRNLISQGWAVNIITADHVSPLHEACLGGHLSCVKILLKHGAQHGASVQPESDLASPIHEAARRAWPTW

SEQ ID NO: 748833 - protein, 99 aa, Homo sapiens [sequence omitted]

SEQ ID NO: 748834 - protein, 107 aa, Homo sapiens
LNIRSSNKSITFSFFFKTESYSVTQAECSGTISAHCSLHLLGSNDSYASSLPSSWEYRHRPPHPADFLYFHKEGGVELLSSGSLPASASQSARITGMSDHAWPFLCF

SEQ ID NO: 748835 - protein, 129 aa, Homo sapiens
TYDIPTANIILNGEKLKASPLGTGTRQGCLLSPLLFNIELEVLTRAIRQEKEIKGIQIGKDEVKLSLFDDMIFYLENPKDSSRKLLELIKEFSRVPIYKINVHKSVAFLYTNSDQAENQELHHFYNSCK

SEQ ID NO: 748836 - protein, 367 aa, Homo sapiens
MLAVGAMEGTRQSAFLLSSPPLAALHSMAEMKTPLYPAAYPPLPAGPPSSSSSSSSSSSPSPPLGTHNPGGLKPPATGGLSSLGSPPQQLSAATPHGINDILSRPSMPVASGAALPSASPSGSSSSSSSSASASSASAAAAAAAAAAAAASSPAGLLAGLPRFSSLSPPPPPPGLYFSPSAAAVAAVGRYPKPLAELPGRTPIFWPGVMQSPPWRDARLACTPHQGSILLDKDGKRKHTRPTFSGQQIFALEKTFEQTKYLAGPERARLAYSLGMTESQVKVWFQNRRTKWRKKHAAEMATAKKKQDSETERLKGASENEEEDDDYNKPLDPNSDDEKITQLLKKHKSSSGGGGGLLLHASEPESSS

SEQ ID NO: 748837 - protein, 129 aa, Homo sapiens
GPVDTAWSAVRIGLYAQHLDHWLRYFPLSHFLFVSGERLVSDPAGEVGRVQDFLGLKRVVTDKHFYFNATKGFPCLKKAQGGSRPRCLGKSKGRPHPRVPQAVVRRLQEFYRPFNRRFYQMTGQDFGWG

SEQ ID NO: 748838 - protein, 75 aa, Homo sapiens
FTPTAKAPPAIGGSHKGVMETPVWQRGVTNTSVARLHGAWASFSVRKGSLQGNCLQKSCSYCGGTDLGPWSKLSP

SEQ ID NO: 748839 - protein, 397 aa, Homo sapiens
AGAVARGQLTRRALTQKLGPGGGSGRGGPRRAESPGGSCGRGRRGLEWVVAPSWDAPPSTISPGLQGPRAYTASSHAVLRNPCWPQNTSALPPVQPCLAGGPSSTAMVWKKLGSRNFSSCPSGSIQWIWDVLGECAQDGWDEASVGLGLISILCFAASTFPQFIKAYKTGNMDQALSLWFLLGWIGGDSCNLIGSFLADQLPLQTYTAVYYVLADLVMLTLYFYYKFRTRPSLLSAPINSVLLFLMGMACATPLLSAAGPVAAPREAFRGRALLSVESGSKPFTRQEVIGFVIGSISSVLYLLSRLPQIRTNFLRKSTQGISYSLFALVMLGNTLYGLSVLLKNPEEGQSEGSYLLHHLPWLVGSLGVLLLDTIISIQFLVYRRSTAASELEPLLPS

SEQ ID NO: 748840 - protein, 226 aa, Homo sapiens
MDQALSLWFLLGWIGGDSCNLIGSFLADQLPLQTYTAVYYVLADLVMLTLYFYYKFRTRPSLLSAPINSVLLFLMGMACATPLLSAAGPVAAPREAFRGRALLSVESGSKPFTRQEVIGFVIGSISSVLYLLSRLPQIRTNFLRKSTQGISYSLFALVMLGNTLYGLSVLLKNPEEGQSEGSYLLHHLPWLVGSLGVLLLDTIISIQFLVYRRSTAASELEPLLPS

SEQ ID NO: 748841 - protein, 387 aa, Homo sapiens
AGAVARGQLTRRALTQKLGPGGGSGRGGPRRAESPGGSCGRGRRGLEWVVAPSWDAPPSTISPGLQGPRAYTASSHAVLRNPCWPQNTSALPPVQPCLAGGPSSTAMVWKKLGSRNFSSCPSGSIQWIWDVLGECAQDGWDEASVGLGLISILCFAASTFPQFIKAYKTGNMDQALSLWFLLGWIGGDSCNLIGSFLADQLPLQDLVMLTLYFYYKFRTRPSLLSAPINSVLLFLMGMACATPLLSAAGPVAAPREAFRGRALLSVESGSKPFTRQEVIGFVIGSISSVLYLLSRLPQIRTNFLRKSTQGISYSLFALVMLGNTLYGLSVLLKNPEEGQSEGSYLLHHLPWLVGSLGVLLLDTIISIQFLVYRRSTAASELEPLLPS

SEQ ID NO: 748842 - protein, 328 aa, Homo sapiens
AGAVARGQLTRRALTQKLGPGGGSGRGGPRRAESPGGSCGRGRRGLEWVVAPSWDAPPSTISPGLQGPRAYTASSHAVLRNPCWPQNTSALPPVQPCLAGGPSSTAMVWKKLGSRNFSSCPSGSIQWIWDVLGECAQDGWDEASVGLGLISILCFAASTFPQFIKAYKTGNMDQALSLWFLLGWIGGDSCNLIGSFLADQLPLQTYTAVYYVLADLVMLTLYFYYKFRTRPSLLSAPINSVLLFLMGMACATPLLSAAGPVAAPREAFRGRALLSVESGSKPFTRQEVIGFVIGSISSVLYLLSRLPQIRTNSCTPPVCQAPSWTLEP

SEQ ID NO: 748843 - protein, 397 aa, Homo sapiens; identical to SEQ ID NO: 748839

SEQ ID NO: 748844 - protein, 167 aa, Homo sapiens
  misc_feature (4)..(4): Xaa can be any naturally occurring amino acid
TRVXVIDSYKGARFHSLSSNLYEEVENNKKWTENQFLKYRKDHLGHINECLKVLQEKLEKSENKMEEKLLQLSSKVENFINTQKQETQLSKVKHMENKLSKKMEQMEKQIWGELETMQNEYQSGFKSIHDSLSSLQQIQKTKMDLEKYKVQKDLKKLQRKIVELQEV

SEQ ID NO: 748845 - protein, 452 aa, Homo sapiens
MQLQFLGTLASSEKRKKSQRLFFKNIKSTKNKAGKASIMSSDTNVNKSASPTATAEEQPVEPDGPLPGSDNNQEKKVRLSPAKMSTKNSTDLVEYVDKSHAFLPIIPNTQRGQLEDRLNNQARTIAFLLEQAFRIKEDISACLQGTHGFRKEESLARKLLESHIQTITSIVKKLSQNIEILEDQIRARDQAATGTNFAVHEINIKHLQGVGDLRGRVARCDSSIVKLSGDIHLFRQEHRQIEKAIQEFVPALETLSKNLDMKVMQLLGKIETASSEQTSNLKMVQGDYRHEMNLLEFKFHSLSSNLYEEVENNKKWTENQFLKYRKDHLGHINECLKVLQEKLEKSENKMEEKLLQLSSKVENFINTQKQETQLSKVKHMENKLSKKMEQMEKQIWGELETMQNEYQSGFKSIHDSLSSLQQIQKTKMDLEKYKVQKDLKKLQRKIVELQEV

SEQ ID NO: 748846 - protein, 192 aa, Homo sapiens [sequence omitted]

SEQ ID NO: 748847 - protein, 330 aa, Homo sapiens
SPLGRGPRNRKTLVRMQLQFLGTLASSEKRKKSQRLFFKNIKSTKNKAGKASIMSSDTNVNKSASPTATAEEQPVEPDGPLPGSDNNQEKKVRLSPAKMSTKNSTDLVEYVDKSHAFLPIIPNTQRGQLEDRLNNQARTIAFLLEQAFRIKEDISACLQGTHGFRKEESLARKLLESHIQTITSIVKKLSQNIEILEDQIRARDQAATGTNFAVHEINIKHLQGVGDLRGRVARCDSSIVKLSGDIHLFRQEHRQIEKAIQEFVPALETLSKNLDMKVMQLLGKIETASSEQTSNLKMVQGDYRHEMNLLEFKKSLKIKWKKNCCSFQAK

SEQ ID NO: 748848 - protein, 130 aa, Homo sapiens
FSYYDAPLYVIFKAYEIWPASEKSENKMEEKLLQLSSKVENFINTQKQETQLSKVKHMENKLSKKMEQMEKQIWGELETMQNEYQSGFKSIHDSLSSLQQIQKTKMDLEKYKVQKDLKKLQRKIVELQEV

SEQ ID NO: 748849 - protein, 247 aa, Homo sapiens
SPLGRGPRNRKTLVRMQLQFLGTLASSEKRKKSQRLFFKNIKSTKNKAGKASIMSSDTNVNKSASPTATAEEQPVEPDGPLPGSDNNQEKKVRLSPAKMSTKNSTDLVEYVDKSHAFLPIIPNTQRGQLEDRLNNQARTIAFLLEQAFRIKEDISACLQGTHGFRKEESLARKLLESHIQTITSIVKKLSQNIEILEDQIRARDQAATGTNFAVHEINIKHLQGVGDLRGRVARTSLLARLYLRETG

SEQ ID NO: 748850 - protein, 134 aa, Homo sapiens
SPLGRGPRNRKTLVRMQLQFLGTLASSEKRKKSQRLFFKNIKSTKNKAGKASIMSSDTNVNKSASPTATAEEQPVEPDGPLPGSDNNQEKKVRLSPAKMSTKNSTDLVEYVDNAIPGAPPGKVYHRGTTPGTWK

SEQ ID NO: 748851 - protein, 112 aa, Homo sapiens
MVPRVVHPPTWGWGPTPLPTGTFSTVDNPVSWSQPKEWHTASPFSAFLLYSCPCLQFTFHWCSTECSGTHIPPVVGLVVVNIILPISRDKFGIFTLYFHEEPNLGWFFLFFF

SEQ ID NO: 748852 - protein, 56 aa, Homo sapiens
MVLIPTSLWGENQSLIRASEECMTQKGQEYKRSQAQGESLLCRVQGLGSIYNHNCK

SEQ ID NO: 748853 - protein, 448 aa, Homo sapiens
MALTLLEDWCKGMDMDPRKALLIVGIPMECSEVEIQDTVKAGLQPLCAYRVLGRMFRREDNAKAVFIELADTVNYTTLPSHIPGKGGSWEVVVKPRNPDDEFLSRLNYFLKDEGRSMTDVARALGCCSLPAESLDAEVMPQVRSPPLEPPKESMWYRKLKVFSGTASPSPGEETFEDWLEQVTEIMPIWQVSEVEKRRRLLESLRGPALSIMRVLQANNDSITVEQCLDALKQIFGDKEDFRASQFRFLQTSPKIGEKVSTFLLRLEPLLQKAVHKSPLSVRSTDMIRLKHLLARVAMTPALRGKLELLDQRGCPPNFLELMKLIRDEEEWENTEAVMKNKEKPSGRGRGASGRQARAEASVSAPQATVQARSFSDSSPQTIQGGLPPLVKRRRLLGSESTRGEDHGQATYPKAENQTPGREGPQAAGEELGNEAGAGAMSHPKPWET

SEQ ID NO: 748854 - protein, 259 aa, Homo sapiens
CGMKGAKETGQGRDPQEKRGGGGKGWYKQPWHLSVSLRHLDTQVGKDADTGGQKRRIPPFFHFYSVSGGPKEGTFVALLCSQAHLCVSSCRESTLGHAAALPSQERGRMAAQMSEASALAPQVFPSPLELMVGEPSSKSPGQCFWGFCYEKAAGPRGALAQLRELCCQWLMPEACSKEQMLELLVLEQLLGTLLPEIQAYTQEQWLGSPEEATALAERLQQESAGPGLQMNGGWSGGWVCFPCSRPQLSQHWGQSWVGG

SEQ ID NO: 748855 - protein, 139 aa, Homo sapiens
TCSENRTFTGLDLNLAFFAALMKADLGDWKKNREMVFMALQLPLQLSLERHRLENMVVSGFFFWLSKQLLFPSGLEWRHLSPILAGQEGAGGETKVIFPFTNTWKPGVTLQKTNPIMLQRGNCRGPSIQLSPPLSPPPS

SEQ ID NO: 748856 - protein, 1424 aa, Homo sapiens
WSTILFNVLPYKATDTYILKSPDEASQLLDDHIVMTQNMSFSPYKKPFEQRINSWENKLKLTQEVLEEWLNCQRSWLYLEPIFSSEDINQQLPVESKRYQTMERIWKKIMKNAYENREVINVCSDLRMLDSLRDCNKILDLVQKGLSEYLETKRSAFPRFYFLSDDELLEILSQTKDPTAVQPHLRKCFENIARLLFQEDLEITHMYSAEGEEVQLCFSIYPSSNVEDWLREVERSMKASVHDIIEKAIRAYPTMPRTQWVLNWPGQVTIAGCQTYWTMEVAEALEAGNLRSQLFPQLCQQLSDLVALVRGKLSRMQRAVLSALIVIEVHAKDVVSKLIQENVVSVNDFQWISQLRYYWTNNDLYIRAVNAEFIYGYEYLGNSGRLVITPLTDRCYLTLTGALHLKFGGAPAGPAGTGKTETTKDLGKALAIQTVVFNCSDQLDFMAMGKFFKGLASAGAWACFDEFNRIDIEVLSVVAQQITTIQKAQQQRVERFMFEGVEIPLVPSCAVFITMNPGYAGRTELPDNLKALFRPVAMMVPDYAMITEISLYSFGFNEASVLAKKITTTFKLSSEQLSSQDHYDFGMRAVKTVISAAGNLKRENPSMNEELICLRAIRDVNVPKFLQEDLKLFSGIVSDLFPTIKEEDTDYGILDEAIREACRNSNLKDVEGFLTKCIQLYETTVVRHGLMLVGPTGSGKSTCYRVLAAAMTSLKGQPSISGGMYEAVNYYVLNPKSITMGQLYGEFDLLTHEWTDGIFSSFIRAGAITSDTNKKWYMFDGPVDAIWIENMNTVLDDNKKLCLSSGEIIKLTEAMTMMFEVQDLAVASPATVSRCGMVYLEPSILGLMPFIECWLRKLPPLLKPYEEHFKALFVSFLEESISFVRSSVKEVIASTNCNLTMSLLKLLDCFFKPFLPREGLKKIPSEKLSRIVELIEPWFIFSLIWSVGATGDSSGRTSFSHWLRLKMENEQLTLLFPEEGLVFDYRLEDAGISGTNDSEDEEEEYKQVAWVKWMDSSAPFTMVPDTNYCNIIVPTMDTVQMSHLLDMLLTNKKPVLCIGPTGTGKTLTISDKLLKNLALDYISHFLTFSARTSANQTQDFIDSKLDKRRKGVFGPPLGRNFIFFIDDLNMPALETYGAQPPIELLRQWMDHGGWYDRKIIGAFKNLVDINFVCAMGPPGGGRNTVTPRLMRHFNYLSFAEMDEVSKKRIFSTILGNWLDGLLGEKSYRERVPGAPHIAHFTEPLVDATIMVYATITSQLLPTPAKSHYTFNLRDLSKVFQGMLMADPAKVEDQVQLLRLWYHENCRVFRDRLVNEEDRSWFDQLLKRCMEQWEVTFNKVCPFQPILYGDFMSPGSDVKSYELITSESKMMQVIEEYIEDYNQINTAKLKLVLFMDAMSHICRISRTLRQALGNALLLGVGGSGR

SEQ ID NO: 748857 - protein, 1227 aa, Homo sapiens
MKFGETEMSRYSAEGEEVQLCFSIYPSSNVEDWLREVERSMKASVHDIIEKAIRAYPTMPRTQWVLNWPGQVTIAGCQTYWTMEVAEALEAGNLRSQLFPQLCQQLSDLVALVRGKLSRMQRAVLSALIVIEVHAKDVVSKLIQENVVSVNDFQWISQLRYYWTNNDLYIRAVNAEFIYGYEYLGNSGRLVITPLTDRCYLTLTGALHLKFGGAPAGPAGTGKTETTKDLGKALAIQTVVFNCSDQLDFMAMGKFFKGLASAGAWACFDEFNRIDIEVLSVVAQQITTIQKAQQQRVERFMFEGVEIPLVPSCAVFITMNPGYAGRTELPDNLKALFRPVAMMVPDYAMITEISLYSFGFNEASVLAKKITTTFKLSSEQLSSQDHYDFGMRAVKTVISAAGNLKRENPSMNEELICLRAIRDVNVPKFLQEDLKLFSGIVSDLFPTIKEEDTDYGILDEAIREACRNSNLKDVEGFLTKCIQLYETTVVRHGLMLVGPTGSGKSTCYRVLAAAMTSLKGQPSISGGMYEAVNYYVLNPKSITMGQLYGEFDLLTHEWTDGIFSSFIRAGAITSDTNKKWYMFDGPVDAIWIENMNTVLDDNKKLCLSSGEIIKLTEAMTMMFEVQDLAVASPATVSRCGMVYLEPSILGLMPFIECWLRKLPPLLKPYEEHFKALFVSFLEESISFVRSSVKEVIASTNCNLTMSLLKLLDCFFKPFLPREGLKKIPSEKLSRIVELIEPWFIFSLIWSVGATGDSSGRTSFSHWLRLKMENEQLTLLFPEEGLVFDYRLEDAGISGTNDSEDEEEEYKQVAWVKWMDSSAPFTMVPDTNYCNIIVPTMDTVQMSHLLDMLLTNKKPVLCIGPTGTGKTLTISDKLLKNLALDYISHFLTFSARTSANQTQDFIDSKLDKRRKGVFGPPLGRNFIFFIDDLNMPALETYGAQPPIELLRQWMDHGGWYDRKIIGAFKNLVDINFVCAMGPPGGGRNTVTPRLMRHFNYLSFAEMDEVSKKRIFSTILGNWLDGLLGEKSYRERVPGAPHIAHFTEPLVDATIMVYATITSQLLPTPAKSHYTFNLRDLSKVFQGMLMADPAKVEDQVQLLRLWYHENCRVFRDRLVNEEDRSWFDQLLKRCMEQWEVTFNKVCPFQPILYGDFMSPGSDVKSYELITSESKMMQVIEEYIEDYNQINTAKLKLVLFMDAMSHICRISRTLRQALGNALLLGVGGSG

SEQ ID NO: 748858 - protein, 433 aa, Homo sapiens
ADVVTLEGQRPDAHCHDSQTWASQAWLAQVMVPDTNYCNIIVPTMDTVQMSHLLDMLLTNKKPVLCIGPTGTGKTLTISDKLLKNLALDYISHFLTFSARTSANQTQDFIDSKLDKRRKGVFGPPLGRNFIFFIDDLNMPALETYGAQPPIELLRQWMDHGGWYDRKIIGAFKNLVDINFVCAMGPPGGGRNTVTPRLMRHFNYLSFAEMDEVSKKRIFSTILGNWLDGLLGEKSYRERVPGAPHIAHFTEPLVDATIMVYATITSQLLPTPAKSHYTFNLRDLSKVFQGMLMADPAKVEDQVQLLRLWYHENCRVFRDRLVNEEDRSWFDQLLKRCMEQWEVTFNKVCPFQPILYGDFMSPGSDVKSYELITSESKMMQVIEEYIEDYNQINTAKLKLVLFMDAMSHICRISRTLRQALGNALLLGVGGSGR

SEQ ID NO: 748859 - protein, 78 aa, Homo sapiens
MPCPPGFLTKCIQLYETTVVRHGLMLVGPTGSGKSTVSRAKLGSQCPDSGPVGGCSFNRGWPPFVPLGIEYPSPSPWP

SEQ ID NO: 748860 - protein, 103 aa, Homo sapiens
SSLGLLGNTMVSPAHCPGCLGLVAAGGFYDIACGDLWQEPRPVLDTLAPSKCGGPPEGQGGIMGISTADGRIPGALYPFVCCLQYGGWALPAACQPSLARDNL

SEQ ID NO: 748861 - protein, 201 aa, Homo sapiens
MAARTAFGAVCRRLWQGLGNFSVNTSKGNTAKNGGLLLSTNMKWVQFSNLHVDVPKDLTKPVVTISDEPDILYKRLSVLVKGHDKAVLDSYEYFAVLAAKELGISIKVHEPPRKIERFTLLQSVHIYKKHRVQYEMRTLYRCLELEHLTGSTADVYLEYIQRNLPEGVAMEVTKTQLEQLPEHIKEPIWETLSEEKEESKS

SEQ ID NO: 748862 - protein, 201 aa, Homo sapiens; identical to SEQ ID NO: 748861

SEQ ID NO: 748863 - protein, 201 aa, Homo sapiens; identical to SEQ ID NO: 748861

SEQ ID NO: 748864 - protein, 201 aa, Homo sapiens; identical to SEQ ID NO: 748861

SEQ ID NO: 748865 - protein, 160 aa, Homo sapiens
MKWVQFSNLHVDVPKDLTKPVVTISDEPDILYKRLSVLVKGHDKAVLDSYEYFAVLAAKELGISIKVHEPPRKIERFTLLQSVHIYKKHRVQYEMRTLYRCLELEHLTGSTADVYLEYIQRNLPEGVAMEVTKTQLEQLPEHIKEPIWETLSEEKEESKS

SEQ ID NO: 748866 - protein, 201 aa, Homo sapiens
MAARTAFGAVCRRLWQGLGNFSVNTSKGNTAKNGGLLLSTNMKWVQFSNLHVDVPKDLTKPVVTISDEPDILYKRLSVLVKGHDKAVLDSYEYFAVLAAKELGISIKVHEPPRKIERFTLLQSVHIYKKHRVQYEMRTLYRCLELEHLTGSTADVYLEYIQRNLPEGVAMEVTKTQLEQLPEHIKEPIWETLSEEKEGWAR

SEQ ID NO: 748867 - protein, 192 aa, Homo sapiens
MAARTAFGAVCRRLWQGLGNFSVNTSKGNTAKNGGLLLSTNMKWVQFSNLHVDVPKDLTKPVVTISDEPDILYKRLSVLVKGHDKAVLDSYEYFAVLAAKELGISIKVHEPPRKIERFTLLQSVHIYKKHRVQYEMRTLYRCLELEHLTGSTADVYLEYIHKHEQTTLTESRKSENSILLRYWCSIISLYHF

SEQ ID NO: 748868 - protein, 164 aa, Homo sapiens
VCARERMRMASPQACARSVLMPLAWLPSAICTQGVLPRIDRIFTRCTSPETPKELRGFGVDSLWVEVADPPYQDFLPPPGPGWRSDLPPPLPRPRGDGPGGPGPRGPFGRKACSLRNGQGGRETRSCIRRKKKKKIVQSIGKYFSLLSFSLRSPLYFGKCHSVC

SEQ ID NO: 748869 - protein, 102 aa, Homo sapiens
NRDRNSHPAHLSADIDECGTEGANCGADQFCVNTEGSYECRDCAKACLGCMGAGPGRCKKCSPGYQQVGSKCLDVDECETEVCPGENKQCENTEGGYRCICA

SEQ ID NO: 748870 - protein, 209 aa, Homo sapiens
MPSMLVVNVHLAPGRANPHGVCVNTSLNHSLIYPIFVVHVSRIQCLCSRIWFSLHVFGVCAYRCAWCGLSPRPVCKRHPTQRPRQDPGLWAVVPGLPLQGRCVLLREHPCLGSNPGSGRQVVGVAASSASLDDAQEHAQSQRAQLLGSLTLGWALGRQPFGECVLMVVSGVSLTNNPPCPLDTGVPSSLAVFLIRVPHRPTARCVSPDL

SEQ ID NO: 748871 - protein, 209 aa, Homo sapiens; identical to SEQ ID NO: 748870

SEQ ID NO: 748872 - protein, 150 aa, Homo sapiens
  misc_feature (7)..(7): Xaa can be any naturally occurring amino acid
EAGDERXDVGGASEESQAMQATVSIILPVHNAEPWLDECLRSVLQQDFEGTMELSVFNDASKDKSGAIIEKWRVKLEDSGVHVIIGGHDSPSPRGVGYAKNQAVAQSSGSYLCFLDSDDVMMPQRVRLQHEAAVQHPSSLLVRGYVNYIV

SEQ ID NO: 748873 - protein, 335 aa, Homo sapiens
  misc_feature (7)..(7): Xaa can be any naturally occurring amino acid
EAGDERXDVGGGVRGEPGHAGHVSIILPVHNAEPWLDECLRSVLQQDFEDKSGAIIEKWRVKLEDSGVHVIIGGHDSPSPRGVGYAKNQAVAQSSGSYLCFLDSDDVMMPQRVRLQHEAAVQHPSSIIGCRVRRDPPNSTERYTRWINQLTPEQLLTQVFTSNGPTVIMPTWFCSRAWFSHVGPFNEGGQGVPEDLLFFYEHLRKGGGVIRVDQSLLLYRHHPQAATHCVLETTIWTHRVRFLEEQALPRWAAFTIWNAGKQGRRLYRSLTAGSQRKVVAFCDVDENKIRKGFYCHEDSQERPKPRIPILHFRAARPPFVICVKLDPQGAPLRTT

SEQ ID NO: 748874 - protein, 335 aa, Homo sapiens; identical to SEQ ID NO: 748873
  misc_feature (7)..(7): Xaa can be any naturally occurring amino acid

SEQ ID NO: 748875 - protein, 335 aa, Homo sapiens; identical to SEQ ID NO: 748873
  misc_feature (7)..(7): Xaa can be any naturally occurring amino acid

SEQ ID NO: 748876 - protein, 196 aa, Homo sapiens
MPLLLPPCRASRRTCCSSTSTSGRAAASSAWTRVSCCIATTHRRPRTASSNPGRQFPPENCEDTEVSATCLPRAAALSWKAGRRPRLASRPLRTTIWTHRVRFLEEQALPRWAAFTIWNAGKQGRRLYRSLTAGSQRKVVAFCDVDENKIRKGFYCHEDSQERPKPRIPILHFRAARPPFVICVKLDPQGAPLRTT

SEQ ID NO: 748877 - protein, 209 aa, Homo sapiens; identical to SEQ ID NO: 748870

SEQ ID NO: 748878 - protein, 542 aa, Homo sapiens
MEPDSVIEDKTIELMCSVPRSLWLGCANLVESMCALSCLQSMPSVRCLQISNGTSSVIVSRKRPSEGNYQKEKDLCIKYFDQWSESDQVEFVEHLISRMCHYQHGHINSYLKPMLQRDFITALPEQGLDHIAENILSYLDARSLCAAELVCKEWQRVISEGMLWKKLIERMVRTDPLWKGLSERRGWDQYLFKNRPTDGPPNSFYRSLYPKIIQDIETIESNWRCGRHNLQRIQCRSENSKGVYCLQYDDEKIISGLRDNSIKIWDKTSLECLKVLTGHTGSVLCLQYDERVIVTGSSDSTVRVWDVNTGEVLNTLIHHNEAVLHLRFSNGLMVTCSKDRSIAVWDMASATDITLRRVLVGHRAAVNVVDFDDKYIVSASGDRTIKVWSTSTCEFVRTLNGHKRGIACLQYRDRLVVSGSSDNTIRLWDIECGACLRVLEGHEELVRCIRFDNKRIVSGAYDGKIKVWDLQAALDPRAPASTLCLRTLVEHSGRVFRLQFDEFQIISSSHDDTILIWDFLNVPPSAQNETHSPSRTYTYISR

SEQ ID NO: 748879 - protein, 510 aa, Homo sapiens
MEDQDEDKSPKKNTPWQISNGTSSVIVSRKRPSEGNYQKEKDLCIKYFDQWSESDQVEFVEHLISRMCHYQHGHINSYLKPMLQRDFITALPEQGLDHIAENILSYLDARSLCAAELVCKEWQRVISEGMLWKKLIERMVRTDPLWKGLSERRGWDQYLFKNRPTDGPPNSFYRSLYPKIIQDIETIESNWRCGRHNLQRIQCRSENSKGVYCLQYDDEKIISGLRDNSIKIWDKTSLECLKVLTGHTGSVLCLQYDERVIVTGSSDSTVRVWDVNTGEVLNTLIHHNEAVLHLRFSNGLMVTCSKDRSIAVWDMASATDITLRRVLVGHRAAVNVVDFDDKYIVSASGDRTIKVWSTSTCEFVRTLNGHKRGIACLQYRDRLVVSGSSDNTIRLWDIECGACLRVLEGHEELVRCIRFDNKRIVSGAYDGKIKVWDLQAALDPRAPASTLCLRTLVEHSGRVFRLQFDEFQIISSSHDDTILIWDFLNVPPSAQNETHSPSRTYTYISR

SEQ ID NO: 748880 - protein, 444 aa, Homo sapiens
MCHYQHGHINSYLKPMLQRDFITALPEQGLDHIAENILSYLDARSLCAAELVCKEWQRVISEGMLWKKLIERMVRTDPLWKGLSERRGWDQYLFKNRPTDGPPNSFYRSLYPKIIQDIETIESNWRCGRHNLQRIQCRSENSKGVYCLQYDDEKIISGLRDNSIKIWDKTSLECLKVLTGHTGSVLCLQYDERVIVTGSSDSTVRVWDVNTGEVLNTLIHHNEAVLHLRFSNGLMVTCSKDRSIAVWDMASATDITLRRVLVGHRAAVNVVDFDDKYIVSASGDRTIKVWSTSTCEFVRTLNGHKRGIACLQYRDRLVVSGSSDNTIRLWDIECGACLRVLEGHEELVRCIRFDNKRIVSGAYDGKIKVWDLQAALDPRAPASTLCLRTLVEHSGRVFRLQFDEFQIISSSHDDTILIWDFLNVPPSAQNETHSPSRTYTYISR

SEQ ID NO: 748881 - protein, 72 aa, Homo sapiens
MRPPQPCGTNTSVLEDQDEDKSPKKNTPWQISNGTSSVIVSRKRPSEGNYQKEKDLCIKYFDQWSESDQVEF

SEQ ID NO: 748882 - protein, 332 aa, Homo sapiens [sequence omitted]

SEQ ID NO: 748883 - protein, 902 aa, Homo sapiens [sequence omitted]

SEQ ID NO: 748884 - protein, 832 aa, Homo sapiens
MHSPPPRPAPSPGTWESQPARSVRLGGPGGGAGGAGGGRVLECPSIRITSISPTPEPPAALEDNPDAWGDGSPRDYPPPEGFGGYREAGAQGGGAFFSPSPGSSSLSSWSFFSDASDEAALYAACDEVESELNEAASRFGLGSPLPSPRASPRPWTPEDPWSLYGPSPGGRGPEDSWLLLSAPGPTPASPRPASPCGKRRYSSSGTPSSASPALSRRGSLGEEGSEPPPPPPLPLARDPGSPGPFDYVGAPPAESIPQKTRRTSSEQAVALPRSEEPASCNGKLPLGAEESVAPPGGSRKEVAGMDYLAVPSPLAWSKARIGGHSPIFRTSALPPLDWPLPSQYEQLELRIEVQPRAHHRAHYETEGSRGAVKAAPGGHPVVKLLGYSEKPLTLQMFIGTADERNLRPHAFYQVHRITGKMVATASYEAVVSGTKVLEMTLLPENNMAANIDCAGILKLRNSDIELRKGETDIGRKNTRVRLVFRVHVPQGGGKVVSVQAASVPIECSQRSAQELPQVEAYSPSACSVRGGEELVLTGSNFLPDSKVVFIERGPDGKLQWEEEATVNRLQSNEVTLTLTVPEYSNKRVSRPVQVYFYVSNGRRKRSPTQSFRFLPVICKEEPLPDSSLRGFPSASATPFGTDMDFSPPRPPYPSYPHEDPACETPYLSEGFGYGMPPLYPQTGPPPSYRPGLRMFPETRGTTGCAQPPAVSFLPRPFPSDPYGGRGSSFPLGLPFSPPAPFRPPPLPASPPLEGPFPSQSDVHPLPAEGYNKVGPGYGPGEGAPEQEKSRGGYSSGFRDSVPIQGITLEEVSEIIGRDLSGFPAPPGEEPPA

SEQ ID NO: 748885 - protein, 901 aa, Homo sapiens
MGAASCEDEELEFKLVFGEEKEAPPLGAGGLGEELDSEDAPPCCRLALGEPPPYGAAPIGIPRPPPPRPGMHSPPPRPAPSPGTWESQPARSVRLGGPGGGAGGAGGGRVLECPSIRITSISPTPEPPAALEDNPDAWGDGSPRDYPPPEGFGGYREAGAQGGGAFFSPSPGSSSLSSWSFFSDASDEAALYAACDEVESELNEAASRFGLGSPLPSPRASPRPWTPEDPWSLYGPSPGGRGPEDSWLLLSAPGPTPASPRPASPCGKRRYSSSGTPSSASPALSRRGSLGEEGSEPPPPPPLPLARDPGSPGPFDYVGAPPAESIPQKTRRTSSEQAVALPRSEEPASCNGKLPLGAEESVAPPGGSRKEVAGMDYLAVPSPLAWSKARIGGHSPIFRTSALPPLDWPLPSQYEQLELRIEVQPRAHHRAHYETEGSRGAVKAAPGGHPVVKLLGYSEKPLTLQMFIGTADERNLRPHAFYQVHRITGKMVATASYEAVVSGTKVLEMTLLPENNMAANIDCAGILKLRNSDIELRKGETDIGRKNTRVRLVFRVHVPQGGGKVVSVQAASVPIECSQRSAQELPQVEAYSPSACSVRGGEELVLTGSNFLPDSKVVFIERGPDGKLQWEEEATVNRLQSNEVTLTLTVPEYSNKRVSRPVQVYFYVSNGRRKRSPTQSFRFLPVICKEEPLPDSSLRGFPSASATPFGTDMDFSPPRPPYPSYPHEDPACETPYLSEGFGYGMPPLYPQTGPPPSYRPGLRMFPETRGTTGCAQPPAVSFLPRPFPSDPYGGRGSSFPLGLPFSPPAPFRPPPLPASPPLEGPFPSQSDVHPLPAEGYNKVGPGYGPGEGAPEQEKSRGGYSSGFRDSVPIQGITLEEGGCGTGGCECECVQEIALHVC

SEQ ID NO: 748886 - protein, 780 aa, Homo sapiens
WGRTRGAWFSHLIPGGGAGASPAANQGQAGGGTALKKFGGKKFGKVSIITRGLLEGGGSDGGGGFSEKGREGATRVKIQQPPELPPPTQAGTWGLLPDPWGRPAARMRSWSLYGPSPGGRGPEDSWLLLSAPGPTPASPRPASPCGKRRYSSSGTPSSASPALSRRGSLGEEGSEPPPPPPLPLARDPGSPGPFDYVGAPPAESIPQKTRRTSSEQAVALPRSEEPASCNGKLPLGAEESVAPPGGSRKEVAGMDYLAVPSPLAWSKARIGGHSPIFRTSALPPLDWPLPSQYEQLELRIEVQPRAHHRAHYETEGSRGAVKAAPGGHPVVKLLGYSEKPLTLQMFIGTADERNLRPHAFYQVHRITGKMVATASYEAVVSGTKVLEMTLLPENNMAANIDCAGILKLRNSDIELRKGETDIGRKNTRVRLVFRVHVPQGGGKVVSVQAASVPIECSQRSAQELPQVEAYSPSACSVRGGEELVLTGSNFLPDSKVVFIERGPDGKLQWEEEATVNRLQSNEVTLTLTVPEYSNKRVSRPVQVYFYVSNGRRKRSPTQSFRFLPVICKEEPLPDSSLRGFPSASATPFGTDMDFSPPRPPYPSYPHEDPACETPYLSEGFGYGMPPLYPQTGPPPSYRPGLRMFPETRGTTGCAQPPAVSFLPRPFPSDPYGGRGSSFPLGLPFSPPAPFRPPPLPASPPLEGPFPSQSDVHPLPAEGYNKVGPGYGPGEGAPEQEKSRGGYSSGFRDSVPIQGITLEEGGCGTGGCECECVQEIALHVC

SEQ ID NO: 748887 - protein, 436 aa, Homo sapiens
MFIGTADERNLRPHAFYQVHRITGKMVATASYEAVVSGTKVLEMTLLPENNMAANIDCAGILKLRNSDIELRKGETDIGRKNTRVRLVFRVHVPQGGGKVVSVQAASVPIECSQRSAQELPQVEAYSPSACSVRGGEELVLTGSNFLPDSKVVFIERGPDGKLQWEEEATVNRLQSNEVTLTLTVPEYSNKRVSRPVQVYFYVSNGRRKRSPTQSFRFLPVICKEEPLPDSSLRGFPSASATPFGTDMDFSPPRPPYPSYPHEDPACETPYLSEGFGYGMPPLYPQTGPPPSYRPGLRMFPETRGTTGCAQPPAVSFLPRPFPSDPYGGRGSSFPLGLPFSPPAPFRPPPLPASPPLEGPFPSQSDVHPLPAEGYNKVGPGYGPGEGAPEQEKSRGGYSSGFRDSVPIQGITLEEGGCGTGGCECECVQEIALHVC

SEQ ID NO: 748888 - protein, 391 aa, Homo sapiens
LFNPLSALGAAPYMVYVTPWILLVICVSTAEEGSLRALWQFSQRGWGQRRPPLHAQPSQSSSLHCSAAQRSAQELPQVEAYSPSACSVRGGEELVLTGSNFLPDSKVVFIERGPDGKLQWEEEATVNRLQSNEVTLTLTVPEYSNKRVSRPVQVYFYVSNGRRKRSPTQSFRFLPVICKEEPLPDSSLRGFPSASATPFGTDMDFSPPRPPYPSYPHEDPACETPYLSEGFGYGMPPLYPQTGPPPSYRPGLRMFPETRGTTGCAQPPAVSFLPRPFPSDPYGGRGSSFPLGLPFSPPAPFRPPPLPASPPLEGPFPSQSDVHPLPAEGYNKVGPGYGPGEGAPEQEKSRGGYSSGFRDSVPIQGITLEEGGCGTGGCECECVQEIALHVC

SEQ ID NO: 748889 - protein, 791 aa, Homo sapiens
MGAASCEDEELEFKLVFGEEKEAPPLGAGGLGEELDSEDAPPCCRLALGEPPPYGAAPIGIPRPPPPRPGMHSPPPRPAPSPGTWESQPARSVRLGGPGGGAGGAGGGRVLECPSIRITSISPTPEPPAALEDNPDAWGDGSPRDYPPPEGFGGYREAGAQGGGAFFSPSPGSSSLSSWSFFSDASDEAALYAACDEVESELNEAASRFGLGSPLPSPRASPRPWTPEDPWSLYGPSPGGRGPEDSWLLLSAPGPTPASPRPASPCGKRRYSSSGTPSSASPALSRRGSLGEEGSEPPPPPPLPLARDPGSPGPFDYVGAPPAESIPQKTRRTSSEQAVALPRSEEPASCNGKLPLGAEESVAPPGGSRKEVAGMDYLAVPSPLAWSKARIGGHSPIFRTSALPPLDWPLPSQYEQLELRIEVQPRAHHRAHYETEGSRGAVKAAPGGHPVVKLLGYSEKPLTLQMFIGTADERNLRPHAFYQVHRITGKMVATASYEAVVSGTKVLEMTLLPENNMAANIDCAGILKLRNSDIELRKGETDIGRKNTRVRLVFRVHVPQGGGKVVSVQAASVPIECSQRSAQELPQVEAYSPSACSVRGGEELVLTGSNFLPDSKVVFIERGPDGKLQWEEEATVNRLQSNEVTLTLTVPEYSNKRVSRPVQVYFYVSNGRRKRSPTQSFRFLPVICKEEPLPDSSLRGFPSASATPFGTDMDFSPPRPPYPSYPHEDPACETPYLSEGFGYGMPPLYPQTGPPPSYRPGLRMFPETRVSEIIGRDLSGFPAPPGEEPPA

SEQ ID NO: 748890 - protein, 901 aa, Homo sapiens; identical to SEQ ID NO: 748885

SEQ ID NO: 748891 - protein, 707 aa, Homo sapiens
MGAASCEDEELEFKLVFGEEKEAPPLGAGGLGEELDSEDAPPCCRLALGEPPPYGAAPIGIPRPPPPRPGMHSPPPRPAPSPGTWESQPARSVRLGGPGGGAGGAGGGRVLECPSIRITSISPTPEPPAALEDNPDAWGDGSPRDYPPPEGFGGYREAGAQGGGAFFSPSPGSSSLSSWSFFSDASDEAALYAACDEVESELNEAASRFGLGSPLPSPRASPRPWTPEDPWSLYGPSPGGRGPEDSWLLLSAPGPTPASPRPASPCGKRRYSSSGTPSSASPALSRRGSLGEEGSEPPPPPPLPLARDPGSPGPFDYVGAPPAESIPQKTRRTSSEQAVALPRSEEPASCNGKLPLGAEESVAPPGGSRKEVAGMDYLAVPSPLAWSKARIGGHSPIFRTSALPPLDWPLPSQYEQLELRIEVQPRAHHRAHYETEGSRGAVKAAPGGHPVVKLLGYSEKPLTLQMFIGTADERNLRPHAFYQVHRITGKMVATASYEAVVSGTKVLEMTLLPENNMAANIDCAGILKLRNSDIELRKGETDIGRKNTRVRLVFRVHVPQGGGKVVSVQAASVPIECSQRSAQELPQVEAYSPSACSVRGGEELVLTGSNFLPDSKVVFIERGPDGKLQWEEEATVNRLQSNEVTLTLTVPEYSNKRVSRPVQVYFYVSNGRRKRSPTQSFRFLPVSEIIGRDLSGFPAPPGEEPPA

SEQ ID NO: 748892 - protein, 727 aa, Homo sapiens
MGAASCEDEELEFKLVFGEEKEAPPLGAGGLGEELDSEDAPPCCRLALGEPPPYGAAPIGIPRPPPPRPGMHSPPPRPAPSPGTWESQPARSVRLGGPGGGAGGAGGGRVLECPSIRITSISPTPEPPAALEDNPDAWGDGSPRDYPPPEGFGGYREAGAQGGGAFFSPSPGSSSLSSWSFFSDASDEAALYAACDEVESELNEAASRFGLGSPLPSPRASPRPWTPEDPWSLYGPSPGGRGPEDSWLLLSAPGPTPASPRPASPCGKRRYSSSGTPSSASPALSRRGSLGEEGSEPPPPPPLPLARDPGSPGPFDYVGAPPAESIPQKTRRTSSEQAVALPRSEEPASCNGKLPLGAEESVAPPGGSRKEVAGMDYLAVPSPLAWSKARIGGHSPIFRTSALPPLDWPLPSQYEQLELRIEVQPRAHHRAHYETEGSRGAVKAAPGGHPVVKLLGYSEKPLTLQMFIGTADERNLRPHAFYQVHRITGKMVATASYEAVVSGTKVLEMTLLPENNMAANIDCAGILKLRNSDIELRKGETDIGRKNTRVRLVFRVHVPQGGGKVVSVQAASVPIECSQRSAQELPQVEAYSPSACSVRGGEELVLTGSNFLPDSKVVFIERGPDGKLQWEEEATVNRLQSNESLLPEPRELSSPGNPSPSLSPAPFPSFLEWWLQKLGANPGSSFPSFCLSHCLPSPPPAEVWPSGLVLPWRAGGRSVWRREEGED

SEQ ID NO: 748893 - protein, 397 aa, Homo sapiens
MGAASCEDEELEFKLVFGEEKEAPPLGAGGLGEELDSEDAPPCCRLALGEPPPYGAAPIGIPRPPPPRPGMHSPPPRPAPSPGTWESQPARSVRLGGPGGGAGGAGGGRVLECPSIRITSISPTPEPPAALEDNPDAWGDGSPRDYPPPEGFGGYREAGAQGGGAFFSPSPGSSSLSSWSFFSDASDEAALYAACDEVESELNEAASRFGLGSPLPSPRASPRPWTPEDPWSLYGPSPGGRGPEDSWLLLSAPGPTPASPRPASPCGKRRYSSSGTPSSASPALSRRGSLGEEGSEPPPPPPLPLARDPGSPGPFDYVGAPPAESIPQKTRRTSSEQAVALPRSEEPASCNGKLPLGAEESVAPPGGSRKEVDCHSCIVRYLLNSSKVPANLSWRNS

SEQ ID NO: 748894 - protein, 160 aa, Homo sapiens [sequence omitted]

SEQ ID NO: 748895 - protein, 160 aa, Homo sapiens [sequence omitted]

SEQ ID NO: 748896 - protein, 773 aa, Homo sapiens
YVRVMDMGLLELTITAVKSDSDGEQTEPRFELHCSSDVVHIRTCSDSCAALMNLIQYIASYGDLQTPNKADMKPGAFQRRSKVDSSGRSSSRGPVLPEADQQMLRDLMSDAMEEIDMQQGTSSVKPQANGVLDEKSQIQEPCCSDLFLFPDESGNVSQESGPTYASFSHHFISDAMTGVPTENDDFCILFAPKAAMQEKEEEPVIKIMVDDAIVIRDNYFSLPVNKTDTSKAPLHFPIPVIRYVVKEVSLVWHLYGGKDFGTVPPTSPAKSYISPHSSPSHTPTRHGRNTVCGGKGRNHDFLMEIQLSKVKFQHEVYPPCKPDCDSSLSEHPVSRQVFIVQDLEIRDRLATSQMNKFLYLYCSKEMPRKAHSNMLTVKALHVCPESGRSPQECCLRVSLMPLRLNIDQDALFFLKDFFTSLSAEVELQMTPDPEVKKSPGADVTCSLPRHLSTSKEPNLVISFSGPKQPSQNDSANSVEVVNGMEEKNFSAEEASFRDQPVFFREFRFTSEVPIRLDYHGKHVSMDQGTLAGILIGLAQLNCSELKLKRLSYRHGLLGVDKLFSYAITEWLNDIKKNQLPGILGGVGPMHSLVQLVQGLKDLVWLPIEQYRKDGRIVRGFQRGAASFGTSTAMAALELTNRMVQTIQAAAETAYDMVSPGTLSIEPKKTKRFPHHRLAHQPVDLREGVAKAYSVVKEGITDTAQTIYETAAREHESRGVTGAVGEVLRQIPPAVVKPLIVATEATSNVLGGMRNQIRPDVRQDESQKWRHGDD

SEQ ID NO: 748897 - protein, 335 aa, Homo sapiens
MLIHSYAHLILMLIPPYAHPSLCSSLLMLIPPYDSSLLMLIPPYAHPSLCSSLLMFIPPLCSSLLREFRFTSEVPIRLDYHGKHVSMDQGTLAGILIGLAQLNCSELKLKRLSYRHGLLGVDKLFSYAITEWLNDIKKNQLPGILGGVGPMHSLVQLVQGLKDLVWLPIEQYRKDGRIVRGFQRGAASFGTSTAMAALELTNRMVQTIQAAAETAYDMVSPGTLSIEPKKTKRFPHHRLAHQPVDLREGVAKAYSVVKEGITDTAQTIYETAAREHESRGVTGAVGEVLRQIPPAVVKPLIVATEATSNVLGGMRNQIRPDVRQDESQKWRHGDD

SEQ ID NO: 748898 - protein, 773 aa, Homo sapiens; identical to SEQ ID NO: 748896

SEQ ID NO: 748899 - protein, 717 aa, Homo sapiens
YVRVMDMGLLELTITAVKSDSDGEQTEPRFELHCSSDVVHIRTCSDSCAALMNLIQYIASYGDLQTPNKADMKPGAFQRRSKVDSSGRSSSRGPVLPEADQQMLRDLMSDAMEEIDMQQGTSSVKPQANGVLDEKSQIQEPCCSDLFLFPDESGNVSQESGPTYASFSHHFISDAMTGVPTENDDFCILFAPKAAMQEKEEEPVIKIMVDDAIVIRDNYFSLPVNKTDTSKAPLHFPIPVIRYVVKEVSLVWHLYGGKDFGTVPPTSPAKSYISPHSSPSHTPTRHGRNTVCGGKGRNHDFLMEIQLSKVKFQHEVYPPCKPDCDSSLSEHPVSRQVFIVQDLEIRDRLATSQMNKFLYLYCSKEMPRKAHSNMLTVKALHVCPESGRSPQECCLRVSLMPLRLNIDQDALFFLKDFFTSLSAEVELQMTPDPEVKKSPGADVTCSLPRHLSTSKEPNLVISFSGPKQPSQNDSANSVEVVNGMEEKNFSAEEASFRDQPVFFREFRFTSEVPIRLDYHGKHVSMDQGTLAGILIGLAQLNCSELKLKRLSYRHGLLGVDKLFSYAITEWLNDIKKNQLPGILGGVGPMHSLVQLVQGLKDLVWLPIEQYRKDGRIVRGFQRGAASFGTSTAMAALELTNRMVQTIQAAAETAYDMVSPGTLSIEPKKTKRFPHHRLAHQPVDLREGVAKAYSVVKEVTEYLGGHIRTLLCAFPTFT

SEQ ID NO: 748900 - protein, 650 aa, Homo sapiens
YVRVMDMGLLELTITAVKSDSDGEQTEPRFELHCSSDVVHIRTCSDSCAALMNLIQYIASYGDLQTPNKADMKPGAFQRRSKVDSSGRSSSRGPVLPEADQQMLRDLMSDAMEEIDMQQGTSSVKPQANGVLDEKSQIQEPCCSDLFLFPDESGNVSQESGPTYASFSHHFISDAMTGVPTENDDFCILFAPKAAMQEKEEEPVIKIMVDDAIVIRDNYFSLPVNKTDTSKAPLHFPIPVIRYVVKEVSLVWHLYGGKDFGTVPPTSPAKSYISPHSSPSHTPTRHGRNTVCGGKGRNHDFLMEIQLSKVKFQHEVYPPCKPDCDSSLSEHPVSRQVFIVQDLEIRDRLATSQMNKFLYLYCSKEMPRKAHSNMLTVKALHVCPESGRSPQECCLRVSLMPLRLNIDQDALFFLKDFFTSLSAEVELQMTPDPEVKKSPGADVTCSLPRHLSTSKEPNLVISFSGPKQPSQNDSANSVEVVNGMEEKNFSAEEASFRDQPVFFREFRFTSEVPIRLDYHGKHVSMDQGTLAGILIGLAQLNCSELKLKRLSYRHGLLGVDKLFSYAITEWLNDIKKNQLPGILGGVGPMHSLVQLVQGLKDLVWLPIEQYRKDGRIVRGFQRGAASFGTSTAMAALELTNRMVQTIQVSF

SEQ ID NO: 748901 - protein, 509 aa, Homo sapiens
YVRVMDMGLLELTITAVKSDSDGEQTEPRFELHCSSDVVHIRTCSDSCAALMNLIQYIASYGDLQTPNKADMKPGAFQRRSKVDSSGRSSSRGPVLPEADQQMLRDLMSDAMEEIDMQQGTSSVKPQANGVLDEKSQIQEPCCSDLFLFPDESGNVSQESGPTYASFSHHFISDAMTGVPTENDDFCILFAPKAAMQEKEEEPVIKIMVDDAIVIRDNYFSLPVNKTDTSKAPLHFPIPVIRYVVKEVSLVWHLYGGKDFGTVPPTSPAKSYISPHSSPSHTPTRHGRNTVCGGKGRNHDFLMEIQLSKVKFQHEVYPPCKPDCDSSLSEHPVSRQVFIVQDLEIRDRLATSQMNKFLYLYCSKEMPRKAHSNMLTVKALHVCPESGRSPQECCLRVSLMPLRLNIDQDALFFLKDFFTSLSAEVELQMTPDPEVKKSPGADVTCSLPRHLSTSKEPNLVISFSGPKQPSQNDSANSVEVVNGMEEKNFSAEEASFRDQPVFFRRSGLW

SEQ ID NO: 748902 - protein, 588 aa, Homo sapiens
GGAWAGLYKPAAGGRRGVGVCGCWAGGAQAAGPEPGEARERRRRGSDSLPGETYGPKPCKCVLSRGLGSATATPPRGVAQVSRSPATPPSSAPGSGPREGGRSLCVAYFLRRRLQQRLHPARQLLLQGMAGYLSESDFVMVEEGFSTRDLLKELTLGASQATTDEVAAFFVADLGAIVRKHFCFLKCLPRVRPFYAVKCNSSPGVLKVLAQLGLGFSCANKAEMELVQHIGIPASKIICANPCKQIAQIKYAAKHGIQLLSFDNEMELAKVVKSHPSAKMVLCIATDDSHSLSCLSLKFGVSLKSCRHLLENAKKHHVEVVGVSFHIGSGCPDPQAYAQSIADARLVFEMGTELGHKMHVLDLGGGFPGTEGAKVRFEEIASVINSALDLYFPEGCGVDIFAELGRYYVTSAFTVAVSIIAKKEVLLDQPGREEENGSTSKTIVYHLDEGVYGIFNSVLFDNICPTPILQKKPSTEQPLYSSSLWGPAVDGCDCVAEGLWLPQLHVGDWLVFDNMGAYTVGMGSPFWGTQACHITYAMSRVAWEALRRQLMAAEQEDDVEGVCKPLSCGWEITDTLCVGPVFTPASIM

SEQ ID NO: 748903 - protein, 277 aa, Homo sapiens
GGAWAGLYKPAAGGRRGVGVCGCWAGGAQAAGPEPGEARERRRRGSDSLPGETYGPKPCKCVLSRGLGSATATPPRGVAQVSRSPATPPSSAPGSGPREGGRSLAEMELVQHIGIPASKIICANPCKQIAQIKYAAKHGIQLLSFDNEMELAKVVKSHPSAKMVLCIATDDSHSLSCLSLKFGVSLKSCRHLLENAKKHHVEVVGVSFHIGSGCPDPQAYAQSIADARLVFEMGTELGHKMHVLDLGGGFPGTEGAKVRFEEICFCDQAQTLRDPLD

SEQ ID NO: 748904 - protein, 608 aa, Homo sapiens
GGAWAGLYKPAAGGRRGVGVCGCWAGGAQAAGPEPGEARERRRRGSDSLPGETYGPKPCKCVLSRGLGSATATPPRGVAQVSRSPATPPSSAPGSGPREGGRSLCVAYFLRRRLQQRLHPARQLLLQGMAGYLSESDFVMVEEGFSTRDLLKELTLGASQATTDEVAAFFVADLGAIVRKHFCFLKCLPRVRPFYAVKCNSSPGVLKVLAQLGLGFSCANKAEMELVQHIGIPASKIICANPCKQIAQIKYAAKHGIQLLSFDNEMELAKVVKSHPSAKMVLCIATDDSHSLSCLSLKFGVSLKSCRHLLENAKKHHVEVVGVSFHIGSGCPDPQAYAQSIADARLVFEMGTELGHKMHVLDLGGGFPGTEGAKVRFEEIASVINSALDLYFPEGCGVDIFAELGRYYVTSAFTVAVSIIAKKEVLLDQPGREAPLPPPHIATCAASEPSPPAEENGSTSKTIVYHLDEGVYGIFNSVLFDNICPTPILQKKPSTEQPLYSSSLWGPAVDGCDCVAEGLWLPQLHVGDWLVFDNMGAYTVGMGSPFWGTQACHITYAMSRVAWEALRRQLMAAEQEDDVEGVCKPLSCGWEITDTLCVGPVFTPASIM

SEQ ID NO: 748905 - protein, 460 aa, Homo sapiens
MAGYLSESDFVMVEEGFSTRDLLKELTLGASQATTDEVAAFFVADLGAIVRKHFCFLKCLPRVRPFYAVKCNSSPGVLKVLAQLGLGFSCANKAEMELVQHIGIPASKIICANPCKQIAQIKYAAKHGIQLLSFDNEMELAKVVKSHPSAKMVLCIATDDSHSLSCLSLKFGVSLKSCRHLLENAKKHHVEVVGVSFHIGSGCPDPQAYAQSIADARLVFEMGTELGHKMHVLDLGGGFPGTEGAKVRFEEIASVINSALDLYFPEGCGVDIFAELGRYYVTSAFTVAVSIIAKKEVLLDQPGREEENGSTSKTIVYHLDEGVYGIFNSVLFDNICPTPILQKKPSTEQPLYSSSLWGPAVDGCDCVAEGLWLPQLHVGDWLVFDNMGAYTVGMGSPFWGTQACHITYAMSRVAWEALRRQLMAAEQEDDVEGVCKPLSCGWEITDTLCVGPVFTPASIM

SEQ ID NO: 748906 - protein, 460 aa, Homo sapiens; identical to SEQ ID NO: 748905

SEQ ID NO: 748907 - protein, 600 aa, Homo sapiens
GGAWAGLYKPAAGGRRGVGVCGCWAGGAQAAGPEPGEARERRRRGSDSLPGETYGPKPCKCVLSRGLGSATATPPRGVAQVSRSPATPPSSAPGSGPREGGRSLCVAYFLRRRLQQRLHPARQLLLQGMAGYLSESDFVMVEEGFSTRDLLKELTLGASQATTDEVAAFFVADLGAIVRKHFCFLKCLPRVRPFYAVKCNSSPGVLKVLAQLGLGFSCANKAEMELVQHIGIPASKIICANPCKQIAQIKYAAKHGIQLLSFDNEMELAKVVKSHPSAKFVQQRGTACLIRMVLCIATDDSHSLSCLSLKFGVSLKSCRHLLENAKKHHVEVVGVSFHIGSGCPDPQAYAQSIADARLVFEMGTELGHKMHVLDLGGGFPGTEGAKVRFEEIASVINSALDLYFPEGCGVDIFAELGRYYVTSAFTVAVSIIAKKEVLLDQPGREEENGSTSKTIVYHLDEGVYGIFNSVLFDNICPTPILQKKPSTEQPLYSSSLWGPAVDGCDCVAEGLWLPQLHVGDWLVFDNMGAYTVGMGSPFWGTQACHITYAMSRVAWEALRRQLMAAEQEDDVEGVCKPLSCGWEITDTLCVGPVFTPASIM

SEQ ID NO: 748908 - protein, 365 aa, Homo sapiens
MELVQHIGIPASKIICANPCKQIAQIKYAAKHGIQLLSFDNEMELAKVVKSHPSAKMVLCIATDDSHSLSCLSLKFGVSLKSCRHLLENAKKHHVEVVGVSFHIGSGCPDPQAYAQSIADARLVFEMGTELGHKMHVLDLGGGFPGTEGAKVRFEEIASVINSALDLYFPEGCGVDIFAELGRYYVTSAFTVAVSIIAKKEVLLDQPGREEENGSTSKTIVYHLDEGVYGIFNSVLFDNICPTPILQKKPSTEQPLYSSSLWGPAVDGCDCVAEGLWLPQLHVGDWLVFDNMGAYTVGMGSPFWGTQACHITYAMSRVAWEALRRQLMAAEQEDDVEGVCKPLSCGWEITDTLCVGPVFTPASIM

SEQ ID NO: 748909 - protein, 365 aa, Homo sapiens; identical to SEQ ID NO: 748908

SEQ ID NO: 748910 - protein, 490 aa, Homo sapiens
GGAWAGLYKPAAGGRRGVGVCGCWAGGAQAAGPEPGEARERRRRGSDSLPGETYGPKPCKCVLSRGLGSATATPPRGVAQVSRSPATPPSSAPGSGPREGGRSLCVAYFLRRRLQQRLHPARQLLLQGMAGYLSESDFVMVEEGFSTRDLLKELTLGASQATTDEVAAFFVADLGAIVRKHFCFLKCLPRVRPFYAVKCNSSPGVLKVLAQLGLGFSCANKAEMELVQHIGIPASKIICANPCKQIAQIKYAAKHGIQLLSFDNEMELAKVVKSHPSAKMVLCIATDDSHSLSCLSLKFGVSLKSCRHLLENAKKHHVEVVGVSFHIGSGCPDPQAYAQSIADARLVFEMGTELGHKMHVLDLGGGFPGTEGAKVRFEEIASVINSALDLYFPEGCGVDIFAELGRYYVTSAFTVAVSIIAKKEVLLDQPGREEENGSTSKTIVYHLDEGVYGIFNSVLFDNICPTPILQKSKNHSPCYMSLESIHFIAV

SEQ ID NO: 748911 - protein, 530 aa, Homo sapiens
GGAWAGLYKPAAGGRRGVGVCGCWAGGAQAAGPEPGEARERRRRGSDSLPGETYGPKPCKCVLSRGLGSATATPPRGVAQVSRSPATPPSSAPGSGPREGGRSLCVAYFLRRRLQQRLHPARQLLLQGMAGYLSESDFVMVEEGFSTRDLLKELTLGASQATTAEMELVQHIGIPASKIICANPCKQIAQIKYAAKHGIQLLSFDNEMELAKVVKSHPSAKMVLCIATDDSHSLSCLSLKFGVSLKSCRHLLENAKKHHVEVVGVSFHIGSGCPDPQAYAQSIADARLVFEMGTELGHKMHVLDLGGGFPGTEGAKVRFEEIASVINSALDLYFPEGCGVDIFAELGRYYVTSAFTVAVSIIAKKEVLLDQPGREEENGSTSKTIVYHLDEGVYGIFNSVLFDNICPTPILQKKPSTEQPLYSSSLWGPAVDGCDCVAEGLWLPQLHVGDWLVFDNMGAYTVGMGSPFWGTQACHITYAMSRVAWEALRRQLMAAEQEDDVEGVCKPLSCGWEITDTLCVGPVFTPASIM

SEQ ID NO: 748912 - protein, 529 aa, Homo sapiens
GGAWAGLYKPAAGGRRGVGVCGCWAGGAQAAGPEPGEARERRRRGSDSLPGETYGPKPCKCVLSRGLGSATATPPRGVAQVSRSPATPPSSAPGSGPREGGRSLDEVAAFFVADLGAIVRKHFCFLKCLPRVRPFYAVKCNSSPGVLKVLAQLGLGFSCANKAEMELVQHIGIPASKIICANPCKQIAQIKYAAKHGIQLLSFDNEMELAKVVKSHPSAKMVLCIATDDSHSLSCLSLKFGVSLKSCRHLLENAKKHHVEVVGVSFHIGSGCPDPQAYAQSIADARLVFEMGTELGHKMHVLDLGGGFPGTEGAKVRFEEIASVINSALDLYFPEGCGVDIFAELGRYYVTSAFTVAVSIIAKKEVLLDQPGREEENGSTSKTIVYHLDEGVYGIFNSVLFDNICPTPILQKKPSTEQPLYSSSLWGPAVDGCDCVAEGLWLPQLHVGDWLVFDNMGAYTVGMGSPFWGTQACHITYAMSRVAWEALRRQLMAAEQEDDVEGVCKPLSCGWEITDTLCVGPVFTPASIM

SEQ ID NO: 748913 - protein, 309 aa, Homo sapiens
MVLCIATDDSHSLSCLSLKFGVSLKSCRHLLENAKKHHVEVVGVSFHIGSGCPDPQAYAQSIADARLVFEMGTELGHKMHVLDLGGGFPGTEGAKVRFEEIASVINSALDLYFPEGCGVDIFAELGRYYVTSAFTVAVSIIAKKEVLLDQPGREEENGSTSKTIVYHLDEGVYGIFNSVLFDNICPTPILQKKPSTEQPLYSSSLWGPAVDGCDCVAEGLWLPQLHVGDWLVFDNMGAYTVGMGSPFWGTQACHITYAMSRVAWEALRRQLMAAEQEDDVEGVCKPLSCGWEITDTLCVGPVFTPASIM

SEQ ID NO: 748914 - protein, 502 aa, Homo sapiens
GGAWAGLYKPAAGGRRGVGVCGCWAGGAQAAGPEPGEARERRRRGSDSLPGETYGPKPCKCVLSRGLGSATATPPRGVAQVSRSPATPPSSAPGSGPREGGRSLCVAYFLRRRLQQRLHPARQLLLQGMAGYLSESDFVMVEEGFSTRDLLKELTLGASQATTDEVAAFFVADLGAIVRKHFCFLKCLPRVRPFYAVKCNSSPGVLKVLAQLGLGFSCANKAEMELVQHIGIPASKIICANPCKQIAQIKYAAKHGIQLLSFDNEMELAKVVKSHPSAKFVQQRGTACLIRMVLCIATDDSHSLSCLSLKFGVSLKSCRHLLENAKKHHVEVVGVSFHIGSGCPDPQAYAQSIADARLVFEMGTELGHKMHVLDLGGGFPGTEGAKVRFEEIASVINSALDLYFPEGCGVDIFAELGRYYVTSAFTVAVSIIAKKEVLLDQPGREEENGSTSKTIVYHLDEGVYGIFNSVLFDNICPTPILQKSKNHSPCYMSLESIHFIAV

SEQ ID NO: 748915 - protein, 394 aa, Homo sapiens
GGAWAGLYKPAAGGRRGVGVCGCWAGGAQAAGPEPGEARERRRRGSDSLPGETYGPKPCKCVLSRGLGSATATPPRGVAQVSRSPATPPSSAPGSGPREGGRSLCVAYFLRRRLQQRLHPARQLLLQGMAGYLSESDFVMVEEGFSTRDLLKELTLGASQATTDEVAAFFVADLGAIVRKHFCFLKCLPRVRPFYAVKCNSSPGVLKVLAQLGLGFSCANKAEMELVQHIGIPASKIICANPCKQIAQIKYAAKHGIQLLSFDNEMELAKVVKSHPSAKMVLCIATDDSHSLSCLSLKFGVSLKSCRHLLENAKKHHVEVVGVSFHIGSGCPDPQAYAQSIADARLVFEMGTELGHKMHVLDLGGGFPGTEGAKVRFEEICFCDQAQTLRDPLD

SEQ ID NO: 748916 - protein, 459 aa, Homo sapiens
GGAWAGLYKPAAGGRRGVGVCGCWAGGAQAAGPEPGEARERRRRGSDSLPGETYGPKPCKCVLSRGLGSATATPPRGVAQVSRSPATPPSSAPGSGPREGGRSLCVAYFLRRRLQQRLHPARQLLLQGMAGYLSESDFVMVEEGFSTRDLLKELTLGASQATTDEVAAFFVADLGAIVRKHFCFLKCLPRVRPFYAVKCNSSPGVLKVLAQLGLGFSCANKAEMELVQHIGIPASKIICANPCKQIAQIKYAAKHGIQLLSFDNEMELAKVVKSHPSAKMVLCIATDDSHSLSCLSLKFGVSLKSCRHLLENAKKHHVEVVGVSFHIGSGCPDPQAYAQSIADARLVFEMGTELGHKMHVLDLGGGFPGTEGAKVRFEEIASVINSALDLYFPEGCGVDIFAELGRYYVTSAFTVAVSIIAKKEVLLDQPGREGRCQVGSGALFSPEASDSGWLSRIWF

SEQ ID NO: 748917 - protein, 332 aa, Homo sapiens
GGAWAGLYKPAAGGRRGVGVCGCWAGGAQAAGPEPGEARERRRRGSDSLPGETYGPKPCKCVLSRGLGSATATPPRGVAQVSRSPATPPSSAPGSGPREGGRSLCVAYFLRRRLQQRLHPARQLLLQGMAGYLSESDFVMVEEGFSTRDLLKELTLGASQATTDEVAAFFVADLGAIVRKHFCFLKCLPRVRPFYAVKCNSSPGVLKVLAQLGLGFSCANKIASVINSALDLYFPEGCGVDIFAELGRYYVTSAFTVAVSIIAKKEVLLDQPGREEENGSTSKTIVYHLDEGVYGIFNSVLFDNICPTPILQKSKNHSPCYMSLESIHFIAV

SEQ ID NO: 748918 - protein, 124 aa, Homo sapiens
TSTRLSTQLCPPPTFLASCPQLSAGALAAAKSFFRKSKQLSRNRLGAVASLQHKAHISNTYIVSPFSSYQIASVINSALDLYFPEGCGVDIFAELGRYYVTSAFTVAVSIIAKKEVLLDQPGRE

SEQ ID NO: 748919 - protein, 68 aa, Homo sapiens
EPSPPAEENGSTSKTIVYHLDEGVYGIFNSVLFDNICPTPILQKVSLPHVGLFSVVCVYFNNICCVFI

SEQ ID NO: 748920 - protein, 594 aa, Homo sapiens
MLPRTKYNRFRNDSVTSVDDLLHSLSVSGGGGKVSAARATPAAAPYLVSGEALRKAPDDGPGSLGHLLHKVSHLKLSSSGLRGLSSAARERAGARLSGSCSAPSLAAPDGSAPSAPRAPAMSAARKGRPGDEPLPRPPRGAPHASDQVLGPGVTYVVKYLGCIEVLRSMRSLDFSTRTQITREAISRVCEAVPGAKGAFKKRKPPSKMLSSILGKSNLQFAGMSISLTISTASLNLRTPDSKQIIANHHMRSISFASGGDPDTTDYVAYVAKDPVNRRACHILECCDGLAQDVIGSIGQAFELRFKQYLQCPTKIPALHDRMQSLDEPWTEEEGDGSDHPYYNSIPSKMPPPGGFLDTRLKPRPHAPDTAQFAGKEQTYYQGRHLGDTFGEDWQQTPLRQGSSDIYSTPEGKLHVAPTGEAPTYVNTQQIPPQAWPAAVSSAESSPRKDLFDMKPFEDALKNQPLGPVLSKAASVECISPVSPRAPDAKMLEELQAETWYQGEMSRKEAEGLLEKDGDFLVRKSTTNPGSFVLTGMHNGQAKHLLLVDPEGTIRTKDRVFDSISHLINHHLESSLPIVSAGSELCLQQPVERKQ

SEQ ID NO: 748921 - protein, 557 aa, Homo sapiens
MLPRTKYNRFRNDSVTSVDDLLHSLSVSGGGGKVSAARATPAAAPYLVSGEALRKAPDDGPGSLGHLLHKVSHLKLSSSGLRGLSSAARERAGARLSGSCSAPSLAAPDGSAPSAPRAPAMSAARKGRPGDEPLPRPPRGAPHASDQVLGPGVTYVVKYLGCIEVLRSMRSLDFSTRTQITREAISRVCEAVPGAKGAFKKRKPPSKMLSSILGKSNLQFAGMSISLTISTASLNLRTPDSKQIIANHHMRSISFASGGDPDTTDYVAYVAKDPVNRRACHILECCDGLAQDVIGSIGQAFELRFKQYLQCPTKIPALHDRMQSLDEPWTEEEGDGSDHPYYNSIPSKMPPPGGFLDTRLKPRPHAPDTAQFAGKEQTYYQGRHLGDTFGEDWQQTPLRQGSSDIYSTPEGKLHVAPTGEAPTYVNTQQIPPQAWPAAVSSAESSPRKDLFDMKPFEDALKNQPLGPVLSKAASVECISPVSPRAPDAKMLEELQAETWYQGEMSRKEAEGLLEKDGDFLVRKSTTNPGSFVLTGMHNGQAKHLLLVDPEGTRSNSY

SEQ ID NO: 748922 - protein, 314 aa, Homo sapiens
QEAVYGQNDIHHKVLSLNFSECHTKIRHVDAHATLSDGVVVQVMGLLSNSGQPERKFMQTLFWLLKDLFQINFMFINDMFRYEDEVFGDSEPELDEESEDEVEEEQEERQPSPEPVQENANSGYYEAHPVTNGIEEPLEESSHEPEPEPESETKTEELKPQVEEKNLEELEEKSTTPPPAEPVSLPQEPPKPRVEAKPEVQSQPPRVREQRPRERPGFPPRGPRPGRGDMDQNGSDKRRIIRYPDSSSTFCGNLPPDIGENELRNSSEFETLWNFASIPGVGEAPIGWGWGLDRPTLLARFVGGAWGNRRRRPA

SEQ ID NO: 748923 - protein, 214 aa, Homo sapiens
QEAVYGQNDIHHKVLSLNFSECHTKIRHVDAHATLSDGVVVQVMGLLSNSGQPERKFMQTLFWLLKDLFQINFMFINDMFRYEDEVFGDSEPELDEESEDEVEEEQEERQPSPEPVQENANSGYYEAHPVTNGIEEPLEESSHEPEPEPESETKTEELKPQVEEKNLEELEEKSTTPPPAEPVSLPQEPPKAFSWASVTSKNLPPSGTVSSSGI

SEQ ID NO: 748924 - protein, 77 aa, Homo sapiens
  misc_feature (1)..(3): Xaa can be any naturally occurring amino acid
XXXFTHLIWQSRIVIPAVIDFPKRESALRGWLYNYIIMAGNKCNVLYYISSLEKWGFRRVRKIVTFSRCPLHKTLHI

SEQ ID NO: 748925 - protein, 97 aa, Homo sapiens
TLKRPWSTSEVSTIAIFSSVEDRGGVPSWLQTLDEGWGLRASQRASQEVVLPLLKASEAVLGLLGVGTTSVLQPFLEEVFSFLQHQKLAKDNIGFVK

SEQ ID NO: 748926 - protein, 642 aa, Homo sapiens
ARRRRRRRRWRRRRRRGGEGSGGQPKQWLSEGEQRAATKAAEERRRWRRCSSGRDWYGGSTGQTPLHSQGGGGGSGGGRRRTPRGMPKEKYEPPDPRRMYTIMSSEEAANGKKSHWAELEISGKVRSLSASLWSLTHLTALHLSDNSLSRIPSDIAKLHNLVYLDLSSNKIRSLPAELGNMVSLRELHLNNNLLRVLPFELGKLFQLQTLGLKGNPLTQDILNLYQEPDGTRRLLNYLLDNLSGTAKRITTEQPPPRSWIMLQEPDRTRPTALFSVMCYNVLCDKYATRQLYGYCPSWALNWDYRKKAIIQEILSCNADIVSLQEVETEQYYSFFLVELKERGYNGFFSPKSRARTMSEQERKHVDGCAIFFKTEKFTLVQKHTVEFNQLAMANSEGSEAMLNRVMTKDNIGVAVLLELRKESIEMPSGKPHLGTEKQLILVANAHMHWDPEYSDVKLVQTMMFLSEVKNIIDKASRNLKSSVLGEFGTIPLVLCADLNSLPDSGVVEYLSTGGVETNHKDFKELRYNESLTNFSCHGKNGTTNGRITHGFKLQSAYESGLMPYTNYTFDFKGIIDYIFYSKPQLNTLGILGPLDHHWLVENNISGCPHPLIPSDHFSLFAQLELLLPFLPQVNGIHLPGRR

SEQ ID NO: 748927 - protein, 642 aa, Homo sapiens; identical to SEQ ID NO: 748926

SEQ ID NO: 748928 - protein, 382 aa, Homo sapiens
MLQEPDRTRPTALFSVMCYNVLCDKYATRQLYGYCPSWALNWDYRKKAIIQEILSCNADIVSLQEVETEQYYSFFLVELKERGYNGFFSPKSRARTMSEQERKHVDGCAIFFKTEKFTLVQKHTVEFNQLAMANSEGSEAMLNRVMTKDNIGVAVLLELRKESIEMPSGKPHLGTEKQLILVANAHMHWDPEYSDVKLVQTMMFLSEVKNIIDKASRNLKSSVLGEFGTIPLVLCADLNSLPDSGVVEYLSTGGVETNHKDFKELRYNESLTNFSCHGKNGTTNGRITHGFKLQSAYESGLMPYTNYTFDFKGIIDYIFYSKPQLNTLGILGPLDHHWLVENNISGCPHPLIPSDHFSLFAQLELLLPFLPQVNGIHLPGRR

SEQ ID NO: 748929 - protein, 642 aa, Homo sapiens; identical to SEQ ID NO: 748926

SEQ ID NO: 748930 - protein, 642 aa, Homo sapiens; identical to SEQ ID NO: 748926

SEQ ID NO: 748931 - protein, 642 aa, Homo sapiens; identical to SEQ ID NO: 748926

SEQ ID NO: 748932 - protein, 509 aa, Homo sapiens
ARRRRRRRRWRRRRRRGGEGSGGQPKQWLSEGEQRAATKAAEERRRWRRCSSGRDWYGGSTGQTPLHSQGGGGGSGGGRRRTPRGMPKEKYEPPDPRRMYTIMSSEEAANGKKSHWAELEISGKVRSLSASLWSLTHLTALHLSDNSLSRIPSDIAKLHNLVYLDLSSNKIRSLPAELGNMVSLRELHLNNNLLRVLPFELGKLFQLQTLGLKGNPLTQDILNLYQEPDGTRRLLNYLLDNLSGTAKRITTEQPPPRSWIMLQEPDRTRPTALFSVMCYNVLCDKYATRQLYGYCPSWALNWDYRKKAIIQEILSCNADIVSLQEVETEQYYSFFLVELKERGYNGFFSPKSRARTMSEQERKHVDGCAIFFKTEKFTLVQKHTVEFNQLAMANSEGSEAMLNRVMTKDNIGVAVLLELRKESIEMPSGKPHLGTEKQLILVANAHMHWDPEYSDVKLVQTMMFLSEVKNIIDKASRNLKSSVLGEFGTIPLVLCADLNSLPDSGKKIM

SEQ ID NO: 748933 - protein, 557 aa, Homo sapiens
MPKEKYEPPDPRRMYTIMSSEEAANGKKSHWAELEISGKVRSLSASLWSLTHLTALHLSDNSLSRIPSDIAKLHNLVYLDLSSNKIRSLPAELGNMVSLRELHLNNNLLRVLPFELGKLFQLQTLGLKGNPLTQDILNLYQEPDGTRRLLNYLLDNLSGTAKRITTEQPPPRSWIMLQEPDRTRPTALFSVMCYNVLCDKYATRQLYGYCPSWALNWDYRKKAIIQEILSCNADIVSLQEVETEQYYSFFLVELKERGYNGFFSPKSRARTMSEQERKHVDGCAIFFKTEKFTLVQKHTVEFNQLAMANSEGSEAMLNRVMTKDNIGVAVLLELRKESIEMPSGKPHLGTEKQLILVANAHMHWDPEYSDVKLVQTMMFLSEVKNIIDKASRNLKSSVLGEFGTIPLVLCADLNSLPDSGVVEYLSTGGVETNHKDFKELRYNESLTNFSCHGKNGTTNGRITHGFKLQSAYESGLMPYTNYTFDFKGIIDYIFYSKPQLNTLGILGPLDHHWLVENNISGCPHPLIPSDHFSLFAQLELLLPFLPQVNGIHLPGRR

SEQ ID NO: 748934 - protein, 558 aa, Homo sapiens
ADLEYPRSPTRPRRMYTIMSSEEAANGKKSHWAELEISGKVRSLSASLWSLTHLTALHLSDNSLSRIPSDIAKLHNLVYLDLSSNKIRSLPAELGNMVSLRELHLNNNLLRVLPFELGKLFQLQTLGLKGNPLTQDILNLYQEPDGTRRLLNYLLDNLSGTAKRITTEQPPPRSWIMLQEPDRTRPTALFSVMCYNVLCDKYATRQLYGYCPSWALNWDYRKKAIIQEILSCNADIVSLQEVETEQYYSFFLVELKERGYNGFFSPKSRARTMSEQERKHVDGCAIFFKTEKFTLVQKHTVEFNQLAMANSEGSEAMLNRVMTKDNIGVAVLLELRKESIEMPSGKPHLGTEKQLILVANAHMHWDPEYSDVKLVQTMMFLSEVKNIIDKASRNLKSSVLGEFGTIPLVLCADLNSLPDSGVVEYLSTGGVETNHKDFKELRYNESLTNFSCHGKNGTTNGRITHGFKLQSAYESGLMPYTNYTFDFKGIIDYIFYSKPQLNTLGILGPLDHHWLVENNISGCPHPLIPSDHFSLFAQLELLLPFLPQVNGIHLPGRR

SEQ ID NO: 748935 - protein, 382 aa, Homo sapiens; identical to SEQ ID NO: 748928

SEQ ID NO: 748936 - protein, 642 aa, Homo sapiens; identical to SEQ ID NO: 748926

SEQ ID NO: 748937 - protein, 650 aa, Homo sapiens
ARRRRRRRRWRRRRRRGGEGSGGQPKQWLSEGEQRAATKAAEERRRWRRCSSGRDWYGGSTGQTPLHSQGGGGGSGGGRRRTPRGMPKEKYEPPDPRRMYTIMSSEEAANGKKSHWAELEISGKVRSLSASLWSLTHLTALHLSDNSLSRIPSDIAKLHNLVYLDLSSNKIRSLPAELGNMVSLRELHLNNNLLRVLPFELGKLFQLQTLGLKGNPLTQDILNLYQEPDGTRRLLNYLLDNLSGTAKRITTEQPPPRSWIMLQEPDRTRPTALFSVMCYNVLCDKYATRQLYGYCPSWALNWDYRKKAIIQEILSCNADIVSLQEVETEQYYSFFLVELKERGYNGFFSPKSRARTMSEQERKHVDGCAIFFKTEKFTLVQKHTVEFNQLAMANSEGSEAMLNRVMTKDNIGVAVLLELRKESIEMPSGKPHLGTEKQLILVANAHMHWDPEYSDVKLVQTMMFLSEVKNIIDKASRNLKSSVLGEFGTIPLVLCADLNSLPDSGVVEYLSTGGVETNHKDFKELRYNESLTNFSCHGKNGTTNGRITHGFKLQSAYESGLMPYTNYTFDFKGIIDYIFYSKPQLNTLGILGPLDHHWLVENNISGCPHPLIPSDHFSLFAQLELLLPFLPQVNGIHLPGRRHTAFCGSV

SEQ ID NO: 748938 - protein, 120 aa, Homo sapiens
RQGLALSPRLECSGVTSAHCNLHLQGSSGFCTSASGVAGSTGAYHHAWLIFVFFVETGFHCVAQAGLKLLASSDLPNLASQSAEIKSVSHHTQPVLCNLNEEKITWALRNNFYPGPLLSS

SEQ ID NO: 748939 - protein, 215 aa, Homo sapiens
MANRRVGRGCWEVSPTERRPPAGLRGPAAEEEASSPPVLSLSHFCRSPFLCFGDVLLGASRTLSLALDNPNEEVAEVKISHFPAADLGFSVSQRCFVLQPKEKIVISVNWTPLKEGRVREIMTFLVNDVLKHQAILLGNAEEQKKKKRSLWDTIKKKKISASTSHNRRVSNIQNVNKTFSVSQKVDRVRSPLQACENLAMNEGGPPTENNSLILE

SEQ ID NO: 748940 - protein, 114 aa, Homo sapiens
MQFGFLGSWRPSLSSISYIEHSRCFHIILIFLREWTNYFLLNSLFATFHKALVLNNRHGAAWSTKRLNFIFLVETGFQDVGQAALELLMSGDLPASASQSAGITSVDHCTQLLF

SEQ ID NO: 748941 - protein, 343 aa, Homo sapiens
MAGNCSWEAHPGNRNKMCPGLSEAPELYSRGFLTIEQIAMLPPPAVMNYIFLLLCLCGLVGNGLVLWFFGFSIKRNPFSIYFLHLASADVGYLFSKAVFSILNTGGFLGTFADYIRSVCRVLGLCMFLTGVSLLPAVSAERCASVIFPAWYWRRRPKRLSAVVCALLWVLSLLVTCLHNYFCVFLGRGAPGAACRHMDIFLGILLFLLCCPLMVLPCLALILHVECRARRRQRSAKLNHVILAMVSVFLVSSIYLGIDWFLFWVFQIPAPFPEYVTDLCICINSSAKPIVYFLAGRDKSQRLWEPLRVVFQRALRDGAELGEAGGSTPNTVTMEMQCPPGNAS

SEQ ID NO: 748942 - protein, 343 aa, Homo sapiens; identical to SEQ ID NO: 748941

SEQ ID NO: 748943 - protein, 343 aa, Homo sapiens; identical to SEQ ID NO: 748941

SEQ ID NO: 748944 - protein, 343 aa, Homo sapiens; identical to SEQ ID NO: 748941

SEQ ID NO: 748945 - protein, 46 aa, Homo sapiens
MADIQTERAYQKQPTIFQNKKRVLLGETGKEKLLRYYKNIGLGFKT

SEQ ID NO: 748946 - protein, 80 aa, Homo sapiens
AAAYYYYLLLEFKLLTDVRGHASVSDDGSNSSPAREALQTAVREKPDRGLGSQSRFLGSGVSKRGPRCWEPPREAGRLFL

SEQ ID NO: 748947 - protein, 445 aa, Homo sapiens
MLPWTALGLALSLRLALARSGAERGPPASAPRGDLMFLLDSSASVSHYEFSRVREFVGQLVAPLPLGTGALRASLVHVGSRPYTEFPFGQHSSGEAAQDAVRASAQRMGDTHTGLALVYAKEQLFAEASGARPGVPKVLVWVTDGGSSDPVGPPMQELKDLGVTVFIVSTGRGNFLELSAAASAPAEKHLHFVDVDDLHIIVQELRGSILDAMRPQQLHATEITSSGFRLAWPPLLTADSGYYVLELVPSAQPGAARRQQLPGNATDWIWAGLDPDTDYDVALVPESNVRLLRPQILRVRTRPGEAGPGASGPESGAGPAPTQLAALPAPEEAGPERIVISHARPRSLRVSWAPALGSAAALGYHVQFGPLRGGEAQRVEVPAGRNCTTLQGLAPGTAYLVTVTAAFRSGRESALSAKACTPDGPRPRPRPVPRAPTPGTASREP

SEQ ID NO: 748948 - protein, 557 aa, Homo sapiens
MATPREGRGRVLLSRGHCWPSPTQAGEICPGSHCPSGRPLQPATSRLGLTKTPRLKSSCLTSGTLQSCWGCVLGPGVWAPHWVGYMGNRPSVVPLDRASTNHLPLPCLFLQEAQVAWVLRVSLNSCLLSPFKPLCPCPPASAPRGDLMFLLDSSASVSHYEFSRVREFVGQLVAPLPLGTGALRASLVHVGSRPYTEFPFGQHSSGEAAQDAVRASAQRMGDTHTGLALVYAKEQLFAEASGARPGVPKVLVWVTDGGSSDPVGPPMQELKDLGVTVFIVSTGRGNFLELSAAASAPAEKHLHFVDVDDLHIIVQELRGSILDAMRPQQLHATEITSSGFRLAWPPLLTADSGYYVLELVPSAQPGAARRQQLPGNATDWIWAGLDPDTDYDVALVPESNVRLLRPQILRVRTRPGEAGPGASGPESGAGPAPTQLAALPAPEEAGPERIVISHARPRSLRVSWAPALGSAAALGYHVQFGPLRGGEAQRVEVPAGRNCTTLQGLAPGTAYLVTVTAAFRSGRESALSAKACTPDGPRPRPRPVPRAPTPGTASREP

SEQ ID NO: 748949 - protein, 233 aa, Homo sapiens
MRPQQLHATEITSSGFRLAWPPLLTADSGYYVLELVPSAQPGAARRQQLPGNATDWIWAGLDPDTDYDVALVPESNVRLLRPQILRVRTRPGEAGPGASGPESGAGPAPTQLAALPAPEEAGPERIVISHARPRSLRVSWAPALGSAAALGYHVQFGPLRGGEAQRVEVPAGRNCTTLQGLAPGTAYLVTVTAAFRSGRESALSAKACTPDGPRPRPRPVPRAPTPGTASREP

SEQ ID NO: 748950 - protein, 445 aa, Homo sapiens; identical to SEQ ID NO: 748947

SEQ ID NO: 748951 - protein, 297 aa, Homo sapiens
NPYTAEVEARGVIGRGVFIVSTGRGNFLELSAAASAPAEKHLHFVDVDDLHIIVQELRGSILDAMRPQQLHATEITSSGFRLAWPPLLTADSGYYVLELVPSAQPGAARRQQLPGNATDWIWAGLDPDTDYDVALVPESNVRLLRPQILRVRTRPGEAGPGASGPESGAGPAPTQLAALPAPEEAGPERIVISHARPRSLRVSWAPALGSAAALGYHVQFGPLRGGEAQRVEVPAGRNCTTLQGLAPGTAYLVTVTAAFRSGRESALSAKACTPDGPRPRPRPVPRAPTPGTASREP

SEQ ID NO: 748952 - protein, 233 aa, Homo sapiens; identical to SEQ ID NO: 748949

SEQ ID NO: 748953 - protein, 419 aa, Homo sapiens
MLPWTALGLALSLRLALARSGAERGPPASAPRGDLMFLLDSSASVSHYEFSRVREFVGQLVAPLPLGTGALRASLVHVGSRPYTEFPFGQHSSGEAAQDAVRASAQRMGDTHTGLALVYAKEQLFAEASGARPGVPKVLVWVTDGGSSDPVGPPMQELKDLGVTVFIVSTGRGNFLELSAAASAPAEKHLHFVDVDDLHIIVQELRGSILDAMRPQQLHATEITSSGFRLAWPPLLTADSGYYVLELVPSAQPGAARRQQLPGNATDWIWAGLDPDTDYDVALVPESNVRLAWRDPAAAPAPSPPRAGRRVGPWVIIESVRPRTVQGGAPVRLPRVKTGPQVARAGLGRAAWVLDVDRKRKGNRGKLAPGTAYLVTVTAAFRSGRESALSAKACTPDGPRPRPRPVPRAPTPGTASREP

SEQ ID NO: 748954 - protein, 143 aa, Homo sapiens
KNSTRGGHEAPPSARAARARCPPRPARPTARARAHAPCPAPRPRGPPAVSRKPASPPSREGRRLPEGPCVPNPERRRPTRQTGAGPAFPHADSARPRPSPCGRRASPPGACPPGLGPRLAGPRSSPGPIPAQSRASCGSVGDN

SEQ ID NO: 748955 - protein, 445 aa, Homo sapiens; identical to SEQ ID NO: 748947

SEQ ID NO: 748956 - protein, 445 aa, Homo sapiens; identical to SEQ ID NO: 748947

SEQ ID NO: 748957 - protein, 278 aa, Homo sapiens
MLPWTALGLALSLRLALARSGAERGPPASAPRGDLMFLLDSSASVSHYEFSRVREFVGQLVAPLPLGTGALRASLVHVGSRPYTEFPFGQHSSGEAAQDAVRASAQRMGDTHTGLALVYAKEQLFAEASGARPGVPKVLVWVTDGGSSDPVGPPMQELKDLGVTVFIVSTGRGNFLELSAAASAPAEKHLHFVDVDDLHIIVQELRGSILDAMRPQQLHATEITSSGFRLAWPPLLTADSGQHLLGTVALPSCPGHQLGPASSHWESEEWGRAGHSGP

SEQ ID NO: 748958 - protein, 445 aa, Homo sapiens; identical to SEQ ID NO: 748947

SEQ ID NO: 748959 - protein, 238 aa, Homo sapiens
MLPWTALGLALSLRLALARSGAERGPPASAPRGDLMFLLDSSASVSHYEFSRVREFVGQLVAPLPLGTGALRASLVHVGSRPYTEFPFGQHSSGEAAQDAVRASAQRMGDTHTGLALVYAKEQLFAEASGARPGVPKVLVWVTDGGSTLGSAAALGYHVQFGPLRGGEAQRVEVPAGRNCTTLQGLAPGTAYLVTVTAAFRSGRESALSAKACTPDGPRPRPRPVPRAPTPGTASREP

SEQ ID NO: 748960 - protein, 445 aa, Homo sapiens; identical to SEQ ID NO: 748947

SEQ ID NO: 748961 - protein, 154 aa, Homo sapiens
ATVCSLFLVALTLSGYWVDPRKNRRRRLGFNYSSQLWNLLLLTWTRTQEQNLRVAIWFLRRKRKAALEWFLYSNFNRRVRDGTRRRKDSLQPEIVETGLAGLELVTSGDPPASASQGVGITAVSHCIWPVCSFHKHLRGSLLQDFRSTSIDGGR

SEQ ID NO: 748962 - protein, 112 aa, Homo sapiens
MCSGRFQNIQVNPDFPRGRISNSFRRTSSTENKTKTLGKLHQEPRQLQSDGKRKILLEELANSDPKLALTGVPIVQWPKRDKCGMEKRRKGPGMVAHTCNPSTLGGPGRWIT

SEQ ID NO: 748963 - protein, 105 aa, Homo sapiens
WSLSQVVVGQRGLLFSILKERRLQELNGEESCVYVSTVIMSTFPTGCNKLTDQTLIYLRRIANVTLIDLRGCKQITRKACEHFISDLSINSLYCLSDEKLIQKIS

SEQ ID NO: 748964 - protein, 1162 aa, Homo sapiens
MEPEEERIRYSQRLRGTMRRRYEDDGISDDEIEGKRTFDLEEKLHTNKYNANFVTFMEGKDFNVEYIQRGGLRDPLIFKNSDGLGIKMPDPDFTVNDVKMCVGSRRMVDVMDVNTQKGIEMTMAQWTRYYETPEEEREKLYNVISLEFSHTRLENMVQRPSTVDFIDWVDNMWPRHLKESQTESTNAILEMQYPKVQKYCLMSVRGCYTDFHVDFGGTSVWYHIHQGGKVFWLIPPTAHNLELYENWLLSGKQGDIFLGDRVSDCQRIELKQGYTFVIPSGWIHAVYTPTDTLVFGGNFLHSFNIPMQLKIYNIEDRTRVPNKFRYPFYYEMCWYVLERYVYCITNRSHLTKEFQKESLSMDLELNGLESGNGDEEAVDREPRRLSSRRSVLTSPVANGVNLDYDGLGKTCRSLPSLKKTLAGDSSSDCSRGSHNGQVWDPQCAPRKDRQVHLTHFELEGLRCLVDKLESLPLHKKCVPTGIEDEDALIADVKILLEELANSDPKLALTGVPIVQWPKRDKLKFPTRPKVRVPTIPITKPHTMKPAPRLTPVRPAAASPIVSGARRRRVRCRKCKACVQGECGVCHYCRDMKKFGGPGRMKQSCVLRQCLAPRLPHSVTCSLCGEVDQNEETQDFEKKLMECCICNEIVHPGCLQMDGEGLLNEELPNCWECPKCYQEDSSEKAQKRKMEESDEEAVQAKVLRPLRSCDEPLTPPPHSPTSMLQLIHDPVSPRGMVTRSSPGAGPSDHHSASRDERFKRRQLLRLQATERTMVREKENNPSGKKELSEVEKAKIRGSYLTVTLQRPTKELHGTSIVPKLQAITASSANLRHSPRVLVQHCPARTPQRGDEEGLGGEEEEEEEEEEEDDSAEEGGAARLNGRGSWAQDGDESWMQREVWMSVFRYLSRRELCECMRVCKTWYKWCCDKRLWTKIDLSRCKAIVPQALSGIIKRQPVSLDLSWTNISKKQLTWLVNRLPGLKDLLLAGCSWSAVSALSTSSCPLLRTLDLRWAVGIKDPQIRDLLTPPADKPGQDNRSKLRNMTDFRLAGLDITDATLRLIIRHMPLLSRLDLSHCSHLTDQSSNLLTAVGSSTRYSLTELNMAGCNKLTDQTLIYLRRIANVTLIDLRGCKQITRKACEHFISDLSINSLYCLSDEKLIQKIS

SEQ ID NO: 748965 - protein, 1298 aa, Homo sapiens
MEPEEERIRYSQRLRGTMRRRYEDDGISDDEIEGKRTFDLEEKLHTNKYNANFVTFMEGKDFNVEYIQRGGLRDPLIFKNSDGLGIKMPDPDFTVNDVKMCVGSRRMVDVMDVNTQKGIEMTMAQWTRYYETPEEEREKLYNVISLEFSHTRLENMVQRPSTVDFIDWVDNMWPRHLKESQTESTNAILEMQYPKVQKYSDAPCIFLRVLWETKAIARIGFSLTSFALCLEVIKKMNYLKMRLYSSTRKSVCEHTIAHNHTVKGKKTYILVNTVEKKKTFFDNVMTENALLFLLLELKIKWKIKGVYKRRVWHFGGADVLFSISTLMLLLFLGRYCLMSVRGCYTDFHVDFGGTSVWYHIHQGGKVFWLIPPTAHNLELYENWLLSGKQGDIFLGDRVSDCQRIELKQGYTFVIPSGWIHAVYTPTDTLVFGGNFLHSFNIPMQLKIYNIEDRTRVPNKFRYPFYYEMCWYVLERYVYCITNRSHLTKEFQKESLSMDLELNGLESGNGDEEAVDREPRRLSSRRSVLTSPVANGVNLDYDGLGKTCRSLPSLKKTLAGDSSSDCSRGSHNGQVWDPQCAPRKDRQVHLTHFELEGLRCLVDKLESLPLHKKCVPTGIEDEDALIADVKILLEELANSDPKLALTGVPIVQWPKRDKLKFPTRPKVRVPTIPITKPHTMKPAPRLTPVRPAAASPIVSGARRRRVRCRKCKACVQGECGVCHYCRDMKKFGGPGRMKQSCVLRQCLAPRLPHSVTCSLCGEVDQNEETQDFEKKLMECCICNEIVHPGCLQMDGEGLLNEELPNCWECPKCYQEDSSEKAQKRKMEESDEEAVQAKVLRPLRSCDEPLTPPPHSPTSMLQLIHDPVSPRGMVTRSSPGAGPSDHHSASRDERFKRRQLLRLQATERTMVREKENNPSGKKELSEVEKAKIRGSYLTVTLQRPTKELHGTSIVPKLQAITASSANLRHSPRVLVQHCPARTPQRGDEEGLGGEEEEEEEEEEEDDSAEEGGAARLNGRGSWAQDGDESWMQREVWMSVFRYLSRRELCECMRVCKTWYKWCCDKRLWTKIDLSRCKAIVPQALSGIIKRQPVSLDLSWTNISKKQLTWLVNRLPGLKDLLLAGCSWSAVSALSTSSCPLLRTLDLRWAVGIKDPQIRDLLTPPADKPGQDNRSKLRNMTDFRLAGLDITDATLRLIIRHMPLLSRLDLSHCSHLTDQSSNLLTAVGSSTRYSLTELNMAGCNKLTDQTLIYLRRIANVTLIDLRGCKQITRKACEHFISDLSINSLYCLSDEKLIQKIS

SEQ ID NO: 748966 - protein, 1162 aa, Homo sapiens; identical to SEQ ID NO: 748964

SEQ ID NO: 748967 - protein, 1023 aa, Homo sapiens
RVVELDTGYDVASSLYNSHTRLENMVQRPSTVDFIDWVDNMWPRHLKESQTESTNAILEMQYPKVQKYCLMSVRGCYTDFHVDFGGTSVWYHIHQGGKPTNLELYENWLLSGKQGDIFLGDRVSDCQRIELKQGYTFVIPSGWIHAVYTPTDTLVFGGNFLHSFNIPMQLKIYNIEDRTRVPNKFRYPFYYEMCWYVLERYVYCITNRSHLTKEFQKESLSMDLELNGLESGNGDEEAVDREPRRLSSRRSVLTSPVANGVNLDYDGLGKTCRSLPSLKKTLAGDSSSDCSRGSHNGQVWDPQCAPRKDRQVHLTHFELEGLRCLVDKLESLPLHKKCVPTGIEDEDALIADVKILLEELANSDPKLALTGVPIVQWPKRDKLKFPTRPKVRVPTIPITKPHTMKPAPRLTPVRPAAASPIVSGARRRRVRCRKCKACVQGECGVCHYCRDMKKFGGPGRMKQSCVLRQCLAPRLPHSVTCSLCGEVDQNEETQDFEKKLMECCICNEIVHPGCLQMDGEGLLNEELPNCWECPKCYQEDSSEKAQKRKMEESDEEAVQAKVLRPLRSCDEPLTPPPHSPTSMLQLIHDPVSPRGMVTRSSPGAGPSDHHSASRDERFKRRQLLRLQATERTMVREKENNPSGKKELSEVEKAKIRGSYLTVTLQRPTKELHGTSIVPKLQAITASSANLRHSPRVLVQHCPARTPQRGDEEGLGGEEEEEEEEEEEDDSAEEGGAARLNGRGSWAQDGDESWMQREVWMSVFRYLSRRELCECMRVCKTWYKWCCDKRLWTKIDLSRCKAIVPQALSGIIKRQPVSLDLSWTNISKKQLTWLVNRLPGLKDLLLAGCSWSAVSALSTSSCPLLRTLDLRWAVGIKDPQIRDLLTPPADKPGQDNRSKLRNMTDFRLAGLDITDATLRLIIRHMPLLSRLDLSHCSHLTDQSSNLLTAVGSSTRYSLTELNMAGCNKLTDQTLIYLRRIANVTLIDLRGCKQITRKACEHFISDLSINSLYCLSDEKLIQKIS

SEQ ID NO: 748968 - protein, 831 aa, Homo sapiens
MCWYVLERYVYCITNRSHLTKEFQKESLSMDLELNGLESGNGDEEAVDREPRRLSSRRSVLTSPVANGVNLDYDGLGKTCRSLPSLKKTLAGDSSSDCSRGSHNGQVWDPQCAPRKDRQVHLTHFELEGLRCLVDKLESLPLHKKCVPTGIEDEDALIADVKILLEELANSDPKLALTGVPIVQWPKRDKLKFPTRPKVRVPTIPITKPHTMKPAPRLTPVRPAAASPIVSGARRRRVRCRKCKACVQGECGVCHYCRDMKKFGGPGRMKQSCVLRQCLAPRLPHSVTCSLCGEVDQNEETQDFEKKLMECCICNEIVHPGCLQMDGEGLLNEELPNCWECPKCYQEDSSEKAQKRKMEESDEEAVQAKVLRPLRSCDEPLTPPPHSPTSMLQLIHDPVSPRGMVTRSSPGAGPSDHHSASRDERFKRRQLLRLQATERTMVREKENNPSGKKELSEVEKAKIRGSYLTVTLQRPTKELHGTSIVPKLQAITASSANLRHSPRVLVQHCPARTPQRGDEEGLGGEEEEEEEEEEEDDSAEEGGAARLNGRGSWAQDGDESWMQREVWMSVFRYLSRRELCECMRVCKTWYKWCCDKRLWTKIDLSRCKAIVPQALSGIIKRQPVSLDLSWTNISKKQLTWLVNRLPGLKDLLLAGCSWSAVSALSTSSCPLLRTLDLRWAVGIKDPQIRDLLTPPADKPGQDNRSKLRNMTDFRLAGLDITDATLRLIIRHMPLLSRLDLSHCSHLTDQSSNLLTAVGSSTRYSLTELNMAGCNKLTDQTLIYLRRIANVTLIDLRGCKQITRKACEHFISDLSINSLYCLSDEKLIQKIS

SEQ ID NO: 748969 - protein, 523 aa, Homo sapiens
MECCICNEIVHPGCLQMDGEGLLNEELPNCWECPKCYQEDSSEKAQKRKMEESDEEAVQAKVLRPLRSCDEPLTPPPHSPTSMLQLIHDPVSPRGMVTRSSPGAGPSDHHSASRDERFKRRQLLRLQATERTMVREKENNPSGKKELSEVEKAKIRGSYLTVTLQRPTKELHGTSIVPKLQAITASSANLRHSPRVLVQHCPARTPQRGDEEGLGGEEEEEEEEEEEDDSAEEGGAARLNGRGSWAQDGDESWMQREVWMSVFRYLSRRELCECMRVCKTWYKWCCDKRLWTKIDLSRCKAIVPQALSGIIKRQPVSLDLSWTNISKKQLTWLVNRLPGLKDLLLAGCSWSAVSALSTSSCPLLRTLDLRWAVGIKDPQIRDLLTPPADKPGQDNRSKLRNMTDFRLAGLDITDATLRLIIRHMPLLSRLDLSHCSHLTDQSSNLLTAVGSSTRYSLTELNMAGCNKLTDQTLIYLRRIANVTLIDLRGCKQITRKACEHFISDLSINSLYCLSDEKLIQKIS

SEQ ID NO: 748970 - protein, 1162 aa, Homo sapiens; identical to SEQ ID NO: 748964

SEQ ID NO: 748971 - protein, 223 aa, Homo sapiens
DSRTQACSGIIKRQPVSLDLSWTNISKKQLTWLVNRLPGLKDLLLAGCSWSAVSALSTSSCPLLRTLDLRWAVGIKDPQIRDLLTPPADKPGQDNRSKLRNMTDFRLAGLDITDATLRLIIRHMPLLSRLDLSHCSHLTDQSSNLLTAVGSSTRYSLTELNMAGCNKLTDQTLIYLRRIANVTLIDLRGCKQITRKACEHFISDLSINSLYCLSDEKLIQKIS

SEQ ID NO: 748972 - protein, 1298 aa, Homo sapiens; identical to SEQ ID NO: 748965

SEQ ID NO: 748973 - protein, 1075 aa, Homo sapiens
MEPEEERIRYSQRLRGTMRRRYEDDGISDDEIEGKRTFDLEEKLHTNKYNANFVTFMEGKDFNVEYIQRGGLRDPLIFKNSDGLGIKMPDPDFTVNDVKMCVGSRRMVDVMDVNTQKGIEMTMAQWTRYYETPEEEREKLYNVISLEFSHTRLENMVQRPSTVDFIDWVDNMWPRHLKESQTESTNAILEMQYPKVQKYSDAPCIFLRVLWETKAIARIGFSLTSFALCLEVIKKMNYLKMRLYSSTRKSVCEHTIAHNHTVKGKKTYILVNTVEKKKTFFDNVMTENALLFLLLELKIKWKIKGVYKRRVWHFGGADVLFSISTLMLLLFLGRYCLMSVRGCYTDFHVDFGGTSVWYHIHQGGKVFWLIPPTAHNLELYENWLLSGKQGDIFLGDRVSDCQRIELKQGYTFVIPSGWIHAVYTPTDTLVFGGNFLHSFNIPMQLKIYNIEDRTRVPNKFRYPFYYEMCWYVLERYVYCITNRSHLTKEFQKESLSMDLELNGLESGNGDEEAVDREPRRLSSRRSVLTSPVANGVNLDYDGLGKTCRSLPSLKKTLAGDSSSDCSRGSHNGQVWDPQCAPRKDRQVHLTHFELEGLRCLVDKLESLPLHKKCVPTGIEDEDALIADVKILLEELANSDPKLALTGVPIVQWPKRDKLKFPTRPKVRVPTIPITKPHTMKPAPRLTPVRPAAASPIVSGARRRRVRCRKCKACVQGECGVCHYCRDMKKFGGPGRMKQSCVLRQCLAPRLPHSVTCSLCGEVDQNEETQDFEKKLMECCICNEIVHPGCLQMDGEGLLNEELPNCWECPKCYQEDSSEKAQKRKMEESDEEAVQAKVLRPLRSCDEPLTPPPHSPTSMLQLIHDPVSPRGMVTRSSPGAGPSDHHSASRDERFKRRQLLRLQATERTMVREKENNPSGKKELSEVEKAKIRGSYLTVTLQRPTKELHGTSIVPKLQAITASSANLRHSPRVLVQHCPARTPQRGDEEGLGGEEEEEEEEEEEDDSAEEGGAARLNGRGSWAQDGDESWMQREVWMSVFRYLSRRELCECMRVCKTWYKWSATRDFDTGQNNRAEL

SEQ ID NO: 748974 - protein, 308 aa, Homo sapiens
MEPEEERIRYSQRLRGTMRRRYEDDGISDDEIEGKRTFDLEEKLHTNKYNANFVTFMEGKDFNVEYIQRGGLRDPLIFKNSDGLGIKMPDPDFTVNDVKMCVGSRRMVDVMDVNTQKGIEMTMAQWTRYYETPEEEREKLYNVISLEFSHTRLENMVQRPSTVDFIDWVDNMWPRHLKESQTESTNAILEMQYPKVQKYCLMSVRGCYTDFHVDFGGTSVWYHIHQGGKVFWLIPPTAHNLELYENWLLSGKQGDIFLGDRVSDCQRIELKQGYTFVIPSGWIHAVYTPTDTLVFGGKSTSDESSDHL

SEQ ID NO: 748975 - protein, 961 aa, Homo sapiens
MSVRGCYTDFHVDFGGTSVWYHIHQGGKVFWLIPPTAHNLELYENWLLSGKQGDIFLGDRVSDCQRIELKQGYTFVIPSGWIHAVYTPTDTLVFGGNFLHSFNIPMQLKIYNIEDRTRVPNKFRYPFYYEMCWYVLERYVYCITNRSHLTKEFQKESLSMDLELNGLESGNGDEEAVDREPRRLSSRRSVLTSPVANGVNLDYDGLGKTCRSLPSLKKTLAGDSSSDCSRGSHNGQVWDPQCAPRKDRQVHLTHFELEGLRCLVDKLESLPLHKKCVPTGIEDEDALIADVKILLEELANSDPKLALTGVPIVQWPKRDKLKFPTRPKVRVPTIPITKPHTMKPAPRLTPVRPAAASPIVSGARRRRVRCRKCKACVQGECGVCHYCRDMKKFGGPGRMKQSCVLRQCLAPRLPHSVTCSLCGEVDQNEETQDFEKKLMECCICNEIVHPGCLQMDGEGLLNEELPNCWECPKCYQEDSSEKAQKRKMEESDEEAVQAKVLRPLRSCDEPLTPPPHSPTSMLQLIHDPVSPRGMVTRSSPGAGPSDHHSASRDERFKRRQLLRLQATERTMVREKENNPSGKKELSEVEKAKIRGSYLTVTLQRPTKELHGTSIVPKLQAITASSANLRHSPRVLVQHCPARTPQRGDEEGLGGEEEEEEEEEEEDDSAEEGGAARLNGRGSWAQDGDESWMQREVWMSVFRYLSRRELCECMRVCKTWYKWCCDKRLWTKIDLSRCKAIVPQALSGIIKRQPVSLDLSWTNISKKQLTWLVNRLPGLKDLLLAGCSWSAVSALSTSSCPLLRTLDLRWAVGIKDPQIRDLLTPPADKPGQDNRSKLRNMTDFRLAGLDITDATLRLIIRHMPLLSRLDLSHCSHLTDQSSNLLTAVGSSTRYSLTELNMAGCNKLTDQTLIYLRRIANVTLIDLRGCKQITRKACEHFISDLSINSLYCLSDEKLIQKIS

SEQ ID NO: 748976 - protein, 961 aa, Homo sapiens; identical to SEQ ID NO: 748975

SEQ ID NO: 748977 - protein, 1281 aa, Homo sapiens
MRRRYEDDGISDDEIEGKRTFDLEEKLHTNKYNANFVTFMEGKDFNVEYIQRGGLRDPLIFKNSDGLGIKMPDPDFTVNDVKMCVGSRRMVDVMDVNTQKGIEMTMAQWTRYYETPEEEREKLYNVISLEFSHTRLENMVQRPSTVDFIDWVDNMWPRHLKESQTESTNAILEMQYPKVQKYSDAPCIFLRVLWETKAIARIGFSLTSFALCLEVIKKMNYLKMRLYSSTRKSVCEHTIAHNHTVKGKKTYILVNTVEKKKTFFDNVMIENALLFLLLELKIKWKIKGVYKRRVWHFGGADVLFSISTLMLLLFLGRYCLMSVRGCYTDFHVDFGGTSVWYHIHQGGKVFWLIPPTAHNLELYENWLLSGKQGDIFLGDRVSDCQRIELKQGYTFVIPSGWIHAVYTPTDTLVFGGNFLHSFNIPMQLKIYNIEDRTRVPNKFRYPFYYEMCWYVLERYVYCITNRSHLTKEFQKESLSMDLELNGLESGNGDEEAVDREPRRLSSRRSVLTSPVANGVNLDYDGLGKTCRSLPSLKKTLAGDSSSDCSRGSHNGQVWDPQCAPRKDRQVHLTHFELEGLRCLVDKLESLPLHKKCVPTGIEDEDALIADVKILLEELANSDPKLALTGVPIVQWPKRDKLKFPTRPKVRVPTIPITKPHTMKPAPRLTPVRPAAASPIVSGARRRRVRCRKCKACVQGECGVCHYCRDMKKFGGPGRMKQSCVLRQCLAPRLPHSVTCSLCGEVDQNEETQDFEKKLMECCICNEIVHPGCLQMDGEGLLNEELPNCWECPKCYQEDSSEKAQKRKMEESDEEAVQAKVLRPLRSCDEPLTPPPHSPTSMLQLIHDPVSPRGMVTRSSPGAGPSDHHSASRDERFKRRQLLRLQATERTMVREKENNPSGKKELSEVEKAKIRGSYLTVTLQRPTKELHGTSIVPKLQAITASSANLRHSPRVLVQHCPARTPQRGDEEGLGGEEEEEEEEEEEDDSAEEGGAARLNGRGSWAQDGDESWMQREVWMSVFRYLSRRELCECMRVCKTWYKWCCDKRLWTKIDLSRCKAIVPQALSGIIKRQPVSLDLSWTNISKKQLTWLVNRLPGLKDLLLAGCSWSAVSALSTSSCPLLRTLDLRWAVGIKDPQIRDLLTPPADKPGQDNRSKLRNMTDFRLAGLDITDATLRLIIRHMPLLSRLDLSHCSHLTDQSSNLLTAVGSSTRYSLTELNMAGCNKLTDQTLIYLRRIANVTLIDLRGCKQITRKACEHFISDLSINSLYCLSDEKLIQKIS

SEQ ID NO: 748978 - protein, 1474 aa, Homo sapiens
MEPEEERIRYSQRLRGTMRRRYEDDGISDDEIEGKRTFDLEEKLHTNKYNANFVTFMEGKDFNVEYIQRGGLRDPLIFKNSDGLGIKMPDPDFTVNDVKMCVGSRRMVDVMDVNTQKGIEMTMAQWTRYYETPEEEREKLYNVISLEFSHTRLENMVQRPSTVDFIDWVDNMWPRHLKESQTESTNAILEMQYPKVQKYSDAPCIFLRVLWETKAIARIGFSLTSFALCLEVIKKMNYLKMRLYSSTRKSVCEHTIAHNHTVKGKKTYILVNTVEKKKTFFDNVMTENALLFLLLELKIKWKIKGVYKRRVWHFGGADVLFSISTLMLLLFLGRYCLMSVRGCYTDFHVDFGGTSVWYHIHQGGKVFWLIPPTAHNLELYENWLLSGKQGDIFLGDRVSDCQRIELKQGYTFVIPSGWIHAVYTPTDTLVFGGNFLHSFNIPMQLKIYNIEDRTRVPNKFRYPFYYEMCWYVLERYVYCITNRSHLTKEFQKESLSMDLELNGLESGNGDEEAVDREPRRLSSRRSVLTSPVANGVNLDYDGLGKTCRSLPSLKKTLAGDSSSDCSRGSHNGQVWDPQCAPRKDRQVHLTHFELEGLRCLVDKLESLPLHKKCVPTGIEDEDALIADVKILLEELANSDPKLALTGVPIVQWPKRDKLKFPTRPKVRVPTIPITKPHTMKPAPRLTPVRPAAASPIVSGARRRRVRCRKCKACVQGECGVCHYCRDMKKFGGPGRMKQSCVLRQCLAVSDLLGKEFWGGVAVPKELKYIKCRVKETSELERKGLYSLFGFILYLFSPGLDRRYLVLKIRFNFRLYLIFKQEIQHLKGKSLLSFPSSGRLERTGEAKYRPTENKLVSGAQVVESSSSPVIFPTQNLRSLHPASMLPGVVVENYRTQISHLQFKGNGNDKDLSQFSWILSLSSCEPRLPHSVTCSLCGEVDQNEETQDFEKKLMECCICNEIVHPGCLQMDGEGLLNEELPNCWECPKCYQEDSSEKAQKRKMEESDEEAVQAKVLRPLRSCDEPLTPPPHSPTSMLQLIHDPVSPRGMVTRSSPGAGPSDHHSASRDERFKRRQLLRLQATERTMVREKENNPSGKKELSEVEKAKIRGSYLTVTLQRPTKELHGTSIVPKLQAITASSANLRHSPRVLVQHCPARTPQRGDEEGLGGEEEEEEEEEEEDDSAEEGGAARLNGRGSWAQDGDESWMQREVWMSVFRYLSRRELCECMRVCKTWYKWCCDKRLWTKIDLSRCKAIVPQALSGIIKRQPVSLDLSWTNISKKQLTWLVNRLPGLKDLLLAGCSWSAVSALSTSSCPLLRTLDLRWAVGIKDPQIRDLLTPPADKPGQDNRSKLRNMTDFRLAGLDITDATLRLIIRHMPLLSRLDLSHCSHLTDQSSNLLTAVGSSTRYSLTELNMAGCNKLTDQTLIYLRRIANVTLIDLRGCKQITRKACEHFISDLSINSLYCLSDEKLIQKIS

SEQ ID NO: 748979 - protein, 1446 aa, Homo sapiens
MEPEEERIRYSQRLRGTMRRRYEDDGISDDEIEGKRTFDLEEKLHTNKYNANFVTFMEGKDFNVEYIQRGGLRDPLIFKNSDGLGIKMPDPDFTVNDVKMCVGSRRMVDVMDVNTQKGIEMTMAQWTRYYETPEEEREKLYNVISLEFSHTRLENMVQRPSTVDFIDWVDNMWPRHLKESQTESTNAILEMQYPKVQKYSDAPCIFLRVLWETKAIARIGFSLTSFALCLEVIKKMNYLKMRLYSSTRKSVCEHTIAHNHTVKGKKTYILVNTVEKKKTFFDNVMTENALLFLLLELKIKWKIKGVYKRRVWHFGGADVLFSISTLMLLLFLGRYCLMSVRGCYTDFHVDFGGTSVWYHIHQGGKVFWLIPPTAHNLELYENWLLSGKQGDIFLGDRVSDCQRIELKQGYTFVIPSGWIHAVYTPTDTLVFGGNFLHSFNIPMQLKIYNIEDRTRVPNKFRYPFYYEMCWYVLERYVYCITNRSHLTKEFQKESLSMDLELNGLESGNGDEEAVDREPRRLSSRRSVLTSPVANGVNLDYDGLGKTCRSLPSLKKTLAGDSSSDCSRGSHNGQVWDPQCAPRKDRQVHLTHFELEGLRCLVDKLESLPLHKKCVPTGIEDEDALIADVKLKFPTRPKVRVPTIPITKPHTMKPAPRLTPVRPAAASPIVSGARRRRVRCRKCKACVQGECGVCHYCRDMKKFGGPGRMKQSCVLRQCLAVSDLLGKEFWGGVAVPKELKYIKCRVKETSELERKGLYSLFGFILYLFSPGLDRRYLVLKIRFNLQALPNFQTRDEHLKGKSLLSFPSSGRLERTGEAKYRPTENKLVSGAQVVESSSSPVIFPTQNLRSLHPASMLPGVYVENYRTQISHLQFKGNGNDKDLSQFSWILSLSSCEPRLPHSVTCSLCGEVDQNEETQDFEKKLMECCICNEIVHPGCLQMDGEGLLNEELPNCWECPKCYQEDSSEKAQKRKMEESDEEAVQAKVLRPLRSCDEPLTPPPHSPTSMLQLIHDPVSPRGMVTRSSPGAGPSDHHSASRDERFKRRQLLRLQATERTMVREKENNPSGKKELSEVEKAKIRGSYLTVTLQRPTKELHGTSIVPKLQAITASSANLRHSPRVLVQHCPARTPQRGDEEGLGGEEEEEEEEEEEDDSAEEGGAARLNGRGSWAQDGDESWMQREVWMSVFRYLSRRELCECMRVCKTWYKWCCDKRLWTKIDLSRCKAIVPQALSGIIKRQPVSLDLSWTNISKKQLTWLVNRLPGLKDLLLAGCSWSAVSALSTSSCPLLRTLDLRWAVGIKDPQIRDLLTPPADKPGQDNRSKLRNMTDFRLAGLDITDATLRLIIRHMPLLSRLDLSHCSHLTDQSSNLLTAVGSSTRYSLTELNMAGCNKLTDQTLIYLRRIANVTLIDLRGCKQITRKACEHFISDLSINSLYCLSDEKLIQKIS

SEQ ID NO: 748980 - protein, 723 aa, Homo sapiens
MCSGRFQNIQVNPDFPRGRISNSFRRTSSTENKTKTLGKLHQEPRQLQSDGKRKILLEELANSDPKLALTGVPIVQWPKRDKLKFPTRPKVRVPTIPITKPHTMKPAPRLTPVRPAAASPIVSGARRRRVRCRKCKACVQGECGVCHYCRDMKKFGGPGRMKQSCVLRQCLAPRLPHSVTCSLCGEVDQNEETQDFEKKLMECCICNEIVHPGCLQMDGEGLLNEELPNCWECPKCYQEDSSEKAQKRKMEESDEEAVQAKVLRPLRSCDEPLTPPPHSPTSMLQLIHDPVSPRGMVTRSSPGAGPSDHHSASRDERFKRRQLLRLQATERTMVREKENNPSGKKELSEVEKAKIRGSYLTVTLQRPTKELHGTSIVPKLQAITASSANLRHSPRVLVQHCPARTPQRGDEEGLGGEEEEEEEEEEEDDSAEEGGAARLNGRGSWAQDGDESWMQREVWMSVFRYLSRRELCECMRVCKTWYKWCCDKRLWTKIDLSRCKAIVPQALSGIIKRQPVSLDLSWTNISKKQLTWLVNRLPGLKDLLLAGCSWSAVSALSTSSCPLLRTLDLRWAVGIKDPQIRDLLTPPADKPGQDNRSKLRNMTDFRLAGLDITDATLRLIIRHMPLLSRLDLSHCSHLTDQSSNLLTAVGSSTRYSLTELNMAGCNKLTDQTLIYLRRIANVTLIDLRGCKQITRKACEHFISDLSINSLYCLSDEKLIQKIS

SEQ ID NO: 748981 - protein, 1162 aa, Homo sapiens; identical to SEQ ID NO: 748964

SEQ ID NO: 748982 - protein, 148 aa, Homo sapiens
MEPEEERIRYSQRLRGTMRRRYEDDGISDDEIEGKRTFDLEEKLHTNKYNANFVTFMEGKDFNVEYIQRGGLRDPLIFKNSDGLGIKMPDPDFTVNDVKMCVGSRRMVDVMDVNTQKGIEMTMAQWTRYYETRADHTGAVEISQTSRP

SEQ ID NO: 748983 - protein, 1207 aa, Homo sapiens
MEPEEERIRYSQRLRGTMRRRYEDDGISDDEIEGKRTFDLEEKLHTNKYNANFVTFMEGKDFNVEYIQRGGLRDPLIFKNSDGLGIKMPDPDFTVNDVKMCVGSRRMVDVMDVNTQKGIEMTMAQWTRYYETPEEEREKLYNVISLEFSHTRLENMVQRPSTVDFIDWVDNMWPRHLKESQTESTNAILEMQYPKVQKYSDAPCIFLRVLWETKAIARIGFSLTSFALCLEVIKKMNYLKMRLYSSTRKSVCEHTIAHNHTVKGKKTYILVNTVEKKKTFFDNVMTENALLFLLLELKIKWKIKGVYKRRVWHFGGADVLFSISTLMLLLFLGRYCLMSVRGCYTDFHVDFGGTSVWYHIHQGGKVFWLIPPTAHNLELYENWLLSGKQGDIFLGDRVSDCQRIELKQGYTFVIPSGWIHAVYTPTDTLVFGGNFLHSFNIPMQLKIYNIEDRTRVPNKFRYPFYYEMCWYVLERYVYCITNRSHLTKEFQKESLSMDLELNGLESGNGDEEAVDREPRRLSSRRSVLTSPVANGVNLDYDGLGKTCRSLPSLKKTLAGDSSSDCSRGSHNGQVWDPQCAPRKDRQVHLTHFELEGLRCLVDKLESLPLHKKCVPTGIEDEDALIADVKILLEELANSDPKLALTGVPIVQWPKRDKLKFPTRPKVRVPTIPITKPHTMKPAPRLTPVRPAAASPIVSGARRRRVRCRKCKACVQGECGVCHYCRDMKKFGGPGRMKQSCVLRQCLAPRLPHSVTCSLCGEVDQNEETQDFEKKLMECCICNEIVHPGCLQMDGEGLLNEELPNCWECPKCYQEDSSEKAQKRKMEESDEEAVQAKVLRPLRSCDEPLTPPPHSPTSMLQLIHDPVSPRGMVTRSSPGAGPSDHHSASRDERFKRRQLLRLQATERTMVREKENNPSGKKELSEVEKAKIRGSYLTVTLQRPTKELHGTSIVPKLQAITASSANLRHSPRVLVQHCPARTPQRGDEEGLGGEEEEEEEEEEEDDSAEEGGAARLNGRGSWAQDGDESWMQREVWMSVFRYLSRRELCECMRVCKTWYKWCCDKRLWTKIDLSRCKAIVPQALSGIIKRQPVSLDLSWTNISKKQLTWLVNRLPGLKDLLLAGCSWSAVSALSTSSCPLLRTLDLRWAVGIKDPQIRDLLTPPADKPGQDNRSKLRNMTDFRLAGLDITDATLRLIIRHIVQRLTGIL

SEQ ID NO: 748984 - protein, 4368 aa, Homo sapiens
MAAQVAAREARDFREAPTLRLTSGAGLEAVGAVELEEEEENEEEAAARRARSFAQDARVRFLGGRLAMMLGFTEEKWSQYLESEDNRQVLGEFLESTSPACLVFSFAASGRLAASQEIPRDANHKLVFISKKITESIGVNDFSQVVLFGELPALSLGHVSAFLDEILVPVLSNKNNHKSWSCFTSQDMEYHIEVMKKKMYIFRGKMSRRTLLPIPTVAGKMDLDQNCSENKPPSNERIILHAIESVVIEWSHQIQEIIERDSVQRLLNGLHLSPQAELDFWMMRRENLSCIYDQLQAPVVLKMVKILTTKQSSYFPTLKDIFLAVENALLEAQDVELYLRPLRRHIQCLQETEFPQTRILIAPLFHTICLIWSHSKFYNTPARVIVLLQEFCNLFINQATAYLSPEDLLRGEIEESLEKVQVAVNILKTFKNSFFNYRKKLASYFMGRKLRPWDFQSHLVFCRFDKFLDRLIKIEDIFATTLEFEKLERLEFGGTKGAILNGQVHEMSEELMELCKLFKQSTYDPSDCTNMEFESDYVAFKSKTLEFDRRLGTIICEAFFNCNGLEAAFKLLTIFGNFLEKPVVMEIFSLHYSTLVHMFNTELDVCKQLYNEHMKQIECGHVVLNKNMPFTSGNMKWAQQVLQRLQMFWSNFASLRYLFLGNPDHALVYQKYVEMTTLLDQFESRIYNEWKSNVDEICEFNLNQPLVKFSAINGLLCVNFDPKLVAVLREVKYLLMLKKQDIPDSALAIFKKRNTILKYIGNLDLLVQGYNKLKQTLLEVEYPLIEDELRAIDEQLTAATTWLTWQDDCWGYIERVRAATSELEHRVERTQKNVKVIQQTMRGWARCVLPPRREHRREAAFTLEDKGDLFTKKYKLIQGDGCKIHNLVEENRKLFKANPSLDTWKIYVEFIDDIVVEGFFQAIMHDLDFFLKNTEKQLKPAPFFQAQMILLPPEIVFKPSLDREAGDGFYDLVEEMLCNSFRMSAQMNRIATHLEIKNYQNDMDNMLGLAEVRQEIMNRVVNVINKVLDFRNTLETHTYLWVDDRAEFMKHFLLYGHAVSSDEMDAHANEEIPEQPPTLEQFKEQIDIYEALYVQMSKFEDFRVFDSWFKVDMKPFKVSLLTIIKKWSWMFQEHLLRFVIDSLNELQEFIKETDSGLQRELNEGDHDGLVDIMVHLLAVRSRQRATDELFEPLKETITLLESYGQKMPEQVYIQLEELPERWETTKKIAATVRHEVSPLHNAEVTLIRKKCILFDAKQAEFRERFRHYAPLGFNAENPYTALDKANEELEALEEEMLQMQESTRLFEVALPEYKQMKQCRKEIKLLKGLWDVIIYVRRSIDNWTKTQWRQIHVEQMDVELRRFAKASSITEIWSLNKEVRVWDAYTGLEGTVKDMTASLRAITELQSPALRDRHWHQLMKAIGVKFLINEATTLADLLALRLHRVEDDVRRIVDKAVKELGTEKVITEISQTWATMKFSYEVHYRTGIPLLKSDEQLFETLEHNQVQLQTLLQSKYVEYFIEQVLSWQNKLNIADLVIFTWMEVQRTWSHLESIFVCSEDIRIQLVKDARRFDGVDAEFKELMFKTAKVENVLEATCRPNLYEKLKDLQSRLSLCEKALAEYLETKRIAFPRFYFVSSADLLDILSKGAQPKQVTCHLAKLFDSIADLQFEDNQDVSAHRAVGMYSKEKEYVPFQAECECVGHVETWLLQLEQTMQETVRHSITEAIVAYEEKPRELWIFDFPAQVALTSSQIWWTTDVGIAFSRLEEGYETALKDFHKKQISQLNTLITLLLGELPPGDRQKIMTICTIDVHARDVVAKLISQKQVVVSPQAFTWLSQLRHRWEDTQKHCFVNICDAQFQYFYEYLGNSPRLVITPLTDRCYITLTQSLHLTMSGAPAGPAGTGKTETTKDLGRALGMMVYVFNCSEQMDYKSIGNIYKGLVQTGAWGCFDEFNRISVEVLSVVAVQVKMIHDAIRNRKKRFVFLGEAITLKPSVGIFITMNPGYAGRTELPENLKALFRPCAMVAPDIELICEILLVAEGFVDARALARKFITLYTLCKELLSKQDHYDWGLRAIKSVLVVAGSLKRGDKNRPEDQVLMRALRDFNMPKIVTDDIPVFLGLVGDLFPALDVPRRRKLHFEQMVRQSTLELRLQPEESFILKVVQLEELLAVRHSVFVVGNAGTGKSKILRTLNRTYVNMKQKPVWNDLNPKAVTTDELFGFIHHATREWKDGKIVYSYFIGLFSSILREQANLKHDGPKWIVLDGDIDPMWIESLNTVMDDNKVLTLASNERIALTPFMRLLFEIHHLRSATPATVSRAGILYVNPQDLGWNPYVASWIDRRRHQSEKANLTILFDKYVPACLDKLRTSFKTITSIPESSLVQTLCVLLECLLTPENVPSDSPKEVYEVYFVFACIWAFGGTLLQDQISDYQADFSRWWQKEMKAVKFPSQGTIFDYYVDHKTKKLLPWADKIAQFTMDPDVPLQTVLVHTTETARLRYFMELLLEKGKPLMLVGNAGVGKTVFVGDTLASLSEDYIVSRVPFNYYTTSTALQKILEKPLEKKAGHNYGPGGNKKLIYFIDDMNMPEVDLYGTVQPHTLIRQHIDYGHWYDRQKVMLKEIHNCQYVACMNPMVGSFTISPRLQRHFTVFAFNFPSLDALNTIYGQIFSFHFQQQAFAPSILRSGPTLIQATIAFHQTMMCNFLPTAIKFHYIFNLRDLSNVFQGILFASPECLKGPLDLIHLWLHESARVYGDKLIDKKDCDLFQRRMLETAYKYFEGIDSHMLLQQPLIYCHFADRGKDPHYMPVKDWEVLKTILTETLDNYNELNAAMHLVLFEDAMQHVCRISRILRTPQGCALLVGVGGSGKQSLSRLAAYLRGLEVFQITLTEGYGIQELRVDLANLYIRTGAKNMPTVFLLTDAQVLDESFLVLINDLLASGEIPDLFSDEDVDKIISGIHNEVHALGMVDSRENCWKFFMARVRLQLKIILCFSPVGRTLRVRARKFPAIVNCTAIDWFHAWPQEALVSVSRRFIEETKGIEPVHKDSISLFMAHVHTTVNEMSTRYYQNERRHNYTTPKSFLEQISLFKNLLKKKQNEVSEKKERLVNGIQKLKTTASQVGDLKARLASQEAELQLRNHDAEALITKIGLQTEKVSREKTIADAEERKVTAIQTEVFQKQRECEADLLKAEPALVAATAALNTLNRVNLSELKAFPNPPIAVTNVTAAVMVLLAPRGRVPKDRSWKAAKVFMGKVDDFLQALINYDKEHIPENCLKVVNEHYLKDPEFNPNLIRTKSFAAAGLCAWVINIIKFYEVYCDVEPKRQALAQANLELAAATEKLEAIRKKLVDLDRNLSRLTASFEKATAEKVRCQEEVNQTNKTIKLANRLVKELEAKKIRWGQSIKSFEAQEKTLCGDVLLTAAFVSYVGPFTRQYRQELVHCKWVPFLQQKVSIPLTEGLDLISMLTDDATIAAWNNEGLPSDRMSTENAAILTHCERWPLVIDPQQQGIKWIKNKYGMDLKVTHLGQKGFLNAIETALAFGDVILIENLEETIDPVLDPLLGRNTIKKGKYIRIGDKECEFNKNFRLILHTKLANPHYKPELQAQTTLLNFTVTEDGLEAQLLAEVVSIERPDLEKLKLVLTKHQNDFKIELKYLEDDLLLRLSAAEGSFLDDTKLVERLEATKTTVAEIEHKVIEAKENERKINEARECYRPLAARASLLYFVINDLQKINPLYQFSLKAFNVLFHRAIEQADKVEDMQGRISILMESITHAVFLYTSQALFEKDKLTFLSQMAFQILLRKKEIDPLELDFLLRFTVEHTHLSPVDFLTSQSWSAIKAIAVMEEFRGIDRDVEGSAKQWRKWVESECPEKEKLPQEWKKKSLIQKLILLRAMRPDRMTYALRNFVEEKLGAKYVERTRLDLVKAFEESSPATPIFFILSPGVDALKDLEILGKRLGFTIDSGKFHNVSLGQGQETVAEVALEKASKGGHWVILQNVHLVAKWLGTLEKLLERFSQGSHRDYRVFMSAESAPTPDEHIIPQGLLENSIKITNEPPTGMLANLHAALYNFDQDTLEICSKEQEFKSILFSLCYFHACVAGRLRFGPQGWSRSYPFNPGDLTICASVLYNYLEANSKVPWEDLRYLFGEIMYGGHITDDWDRKLCRVYLEEFVNPSLTEDELMLAPGFAAPPYLDYAGYHQYIEEMLPPESPALYGLHPNAEIEFLTVTSNTLFRTLLEMQPRNALSGDELGQSTEEKVKNVLDDILEKLPEEFNMAEIMQKNSNRSPYVLVCFQECERMNILIREIRISLEQLDLSLKGELALSPAVEAQQFALSYDTVPDTWSKLAYPSTYGLAQWFNDLLLRCREL

SEQ ID NO: 748985 - protein, 167 aa, Homo sapiens
RPRVPSDGCPMAAQVAAREARDFREAPTLRLTSGAGLEAVGAVELEEEEENEEEAAARRARSFAQDARVRFLGGRLAMMLGFTEEKWSQYLESEDNRQVLGEFLESTSPACLVFSFAASGRLAASQEVRGDGQGDLPIQQNYPGETAQSLPFGFPRGAHSGTLTNLA

SEQ ID NO: 748986 - protein, 353 aa, Homo sapiens
RPRVPSDGCPMAAQVAAREARDFREAPTLRLTSGAGLEAVGAVELEEEEENEEEAAARRARSFAQDARVRFLGGRLAMMLGFTEEKWSQYLESEDNRQVLGEFLESTSPACLVFSFAASGRLAASQEIPRDANHKLVFISKKITESIGVNDFSQVVLFGELPALSLGHVSAFLDEILVPVLSNKNNHKSWSCFTSQDMEYHIEVMKKKMYIFRGKMSRRTLLPIPTVAGKMDLDQNCSENKPPSNERIILHAIESVVIEWSHQIQEIIERDSVQRLLNGLHLSPQAELDFWMMRRENLSCIYDQLQAPVVLKMVKILTTKQSSYFPTLKDIFLAVENGKTLVPQPGINITICS

SEQ ID NO: 748987 - protein, 4365 aa, Homo sapiens
MAAQVAAREARDFREAPTLRLTSGAGLEAVGAVELEEEEENEEEAAARRARSFAQDARVRFLGGRLAMMLGFTEEKWSQYLESEDNRQVLGEFLESTSPACLVFSFAASGRLAASQEIPRDANHKLVFISKKITESIGVNDFSQVVLFGELPALSLGHVSAFLDEILVPVLSNKNNHKSWSCFTSQDMEYHIEVMKKKMYIFRGKMSRRTLLPIPTVAGKMDLDQNCSENKPPSNERIILHAIESVVIEWSHQIQEIIERDSVQRLLNGLHLSPQAELDFWMMRRENLSCIYDQLQAPVVLKMVKILTTKQSSYFPTLKDIFLAVENGNSLPFTWDLLRGEIEESLEKVQVAVNILKTFKNSFFNYRKKLASYFMGRKLRPWDFQSHLVFCRFDKFLDRLIKIEDIFATTLEFEKLERLEFGGTKGAILNGQVHEMSEELMELCKLFKQSTYDPSDCTNMEFESDYVAFKSKTLEFDRRLGTIICEAFFNCNGLEAAFKLLTIFGNFLEKPVVMEIFSLHYSTLVHMFNTELDVCKQLYNEHMKQIECGHVVLNKNMPFTSGNMKWAQQVLQRLQMFWSNFASLRYLFLGNPDHALVYQKYVEMTTLLDQFESRIYNEWKSNVDEICEFNLNQPLVKFSAINGLLCVNFDPKLVAVLREVKYLLMLKKQDIPDSALAIFKKRNTILKYIGNLDLLVQGYNKLKQTLLEVEYPLIEDELRAIDEQLTAATTWLTWQDDCWGYIERVRAATSELEHRVERTQKNVKVIQQTMRGWARCVLPPRREHRREAAFTLEDKGDLFTKKYKLIQGDGCKIHNLVEENRKLFKANPSLDTWKIYVEFIDDIVVEGFFQAIMHDLDFFLKNTEKQLKPAPFFQAQMILLPPEIVFKPSLDREAGDGFYDLVEEMLCNSFRMSAQMNRIATHLEIKNYQNDMDNMLGLAEVRQEIMNRVVNVINKVLDFRNTLETHTYLWVDDRAEFMKHFLLYGHAVSSDEMDAHANEEIPEQPPTLEQFKEQIDIYEALYVQMSKFEDFRVFDSWFKVDMKPFKVSLLTIIKKWSWMFQEHLLRFVIDSLNELQEFIKETDSGLQRELNEGDHDGLVDIMVHLLAVRSRQRATDELFEPLKETITLLESYGQKMPEQVYIQLEELPERWETTKKIAATVRHEVSPLHNAEVTLIRKKCILFDAKQAEFRERFRHYAPLGFNAENPYTALDKANEELEALEEEMLQMQESTRLFEVALPEYKQMKQCRKEIKLLKGLWDVIIYVRRSIDNWTKTQWRQIHVEQMDVELRRFAKASSITEIWSLNKEVRVWDAYTGLEGTVKDMTASLRAITELQSPALRDRHWHQLMKAIGVKFLINEATTLADLLALRLHRVEDDVRRIVDKAVKELGTEKVITEISQTWATMKFSYEVHYRTGIPLLKSDEQLFETLEHNQVQLQTLLQSKYVEYFIEQVLSWQNKLNIADLVIFTWMEVQRTWSHLESIFVCSEDIRIQLVKDARRFDGVDAEFKELMFKTAKVENVLEATCRPNLYEKLKDLQSRLSLCEKALAEYLETKRIAFPRFYFVSSADLLDILSKGAQPKQVTCHLAKLFDSIADLQFEDNQDVSAHRAVGMYSKEKEYVPFQAECECVGHVETWLLQLEQTMQETVRHSITEAIVAYEEKPRELWIFDFPAQVALTSSQIWWTTDVGIAFSRLEEGYETALKDFHKKQISQLNTLITLLLGELPPGDRQKIMTICTIDVHARDVVAKLISQKQVVVSPQAFTWLSQLRHRWEDTQKHCFVNICDAQFQYFYEYLGNSPRLVITPLTDRCYITLTQSLHLTMSGAPAGPAGTGKTETTKDLGRALGMMVYVFNCSEQMDYKSIGNIYKGLVQTGAWGCFDEFNRISVEVLSVVAVQVKMIHDAIRNRKKRFVFLGEAITLKPSVGIFITMNPGYAGRTELPENLKALFRPCAMVAPDIELICEILLVAEGFVDARALARKFITLYTLCKELLSKQDHYDWGLRAIKSVLVVAGSLKRGDKNRPEDQVLMRALRDFNMPKIVTDDIPVFLGLVGDLFPALDVPRRRKLHFEQMVRQSTLELRLQPEESFILKVVQLEELLAVRHSVFVVGNAGTGKSKILRTLNRTYVNMKQKPVWNDLNPKAVTTDELFGFIHHATREWKDGKIVYSYFIGLFSSILREQANLKHDGPKWIVLDGDIDPMWIESLNTVMDDNKVLTLASNERIALTPFMRLLFEIHHLRSATPATVSRAGILYVNPQDLGWNPYVASWIDRRRHQSEKANLTILFDKYVPACLDKLRTSFKTITSIPESSLVQTLCVLLECLLTPENVPSDSPKEVYEVYFVFACIWAFGGTLLQDQISDYQADFSRWWQKEMKAVKFPSQGTIFDYYVDHKTKKLLPWADKIAQFTMDPDVPLQTVLVHTTETARLRYFMELLLEKGKPLMLVGNAGVGKTVFVGDTLASLSEDYIVSRVPFNYYTTSTALQKILEKPLEKKAGHNYGPGGNKKLIYFIDDMNMPEVDLYGTVQPHTLIRQHIDYGHWYDRQKVMLKEIHNCQYVACMNPMVGSFTISPRLQRHFTVFAFNFPSLDALNTIYGQIFSFHFQQQAFAPSILRSGPTLIQATIAFHQTMMCNFLPTAIKFHYIFNLRDLSNVFQGILFASPECLKGPLDLIHLWLHESARVYGDKLIDKKDCDLFQRRMLETAYKYFEGIDSHMLLQQPLIYCHFADRGKDPHYMPVKDWEVLKTILTETLDNYNELNAAMHLVLFEDAMQHVCRISRILRTPQGCALLVGVGGSGKQSLSRLAAYLRGLEVFQITLTEGYGIQELRVDLANLYIRTGAKNMPTVFLLTDAQVLDESFLVLINDLLASGEIPDLFSDEDVDKIISGIHNEVHALGMVDSRENCWKFFMARVRLQLKIILCFSPVGRTLRVRARKFPAIVNCTAIDWFHAWPQEALVSVSRRFIEETKGIEPVHKDSISLFMAHVHTTVNEMSTRYYQNERRHNYTTPKSFLEQISLFKNLLKKKQNEVSEKKERLVNGIQKLKTTASQVGDLKARLASQEAELQLRNHDAEALITKIGLQTEKVSREKTIADAEERKVTAIQTEVFQKQRECEADLLKAEPALVAATAALNTLNRVNLSELKAFPNPPIAVTNVTAAVMVLLAPRGRVPKDRSWKAAKVFMGKVDDFLQALINYDKEHIPENCLKVVNEHYLKDPEFNPNLIRTKSFAAAGLCAWVINIIKFYEVYCDVEPKRQALAQANLELAAATEKLEAIRKKLVDLDRNLSRLTASFEKATAEKVRCQEEVNQTNKTIKLANRLVKELEAKKIRWGQSIKSFEAQEKTLCGDVLLTAAFVSYVGPFTRQYRQELVHCKWVPFLQQKVSIPLTEGLDLISMLTDDATIAAWNNEGLPSDRMSTENAAILTHCERWPLVIDPQQQGIKWIKNKYGMDLKVTHLGQKGFLNAIETALAFGDVILIENLEETIDPVLDPLLGRNTIKKGKYIRIGDKECEFNKNFRLILHTKLANPHYKPELQAQTTLLNFTVTEDGLEAQLLAEVVSIERPDLEKLKLVLTKHQNDFKIELKYLEDDLLLRLSAAEGSFLDDTKLVERLEATKTTVAEIEHKVIEAKENERKINEARECYRPLAARASLLYFVINDLQKINPLYQFSLKAFNVLFHRAIEQADKVEDMQGRISILMESITHAVFLYTSQALFEKDKLTFLSQMAFQILLRKKEIDPLELDFLLRFTVEHTHLSPVDFLTSQSWSAIKAIAVMEEFRGIDRDVEGSAKQWRKWVESECPEKEKLPQEWKKKSLIQKLILLRAMRPDRMTYALRNFVEEKLGAKYVERTRLDLVKAFEESSPATPIFFILSPGVDALKDLEILGKRLGFTIDSGKFHNVSLGQGQETVAEVALEKASKGGHWVILQNVHLVAKWLGTLEKLLERFSQGSHRDYRVFMSAESAPTPDEHIIPQGLLENSIKITNEPPTGMLANLHAALYNFDQDTLEICSKEQEFKSILFSLCYFHACVAGRLRFGPQGWSRSYPFNPGDLTICASVLYNYLEANSKVPWEDLRYLFGEIMYGGHITDDWDRKLCRVYLEEFVNPSLTEDELMLAPGFAAPPYLDYAGYHQYIEEMLPPESPALYGLHPNAEIEFLTVTSNTLFRTLLEMQPRNALSGDELGQSTEEKVKNVLDDILEKLPEEFNMAEIMQKNSNRSPYVLVCFQECERMNILIREIRISLEQLDLSLKGELALSPAVEAQQFALSYDTVPDTWSKLAYPSTYGLAQWFNDLLLRCRELDTWTQDLTLPAVVWLSGFFNPQSFLTAIMQTMARKNEWPLDKTRLTADVTKKTKEDYGHPPREGAYLH

SEQ ID NO: 748988 - protein, 416 aa, Homo sapiens
RPRVPSDGCPMAAQVAAREARDFREAPTLRLTSGAGLEAVGAVELEEEEENEEEAAARRARSFAQDARVRFLGGRLAMMLGFTEEKWSQYLESEDNRQVLGEFLESTSPACLVFSFAASGRLAASQEVRGDGQGDLPIQQNYPGETAQSLPFGFPRGAHSGTLTNWLEVPILRPAGLLPTCTHSAVQQLQIPRDANHKLVFISKKITESIGVNDFSQVVLFGELPALSLGHVSAFLDEILVPVLSNKNNHKSWSCFTSQDMEYHIEVMKKKMYIFRGKMSRRTLLPIPTVAGKMDLDQNCSENKPPSNERIILHAIESVVIEWSHQIQEIIERDSVQRLLNGLHLSPQAELDFWMMRRENLSCIYDQLQAPVVLKMVKILTTKQSSYFPTLKDIFLAVENGKTLVPQPGINITICS

SEQ ID NO: 748989 - protein, 57 aa, Homo sapiens
MLCAHFSDQGPAHLTTSKSAFLSNKKTSTLKHLLGETRSDGSACNSGISGGRGRKIP

SEQ ID NO: 748990 - protein, 57 aa, Homo sapiens; identical to SEQ ID NO: 748989

SEQ ID NO: 748991 - protein, 295 aa, Homo sapiens
MTGSLTLTTPLGWPPALALTAQAPGQPAFLGWLGAALFSGEKALLEELERCPTPAMLALLCSCLLLAAGASDAWTGEDSAEPNSDSAEWIRDMYAKVTEIWQEVMQRRDDDGALHAACQVQPSATLDAAQPRVTGVVLFRQLAPRAKLDAFFALEGFPTEPNSSSRAIHVHQFGDLSQGCESTGPHYNPLAVPHPQHPGDFGNFAVRDGSLWRYRAGLAASLAGPHSIVGRAVVVHAGEDDLGRGGNQASVENGNAGRRLACCVVGVCGPGLWERQAREHSERKKRRRESECKAA

SEQ ID NO: 748992 - protein, 295 aa, Homo sapiens; identical to SEQ ID NO: 748991

SEQ ID NO: 748993 - protein, 285 aa, Homo sapiens
MISLDLHGGRAGLQGQPAFLGWLGAALFSGEKALLEELERCPTPAMLALLCSCLLLAAGASDAWTGEDSAEPNSDSAEWIRDMYAKVTEIWQEVMQRRDDDGALHAACQVQPSATLDAAQPRVTGVVLFRQLAPRAKLDAFFALEGFPTEPNSSSRAIHVHQFGDLSQGCESTGPHYNPLAVPHPQHPGDFGNFAVRDGSLWRYRAGLAASLAGPHSIVGRAVVVHAGEDDLGRGGNQASVENGNAGRRLACCVVGVCGPGLWERQAREHSERKKRRRESECKAA

SEQ ID NO: 748994 - protein, 295 aa, Homo sapiens; identical to SEQ ID NO: 748991

SEQ ID NO: 748995 - protein, 263 aa, Homo sapiens
RTAPSSHGEKAFLEELERCPTPAMLALLCSCLLLAAGASDAWTGEDSAEPNSDSAEWIRDMYAKVTEIWQEVMQRRDDDGALHAACQVQPSATLDAAQPRVTGVVLFRQLAPRAKLDAFFALEGFPTEPNSSSRAIHVHQFGDLSQGCESTGPHYNPLAVPHPQHPGDFGNFAVRDGSLWRYRAGLAASLAGPHSIVGRAVVVHAGEDDLGRGGNQASVENGNAGRRLACCVVGVCGPGLWERQAREHSERKKRRRESECKAA

SEQ ID NO: 748996 - protein, 104 aa, Homo sapiens
LNATCVEPTELTGWPITRVGNPLRYMCITHLDHKDYIFLLLIGFCIFAAGTVAAWLTGVCAVLYQNTRHKSSEEDEDEAGTRVEVSRRIFQTQTSSVQEFPQLI

SEQ ID NO: 748997 - protein, 100 aa, Homo sapiens
TEEIASAEKLASEKQRGDLCGCSRGRPGRSAWWEGPDDTEFDRRQLKAGRHWMPDDEVDFQTGALLKRWDGQRHRRSVGASSITKWFNEDLELHGAGAEV

SEQ ID NO: 748998 - protein, 325 aa, Homo sapiens
MNSSFHLHFLDLNLNATEGNLSGPNVKNKSSPCEDMGIAVEVFLTLGVISLLENILVIGAIVKNKNLHSPMYFFVCSLAVADMLVSMSSAWETITIYLLNNKHLVIADAFVRHIDNVFDSMICISVVASMCSLLAIAVDRYVTIFYALRYHHIMTARRSGAIIAGIWAFCTGCGIVFILYSESTYVILCLISMFFAMLFLLVSLYIHMFLLARTHVKRIAALPGASSARQRTSMQGAVTVTMLLGVFTVCWAPFFLHLTLMLSCPQNLYCSRFMSHFNMYLILIMCNSVMDPLIYAFRSQEMRKTFKEIICCRGFRIACSFPRRD

SEQ ID NO: 748999 - protein, 186 aa, Homo sapiens
MASEDPRYSRHSSRRVLGGGTTPMLTWLQIRVGVDLDENLKEDPSSQHQEANNLDKNMTKAESARLFRMWYSFDHKYLKPILTHSGPPLTTTLPEWCGPISRLLTSPQAYGEQLKEDDVECIVNQDELAINYQEQASSPCSPPARLGLDQKASPQTPGKENIYEGDLGLGGYELKLEQTLGQSQLN

SEQ ID NO: 749000 - protein, 129 aa, Homo sapiens [sequence omitted]

SEQ ID NO: 749001 - protein, 186 aa, Homo sapiens; identical to SEQ ID NO: 748999

SEQ ID NO: 749002 - protein, 127 aa, Homo sapiens
  misc_feature (3)..(3): Xaa can be any naturally occurring amino acid
LKXVKIGFRYLWSKLYQYLKPILTHSGPPLTTTLPEWCGPISRLLTSPQAYGEQLKEDDVECIVNQDELAINYQEQASSPCSPPARLGLDQKASPQTPGKENIYEGDLGLGGYELKLEQTLGQSQLN

SEQ ID NO: 749003 - protein, 129 aa, Homo sapiens [sequence omitted]

SEQ ID NO: 749004 - protein, 80 aa, Homo sapiens
EDSPSSLLPSDPKYSYPVCCKKEKSCLGRTASPYRYRLGTLHMKQESQKFLEANLAFVTARPTGCVRHILNLITCESCIA

SEQ ID NO: 749005 - protein, 79 aa, Homo sapiens
MRQRGQEHLPTSVKSEPRACNNPTVAENRRVPSGLAAVIRNLTALWNPSLGVSERRGGDWEPSRIPRLWARVGWIQLPG

SEQ ID NO: 749006 - protein, 304 aa, Homo sapiens
MASETHNVKKRNFCNKIEDHFIDLPRKKISNFTNKNMKEVKKSPKQLAAYINRTVGQTVKSPDKLRKVIYRRKKVHHPFPNPCYRKKQSPGSGGCDMANKENELACAGHLPEKLHHDSRTYLVNSSDSGSSQTESPSSKYSGFFSEVSQDHETMAQVLFSRNMRLNVALTFWRKRSISELVAYLLRIEDLGVVVDCLPVLTNCLQEEKQYISLGCCVDLLPLVKSLLKSKFEEYVIVGLNWLQAVIKRWWSELSSKTEIINDGNIQILKQQLSGLWEQENHLTLVPGYTGNIAKDVDAYLLQLH

SEQ ID NO: 749007 - protein, 304 aa, Homo sapiens; identical to SEQ ID NO: 749006

SEQ ID NO: 749008 - protein, 263 aa, Homo sapiens
MASETHNVKKRNFCNKIEDHFIDLPRKKISNFTNKNMKEVKKSPKQLAAYINRTVGQTVKSPDKLRKVIYRRKKVHHPFPNPCYRKKQSPGSGGCDMANKENELACAGHLPEKLHHDSRTYLVNSSDSGSSQTESPSSKYSGFFSEVSQDHETMAQVLFSRNMRLNVALTFWRKRSISELVAYLLRIEDLGVVVDCLPVLTNCLQEEKQYISLGCCVDLLPLVKSLLKSKFEEYVIVGLNWLQAVIKRWWSELSSKTEIINDG

SEQ ID NO: 749009 - protein, 304 aa, Homo sapiens; identical to SEQ ID NO: 749006

SEQ ID NO: 749010 - protein, 304 aa, Homo sapiens; identical to SEQ ID NO: 749006

SEQ ID NO: 749011 - protein, 304 aa, Homo sapiens; identical to SEQ ID NO: 749006

SEQ ID NO: 749012 - protein, 304 aa, Homo sapiens; identical to SEQ ID NO: 749006

SEQ ID NO: 749013 - protein, 233 aa, Homo sapiens
MASETHNVKKRNFCNKIEDHFIDLPRKKISNFTNKNMKEVKKSPKQLAAYINRTVGQTVKSPDKLRKVIYRRKKVHHPFPNPCYRKKQSPGSGGCDMANKENELACAGHLPEKLHHDSRTYLVNSSDSGSSQTESPSSKYSGFFSEVSQDHETMAQVLFSRNMRLNVALTFWRKRSISELVAYLLRIEDLGVVVDCLPVLTNCLQEEKQYISLGCCVDLLPLVKSLLKSKFEE

SEQ ID NO: 749014 - protein, 263 aa, Homo sapiens; identical to SEQ ID NO: 749008

SEQ ID NO: 749015 - protein, 215 aa, Homo sapiens
MASETHNVKKRNFCNKIEDHFIDLPRKKISNFTNKNMKEVKKSPKQLAAYINRTVGQTVKSPDKLRKVIYRRKKVHHPFPNPCYRKKQSPGSGGCDMANKENELACAGHLPEKLHHDSRTYLVNSSDSGSSQTESPSSILFSRNMRLNVALTFWRKRSISELVAYLLRIEDLGVVVDCLPVLTNCLQEEKQYISLGCCVDLLPLVKSLLKSKFEE

SEQ ID NO: 749016 - protein, 208 aa, Homo sapiens [sequence omitted]

SEQ ID NO: 749017 - protein, 227 aa, Homo sapiens
MASETHNVKKRNFCNKIEDHFIDLPRKKISNFTNKNMKEVKKSPKQLAAYINRTVGQTVKSPDKLRKVIYRRKKVHHPFPNPCYRKKQSPGSGGCDMANKENELACAGHLPEKLHHDSRTYLVNSSDSGSSQTESPSSKYSGFFSEVSQDHETMAQVLFSRNMRLNVALTFWRKRSISELVAYLLRNIQILKQQLSGLWEQENHLTLVPGYTGNIAKDVDAYLLQLH

SEQ ID NO: 749018 - protein, 304 aa, Homo sapiens; identical to SEQ ID NO: 749006

SEQ ID NO: 749019 - protein, 263 aa, Homo sapiens; identical to SEQ ID NO: 749008

SEQ ID NO: 749020 - protein, 298 aa, Homo sapiens
MASETHNVKKRNFCNKIEDHFIDLPRKKISNFTNKNMKEVKKSPKQLAAYINRTVGQTVKSPDKLRKVIYRRKKVHHPFPNPCYRKKQSPGSGGCDMANKENELACAGHLPEKLHHDSRTYLVNSSDSGSSQTESPSSKYSGFFSEVSQDHETMAQVLFSRNMRLNVALTFWRKRSISELVAYLLRIEDLGVVVDCLPVLTNCLQEEKQYISLGCCVDLLPLVKSLLKSKFEEYVIVGLNWLQAVIKRWWSELSSKTEIINDGNIQILKQQLSGLWEQENHLTLVPGYTGNIAKVLCV

SEQ ID NO: 749021 - protein, 186 aa, Homo sapiens
MASETHNVKKRNFCNKIEDHFIDLPRKKISNFTNKNMKEVKKSPKQLAAYINRTVGQTVKSPDKLRKVIYRRKKVHHPFPNPCYRKKQSPGSGGCDMANKENELACAGHLPEKLHHDSRTYLVNSSDSGSSQTESPSSKYSGFFSEVSQDHETMAQVLFSRNMRLNVALTFWRKRSISELVAYLLR

SEQ ID NO: 749022 - protein, 84 aa, Homo sapiens
QTRGGGHAALGPVVGGRRGLPSRRRCLRLGGGSNFQWPGRERSEPPKKYPEVKPWIHLHVKKKPKLKNLSAELRRPNRNQPSRS

SEQ ID NO: 749023 - protein, 84 aa, Homo sapiens; identical to SEQ ID NO: 749022

SEQ ID NO: 749024 - protein, 318 aa, Homo sapiens
PRDTEHLEMETTSGELSDVSNDPTTSVCVASAPTKEAIDNTLLEHKERSENINLNEKQIPFQVPNIERNFRQSQPKSYLCHYELAEALPQGKMNETPTEWLRYNSGILNTQPPLPFKEAHVSGHTFVTAEQILAPLALPEQALLIPLENHDKFKNVPCEVYQHILQPNMLANKVKFTFPPAALPPPSTPLQPLPLQQSLCSTSVTTIHHTVLQQHAAAAAAAAAAAAAGTFKVLQPHQQFLSQIPALTRTSLPQLSVGPVGPRLCPGNQPTFVAPPQMPIIPASVLHPSHLAFPSLPHALFPSLLSPHPTVIPLQPLF

SEQ ID NO: 749025 - protein, 137 aa, Homo sapiens
MPSEMDTEKEDRRRVQSSTGPITGHSTEVILIPSTYIPELSNILGSLGNVIFPVSTGRGNEIGVDEYIVLLPQLTLLFATYIFPFLLSCKKHIYSLYKDENPKNQAVITTSLQDQNFLIIHEYSIWSRHGSSWSEDL

SEQ ID NO: 749026 - protein, 130 aa, Homo sapiens
MPSEMDTEKEDRRRVQSSTGPITGHSTEVILIPSTYIPELSNIHLPVSTGRGNEIGVDEYIVLLPQLTLLFATYIFPFLLSCKKHIYSLYKDENPKNQAVITTSLQDQNFLIIHEYSIWSRHGSSWSEDL

SEQ ID NO: 749027 - protein, 159 aa, Homo sapiens
MRQYGECLHSCPSGYYGHRAPDMNRCARCRIENCDSCFSKDFCTKCKVGFYLHRGRCFDECPDGFAPLEETMECVEGCEVGHWSEWGTCSRNNRTCGFKWGLETRTRQIVKKPVKDTIPCPTIAESRRCKMTMRHCPGGKRTPKAKEKRNKKKKRKLIE

SEQ ID NO: 749028 - protein, 226 aa, Homo sapiens
MQFRLFSFALIILNCMDYSHCQGNRWRRSKRASYVSNPICKGCLSCSKDNGCSRCQQKLFFFLRREGMRQYGECLHSCPSGYYGHRAPDMNRCARCRIENCDSCFSKDFCTKCKVGFYLHRGRCFDECPDGFAPLEETMECVEGCEVGHWSEWGTCSRNNRTCGFKWGLETRTRQIVKKPVKDTIPCPTIAESRRCKMTMRHCPGGKRTPKAKEKRNKKKKRKLIE

SEQ ID NO: 749029 - protein, 163 aa, Homo sapiens
MQFRLFSFALIILNCMDYSHCQGNRWRRSKRGCRIENCDSCFSKDFCTKCKVGFYLHRGRCFDECPDGFAPLEETMECVEGCEVGHWSEWGTCSRNNRTCGFKWGLETRTRQIVKKPVKDTIPCPTIAESRRCKMTMRHCPGGKRTPKAKEKRNKKKKRKLIE

SEQ ID NO: 749030 - protein, 125 aa, Homo sapiens
VKQVLEGSMLGKSHRHSLILSTQGHDTLRKAAGTSAQESQFSKDNGLQLRQCSCKGHDADFEDASFHIYSLKETNSANQLRELSLSCLKMRSQSAQHHDLDLVTPELRWKRMVLLRPFKIPSVIQ

SEQ ID NO: 749031 - protein, 143 aa, Homo sapiens
SPFSNLEYPGTRYTAEGCRDLCPGKPGSSICRRSPTFCYYYVLQMSRREWGGREQEEERKNNVLKLFSKDNGLQLRQCSCKGHDADFEDASFHIYSLKETNSANQLRELSLSCLKMRSQSAQHHDLDLVTPGMEDPVKFSPNS

SEQ ID NO: 749032 - protein, 106 aa, Homo sapiens
  misc_feature (54)..(54): Xaa can be any naturally occurring amino acid
GRALAGCGRVKTHTQRAESRLQRPPWAKVHLPLSLCLGFAVAPMVSYTQLTKCXRFLFLCLKHRLFCEICFPHFLVYKFLILIPEATRVHGNSGDLVSRCPSAPAQ

SEQ ID NO: 749033 - protein, 156 aa, Homo sapiens
MGGAAQGARTPRGAEAASAREPGGPGRSIRPGWKTFFIITSPGRSARLARRAGPALLPGVESPIFFSCGTAGPPRLAELDAGASTGRGAPREETNLTLGPGFRGGGRSPRGPKPPLPPPPPHSGGRQRRERGCPGRRAARSEHAQGELCPVVRRAL

SEQ ID NO: 749034 - protein, 373 aa, Homo sapiens
MDTLEEVTWANGSTALPPPLAPNISVPHRCLLLLYEDIGTSRVRYWDLLLLIPNVLFLIFLLWKLPSARAKIRITSSPIFITFYILVFVVALVGIARAVVSMTVSTSNAATVADKILWEITRFFLLAIELSVIILGLAFGTWESKSSIKRVLAITTVLSLAYSVTQGTLEILYPDAHLSAEDFNIYGHGGRQFWLVSSCFFFLVYSLVVILPKTPLKERISLPSRRSFYVYAGILALLNLLQGLGSVLLCFDIIEGLCCVDATTFLYFSFFAPLIYVAFLRGFFGSEPKILFSYKCQVDETEEPDVHLPQPYAVARREGLEAAGAAGASAASYSSTQFDSAGGVAYLDDIASMPCHTGSINSTDSERWKAINA

SEQ ID NO: 749035 - protein, 125 aa, Homo sapiens
ATVGQFLPYLVAPSAWRGRLFLNHSVRLPCPSFPFISSEPKILFSYKCQVDETEEPDVHLPQPYAVARREGLEAAGAAGASAASYSSTQFDSAGGVAYLDDIASMPCHTGSINSTDSERWKAINA

SEQ ID NO: 749036 - protein, 496 aa, Homo sapiens
MDTLEEVTWANGSTALPPPLAPNISVPHRCLLLLYEDIGTSRVRYWDLLLLIPNVLFLIFLLWKLPSARAKIRITSSPIFITFYILVFVVALVGIARAVVSMTVSTSNAATVADKILWEITRFFLLAIELSVIILGLAFGTWESKSSIKRVLAITTVLSLAYSVTQGTLEILYPDAHLSAEDFNIYGHGGRQFWLVSSCFFFLVYSLVVILPKTPLKERISLPSRRSFYVYAGILALLNLLQGLGSVLLCFDIIEGLCASSLRSSTWLSSGASSARSPRSSSPTNAKWTRQRSQMYTYPSPTLWPGGRAWRLQGLLGPQLPATRARSSTLPAGWPTWMTSLPCPATLAASTAQTASAGRPSMPEGSCQGLWRTGQRGGQQAQSPQGRRTRSRDVLWAVALCGPVPTMSLEAPPPWGSQSPLPSLLSLGTLLPFPPALILLSDMAQAFLPGPCLARLAEGTLLLCTLGTRAGLALPMPPSHPHGALASSKHPPWWMD

SEQ ID NO: 749037 - protein, 125 aa, Homo sapiens; identical to SEQ ID NO: 749035

SEQ ID NO: 749038 - protein, 222 aa, Homo sapiens
MCPGLSEAPELYSRGFLTIEQIAMLPPPAVMNYIFLLLCLCGLVGNGLVLWFFGFSIKRNPFSIYFLHLASADVGYLFSKAVFSILNTGGFLGTFADYIRSVCRVLGLCMFLTGVSLLPAVSAERCASVIFPAWYWRRRPKRLSAVVCALLWVLSLLVTCLHNYFCVFLGRGAPARPAGTWTSSWASSCSCSAARSWCCPAWPSSCTWSAGPDGARLCQAQA

SEQ ID NO: 749039 - protein, 237 aa, Homo sapiens
MAGNCSWEAHPGNRNKMCPGLSEAPELYSRGFLTIEQIAMLPPPAVMNYIFLLLCLCGLVGNGLVLWFFGFSIKRNPFSIYFLHLASADVGYLFSKAVFSILNTGGFLGTFADYIRSVCRVLGLCMFLTGVSLLPAVSAERCASVIFPAWYWRRRPKRLSAVVCALLWVLSLLVTCLHNYFCVFLGRGAPARPAGTWTSSWASSCSCSAARSWCCPAWPSSCTWSAGPDGPGSAKLK

SEQ ID NO: 749040 - protein, 104 aa, Homo sapiens
MAGNCSWEAHPGNRNKVSATGGGPWSCPDGCGWEGQTQPSISSPIPPFLAPLSSSGPTVGSGLLWAMWPGTSSLDPPTLLSSSVRQAPGLDLKVPRCADTVVAL

SEQ ID NO: 749041 - protein, 134 aa, Homo sapiens
MVGWSVALCESTSNGACRFPALRNKWDRRCRREHSRVQRGGRTGWFLFAPVETRNGPSQPSRCPLRDPQLHQKTIPDSPLPRFARRSEPEWDPALGPQRPFPPRRSGVYSRLSLLDDQCLARISANTVECHSAF

SEQ ID NO: 749042 - protein, 239 aa, Homo sapiens
LDIEFAAASKDQRRPVQVHDASSLLGGRGLGVAMAPSHLSVREMREDEKPLVLEMLKAGVKDTENRVALHALTRPPALLLLAAASSGLRFVLASFALALLLPVFLAVAAVKLGLRARWGSLPPPGGLGGPWVAVRGSGDVCGVLALAPGTNAGDGARVTRLSVSRWHRRRGVGRRLLAFAEARARAWAGGMGEPRARLVVPVAVAAWGVGGMLEGCGYQAEGGWGCLGYTLVREFSKDL

SEQ ID NO: 749043 - protein, 239 aa, Homo sapiens
SRPAPETLSKDQRRPVQVHDASSLLGGRGLGVAMAPSHLSVREMREDEKPLVLEMLKAGVKDTENRVALHALTRPPALLLLAAASSGLRFVLASFALALLLPVFLAVAAVKLGLRARWGSLPPPGGLGGPWVAVRGSGDVCGVLALAPGTNAGDGARVTRLSVSRWHRRRGVGRRLLAFAEARARAWAGGMGEPRARLVVPVAVAAWGVGGMLEGCGYQAEGGWGCLGYTLVREFSKDL

SEQ ID NO: 749044 - protein, 190 aa, Homo sapiens
MSHPSCPQAGVKDTENRVALHALTRPPALLLLAAASSGLRFVLASFALALLLPVFLAVAAVKLGLRARWGSLPPPGGLGGPWVAVRGSGDVCGVLALAPGTNAGDGARVTRLSVSRWHRRRGVGRRLLAFAEARARAWAGGMGEPRARLVVPVAVAAWGVGGMLEGCGYQAEGGWGCLGYTLVREFSKDL

SEQ ID NO: 749045 - protein, 239 aa, Homo sapiens; identical to SEQ ID NO: 749042

SEQ ID NO: 749046 - protein, 89 aa, Homo sapiens
AGTVGVYGSETLSKDQRRPVQVHDASSLLGGRGLGVAMAPSHLSVREMREDEKPLVLEMLKVRGRGPRGPGSGCSGGIASGFSHPLPPT

SEQ ID NO: 749047 - protein, 239 aa, Homo sapiens; identical to SEQ ID NO: 749042

SEQ ID NO: 749048 - protein, 239 aa, Homo sapiens; identical to SEQ ID NO: 749042

SEQ ID NO: 749049 - protein, 89 aa, Homo sapiens; identical to SEQ ID NO: 749046

SEQ ID NO: 749050 - protein, 129 aa, Homo sapiens
GDFSKVAEYCGGRLSCRDPRLGAPRVLSVLIWEVPLLLPTPRGSFGDRGAPLTLTYLCSHQVHDASSLLGGRGLGVAMAPSHLSVREMREDEKPLVLEMLKVRGRGPRGPGSGCSGGIASGFSHPLPPT

SEQ ID NO: 749051 - protein, 3031 aa, Homo sapiens
MWALSPTVFALLSKNLMIVHSDLAVHFPAIQYAVLYTLYSHCTRHDHFISSSLSSSSPSLFDGAVISTVTTATKKHFSIILNLLGILLKKDNLNQDTRKLLMTWALEAAVLMKKSETYAPLFSLPSFHKFCKGLLANTLVEDVNICLQACSSLHALSSSLPDDLLQRCVDVCRVQLVHSGTRIRQAFGKLLKSIPLDVVLSNNNHTEIQEISLALRSHMSKAPSNTFHPQDFSDVISFILYGNSHRTGKDNWLERLFYSCQRLDKRDQSTIPRNLLKTDAVLWQWAIWEAAQFTVLSKLRTPLGRAQDTFQTIEGIIRSLAAHTLNPDQDVSQWTTADNDEGHGNNQLRLVLLLQYLENLEKLMYNAYEGCANALTSPPKVIRTFFYTNRQTCQDWLTRIRLSIMRVGLLAGQPAVTVRHGFDLLTEMKTTSLSQGNELEVTIMMVVEALCELHCPEAIQGIAVWSSSIVGKNLLWINSVAQQAEGRFEKASVEYQEHLCAMTGVDCCISSFDKSVLTLANAGRNSASPKHSLNGESRKTVLSKPTDSSPEVINYLGNKACECYISIADWAAVQEWQNAIHDLKKSTSSTSLNLKADFNYIKSLSSFESGKFVECTEQLELLPGENINLLAGGSKEKIDMKKLLPNMLSPDPRELQKSIEVQLLRSSVCLATALNPIEQDQKWQSITENVVKYLKQTSRIAIGPLRLSTLTVSQSLPVLSTLQLYCSSALENTVSNRLSTEDCLIPLFSEALRSCKQHDVRPWMQALRYTMYQNQLLEKIKEQTVPIRSHLMELGLTAAKFARKRGNVSLATRLLAQCSEVQLGKTTTAQDLVQHFKKLSTQGQVDEKWGPELDIEKTKLLYTAGQSTHAMEMLSSCAISFCKSVKAEYAVAKSILTLAKWIQAEWKEISGQLKQVYRAQHQQNFTGLSTLSKNILTLIELPSVNTMEEEYPRIESESTVHIGVGEPDFILGQLYHLSSVQAPEVAKSWAALASWAYRWGRKVVDNASQGEGVRLLPREKSEVQNLLPDTITEEEKERIYGILGQAVCRPAGIQDEDITLQITESEDNEEDDMVDVIWRQLISSCPWLSELDESATEGVIKVWRKVVDRIFSLYKLSCSAYFTFLKLNAGQIPLDEDDPRLHLSHRVEQSTDDMIVMATLRLLRLLVKHAGELRQYLEHGLETTPTAPWRGIIPQLFSRLNHPEVYVRQSICNLLCRVAQDSPHLILYPAIVGTISLSSESQASGNKFSTAIPTLLGNIQGEELLVSECEGGSPPASQDSNKDEPKSGLNEDQAMMQDCYSKIVDKLSSANPTMVLQVQMLVAELRRVTVLWDELWLGVLLQQHMYVLRRIQQLEDEVKRVQNNNTLRKEEKIAIMREKHTALMKPIVFALEHVRSITAAPAETPHEKWFQDNYGDAIENALEKLKTPLNPAKPGSSWIPFKEIMLSLQQRAQKRASYILRLEEISPWLAAMTNTEIALPGEVSARDTVTIHSVGGTITILPTKTKPKKLLFLGSDGKSYPYLFKGLEDLHLDERIMQFLSIVNTMFATINRQETPRFHARHYSVTPLGTRSGLIQWVDGATPLFGLYKRWQQREAALQAQKAQDSYQTPQNPGIVPRPSELYYSKIGPALKTVGLSLDVSRRDWPLHVMKAVLEELMEATPPNLLAKELWSSCTTPDEWWRVTQSYARSTAVMSMVGYIIGLGDRHLDNVLIDMTTGEVVHIDYNVCFEKGKSLRVPEKVPFRMTQNIETALGVTGVEGVFRLSCEQVLHIMRRGRETLLTLLEAFVYDPLVDWTAGGEAGFAGAVYGGGGQQAESKQSKREMEREITRSLFSSRVAEIKVNWFKNRDEMLVVLPKLDGSLDEYLSLQEQLTDVEKLQGKLLEEIEFLEGAEGVDHPSHTLQHRYSEHTQLQTQQRAVQEAIQVKLNEFEQWITHYQAAFNNLEATQLASLLQEISTQMDLGPPSYVPATAFLQNAGQAHLISQCEQLEGEVGALLQQRRSVLRGCLEQLHHYATVALQYPKAIFQKHRIEQWKTWMEELICNTTVERCQELYRKYEMQYAPQPPPTVCQFITATEMTLQRYAADINSRLIRQVERLKQEAVTVPVCEDQLKEIERCIKVFLHENGEEGSLSLASVIISALCTLTRRNLMMEGAASSAGEQLVDLTSRDGAWFLEELCSMSGNVTCLVQLLKQCHLVPQDLDIPNPMEASETVHLANGVYTSLQELNSNFRQIIFPEALRCLMKGEYTLESMLHELDGLIEQTTDGVPLQTLVESLQAYLRNAAMGLEEETHAHYIDVARLLHAQYGELIQPRNGSVDETPKMSAGQMLLVAFDGMFAQVETAFSLLVEKLNKMEIPIAWRKIDIIREARSTQVNFFDDDNHRQVLEEIFFLKRLQTIKEFFRLCGTFSKTLSGSSSLEDQNTVNGPVQIVNVKTLFRNSCFSEDQMAKPIKAFTADFVRQLLIGLPNQALGLTLCSFISALGVDIIAQVEAKDFGAESKVSVDDLCKKAVEHNIQIGKFSQLVMNRATVLASSYDTAWKKHDLVRRLETSISSCKTSLQRVQLHIAMFQWQHEDLLINRPQAMSVTPPPRSAILTSMKKKLHTLSQIETSIATVQEKLAALESSIEQRLKWAGGANPALAPVLQDFEATIAERRNLVLKESQRASQVTFLCSNIIHFESLRTRTAEALNLDAALFELIKRCQQMCSFASQFNSSVSELELRLLQRVDTGLEHPIGSSEWLLSAHKQLTQDMSTQRAIQTEKEQQIETVCETIQNLVDNIKTVLTGHNRQLGDVKHLLKAMAKDEEAALADGEDVPYENSVRQFLGEYKSWQDNIQTVLFTLVQAMGQVRSQEHVEMLQEITPTLKELKTQSQSIYNNLVSFASPLVTDATNECSSPTSSATYQPSFAAAVRSNTGQKTQPDVMSQNARKLIQKNLATSADTPPSTVPGTGKSVACSPKKAVRDPKTGKAVQERNSYAVSVWKRVKAKLEGRDVDPNRRMSVAEQVDYVIKEATNLDNLAQLYEGWTAWV

SEQ ID NO: 749052 - protein, 3031 aa, Homo sapiens; identical to SEQ ID NO: 749051

SEQ ID NO: 749053 - protein, 3010 aa, Homo sapiens
MWALSPTVFALLSKNLMIVHSDLAVHFPAIQYAVLYTLYSHCTRHDHFISSSLSSSSPSLFDGAVISTVTTATKKHFSIILNLLGILLKKDNLNQDTRKLLMTWALEAAVLMKKSETYAPLFSLPSFHKFCKGLLANTLVEDVNICLQACSSLHALSSSLPDDLLQRCVDVCRVQLVHSGTRIRQAFGKLLKSIPLDVVLSNNNHTEIQEISLALRSHMSKAPSNTFHPQDFSDVISFILYGNSHRTGKDNWLERLFYSCQRLDKRDQSTIPRNLLKTDAVLWQWAIWEAAQFTVLSKLRTPLGRAQDTFQTIEGIIRSLAAHTLNPDQDVSQWTTADNDEGHGNNQLRLVLLLQYLENLEKLMYNAYEGCANALTSPPKVIRTFFYTNRQTCQDWLTRIRLSIMRVGLLAGQPAVTVRHGFDLLTEMKTTSLSQGNELEVTIMMVVEALCELHCPEAIQGIAVWSSSIVGKNLLWINSVAQQAEGRFEKASVEYQEHLCAMTGVDCCISSFDKSVLTLANAGRNSASPKHSLNGESRKTVLSKPTDSSPEVINYLGNKACECYISIADWAAVQEWQNAIHDLKKSTSSTSLNLKADFNYIKSLSSFESGKFVECTEQLELLPGENINLLAGGSKEKIDMKKLLPNMLSPDPRELQKSIEVQLLRSSVCLATALNPIEQDQKWQSITENVVKYLKQTSRIAIGPLRLSTLTVSQSLPVLSTLQLYCSSALENTVSNRLSTEDCLIPLFSEALRSCKQHDVRPWMQALRYTMYQNQLLEKIKEQTVPIRSHLMELGLTAAKFARKRGNVSLATRLLAQCSEVQLGKTTTAQDLVQHFKKLSTQGQVDEKWGPELDIEKTKLLYTAGQSTHAMEMLSSCAISFCKSVKAEYAVAKSILTLAKWIQAEWKEISGQLKQVYRAQHQQNFTGLSTLSKNILTLIELPSVNTMEEEYPRIESESTVHIGVGEPDFILGQLYHLSSVQAPEVAKSWAALASWAYRWGRKVVDNASQGEGVRLLPREKSEVQNLLPDTITEEEKERIYGILGQAVCRPAGIQDEDITLQITESEDNEEDDMVDVIWRQLISSCPWLSELDESATEGVIKVWRKVVDRIFSLYKLSCSAYFTFLKLNAGQIPLDEDDPRLHLSHRVEQSTDDMIVMATLRLLRLLVKHAGELRQYLEHGLETTPTAPWRGIIPQLFSRLNHPEVYVRQSICNLLCRVAQDSPHLILYPAIVGTISLSSESQASGNKFSTAIPTLLGNIQGEELLVSECEGGSPPASQDSNKDEPKSGLNEDQAMMQDCYSKIVDKLSSANPTMVLQVQMLVAELRRVTVLWDELWLGVLLQQHMYVLRRIQQLEDEVKRVQNNNTLRKEEKIAIMREKHTALMKPIVFALEHVRSITAAPAETPHEKWFQDNYGDAIENALEKLKTPLNPAKPGSSWIPFKEIMLSLQQRAQKRASYILRLEEISPWLAAMTNTEIALPGEVSARDTVTIHSVGGTITILPTKTKPKKLLFLGSDGKSYPYLFKGLEDLHLDERIMQFLSIVNTMFATINRQETPRFHARHYSVTPLGTRSGLIQWVDGATPLFGLYKRWQQREAALQAQKAQDSYQTPQNPGIVPRPSELYYSKIGPALKTVGLSLDVSRRDWPLHVMKAVLEELMEATPPNLLAKELWSSCTTPDEWWRVTQSYARSTAVMSMVGYIIGLGDRHLDNVLIDMTTGEVVHIDYNVCFEKGKSLRVPEKVPFRMTQNIETALGVTGVEGVFRLSCEQVLHIMRRGRETLLTLLEAFVYDPLVDWTAGGEAGFAGAVYGGGGQQAESKQSKREMEREITRSLFSSRVAEIKVNWFKNRDEMLVVLPKLDGSLDEYLSLQEQLTDVEKLQGKLLEEIEFLEGAEGVDHPSHTLQHRYSEHTQLQTQQRAVQEAIQVKLNEFEQWITHYQAAFNNLEATQLASLLQEISTQMDLGPPSYVPATAFLQNAGQAHLISQCEQLEGEVGALLQQRRSVLRGCLEQLHHYATVALQYPKAIFQKHRIEQWKTWMEELICNTTVERCQELYRKYEMQYAPQPPPTVCQFITATEMTLQRYAADINSRLIRQVERLKQEAVTVPVCEDQLKEIERCIKVFLHENGEEGSLSLASVIISALCTLTRRNLMMEGAASSAGEQLVDLTSRDGAWFLEELCSMSGNVTCLVQLLKQCHLVPQDLDIPNPMEASETVHLANGVYTSLQELNSNFRQIIFPEALRCLMKGEYTLESMLHELDGLIEQTTDGVPLQTLVESLQAYLRNAAMGLEEETHAHYIDVARLLHAQYGELIQPRNGSVDETPKMSAGQMLLVAFDGMFAQVETAFSLLVEKLNKMEIPIAWRKIDIIREARSTQVNFFDDDNHRQVLEEIFFLKRLQTIKEFFRLCGTFSKTLSGSSSLEDQNTVNGPVQIVNVKTLFRNSCFSEDQMAKPIKAFTADFVRQLLIGLPNQALGLTLCSFISALGVDIIAQVEAKDFGAESKVSVDDLCKKAVEHNIQIGKFSQLVMNRATVLASSYDTAWKKHDLVRRLETSISSCKTSLQRVQLHIAMFQWQHEDLLINRPQAMSVTPPPRSAILTSMKKKLHTLSQIETSIATVQEKLAALESSIEQRLKWAGGANPALAPVLQDFEATIAERRNLVLKESQRASQVTFLCSNIIHFESLRTRTAEALNLDAALFELIKRCQQMCSFASQFNSSVSELELRLLQRVDTGLEHPIGSSEWLLSAHKQLTQDMSTQRAIQTEKEQQIETVCETIQNLVDNIKTVLTGHNRQLGDVKHLLKAMAKDEEAALADGEDVPYENSVRQFLGEYKSWQDNIQTVLFTLVQAMGQVRSQEHVEMLQEITPTLKELKTQSQSIYNNLVSFASPLVTDATNECSSPTSSATYQPSFAAAVRSNTGQKTQPDVMSQNARKLIQKNLATSADTPPSTVPGTGKSVACSPKKAVRDPKTGKAVQERNSYAVSVWKRVKAKLEGRDVDPNRRMSVAEQVTVF

SEQ ID NO: 749054 - protein, 2240 aa, Homo sapiens
MWALSPTVFALLSKNLMIVHSDLAVHFPAIQYAVLYTLYSHCTRHDHFISSSLSSSSPSLFDGAVISTVTTATKKHFSIILNLLGILLKKDNLNQDTRKLLMTWALEAAVLMKKSETYAPLFSLPSFHKFCKGLLANTLVEDVNICLQACSSLHALSSSLPDDLLQRCVDVCRVQLVHSGTRIRQAFGKLLKSIPLDVVLSNNNHTEIQEISLALRSHMSKAPSNTFHPQDFSDVISFILYGNSHRTGKDNWLERLFYSCQRLDKRDQSTIPRNLLKTDAVLWQWAIWEAAQFTVLSKLRTPLGRAQDTFQTIEGIIRSLAAHTLNPDQDVSQWTTADNDEGHGNNQLRLVLLLQYLENLEKLMYNAYEGCANALTSPPKVIRTFFYTNRQTCQDWLTRIRLSIMRVGLLAGQPAVTVRHGFDLLTEMKTTSLSQGNELEVTIMMVVEALCELHCPEAIQGIAVWSSSIVGKNLLWINSVAQQAEGRFEKASVEYQEHLCAMTGVDCCISSFDKSVLTLANAGRNSASPKHSLNGESRKTVLSKPTDSSPEVINYLGNKACECYISIADWAAVQEWQNAIHDLKKSTSSTSLNLKADFNYIKSLSSFESGKFVECTEQLELLPGENINLLAGGSKEKIDMKKLLPNMLSPDPRELQKSIEVQLLRSSVCLATALNPIEQDQKWQSITENVVKYLKQTSRIAIGPLRLSTLTVSQSLPVLSTLQLYCSSALENTVSNRLSTEDCLIPLFSEALRSCKQHDVRPWMQALRYTMYQNQLLEKIKEQTVPIRSHLMELGLTAAKFARKRGNVSLATRLLAQCSEVQLGKTTTAQDLVQHFKKLSTQGQVDEKWGPELDIEKTKLLYTAGQSTHAMEMLSSCAISFCKSVKAEYAVAKSILTLAKWIQAEWKEISGQLKQVYRAQHQQNFTGLSTLSKNILTLIELPSVNTMEEEYPRIESESTVHIGVGEPDFILGQLYHLSSVQAPEVAKSWAALASWAYRWGRKVVDNASQGEGVRLLPREKSEVQNLLPDTITEEEKERIYGILGQAVCRPAGIQDEDITLQITESEDNEEDDMVDVIWRQLISSCPWLSELDESATEGVIKVWRKVVDRIFSLYKLSCSAYFTFLKLNAGQIPLDEDDPRLHLSHRVEQSTDDMIVMATLRLLRLLVKHAGELRQYLEHGLETTPTAPWRGIIPQLFSRLNHPEVYVRQSICNLLCRVAQDSPHLILYPAIVGTISLSSESQASGNKFSTAIPTLLGNIQGEELLVSECEGGSPPASQDSNKDEPKSGLNEDQAMMQDCYSKIVDKLSSANPTMVLQVQMLVAELRRVTVLWDELWLGVLLQQHMYVLRRIQQLEDEVKRVQNNNTLRKEEKIAIMREKHTALMKPIVFALEHVRSITAAPAETPHEKWFQDNYGDAIENALEKLKTPLNPAKPGSSWIPFKEIMLSLQQRAQKRASYILRLEEISPWLAAMTNTEIALPGEVSARDTVTIHSVGGTITILPTKTKPKKLLFLGSDGKSYPYLFKGLEDLHLDERIMQFLSIVNTMFATINRQETPRFHARHYSVTPLGTRSGLIQWVDGATPLFGLYKRWQQREAALQAQKAQDSYQTPQNPGIVPRPSELYYSKIGPALKTVGLSLDVSRRDWPLHVMKAVLEELMEATPPNLLAKELWSSCTTPDEWWRVTQSYARSTAVMSMVGYIIGLGDRHLDNVLIDMTTGEVVHIDYNVCFEKGKSLRVPEKVPFRMTQNIETALGVTGVEGVFRLSCEQVLHIMRRGRETLLTLLEAFVYDPLVDWTAGGEAGFAGAVYGGGGQQAESKQSKREMEREITRSLFSSRVAEIKVNWFKNRDEMLVVLPKLDGSLDEYLSLQEQLTDVEKLQGKLLEEIEFLEGAEGVDHPSHTLQHRYSEHTQLQTQQRAVQEAIQVKLNEFEQWITHYQAAFNNLEATQLASLLQEISTQMDLGPPSYVPATAFLQNAGQAHLISQCEQLEGEVGALLQQRRSVLRGCLEQLHHYATVALQYPKAIFQKHRIEQWKTWMEELICNTTVERCQELYRKYEMQYAPQPPPTVCQFITATEMTLQRYAADINSRLIRQVERLKQEAVTVPVCEDQLKEIERCIKVFLHENGEEGSLSLASVIISALCTLTRRNLMMEGAASSAGEQLVDLTSRDGAWFLEELCSMSGNVTCLVQLLKQCPTDSRDWTYTHDRGITSRYISSPHSCRGVKLCFLTASSLAMITLL

SEQ ID NO: 749055 - protein, 352 aa, Homo sapiens
GNEAELCSALANLQTSKPDAVEQTCILESTEIALLNNIPYHEGFKMAMSKVLSSLTPEKLYQTMDTHCQNEMSSGTGQSNTVQNILEPFYVLDVSEGFSVLPVIAGTLGQVKPYSSVEKDQHRIALDLISEANHFPKETLEFWLRHVEDESAMLQRPKSDKLWSIIILDVIEPSGLIQQEIMEKAAISRCLLQSGGKIFPQYVLMFGLLVESQTLLEENAVQGTERTLGLNIAPFINQFQVPIRVFLDLSSLPCIPLSKPVELLRLDLMTPYLNTSNREVKVYVCKSGRLTAIPFWYHMYLDEEIRLDTSSEASHWKQAAVVLDNPIQVEMGEELVLSIQHHKSNVSITVKQ

SEQ ID NO: 749056 - protein, 352 aa, Homo sapiens; identical to SEQ ID NO: 749055

SEQ ID NO: 749057 - protein, 148 aa, Homo sapiens [sequence omitted]

SEQ ID NO: 749058 - protein, 68 aa, Homo sapiens
AAAYYYYCLLLLNSRPLDEEIRLDTSSEASHWKQAAVVLDNPIQVEMGEELVLSIQHHKSNVSITVKQ

SEQ ID NO: 749059 - protein, 179 aa, Homo sapiens
MAVFKTTLWRLISGTLGIICLSLMATLGILLKNSFTKLSIEPAFTPGPNIELQKDSDCCSCQEKWVGYRCNCYFISSEQKTWNESRHLCASQKSSLLQLQNTDELDFMSSSQQFYWIGLSYSEEHTAWLWENGSALSQYLFPSFETFNTKNCIAYNPNGNALDESCEDKNRYICKQQLI

SEQ ID NO: 749060 - protein, 148 aa, Homo sapiens
MAAFTKLSIEPAFTPGPNIELQKDSDCCSCQEKWVGYRCNCYFISSEQKTWNESRHLCASQKSSLLQLQNTDELDFMSSSQQFYWIGLSYSEEHTAWLWENGSALSQYLFPSFETFNTKNCIAYNPNGNALDESCEDKNRYICKQQLI

SEQ ID NO: 749061 - protein, 184 aa, Homo sapiens
MAVFKTTLWRLISGTLGIICLSLMATLGILLKNSFTKLSIEPAFTPGPNIELQKDSDCCSCQEKWVGYRCNCYFISSEQKTWNESRHLCASQKSSLLQLQNTDELDFMSSSQQFYWIGLSYSEEHTAWLWENGSALSQYLFPSFETFNTKNCIAYNPNGNALDESCEDKNRYIYKVLLCCPGWS

SEQ ID NO: 749062 - protein, 103 aa, Homo sapiens
TRPPTRPKNNNLNGTTEEVTSEEEEEEEEMAEDIEDLDHYEMKEEEPISGKKSEDEGIEKENLAILEKIRKTQRQDHLNDNFPFDPPFVRVVLPVLSGGINII

SEQ ID NO: 749063 - protein, 340 aa, Homo sapiens
MSVSGLKAELKFLASIFDKNHERFRIVSWKLDELHCQFLVPQQGSPHSLPPPLTLHCNITESYPSSSPIWFVDSEDPNLTSVLERLEDTKNNNLNGTTEEVTSEEEEEEEEMAEDIEDLDHYEMKEEEPISGKKSEDEGIEKENLAILEKIRKTQRQDHLNGAVSGSVQASDRLMKELRDIYRSQSYKTGIYSVELINDSLYDWHVKLQKVDPDSPLHSDLQILKEKEGIEYILLNFSFKDNFPFDPPFVRVVLPVLSGGYVLGGGALCMELLTKQGWSSAYSIESVIMQINATLVKGKARVQFGANKNQYNLARAQQSYNSIVQIHEKNGWYTPPKEDG

SEQ ID NO: 749064 - protein, 160 aa, Homo sapiens
MRMDSLTEEKLECRLWCCLSDPSPPGLAARCCVLERSIVPSLRQESYPSSSPIWFVDSEDPNLTSVLERLEDTKNNNLLRQQLKWLICELCSLYNLPKHLDVEMLDQPLPTGQNGTTEEVTSEEEEEEEEMAEDNFPFDPPFVRVVLPVLSGGVLRGRKH

SEQ ID NO: 749065 - protein, 314 aa, Homo sapiens
MSVSGLKAELKFLASIFDKNHERFRIVSWKLDELHCQFLVPQQGSPHSLPPPLTLHCNITESYPSSSPIWFVDSEDPNLTSVLERLEDTKNNNLLRQQLKWLICELCSLYNLPKHLDVEMLDQPLPTGQNGTTEEVTSEEEEEEEEMAEDIEDLDHYEMKEEEPISGKKSEDEGIEKENLAILEKIRKTQRQDHLNGAVSGSVQASDRLMKELRDIYRSQSYKTGIYSVELINDSLYDWHVKLQKVDPDSPLHSDLQILKEKEGIEYILLNFSFKDNFPFDPPFVRVVLPVLSGGLVHPSKGRWLNMLTVVCLD

SEQ ID NO: 749066 - protein, 375 aa, Homo sapiens
MSVSGLKAELKFLASIFDKNHERFRIVSWKLDELHCQFLVPQQGSPHSLPPPLTLHCNITESYPSSSPIWFVDSEDPNLTSVLERLEDTKNNNLLRQQLKWLICELCSLYNLPKHLDVEMLDQPLPTGQNGTTEEVTSEEEEEEEEMAEDIEDLDHYEMKEEEPISGKKSEDEGIEKENLAILEKIRKTQRQDHLNGAVSGSVQASDRLMKELRDIYRSQSYKTGIYSVELINDSLYDWHVKLQKVDPDSPLHSDLQILKEKEGIEYILLNFSFKDNFPFDPPFVRVVLPVLSGGYVLGGGALCMELLTKQGWSSAYSIESVIMQINATLVKGKARVQFGANKNQYNLARAQQSYNSIVQIHEKNGWYTPPKEDG

SEQ ID NO: 749067 - protein, 245 aa, Homo sapiens
MSVSGLKAELKFLASIFDKNHERFRIVSWKLDELHCQFLVPQQGSPHSLPPPLTLHCNITESYPSSSPIWFVDSEDPNLTSVLERLEDTKNNNLLRQQLKWLICELCSLYNLPKHLDVEMLDQPLPTGQNGTTEEVTSEEEEEEEEMAEDIEDLDHYEMKEEEPISGKKSEDEGIEKENLAILEKIRKTQRQDHLNGAVSGSVQASDRLMKELRDIYRSQSYKTGIYSVELINDSLYDWHVKLQK

SEQ ID NO: 749068 - protein, 241 aa, Homo sapiens
MSVSGLKAELKFLASIFDKNHERFRIVSWKLDELHCQFLVPQQGSPHSLPPPLTLHCNITESYPSSSPIWFVDSEDPNLTSVLERLEDTKNNNLLRQQLKWLICELCSLYNLPKHLDVEMLDQPLPTGQNGTTEEVTSEEEEEEEEMAEDIEDLDHYEMKEEEPISGKKSEDEGIEKENLAILEKIRKTQRQDHLNVQCLDHAGTGLLEDVLEEVTSLSPKPSSGWLSSSHAPYKCHVAYL

SEQ ID NO: 749069 - protein, 208 aa, Homo sapiens
MSVSGLKAELKFLASIFDKNHERFRIVSWKLDELHCQFLVPQQGSPHSLPPPLTLHCNITESYPSSSPIWFVDSEDPNLTSVLERLEDTKNNNLLRQQLKWLICELCSLYNLPKHLDVEMLDQPLPTGQNGTTEEVTSEEEEEEEEMAEDIEDLDHYEMKEEEPISGKKSEDEGIEKENLAILEKIRKTQRQDHLNTSLANMAKPRLY

SEQ ID NO: 749070 - protein, 149 aa, Homo sapiens
MSVSGLKAELKFLASIFDKNHERFRIVSWKLDELHCQFLVPQQGSPHSLPPPLTLHCNITESYPSSSPIWFVDSEDPNLTSVLERLEDTKNNNLLRQQLKWLICELCSLYNLPKHLDVEMLDQPLPTGQYGTTDEVTSEVEEEEEVVWL

SEQ ID NO: 749071 - protein, 394 aa, Homo sapiens
ARGRHPSRSGLGRQGKMVDYSVWDHIEVSDDEDETHPNIDTASLFRWRHQARVERMEQFQKEKEELDRGCRECKRKVAECQRKLKELEVAEGGKAELERLQAEAQQLRKEERSWEQKLEEMRKKEKSMPWNVDTLSKDGFSKSMVNTKPEKTEEDSEEVREQKHKTFVEKYEKQIKHFGMLRRWDDSQKYLSDNVHLVCEETANYLVIWCIDLEVEEKCALMEQVAHQTIVMQFILELAKSLKVDPRACFRQFFTKIKTADRQYMEGFNDELEAFKERVRGRAKLRIEKAMKEYEEEERKKRLGPGGLDPVEVYESLPEELQKCFDVKDVQMLQDAISKMDPTDAKYHMQRCIDSGLWVPNSKASEAKEGEEAGPGDPLLEAVPKTGDEKDVSV

SEQ ID NO: 749072 - protein, 394 aa, Homo sapiens; identical to SEQ ID NO: 749071

SEQ ID NO: 749073 - protein, 310 aa, Homo sapiens
  misc_feature (43)..(43): Xaa can be any naturally occurring amino acid
SLARGQGPCPRSRHLDAHGFVTTSAVDGMGAATTARPAALEAXSAALPQPTPPLTLPQSMVNTKPEKTEEDSEEVREQKHKTFVEKYEKQIKHFGMLRRWDDSQKYLSDNVHLVCEETANYLVIWCIDLEVEEKCALMEQVAHQTIVMQFILELAKSLKVDPRACFRQFFTKIKTADRQYMEGFNDELEAFKERVRGRAKLRIEKAMKEYEEEERKKRLGPGGLDPVEVYESLPEELQKCFDVKDVQMLQDAISKMDPTDAKYHMQRCIDSGLWVPNSKASEAKEGEEAGPGDPLLEAVPKTGDEKDVSV

SEQ ID NO: 749074 - protein, 111 aa, Homo sapiens
MPSRPLLTSSTCAARPSLGGPPSPPWPLHCLHSPAPIQVSALSQGASLPAAPHQHYAKGPGVRGRAEVTRLVYQVVGEGPQPRGRLSSLGSVFTVRLLSVSSIWQTAMIFQ

SEQ ID NO: 749075 - protein, 424 aa, Homo sapiens
ARGRHPSRSGLGRQGKMVDYSVWDHIEVSDDEDETHPNIDTASLFRWRHQARVERMEQFQKEKEELDRGCRECKRKVAECQRKLKELEVAEGGKAELERLQAEAQQLRKEERSWEQKLEEMRKKEKSMPWNVDTLSKDGFSKSMVNTKPEKTEEDSEEVREQKHKTFVEKYEKQIKHFGEWGLWVMGGKVEAGPLPPGPPAPCQHLPTGMLRRWDDSQKYLSDNVHLVCEETANYLVIWCIDLEVEEKCALMEQVAHQTIVMQFILELAKSLKVDPRACFRQFFTKIKTADRQYMEGFNDELEAFKERVRGRAKLRIEKAMKEYEEEERKKRLGPGGLDPVEVYESLPEELQKCFDVKDVQMLQDAISKMDPTDAKYHMQRCIDSGLWVPNSKASEAKEGEEAGPGDPLLEAVPKTGDEKDVSV

SEQ ID NO: 749076 - protein, 394 aa, Homo sapiens; identical to SEQ ID NO: 749071

SEQ ID NO: 749077 - protein, 394 aa, Homo sapiens; identical to SEQ ID NO: 749071

SEQ ID NO: 749078 - protein, 192 aa, Homo sapiens
RHLEDPGTSDLEVEEKCALMEQVAHQTIVMQFILELAKSLKVDPRACFRQFFTKIKTADRQYMEGFNDELEAFKERVRGRAKLRIEKAMKEYEEEERKKRLGPGGLDPVEVYESLPEELQKCFDVKDVQMLQDAISKMDPTDAKYHMQRCIDSGLWVPNSKASEAKEGEEAGPGDPLLEAVPKTGDEKDVSV

SEQ ID NO: 749079 - protein, 294 aa, Homo sapiens
ARGRHPSRSGLGRQGKMVDYSVWDHIEVSDDEDETHPNIDTASLFRWRHQARVERMEQFQKEKEELDRGCRECKRKVAECQRKLKELEVAEGGKAELERLQAEAQQLRKEERSWEQKLEEMRKKEKSMPWNVDTLSKDGFSKSMVNTKPEKTEEDSEETADRQYMEGFNDELEAFKERVRGRAKLRIEKAMKEYEEEERKKRLGPGGLDPVEVYESLPEELQKCFDVKDVQMLQDAISKMDPTDAKYHMQRCIDSGLWVPNSKASEAKEGEEAGPGDPLLEAVPKTGDEKDVSV

SEQ ID NO: 749080 - protein, 394 aa, Homo sapiens; identical to SEQ ID NO: 749071

SEQ ID NO: 749081 - protein, 394 aa, Homo sapiens; identical to SEQ ID NO: 749071

SEQ ID NO: 749082 - protein, 387 aa, Homo sapiens
ARGRHPSRSGLGRQGKMVDYSVWDHIEVSDDEDETHPNIDTASLFRWRHQARVERMEQFQKEKEELDRGCRECKRKVAECQRKLKELEVAEGGKAELERLQAEAQQLRKEERSWEQKLEEMRKKEKSMPWNVDTLSKDGFSKSMVNTKPEKTEEDSEEVREQKHKTFVEKYEKQIKHFGMLRRWDDSQKYLSDNVHLVCEETANYLVIWCIDLEVEEKCALMEQVAHQTIVMQFILELAKSLKVDPRACFRQFFTKIKTADRQYMEGFNDELEAFKERVRGRAKLRIEKAMKEYEEEERKKRLGPGGLDPVEELQKCFDVKDVQMLQDAISKMDPTDAKYHMQRCIDSGLWVPNSKASEAKEGEEAGPGDPLLEAVPKTGDEKDVSV

SEQ ID NO: 749083 - protein, 394 aa, Homo sapiens; identical to SEQ ID NO: 749071

SEQ ID NO: 749084 - protein, 394 aa, Homo sapiens; identical to SEQ ID NO: 749071

SEQ ID NO: 749085 - protein, 185 aa, Homo sapiens
ARGRHPSRSGLGRQGKMVDYSVWDHIEVSDDEDETHPNIDTASLFRWRHQARVERMEQFQKEKEELDRGCRECKRKVAECQRKLKELEVAEGGKAELERLQAEAQQLRKEERSWEQKLEEMRKKEKSSALERGHAQQRRLQQEHGKYQAREDGGGLRGGEGAETQDLRGKIRETDQALWHASPLG

SEQ ID NO: 749086 - protein, 474 aa, Homo sapiens
ARGRHPSRSGLGRQGKMVDYSVWDHIEVSDDEDETHPNIDTASLFRWRHQARVERMEQFQKEKEELDRGCRECKRKVAECQRKLKELEVAEGGKAELERLQAEAQQLRKEERSWEQKLEEMRKKEKSMPWNVDTLSKDGFSKSMVNTKPEKTEEDSEEVREQKHKTFVEKYEKQIKHFGMLRRWDDSQKYLSDNVHLVCEETANYLVIWCIDLEVEEKCALMEQVAHQTIVMQFILKLFPRRAMRRMSVCDLPQLPPPPASRPLCAPFQKTEDAISPAPDFLYLRCSAQPGGPAQPSLASPLSPLSSAHSSLCFESRGFTACFRQFFTKIKTADRQYMEGFNDELEAFKERVRGRAKLRIEKAMKEYEEEERKKRLGPGGLDPVEVYESLPEELQKCFDVKDVQMLQDAISKMDPTDAKYHMQRCIDSGLWVPNSKASEAKEGEEAGPGDPLLEAVPKTGDEKEGQRSPGWSTR

SEQ ID NO: 749087 - protein, 185 aa, Homo sapiens; identical to SEQ ID NO: 749085

SEQ ID NO: 749088 - protein, 483 aa, Homo sapiens
ARGRHPSRSGLGRQGKMVDYSVWDHIEVSDDEDETHPNIDTASLFRWRHQARVERMEQFQKEKEELDRGCRECKRKVAECQRKLKELEVAEGGKAELERLQAEAQQLRKEERSWEQKLEEMRKKEKSMPWNVDTLSKDGFSKSMVNTKPEKTEEDSEEVREQKHKTFVEKYEKQIKHFGMLRRWDDSQKYLSDNVHLVCEETANYLVIWCIDLEVEEKCALMEQVAHQTIVMQFILKLFPRRAMRRMSVCDLPQLPPPPASRPLCAPFQKTDEMPSRPLLTSSTCAARPSLGGPPSPPWPLHCLHSPAPIQVSALSQGASLPAAPPQHYACFRQFFTKIKTADRQYMEGFNDELEAFKERVRGRAKLRIEKAMKEYEEEERKKRLGPGGLDPVEVYESLPEELQKCFDVKDVQMLQDAISKMDPTDAKYHMQRCIDSGLWVPNSKASEAKEGEEAGPGDPLLEAVPKTGDEKEGQRSPGWSTR

SEQ ID NO: 749089 - protein, 371 aa, Homo sapiens
ARGRHPSRSGLGRQGKMVDYSVWDHIEVSDDEDETHPNIDTASLFRWRHQARVERMEQFQKEKEELDRGCRECKRKVAECQRKLKELEVAEGGKAELERLQAEAQQLRKEERSWEQKLEEMRKKEKSMPWNVDTLSKDGFSKSMVNTKPEKTEEDSEEVREQKHKTFVEKYEKQIKHFGMLRRWDDSQKYLSDNVHLVCEETANYLVIWCIDLEVEEKCALMEQVAHQTIVMQFILELAKSLKVDPRACFRQFFTKIKTADRQYMEGFNDELEAFKERVRGRAKLRIEKAMKEYEEEERKKRLGPGGLDPVEVYESLPEELQKCFDVKDVQMLQDAISKMDPTVSNPRAPCLPGGPCVSPSPVSQVSEAGW

SEQ ID NO: 749090 - protein, 33 aa, Homo sapiens
PAKPASTFKTSAHLTFTYILLAKRSQAFHHCTK

SEQ ID NO: 749091 - protein, 110 aa, Homo sapiens
ERERRKEGRNTERACVSGAPFQPEFPVLEQHHTGKRSIFSLELVCLTSLEQTPFRILPVTRTVYAGQRAGFHSCGLLRPGLQGLCGRGVHSPVWLECSGSTLSGEAMSSQ

SEQ ID NO: 749092 - protein, 387 aa, Homo sapiens
RGGRARVCCGRGGAEPPPARGSPRARPSSDTPSLGAAAGRVSGVAASGRWRQRDTRREEAGWGRRGECGGGGWQGALEAGAVRALPAPEGAGGSEAAAAPRGPGGGWGAGGRCRRRRRGRRWPRPLCSRALPLAAHSPAVARRRRWRRRLLPPEAVGLGAGGGRGRGEHASRREWGAMAKLRVAYEYTEAEDKSIRLGLFLIISGVVSLFIFGFCWLSPALQDLQATEANCTVLSVQQIGEVFECTFTCGADCRGTSQYPCVQVYVNNSESNSRALLHSDEHQLLTNPKCSYIPPCKRENQKNLESVMNWQQYWKDEIGSQPFTCYFNQHQRPDDVLLHRTHDEIVLLHCFLWPLVTFVVGVLIVVLTICAKSLAVKAEAMKKRKFS

SEQ ID NO: 749093 - protein, 119 aa, Homo sapiens
PFTCYFNQHQGPDDVLMHRTHCGPDHLCQELGGQGGSHEEAQVLLKGKEACRKQSTEAVLIGTRPPAEPVFPGAGDGQGHDRALRGSSLSGNRNRHNWKTWNLKACIPSAVAMAKGSRS

SEQ ID NO: 749094 - protein, 387 aa, Homo sapiens; identical to SEQ ID NO: 749092

SEQ ID NO: 749095 - protein, 387 aa, Homo sapiens; identical to SEQ ID NO: 749092

SEQ ID NO: 749096 - protein, 387 aa, Homo sapiens; identical to SEQ ID NO: 749092

SEQ ID NO: 749097 - protein, 210 aa, Homo sapiens
MAKLRVAYEYTEAEDKSIRLGLFLIISGVVSLFIFGFCWLSPALQDLQATEANCTVLSVQQIGEVFECTFTCGADCRGTSQYPCVQVYVNNSESNSRALLHSDEHQLLTNPKCSYIPPCKRENQKNLESVMNWQQYWKDEIGSQPFTCYFNQHQRPDDVLLHRTHDEIVLLHCFLWPLVTFVVGVLIVVLTICAKSLAVKAEAMKKRKFS

SEQ ID NO: 749098 - protein, 333 aa, Homo sapiens
RGGRARVCCGRGGAEPPPARGSPRARPSSDTPSLGAAAGRVSGVAASGRWRQRDTRREEAGWGRRGECGGGGWQGALEAGAVRALPAPEGAGGSEAAAAPRGPGGGWGAGGRCRRRRRGRRWPRPLCSRALPLAAHSPAVARRRRWRRRLLPPEAVGLGAGGGRGRGEHASRREWGAMAKLRVAYEYTEAEDKSIRLGLFLIISGVVSLFIFGFCWLSPALQDLQATEANCTVLSVQQIGEVFECTFTCGADCRGTSQYPCVQVYVNNSESNSRALLHSDEHQLLTNPKCSYIPPCKRENQKNLESVMNWQQYWKDEIGSQPFTCYFNQHQRS

SEQ ID NO: 749099 - protein, 153 aa, Homo sapiens
EVEDDDKMSISRPHPSTAESKPPTPKFDLLASNFPPLPGSSSRIPDKLILENRMSDVVKGVYKEKDNEVLRVSCPVPADEQTECTSAQQLSMSTSSPCAAEPTALSTTQPKKKKKKGSNRGFLCSEGWSQPDNYTSFSSKYYKAMEGKYCLTM

SEQ ID NO: 749100 - protein, 227 aa, Homo sapiens
ADYALLMDFIPLDDKRYRYAFHSSAWLVAGKADPATPGRVHFHPDSPAKGAQWMRQIVSFDKLKLTNNLLDDNGHIILNSMHRYQPRFHVVFVDPRKDSERYAQENFKSFIFTETQFTAVTAYQNHRITQLKIASNPFAKGFRESDLDSWPVAPRPLLSVPARSHSSLSPCVLKGATDREKDPNKASASTSKTPAWLHHQGGLASPSWAGAPVPHCGVPGAWPGLPV

SEQ ID NO: 749101 - protein, 472 aa, Homo sapiens
  misc_feature (33)..(33): Xaa can be any naturally occurring amino acid
  misc_feature (72)..(72): Xaa can be any naturally occurring amino acid
ALLDELQKVFTLEMAYTIYVPFSCLLGDIIRKXHPQATSWLGSWRRCTWRASAPAVATLPAWSPPCPAPGPXWDPHGGGCPQDDGHSGTFGSVLVGNRIQIPNDSRPENPGPLGPISGVGGGGLGSGSDDNALKQELPRSVHGLSGNWLAYWQYEIGVSQQDAHFHFHQIRLQSFPGHSGAVKCVAPLSSEDFFLSGSKDRTVRLWPLYNYGDGTSETAPRLVYTQHRKSVFFVGQLEAPQHVVSCDGAVHVWDPFTGKTLRTVEPLDSRVPLTAVAVMPAPHTSITMASSDSTLRFVDCRKPGLQHEFRLGGGLNPGLVRALAISPSGRSVVAGFSSGFMVLLDTRTGLVLRGWPAHEGDILQIKAVEGSVLVSSSSDHSLTVWKELEQKPTHHYKSASDPIHTFDLYGSEVVTGTVSNKIGVCSLLEPPSQATTKLSSENFRGTLTSLALLPTKRHLLLGSDNGVIRLLA

SEQ ID NO: 749102 - protein, 89 aa, Homo sapiens
  misc_feature (62)..(62): Xaa can be any naturally occurring amino acid
  misc_feature (73)..(73): Xaa can be any naturally occurring amino acid
YLSDTTLMDILPRISHEVLLPVLSFLTSLVTGFPSGAQARTILCVKTISLIALICLRIGQEXGPAAPERARGXPFSRSSLSCMSFGNRI

SEQ ID NO: 749103 - protein, 110 aa, Homo sapiens
  misc_feature (23)..(23): Xaa can be any naturally occurring amino acid
TAPSRSPSQSSWLSPPLGGPILXPLPQSQQWVLRASRMGESKGIWPQTPTPKVTHKQGLSSSQQERPRSWPVVSLGKAGESGRWTGGPQELGEREGVASCLRSFPSEPCT

SEQ ID NO: 749104 - protein, 201 aa, Homo sapiens
SKTRRQKKKKKDIFFSHHTQMVAHYKHSPASLNMIVYLGGDCISPNKTLPRFSTLWGGTIPDWYPCLAGGLGFCCYQQRCSEYPMCLSFCHFSHMWGLLPAHISRGRVAGLVHVKFGWPFLSQEPQFIHTQASSLCVLPTFCSLPGGWVTNDIMISWHWLWGLKKIFYGRVQWLTPVTPGLWEAEAGGSLEVRSLGPAWAT

SEQ ID NO: 749105 - protein, 72 aa, Homo sapiens
QEDKLLRVRRGSPHHRAQCLTIASVLYLFIHTNRTISLLSILPNSSRSLSLLTIHHLLLNVLHPSALHSIKC

SEQ ID NO: 749106 - protein, 96 aa, Homo sapiens
MTSALENYINRTVAVITSDGRMIVGTLKGFDQTINLILDESHERVFSSSQGVEQVVLGLYIVRGDNVAVIGEIDEETDSALDLGNIRAEPLNSVAH

SEQ ID NO: 749107 - protein, 115 aa, Homo sapiens
GRLLLLLLLEFKLLTMYGDMTSALENYINRTVAVITSDGRMIVGTLKGFDQTINLILDESHERVFSSSQGVEQVVLGLYIVRGDNVAVIGEIDEETDSALDLGNIRAEPLNSVAH

SEQ ID NO: 749108 - protein, 171 aa, Homo sapiens
MHAHSLVTAVRLLFGWPVRPNFRLTGLRSSNSHDICCDPQALSAAGFWRALSVLLAVRTAALPGTAGPNSMTSALENYINRILKLAAAGVSRGRGEAAVGDRWEVGRPGLGGILGAGEEMRAPERPRVRRRRLEPSRCCGPRGPFHFACKTQIKTQCDYSELFCLKKNVRS

SEQ ID NO: 749109 - protein, 96 aa, Homo sapiens; identical to SEQ ID NO: 749106

SEQ ID NO: 749110 - protein, 96 aa, Homo sapiens; identical to SEQ ID NO: 749106

SEQ ID NO: 749111 - protein, 144 aa, Homo sapiens
PPGALRKPALASCKVFSNHLRKKSYSSSLWQITAATFSPGVQSIKLLNARMANKVPVTLGEIYKPHQRLLTSTRIKVCRHCSSPASSTREASKTALPSFLSLFVEYRWKRRNPSKFCSFMKMGSCGQEICHYAPNLLYLRFSRE

SEQ ID NO: 749112 - protein, 963 aa, Homo sapiens
MPSLPAPPAPLLLLGLLLLGSRPARGAGPEPPVLPIRSEKEPLPVRGAAGCTFGGKVYALDETWHPDLGEPFGVMRCVLCACEATGTLRPREMKSLSRVTQLPQWGRRTRGPGRVSCKNIKPECPTPACGQPRQLPGHCCQTCPQERSSSERQPSGLSFEYPRDPEHRSYSDRGEPGAEERARGDGHTDFVALLTGPRSQAVARARVSLLRSSLRFSISYRRLDRPTRIRFSDSNGSVLFEHPAAPTQDGLVCGVWRAVPRLSLRLLRAEQLHVALVTLTHPSGEVWGPLIRHRALAAETFSAILTLEGPPQQGVGGITLLTLSDTEDSLHFLLLFRGLLEPRSGDSTPGAATRELQANVSAQEPGFAEVLPNLTVQEMDWLVLGELQMALEWAGRPGLRISGHIAARKSCDVLQSVLCGADALIPVQTGAAGSASLTLLGNGSLIYQVQVVGTSSEVVAMTLETKPQRRDQRTVLCHMAGLQPGGHTAVGICPGLGARGAHMLLQNELFLNVGTKDFPDGELRGHVAALPYCGHSARHDTLPVPLAGALVLPPVKSQAAGHAWLSLDTHCHLHYEVLLAGLGGSEQGTVTAHLLGPPGTPGPRRLLKGFYGSEAQGVVKDLEPELLRHLAKGMASLMITTKGSPRGELRGQVHIANQCEVGGLRLEAAGAEGVRALGAPDTASAAPPVVPGLPALAPAKPGGPGRPRDPNTCFFEGQQRPHGARWAPNYDPLCSLCTCQRRTVICDPVVCPPPSCPHPVQAPDQCCPVCPEKQDVRDLPGLPRSRDPGEGCYFDGDRSWRAAGTRWHPVVPPFGLIKCAVCTCKGGTGEVHCEKVQCPRLACAQPVRVNPTDCCKQCPVGSGAHPQLGDPMQADGPRGCRFAGQWFPESQSWHPSVPPFGEMSCITCRCGAGVPHCERDDCSLPLSCGSGKESRCCSRCTAHRRPAPETRTDPELEKEAEGS

SEQ ID NO: 749113 - protein, 955 aa, Homo sapiens
MPSLPAPPAPLLLLGLLLLGSRPARGAGPEPPVLPIRSEKEPLPVRGAAGCTFGGKVYALDETWHPDLGEPFGVMRCVLCACEAPQWGRRTRGPGRVSCKNIKPECPTPACGQPRQLPGHCCQTCPQERSSSERQPSGLSFEYPRDPEHRSYSDRGEPGAEERARGDGHTDFVALLTGPRSQAVARARVSLLRSSLRFSISYRRLDRPTRIRFSDSNGSVLFEHPAAPTQDGLVCGVWRAVPRLSLRLLRAEQLHVALVTLTHPSGEVWGPLIRHRALAAETFSAILTLEGPPQQGVGGITLLTLSDTEDSLHFLLLFRGLLEPRSGGLTQVPLRLQILHQGQLLRELQANVSAQEPGFAEVLPNLTVQEMDWLVLGELQMALEWAGRPGLRISGHIAARKSCDVLQSVLCGADALIPVQTGAAGSASLTLLGNGSLIYQVQVVGTSSEVVAMTLETKPQRRDQRTVLCHMAGLQPGGHTAVGICPGLGARGAHMLLQNELFLNVGTKDFPDGELRGHVAALPYCGHSARHDTLPVPLAGALVLPPVKSQAAGHAWLSLDTHCHLHYEVLLAGLGGSEQGTVTAHLLGPPGTPGPRRLLKGFYGSEAQGVVKDLEPELLRHLAKGMASLMITTKGSPRGELRGQVHIANQCEVGGLRLEAAGAEGVRALGAPDTASAAPPVVPGLPALAPAKPGGPGRPRDPNTCFFEGQQRPHGARWAPNYDPLCSLCTCQRRTVICDPVVCPPPSCPHPVQAPDQCCPVCPEKQDVRDLPGLPRSRDPGEGCYFDGDRSWRAAGTRWHPVVPPFGLIKCAVCTCKGGTGEVHCEKVQCPRLACAQPVRVNPTDCCKQCPVGSGAHPQLGDPMQADGPRGCRFAGQWFPESQSWHPSVPPFGEMSCITCRCGAGVPHCERDDCSLPLSCGSGKESRCCSRCTAHRRPAPETRTDPELEKEAEGS

SEQ ID NO: 749114 - protein, 945 aa, Homo sapiens
MPSLPAPPAPLLLLGLLLLGSRPARGAGPEPPVLPIRSEKEPLPVRGAAGCTFGGKVYALDETWHPDLGEPFGVMRCVLCACEAPQWGRRTRGPGRVSCKNIKPECPTPACGQPRQLPGHCCQTCPQERSSSERQPSGLSFEYPRDPEHRSYSDRGEPGAEERARGDGHTDFVALLTGPRSQAVARARVSLLRSSLRFSISYRRLDRPTRIRFSDSNGSVLFEHPAAPTQDGLVCGVWRAVPRLSLRLLRAEQLHVALVTLTHPSGEVWGPLIRHRALAAETFSAILTLEGPPQQGVGGITLLTLSDTEDSLHFLLLFRGLLEPRSGDSTQGQLLRELQANVSAQEPGFAEVLPNLTVQEMDWLVLGELQMALEWAGRPGLRISGHIAARKSCDVLQSVLCGADALIPVQTGAAGSASLTLLGNGSLIYQVQVVGTSSEVVAMTLETKPQRRDQRTVLCHMAGLQPGGHTAVGICPGLGARGAHMLLQNELFLNVGTKDFPDGELRGHVAALPYCGHSARHDTLPVPLAGALVLPPVKSQAAGHAWLSLDTHCHLHYEVLLAGLGGSEQGTVTAHLLGPPGTPGPRRLLKGFYGSEAQGVVKDLEPELLRHLAKGMASLMITTKGSPRGELRGQVHIANQCEVGGLRLEAAGAEGVRALGAPDTASAAPPVVPGLPALAPAKPGGPGRPRDPNTCFFEGQQRPHGARWAPNYDPLCSLCTCQRRTVICDPVVCPPPSCPHPVQAPDQCCPVCPEKQDVRDLPGLPRSRDPGEGCYFDGDRSWRAAGTRWHPVVPPFGLIKCAVCTCKGGTGEVHCEKVQCPRLACAQPVRVNPTDCCKQCPVGSGAHPQLGDPMQADGPRGCRFAGQWFPESQSWHPSVPPFGEMSCITCRCGAGVPHCERDDCSLPLSCGSGKESRCCSRCTAHRRPAPETRTDPELEKEAEGS

SEQ ID NO: 749115 - protein, 933 aa, Homo sapiens
MPSLPAPPAPLLLLGLLLLGSRPARGAGPEPPVLPIRSEKEPLPVRGAAGCTFGGKVYALDETWHPDLGEPFGVMRCVLCACEATGTLRPREMKSLSRVTQLPQWGRRTRGPGRVSCKNIKPECPTPACGQPRQLPGHCCQTCPQERSSSERQPSGLSFEYPRDPEHRSYSDRGEPGAEERARGDGHTDFVALLTGPRSQAVARARVSLLRSSLRFSISYRRLDRPTRIRFSDSNGSVLFEHPAAPTQDGLVCGVWRAVPRLSLRLLRAEQLHVALVTLTHPSGEVWGPLIRHRALAAETFSAILTLEGPPQQGVGGITLLTLSDTEDSLHFLLLFRGLLEPRSGGLTQVPLRLQILHQGQLLRELQANVSAQEPGFAEVLPNLTVQEMDWLVLGELQMALEWAGRPGLRISGHIAARKSCDVLQSVLCGADALIPVQTGAAGSASLTLLGNGSLIYQAVGICPGLGARGAHMLLQNELFLNVGTKDFPDGELRGHVAALPYCGHSARHDTLPVPLAGALVLPPVKSQAAGHAWLSLDTHCHLHYEVLLAGLGGSEQGTVTAHLLGPPGTPGPRRLLKGFYGSEAQGVVKDLEPELLRHLAKGMASLMITTKGSPRGELRGQVHIANQCEVGGLRLEAAGAEGVRALGAPDTASAAPPVVPGLPALAPAKPGGPGRPRDPNTCFFEGQQRPHGARWAPNYDPLCSLCTCQRRTVICDPVVCPPPSCPHPVQAPDQCCPVCPEKQDVRDLPGLPRSRDPGEGCYFDGDRSWRAAGTRWHPVVPPFGLIKCAVCTCKGGTGEVHCEKVQCPRLACAQPVRVNPTDCCKQCPVGSGAHPQLGDPMQADGPRGCRFAGQWFPESQSWHPSVPPFGEMSCITCRCGAGVPHCERDDCSLPLSCGSGKESRCCSRCTAHRRPAPETRTDPELEKEAEGS

SEQ ID NO: 749116 - protein, 808 aa, Homo sapiens
MPSLPAPPAPLLLLGLLLLGSRPARGAGPEPPVLPIRSEKEPLPVRGAAGCTFGGKVYALDETWHPDLGEPFGVMRCVLCACEATGTLRPREMKSLSRVTQLPQWGRRTRGPGRVSCKNIKPECPTPACGQPRQLPGHCCQTCPQERSSSERQPSGLSFEYPRDPEHRSYSDRGEPGAEERARGDGHTDFVALLTGPRSQAVARARVSLLRSSLRFSISYRRLDRPTRIRFSDSNGSVLFEHPAAPTQDGLVCGVWRAVPRLSLRLLRAEQLHVALVTLTHPSGEVWGPLIRHRALAAETFSAILTLEGPPQQGVGGITLLTLSDTEDSLHFLLLFRGLLEPRSGGLTQVPLRLQILHQGQLLRELQANVSAQEPGFAEVLPNLTVQEMDWLVLGELQMALEWAGRPGLRISGHIAARKSCDVLQSVLCGADALIPVQTGAAGSASLTLLGNGSLIYQVQVVGTSSEVVAMTLETKPQRRDQRTVLCHMAGLQPGGHTAVGICPGLGARGAHMLLQNELFLNVGTKDFPDGELRGHVAALPYCGHSARHDTLPVPLAGALVLPPVKSQAAGHAWLSLDTHCHLHYEVLLAGLGGSEQGTVTAHLLGPPGTPGPRRLLKGFYGSEAQGVVKDLEPELLRHLAKGMASLMITTKGSPRGELRGQVHIANQCEVGGLRLEAAGAEGVRALGAPDTASAAPPVVPGLPALAPAKPGGPGRPRDPNTCFFEGQQRPHGARWAPNYDPLCSLCTCQRRTVICDPVVCPPPSCPHPVQAPDQCCPVCPEKQDVRDLPGLPRSRDPGEGGHWRGAL

SEQ ID NO: 749117 - protein, 390 aa, Homo sapiens
VRSLAAPGLAGEPAMRGKTFRFEMQRDLVSFPLSPAVRVKLVSAGFQTAEELLEVKPSELSKEVGISKAEALETLQIIRRECLTNKPRYAGTSESHKKCTALELLEQEHTQGFIITFCSALDDILGGGVPLMKTTEICGAPGVGKTQLCMQLAVDVQIPECFGGVAGEAVFIDTEGSFMVDRVVDLATACIQHLQLIAEKHKGEEHRKALEDFTLDNILSHIYYFRCRDYTELLAQVYLLPDFLSEHSKVRLVIVDGIAFPFRHDLDDLSLRTRLLNGLAQQMISLANNHRLAVILTNQMTTKIDRNQALLVPALGESWGHAATIRLIFHWDRKQRLATLYKSPSQKECTVLFQIKPQGFRDTVVTSACSLQTEGSLSTRKRSRDPEEEL

SEQ ID NO: 749118 - protein, 148 aa, Homo sapiens
VRSLAAPGLAGEPAMRGKTFRFEMQRDLVSFPLSPAVRVKLVSAGFQTAEELLEVKPSELSKEVGISKAEALETLQIIRRECLTNKPRYAGTSESHKKCTALELLEQEHTQGFIITFCSALDDILGGGVPLMKTTEICGAPGVGKTQL

SEQ ID NO: 749119 - protein, 149 aa, Homo sapiens
VRSLAAPGLAGEPAMRGKTFRFEMQRDLVSFPLSPAVRVKLVSAGFQTAEELLEVKPSELSKEVGISKAEALETLQIIRRECLTNKPRYAGTSESHKKCTALELLEQEHTQGFIITFCSALDDILGGGVPLMKTTEICGAPGVGKTQLW

SEQ ID NO: 749120 - protein, 149 aa, Homo sapiens; identical to SEQ ID NO: 749119

SEQ ID NO: 749121 - protein, 80 aa, Homo sapiens
PGGGEPPPPPPPHPPHFPPLPPPPRGPFFFPKSPPPPEVPPLIFDPPPGPPPPLFFFPPKKKKKGKKPLYFWPEPPEEEL

SEQ ID NO: 749122 - protein, 66 aa, Homo sapiens [sequence omitted]

SEQ ID NO: 749123 - protein, 430 aa, Homo sapiens
VRSLAAPGLAGEPAMRGKTFRFEMQRDLVSFPLSPAVRVKLVSAGFQTAEELLEVKPSELSKEVGISKAEALETLQIIRRECLTNKPRYAGTSESHKKCTALELLEQEHTQGFIITFCSALDDILGGGVPLMKTTEICGAPGVGKTQLCMQLAVDVQIPECFGGVAGEAVFIDTEGSFMVDRVVDLATACIQHLQLIAEKHKGEEHRKALEDFTLDNILSHIYYFRCRDYTELLAQVYLLPDFLSEHSKAHCSSRITLLLCGVALPLPLSARAPPSETKDDIALPPGLMVRLVIVDGIAFPFRHDLDDLSLRTRLLNGLAQQMISLANNHRLAVILTNQMTTKIDRNQALLVPALGESWGHAATIRLIFHWDRKQRLATLYKSPSQKECTVLFQIKPQGFRDTVVTSACSLQTEGSLSTRKRSRDPEEEL

SEQ ID NO: 749124 - protein, 253 aa, Homo sapiens
VRSLAAPGLAGEPAMRGKTFRFEMQRDLVSFPLSPAVRVKLVSAGFQTAEELLEVKPSELSKEVGISKAEALETLQIIRRECLTNKPRYAGTSESHKKCTALELLEQEHTQGFIITFCSALDDILGGGVPLMKTTEICGAPGVGKTQLCMQLAVDVQIPECFGGVAGEAVFIDTEGSFMVDRVVDLATACIQHLQLIAEKHKGEEHRKALEDFTLDNILSHIYYFRCRDYTELLAQVYLLPDFLSEHSKPQTS

SEQ ID NO: 749125 - protein, 66 aa, Homo sapiens [sequence omitted]

SEQ ID NO: 749126 - protein, 319 aa, Homo sapiens
VRSLAAPGLAGEPAMRGKTFRFEMQRDLVSFPLSPAVRVKLVSAGFQTAEELLEVKPSELSKEVGISKAEALETLQIIRRECLTNKPRYAGTSESHKKCTALELLEQEHTQGFIITFCSALDDILGGGVPLMKTTEICGAPGVGKTQLCMQLAVDVQIPECFGGVAGEAVFIDTEGSFMVDRVVDLATACIQHLQLIAEKHKGEEHRKALEDFTLDNILSHIYYFRCRDYTELLAQVYLLPDFLSEHSKVRLVIVDGIAFPFRHDLDDLSLRTRLLNGLAQQMISLANNHRLAVILTNQMTTKIDRNQALLVPALASGI

SEQ ID NO: 749127 - protein, 66 aa, Homo sapiens [sequence omitted]

SEQ ID NO: 749128 - protein, 259 aa, Homo sapiens
MKTTEICGAPGVGKTQLCMQLAVDVQIPECFGGVAGEAVFIDTEGSFMVDRVVDLATACIQHLQLIAEKHKGEEHRKALEDFTLDNILSHIYYFRCRDYTELLAQVYLLPDFLSEHSKVRLVIVDGIAFPFRHDLDDLSLRTRLLNGLAQQMISLANNHRLAVILTNQMTTKIDRNQALLVPALGESWGHAATIRLIFHWDRKQRLATLYKSPSQKECTVLFQIKPQGFRDTVVTSACSLQTEGSLSTRKRSRDPEEEL

SEQ ID NO: 749129 - protein, 342 aa, Homo sapiens
AIWNDSLNPPPLTAEVGISKAEALETLQIIRRECLTNKPRYAGTSESHKKCTALELLEQEHTQGFIITFCSALDDILGGGVPLMKTTEICGAPGVGKTQLCMQLAVDVQIPECFGGVAGEAVFIDTEGSFMVDRVVDLATACIQHLQLIAEKHKGEEHRKALEDFTLDNILSHIYYFRCRDYTELLAQVYLLPDFLSEHSKVRLVIVDGIAFPFRHDLDDLSLRTRLLNGLAQQMISLANNHRLAVILTNQMTTKIDRNQALLVPALGESWGHAATIRLIFHWDRKQRLATLYKSPSQKECTVLFQIKPQGFRDTVVTSACSLQTEGSLSTRKRSRDPEEEL

SEQ ID NO: 749130 - protein, 356 aa, Homo sapiens
VRSLAAPGLAGEPAMRGKTFRFEMQRDLVSFPLSPAVRVKLVSAGFQTAEELLEVKPSELSKEVGISKAEALETLQIIRRECLTNKPRYAGTSESHKKCTALELLEQEHTQGFIITFCSALDDILGGGVPLMKTTEICGAPGVGKTQLCMQLAVDVQIPECFGGVAGEAVFIDTEGSFMVDRVVDLATACIQHLQLIAEKHKGEEHRKALEDFTLDNILSHIYYFRCRDYTELLAQVYLLPDFLSEHSKVRLVIVDGIAFPFRHDLDDLSLRTRLLNGLAQQMISLANNHRLAVILTNQMTTKIDRNQALLVPALGESWGHAATIRLIFHWDRKQSLRDLEILLLLLHVHCKQKVP

SEQ ID NO: 749131 - protein, 356 aa, Homo sapiens
VRSLAAPGLAGEPAMRGKTFRFEMQRDLVSFPLSPAVRVKLVSAGFQTAEELLEVKPSELSKEVGISKAEALETLQIIRRECLTNKPRYAGTSESHKKCTALELLEQEHTQGFIITFCSALDDILGGGVPLMKTTEICGAPGVGKTQLCMQLAVDVQIPECFGGVAGEAVFIDTEGSFMVDRVVDLATACIQHLQLIAEKHKGEEHRKALEDFTLDNILSHIYYFRCRDYTELLAQVYLLPDFLSEHSKVRLVIVDGIAFPFRHDLDDLSLRTRLLNGLAQQMISLANNHRLAVILTNQMTTKIDRNQALLVPALGWQHCTSHPARRNAQYCFKSNLRDLEILLLLLHVHCKQKVP

SEQ ID NO: 749132 - protein, 317 aa, Homo sapiens
VRSLAAPGLAGEPAMRGKTFRFEMQRDLVSFPLSPAVRVKLVSAGFQTAEELLEVKPSELSKEVGISKAEALETLQIIRRECLTNKPRYAGTSESHKKCTALELLEQEHTQGFIITFCSALDDILGGGVPLMKTTEICGAPGVGKTQLCMQLAVDVQIPECFGGVAGEAVFIDTEGSFMVDRVVDLATACIQHLQLIAEKHKGEEHRKALEDFTLDNILSHIYYFRCRDYTELLAQVYLLPDFLSEHSKVRLVIVDGIAFPFRHDLDDLSLRTRLLNGLAQQMISLANNHRLAVILTNQMTTKIDRNQALLVPALGG

SEQ ID NO: 749133 - protein, 233 aa, Homo sapiens
VRSLAAPGLAGEPAMRGKTFRFEMQRDLVSFPLSPAVRVKLVSAGFQTAEELLEVKPSELSKEVGISKAEALETLQIIRRECLTNKPRYAGTSESHKKCTALELLEQEHTQGFIITFCSALDDILGGGVPLMKTTEICGAPGVGKTQLCMQLAVDVQIPECFGGVAGEAVFIDTEGSFMVDRVVDLATACIQHLQLIAEKHKGEESGSTARAGVQWRNLGLLRPSPPRFKRFS

SEQ ID NO: 749134 - protein, 241 aa, Homo sapiens [sequence omitted]

SEQ ID NO: 749135 - protein, 148 aa, Homo sapiens; identical to SEQ ID NO: 749118

SEQ ID NO: 749136 - protein, 317 aa, Homo sapiens
VRSLAAPGLAGEPAMRGKTFRFEMQRDLVSFPLSPAVRVKLVSAGFQTAEELLEVKPSELSKEVGISKAEALETLQIIRRECLTNKPRYAGTSESHKKCTALELLEQEHTQGFIITFCSALDDILGGGVPLMKTTEICGAPGVGKTQLCMQLAVDVQIPECFGGVAGEAVFIDTEGSFMVDRVVDLATACIQHLQLIAEKHKGEEHRKALEDFTLDNILSHIYYFRCRDYTELLAQVYLLPDFLSEHSKVRLVIVDGIAFPFRHDLDDLSLRTRLLNGLAQQMISLANNHRLAVGNIVQVTQPEGMHSTVSNQTSGI

SEQ ID NO: 749137 - protein, 396 aa, Homo sapiens
VRSLAAPGLAGEPAMRGKTFRFEMQRDLVSFPLSPAVRVKLVSAGFQTAEELLEVKPSELSKEVGISKAEALETLQIIRRECLTNKPRYAGTSESHKKCTALELLEQEHTQGFIITFCSALDDILGGGVPLMKTTEICGAPGVGKTQLCMQLAVDVQIPECFGGVAGEAVFIDTEGSFMVDRVVDLATACIQHLQLIAEKHKGEEHRKALEDFTLDNILSHIYYFRCRDYTELLAQVYLLPDFLSEHSKAHCSSRITLLLCGVALPLPLSARAPPSETKDDIALPPGLMVRLVIVDGIAFPFRHDLDDLSLRTRLLNGLAQQMISLANNHRLAVILTNQMTTKIDRNQALLVPALGWQHCTSHPARRNAQYCFKSNLRDLEILLLLLHVHCKQKVP

SEQ ID NO: 749138 - protein, 66 aa, Homo sapiens [sequence omitted]

SEQ ID NO: 749139 - protein, 66 aa, Homo sapiens [sequence omitted]

SEQ ID NO: 749140 - protein, 66 aa, Homo sapiens [sequence omitted]

SEQ ID NO: 749141 - protein, 66 aa, Homo sapiens [sequence omitted]

SEQ ID NO: 749142 - protein, 66 aa, Homo sapiens [sequence omitted]

SEQ ID NO: 749143 - protein, 143 aa, Homo sapiens
RWQQLTAEQRELSLQAVIAWEIQNLPEEQRTGYMGPQECASKSAPVPNILFKSDASIDRNQALLVPALGESWGHAATIRLIFHWDRKQRLATLYKSPSQKECTVLFQIKPQGFRDTVVTSACSLQTEGSLSTRKRSRDPEEEL

SEQ ID NO: 749144 - protein, 177 aa, Homo sapiens
HLGGDTASQGGGRAGAPAGPAALREPGVAAPASLPPWRSSPAQPWHTPFLHTRTTCTSRTSSRGPYGALCRVPPQPHFTDSPLRPRDMQLSVHNHATCMGALKAVKVHLGPSPKPARGPAVNTGQALSGWDDHTLCFLATCQPPCNSVCLLPICCLCKQLLDPGTLGCWPGGVREGG

SEQ ID NO: 749145 - protein, 116 aa, Homo sapiens
PSSFFQGGGHSASTVSVFSSLGLPLEARGHACLGDPCPPKPSVCLCLFAVCPRLSVPTLVLAVNVNGPILSVLSDTHTPVSTPSVRHTLRLAGPPTAAAINARINTLCGSHSNWAS

SEQ ID NO: 749146 - protein, 298 aa, Homo sapiens
MAYMNPGPHYSVNALALSGPSVDLMHQAVPYPSAPRKQRRERTTFTRSQLEELEALFAKTQYPDVYAREEVALKINLPESRVQVWFKNRRAKCRQQRQQQKQQQQPPGGQAKARPAKRKAGTSPRPSTDVCPDPLGISDSYSPPLPGPSGSPTTAVATVSIWSPASESPLPEAQRAGLVASGPSLTSAPYAMTYAPASAFCSSPSAYGSPSSYFSGLDPYLSPMVPQLGGPALSPLSGPSVGPSLAQSPTSLSGQSYGAYSPVDSLEFKDPTGTWKFTYNPMDPLDYKDQSAWKFQIL

SEQ ID NO: 749147 - protein, 320 aa, Homo sapiens
MRPVLIPQPGPLTWASVSPKIMMAYMNPGPHYSVNALALSGPSVDLMHQAVPYPSAPRKQRRERTTFTRSQLEELEALFAKTQYPDVYAREEVALKINLPESRVQVWFKNRRAKCRQQRQQQKQQQQPPGGQAKARPAKRKAGTSPRPSTDVCPDPLGISDSYSPPLPGPSGSPTTAVATVSIWSPASESPLPEAQRAGLVASGPSLTSAPYAMTYAPASAFCSSPSAYGSPSSYFSGLDPYLSPMVPQLGGPALSPLSGPSVGPSLAQSPTSLSGQSYGAYSPVDSLEFKDPTGTWKFTYNPMDPLDYKDQSAWKFQIL

SEQ ID NO: 749148 - protein, 600 aa, Homo sapiens
MGKKLDLSKLTDEEAQHVLEVVQRDFDLRRKEEERLEALKGKIKKESSKRELLSDTAHLNETHCARCLQPYQLLVNSKRQCLECGLFTCKSCGRVHPEEQGWICDPCHLARVVKIGSLEWYYEHVKARFKRFGSAKVIRSLHGRLQGGAGPELISEERSGDSDQTDEDGEPGSEAQAQAQPFGSKKKRLLSVHDFDFEGDSDDSTQPQGHSLHLSSVPEARDSPQSLTDESCSEKAAPHKAEGLEEADTGASGCHSHPEEQPTSISPSRHGALAELCPPGGSHRMALGTAAALGSNVIRNEQLPLQYLADVDTSDEESIRAHVMASHHSKRRGRASSESQIFELNKHISAVECLLTYLENTVVPPLAKGLGAGVRTEADVEEEALRRKLEELTSNVSDQETSSEEEEAKDEKAEPNRDKSVGPLPQADPEVGTAAHQTNRQEKSPQDPGDPVQYNRTTDEELSELEDRVAVTASEVQQAESEVSDIESRIAALRAAGLTVKPSGKPRRKSNLPIFLPRVAGKLGKRPEDPNADPSSEAKAMAVPYLLRRKFSNSLKSQGKDDDSFDRKSVYRGSLTQRNPNARKGMASHTFAKPVVAHQS

SEQ ID NO: 749149 - protein, 572 aa, Homo sapiens
MGKKLDLSKLTDEEAQHVLEVVQRDFDLRRKEEERLEALKGKIKKESSKRELLSDTAHLNETHCARCLQPYQLLVNSKRQCLECGLFTCKSCGRVHPEEQGWICDPCHLARVVKIGSLEWYYEHVKARFKRFGSAKVIRSLHGRLQGGAGPELISEERSGDSDQTDEDGEPGSEAQAQAQPFGSKKKRLLSVHDFDFEGDSDDSTQPQGHSLHLSSVPEARDSPQSLTDESCSEKAAPHKAEGLEEADTGASGCHSHPEEQPTSISPSRHGALAELCPPGGSHRMALGTAAALGSNVIRNEQLPLQYLADVDTSDEESIRAHVMASHHSKRRGRASSESQGLGAGVRTEADVEEEALRRKLEELTSNVSDQETSSEEEEAKDEKAEPNRDKSVGPLPQADPEVGTAAHQTNRQEKSPQDPGDPVQYNRTTDEELSELEDRVAVTASEVQQAESEVSDIESRIAALRAAGLTVKPSGKPRRKSNLPIFLPRVAGKLGKRPEDPNADPSSEAKAMAVPYLLRRKFSNSLKSQGKDDDSFDRKSVYRGSLTQRNPNARKGMASHTFAKPVVAHQS

SEQ ID NO: 749150 - protein, 600 aa, Homo sapiens; identical to SEQ ID NO: 749148

SEQ ID NO: 749151 - protein, 600 aa, Homo sapiens; identical to SEQ ID NO: 749148

SEQ ID NO: 749152 - protein, 576 aa, Homo sapiens
MGIDSEGKKRTVEALKGKIKKESSKRELLSDTAHLNETHCARCLQPYQLLVNSKRQCLECGLFTCKSCGRVHPEEQGWICDPCHLARVVKIGSLEWYYEHVKARFKRFGSAKVIRSLHGRLQGGAGPELISEERSGDSDQTDEDGEPGSEAQAQAQPFGSKKKRLLSVHDFDFEGDSDDSTQPQGHSLHLSSVPEARDSPQSLTDESCSEKAAPHKAEGLEEADTGASGCHSHPEEQPTSISPSRHGALAELCPPGGSHRMALGTAAALGSNVIRNEQLPLQYLADVDTSDEESIRAHVMASHHSKRRGRASSESQIFELNKHISAVECLLTYLENTVVPPLAKGLGAGVRTEADVEEEALRRKLEELTSNVSDQETSSEEEEAKDEKAEPNRDKSVGPLPQADPEVGTAAHQTNRQEKSPQDPGDPVQYNRTTDEELSELEDRVAVTASEVQQAESEVSDIESRIAALRAAGLTVKPSGKPRRKSNLPIFLPRVAGKLGKRPEDPNADPSSEAKAMAVPYLLRRKFSNSLKSQGKDDDSFDRKSVYRGSLTQRNPNARKGMASHTFAKPVVAHQS

SEQ ID NO: 749153 - protein, 560 aa, Homo sapiens
MGKKLDLSKLTDEEAQHVLEVVQRDFDLRRKEEERLEALKGKIKKESSKRELLSDTAHLNETHCARCLQPYQLLVNSKRQCLECGLFTCKSCGRVHPEEQGWICDPCHLARVVKIGSLEWYYEHVKARFKRFGSAKVIRSLHGRLQGGAGPELISEERSGDSDQTDEDGEPGSEAQAQAQPFGSKSLTDESCSEKAAPHKAEGLEEADTGASGCHSHPEEQPTSISPSRHGALAELCPPGGSHRMALGTAAALGSNVIRNEQLPLQYLADVDTSDEESIRAHVMASHHSKRRGRASSESQIFELNKHISAVECLLTYLENTVVPPLAKGLGAGVRTEADVEEEALRRKLEELTSNVSDQETSSEEEEAKDEKAEPNRDKSVGPLPQADPEVGTAAHQTNRQEKSPQDPGDPVQYNRTTDEELSELEDRVAVTASEVQQAESEVSDIESRIAALRAAGLTVKPSGKPRRKSNLPIFLPRVAGKLGKRPEDPNADPSSEAKAMAVPYLLRRKFSNSLKSQGKDDDSFDRKSVYRGSLTQRNPNARKGMASHTFAKPVVAHQS

SEQ ID NO: 749154 - protein, 532 aa, Homo sapiens
MGKKLDLSKLTDEEAQHVLEVVQRDFDLRRKEEERLEALKGKIKKESSKRELLSDTAHLNETHCARCLQPYQLLVNSKRQCLECGLFTCKSCGRVHPEEQGWICDPCHLARVVKIGSLEWYYEHVKARFKRFGSAKVIRSLHGRLQGGAGPELISEERSGDSDQTDEDGEPGSEAQAQAQPFGSKSLTDESCSEKAAPHKAEGLEEADTGASGCHSHPEEQPTSISPSRHGALAELCPPGGSHRMALGTAAALGSNVIRNEQLPLQYLADVDTSDEESIRAHVMASHHSKRRGRASSESQGLGAGVRTEADVEEEALRRKLEELTSNVSDQETSSEEEEAKDEKAEPNRDKSVGPLPQADPEVGTAAHQTNRQEKSPQDPGDPVQYNRTTDEELSELEDRVAVTASEVQQAESEVSDIESRIAALRAAGLTVKPSGKPRRKSNLPIFLPRVAGKLGKRPEDPNADPSSEAKAMAVPYLLRRKFSNSLKSQGKDDDSFDRKSVYRGSLTQRNPNARKGMASHTFAKPVVAHQS

SEQ ID NO: 749155 - protein, 245 aa, Homo sapiens
YLEDPSGSVSESEGLGAGVRTEADVEEEALRRKLEELTSNVSDQETSSEEEEAKDEKAEPNRDKSVGPLPQADPEVGTAAHQTNRQEKSPQDPGDPVQYNRTTDEELSELEDRVAVTASEVQQAESEVSDIESRIAALRAAGLTVKPSGKPRRKSNLPIFLPRVAGKLGKRPEDPNADPSSEAKAMAVPYLLRRKFSNSLKSQGKDDDSFDRKSVYRGSLTQRNPNARKGMASHTFAKPVVAHQS

SEQ ID NO: 749156 - protein, 72 aa, Homo sapiens
DPIPSHSREAKAMAVPYLLRRKFSNSLKSQGKDDDSFDRKSVYRGSLTQRNPNARKGMASHTFAKPVVAHQS

SEQ ID NO: 749157 - protein, 75 aa, Homo sapiens
AVPEGKDEPYVRVMAMAVPYLLRRKFSNSLKSQGKDDDSFDRKSVYRGSLTQRNPNARKGMASHTFAKPVVAHQS

SEQ ID NO: 749158 - protein, 596 aa, Homo sapiens
MGKKLDLSKLTDEEAQHVLEVVQRDFDLRRKEEERLEALKGKIKKESSKRELLSDTAHLNETHCARCLQPYQLLVNSKRQCLECGLFTCKSCGRVHPEEQGWICDPCHLARVVKIGSLEWYYEHVKARFKRFGSAKVIRSLHGRLQGGAGPELISEERSGDSDQTDEDGEPGSEAQAQAQPFGSKKKRLLSVHDFDFEGDSDDSTQPQGHSLHLSSVPEARDSPQSLTDESCSEKAAPHKAEGLEEADTGASGCHSHPEEQPTSISPSRHGALAELCPPGGSHRMALGTAAALGSNVIRNEQLPLQYLADVDTSDEESIRAHVMASHHSKRRGRASSESQIFELNKHISAVECLLTYLENTVVPPLAKGLGAGVRTEADVEEEALRRKLEELTSNVSDQETSSEEEEAKDEKAEPNRDKSVGPLPQADPEVGTAAHQTNRQEKSPQDPGDPVQYNRTTDEELSELEDRVAVTASEVQQAESEVSDIESRIAALRAAGLTVKPSGKPRRKSNLPIFLPRVAGKLGKRPEDPNADPSSEAKAMAVPYLLRRKFSNSLKSQGKDDDSFDRKSVYRGSLTQRNPNARKGMASHTFASPSQ

SEQ ID NO: 749159 - protein, 506 aa, Homo sapiens
MGKKLDLSKLTDEEAQHVLEVVQRDFDLRRKEEERLEALKGKIKKESSKRELLSDTAHLNETHCARCLQPYQLLVNSKRQCLECGLFTCKSCGRVHPEEQGWICDPCHLARVVKIGSLEWYYEHVKARFKRFGSAKVIRSLHGRLQGGAGPELISEERSGDSDQTDEDGEPGSEAQAQAQPFGSKKKRLLSVHDFDFEGDSDDSTQPQGHSLHLSSVPEARDSPQSLTDESCSEKAAPHKAEGLEEADTGASGCHSHPEEQPTSISPSRHGALAELCPPGGSHRMALGTAAALGSNVIRNEQLPLQYLADVDTSDEESIRAHVMASHHSKRRGRASSESQIFELNKHISAVECLLTYLENTVVPPLAKGLGAGVRTEADVEEEALRRKLEELTSNVSDQETSSEEEEAKDEKAEPNRDKSVGPLPQADPEVGTAAHQTNRQEKSPQDPGDPVQYNRTTAILSLIGSVLSTIHSHRPNEKQEGAPSTWTPTCKWTATFSPALLTWVY

SEQ ID NO: 749160 - protein, 365 aa, Homo sapiens
MGKKLDLSKLTDEEAQHVLEVVQRDFDLRRKEEERLEALKGKIKKESSKRELLSDTAHLNETHCARCLQPYQLLVNSKRQCLECGLFTCKSCGRVHPEEQGWICDPCHLARVVKIGSLEWYYEHVKARFKRFGSAKVIRSLHGRLQGGAGPELISEERSGDSDQTDEDGEPGSEAQAQAQPFGSKKKRLLSVHDFDFEGDSDDSTQPQGHSLHLSSVPEARDSPQSLTDESCSEKAAPHKAEGLEEADTGASGCHSHPEEQPTSISPSRHGALAELCPPGGSHRMALGTAAALGSNVIRNEQLPLQYLADVDTSDEESIRAHVMASHHSKRRGRASSESQVTVAGKTSVLSFLWVESFYLHTKSL

SEQ ID NO: 749161 - protein, 248 aa, Homo sapiens
MGKKLDLSKLTDEEAQHVLEVVQRDFDLRRKEEERLEALKGKIKKESSKRELLSDTAHLNETHCARCLQPYQLLVNSKRQCLECGLFTCKSCGRVHPEEQGWICDPCHLARVVKIGSLEWYYEHVKARFKRFGSAKVIRSLHGRLQGGAGPELISEERSGDSDQTDEDGEPGSEAQAQAQPFGSKKKRLLSVHDFDFEGDSDDSTQPQGHSLHLSSVPEARDSPQVSGSSCLSPAPPRNLSGRCSGPR

SEQ ID NO: 749162 - protein, 163 aa, Homo sapiens [sequence omitted]

SEQ ID NO: 749163 - protein, 600 aa, Homo sapiens; identical to SEQ ID NO: 749148

SEQ ID NO: 749164 - protein, 548 aa, Homo sapiens
MGKKLDLSKLTDEEAQHVLEVVQRDFDLRRKEEERLEALKGKIKKESSKRELLSDTAHLNETHCARCLQPYQLLVNSKRQCLECGLFTCKSCGRVHPEEQGWICDPCHLARVVKIGSLEWYYEHVKARFKRFGSAKVIRSLHGRLQGGAGPELISEERSGDSDQTDEDGEPGSEAQAQAQPFGSKKKRLLSVHDFDFEGDSDDSTQPQGHSLHLSSVPEARDSPQSLTDESCSEKAAPHKAEGLEEADTGASGCHSHPEEQPTSISPSRHGALAELCPPGGSHRMALGTAAALGSNVIRNEQLPLQYLADVDTSDEESIRAHVMASHHSKRRGRASSESQIFELNKHISAVECLLTYLENTVVPPLAKGLGAGVRTEADVEEEALRRKLEELTSNVSDQETSSEEEEAKDEKAEPNRDKSVGPLPQADPEVSDIESRIAALRAAGLTVKPSGKPRRKSNLPIFLPRVAGKLGKRPEDPNADPSSEAKAMAVPYLLRRKFSNSLKSQGKDDDSFDRKSVYRGSLTQRNPNARKGMASHTFAKPVVAHQS

SEQ ID NO: 749165 - protein, 484 aa, Homo sapiens
MDRLVDGWVDGLTNGLFPDCLSLGGVMQVSIAAGPELISEERSGDSDQTDEDGEPGSEAQAQAQPFGSKKKRLLSVHDFDFEGDSDDSTQPQGHSLHLSSVPEARDSPQSLTDESCSEKAAPHKAEGLEEADTGASGCHSHPEEQPTSISPSRHGALAELCPPGGSHRMALGTAAALGSNVIRNEQLPLQYLADVDTSDEESIRAHVMASHHSKRRGRASSESQIFELNKHISAVECLLTYLENTVVPPLAKGLGAGVRTEADVEEEALRRKLEELTSNVSDQETSSEEEEAKDEKAEPNRDKSVGPLPQADPEVGTAAHQTNRQEKSPQDPGDPVQYNRTTDEELSELEDRVAVTASEVQQAESEVSDIESRIAALRAAGLTVKPSGKPRRKSNLPIFLPRVAGKLGKRPEDPNADPSSEAKAMAVPYLLRRKFSNSLKSQGKDDDSFDRKSVYRGSLTQRNPNARKGMASHTFAKPVVAHQS

SEQ ID NO: 749166 - protein, 123 aa, Homo sapiens
MAESEVSDIESRIAALRAAGLTVKPSGKPRRKSNLPIFLPRVAGKLGKRPEDPNADPSSEAKAMAVPYLLRRKFSNSLKSQGKDDDSFDRKSVYRGSLTQRNPNARKGMASHTFAKPVVAHQS

SEQ ID NO: 749167 - protein, 131 aa, Homo sapiens
  misc_feature (32)..(34): Xaa can be any naturally occurring amino acid
  misc_feature (36)..(36): Xaa can be any naturally occurring amino acid
  misc_feature (43)..(43): Xaa can be any naturally occurring amino acid
  misc_feature (71)..(71): Xaa can be any naturally occurring amino acid
  misc_feature (89)..(89): Xaa can be any naturally occurring amino acid
GPIHKQPKGGVRVRRCISSQSTAESEFQTCIXXXSXDFAGSRXASGSPEESNSDDSPRVLELQRQRHKQTXSEPGMVCLSLEKSVILKXSKDDDSFDRKSVYRGSLTQRNPNARKGMASHTFAKPVVAHQS

SEQ ID NO: 749168 - protein, 600 aa, Homo sapiens; identical to SEQ ID NO: 749148

SEQ ID NO: 749169 - protein, 381 aa, Homo sapiens
MGKKLDLSKLTDEEAQHVLEVVQRDFDLRRKEEERLEALKGKIKKESSKRELLSDTAHLNETHCARCLQPYQLLVNSKRQCLECGLFTCKSCGRVHPEEQGWICDPCHLARVVKIGSLEWYYEHVKARFKRFGSAKVIRSLHGRLQGGAGPELISEERSGDSDQTDEDGEPGSEAQAQAQPFGSKKKRLLSVHDFDFEGDSDDSTQPQGHSLHLSSVPEARDSPQSLTDESCSEKAAPHKAEGLEEADTGASGCHSHPEEQPTSISPSRHGALAELCPPGGSHRMALGTAAALGSNVIRNEQLPLQYLADVDTSDEESIRAHVMASHHSKRRGRASSESQIFELNKHISAVECLLTYLENTVVPPLAKAERHSRSFHRGPL

SEQ ID NO: 749170 - protein, 192 aa, Homo sapiens
MGKKLDLSKLTDEEAQHVLEVVQRDFDLRRKEEERLEALKGKIKKESSKRELLSDTAHLNETHCARCLQPYQLLVNSKRQCLECGLFTCKSCGRVHPEEQGWICDPCHLARVVKIGSLEWYYEHVKARFKRFGSAKVIRSLHGRLQGGAGPELISEERSGDSDQTDEDGEPGSEAQAQAQPFGSKPTILSDL

SEQ ID NO: 749171 - protein, 126 aa, Homo sapiens
MGKKLDLSKLTDEEAQHVLEVVQRDFDLRRKEEERLEALKGKIKKESSKRELLSDTAHLNETHCARCLQPYQLLVNSKRQCLECGLFTCKSCGRVHPEEQGWICDPCHLARVVKIASLSVDNHVDQ

SEQ ID NO: 749172 - protein, 368 aa, Homo sapiens
GRARMPGPVEGGCRASQVLTGKKLAGPGRGRAAAVAPPGVEGSSEMESRVADAGTGETARAAGGSPAVGCTTRGPVVSAPLGAARWKLLRQVLKQKHLDDCLRHVSVRRFESFNLFSVTEGKERETEEEVGAWVQYTSIFCPEYSISLRHNSGSLNVEDVLTSFDNTGNVCIWPSEEVLAYYCLKHNNIFRALAVCELGGGMTCLAGLMVAISADVKEVLLTDGNEKAIRNVQDIITRNQKAGVFKTQKISSCVLRWDNETDVSQLEGHFDIVMCADCLFLDQYRASLVDAIKRLLQPRGKAMVFAPRRGNTLNQFCNLAEKAGFCIQRHENYDEHISNFHSKLKKENPDIYEENLHYPLLLILTKHG

SEQ ID NO: 749173 - protein, 177 aa, Homo sapiens
GRARMPGPVEGGCRASQVLTGKKLAGPGRGRAAAVAPPGVEGSSEMESRVADAGTGETARAAGGSPAVGCTTRGPVVSAPLGAARWKLLRQVLKQKHLDDCLRHVSVRRFESFNLFSVTEGKERETEEEVGAWVQYTSIFCPEYSISLRHNSGSLNVEDVLTSFDNTGNVWEATRGK

SEQ ID NO: 749174 - protein, 170 aa, Homo sapiens
GRARMPGPVEGGCRASQVLTGKKLAGPGRGRAAAVAPPGVEGSSEMESRVADAGTGETARAAGGSPAVGCTTRGPVVSAPLGAARWKLLRQVLKQKHLDDCLRHVSVRRFESFNLFSVTEGKERETEEEVGAWVQYTSIFCPEYSISLRHNSGSLNVEDVLTSFDNTGNV

SEQ ID NO: 749175 - protein, 184 aa, Homo sapiens
GRARMPGPVEGGCRASQVLTGKKLAGPGRGRAAAVAPPGVEGSSEMESRVADAGTGETARAAGGSPAVGCTTRGPVVSAPLGAARWKLLRQVLKQKHLDDCLRHVSVRRFESFNLFSVTEGKERETEEEVGAWVQYTSIFCPEYSISLRHNSGSLNVEDVLTSFDNTGNVYTGSHSVAQAGVQW

SEQ ID NO: 749176 - protein, 177 aa, Homo sapiens; identical to SEQ ID NO: 749173

SEQ ID NO: 749177 - protein, 184 aa, Homo sapiens; identical to SEQ ID NO: 749175

SEQ ID NO: 749178 - protein, 180 aa, Homo sapiens
GRARMPGPVEGGCRASQVLTGKKLAGPGRGRAAAVAPPGVEGSSEMESRVADAGTGETARAAGGSPAVGCTTRGPVVSAPLGAARWKLLRQVLKQKHLDDCLRHVSVRRFESFNLFSVTEGKERETEEEVGAWVQYTSIFCPEYSISLRHNSGSLNVEDVLTSFDNTGNVCLHPHHLTIE

SEQ ID NO: 749179 - protein, 180 aa, Homo sapiens; identical to SEQ ID NO: 749178

SEQ ID NO: 749180 - protein, 180 aa, Homo sapiens; identical to SEQ ID NO: 749178

SEQ ID NO: 749181 - protein, 170 aa, Homo sapiens; identical to SEQ ID NO: 749174

SEQ ID NO: 749182 - protein, 184 aa, Homo sapiens; identical to SEQ ID NO: 749175

SEQ ID NO: 749183 - protein, 439 aa, Homo sapiens
ARGRHRPVRTGRGSGLAHVYGGEAGGYMAGSVGLALCGQTLVVRGGSRFLATSIASSDDDSLFIYDCSAAEKKSQENKGEDAPLDQGSGAILASTFSKSGSYFALTDDSKRLILFRTKPWQCLSVRTVARRCTALTFIASEEKVLVADKSGDVYSFSVLEPHGCGRLELGHLSMLLDVAVSPDDRFILTADRDEKIRVSWAAAPHSIESFCLGHTEFVSRISVVPTQPGLLLSSSGDGTLRLWEYRSGRQLHCCHLASLQELVDPQAPQKFAASRIAFWCQENCVALLCDGTPVVYIFQLDARRQQLVYRQQLAFQHQVWDVAFEETQGLWVLQDCQEAPLVLYRPVGDQWQSVPESTVLKKVSGVLRGNWAMLEGSAGADASFSSLYKATFDNVTSYLKKKEERLQQQLEKKQRRRSPPPGPDGHAKKMRPGEATLSC

SEQ ID NO: 749184 - protein, 439 aa, Homo sapiens; identical to SEQ ID NO: 749183

SEQ ID NO: 749185 - protein, 349 aa, Homo sapiens
ARGRHRPVRTGRGSGLAHVYGGEAGGYMAGSVGLALCGQTLVVRGGSRFLATSIASSDDDSLFIYDCSAAEKKSQENKGEDAPLDQGSGAILASTFSKSGSYFALTDDSKRLILFRTKPWQCLSVRFVSRISVVPTQPGLLLSSSGDGTLRLWEYRSGRQLHCCHLASLQELVDPQAPQKFAASRIAFWCQENCVALLCDGTPVVYIFQLDARRQQLVYRQQLAFQHQVWDVAFEETQGLWVLQDCQEAPLVLYRPVGDQWQSVPESTVLKKVSGVLRGNWAMLEGSAGADASFSSLYKATFDNVTSYLKKKEERLQQQLEKKQRRRSPPPGPDGHAKKMRPGEATLSC

SEQ ID NO: 749186 - protein, 217 aa, Homo sapiens
ARGRHRPVRTGRGSGLAHVYGGEAGGYMAGSVGLALCGQTLVVRGGSRFLATSIASSDDDSLFIYDCSAAEKKSQENKGEDAPLDQGSGAILASTFSKSGSYFALTDDSKRLILFRTKPWQCLSVRTVARRCTALTFIASEEKVLVADKSGDVYSFSVLEPHGCGRLELGHLSMLLDVAVSPDDRFILTADRDEKIRVSWAAAPHSIESFCLGHTEW

SEQ ID NO: 749187 - protein, 102 aa, Homo sapiens
MNKVGPCCLVVPCEALFYQDSAENLAIPGGKAQNRPKEPEEVAIQEPRVGDTWLEGPRTRYRGKTVQRAVGPRAPPEHVRSEITDHETHPVGEQTRNTSRRT

SEQ ID NO: 749188 - protein, 105 aa, Homo sapiens
SQSAGIIGVSHCTQSIVFNSKHFLPDGLTLSPRLKCSGVISAHSSLNLPGSSSPPTLASQSAGITGTSHYAQPVFLHFDYSVRTVHPRSACEMLELGFQQLNARV

SEQ ID NO: 749189 - protein, 266 aa, Homo sapiens
MLLDVAVSPDDRFILTADRDEKIRVSWAAAPHSIESFCLGHTEFVSRISVVPTQPGLLLSSSGDGTLRLWEYRSGRQLHCCHLASLQELVDPQAPQKFAASRIAFWCQENCVALLCDGTPVVYIFQLDARRQQLVYRQQLAFQHQVWDVAFEETQGLWVLQDCQEAPLVLYRPVGDQWQSVPESTVLKKVSGVLRGNWAMLEGSAGADASFSSLYKATFDNVTSYLKKKEERLQQQLEKKQRRRSPPPGPDGHAKKMRPGEATLSC

SEQ ID NO: 749190 - protein, 439 aa, Homo sapiens; identical to SEQ ID NO: 749183

SEQ ID NO: 749191 - protein, 406 aa, Homo sapiens
ARGRHRPVRTGRGSGLAHVYGGEAGGYMAGSVGLALCGQTLVVRGGSRFLATSIASSDDDSLFIYDCSAAEKKSQENKGEDAPLDQGSGAILASTFSKSGSYFALTDDSKRLILFRTKPWQCLSVRTVARRCTALTFIASEEKVLVADKSGDVYSFSVLEPHGCGRLELGHLSMLLDVAVSPDDRFILTADRDEKIRVSWAAAPHSIESFCLGHTEFVSRISVVPTQPGLLLSSSGKFAASRIAFWCQENCVALLCDGTPVVYIFQLDARRQQLVYRQQLAFQHQVWDVAFEETQGLWVLQDCQEAPLVLYRPVGDQWQSVPESTVLKKVSGVLRGNWAMLEGSAGADASFSSLYKATFDNVTSYLKKKEERLQQQLEKKQRRRSPPPGPDGHAKKMRPGEATLSC

SEQ ID NO: 749192 - protein, 94 aa, Homo sapiens
LALLNFFGTTFSSWKTEHMARYRCLPPPTWPARLSRTLRCSWKLMGVSFWPSRTVARRCTALTFIASEEKVLVADKSGDVYSFSVLEPHGCGRL

SEQ ID NO: 749193 - protein, 132 aa, Homo sapiens
RRGLHRLGCWLQSGARGPAVLVIMLSFFVASTPVVYIFQLDARRQQLVYRQQLAFQHQVWDVAFEETQGLWVLQDCQEAPLVLYRPVGDQWQVRLGTFQMSYALPFHKPGGVGRQLCFLGPWVSLFQLSHFW

SEQ ID NO: 749194 - protein, 129 aa, Homo sapiens [sequence omitted]

SEQ ID NO: 749195 - protein, 128 aa, Homo sapiens
MLTWSRRRVRPACVRVWERASPLTRGPVMNRGCVFASRDLARCGALQKCGQAAAETASQEPPPASPASQRGGGTPGESLQTSSGRGEDAGSPRGRVGARAGGSLSPVRSCSCHLSRRAAGCSGWARAR

SEQ ID NO: 749196 - protein, 177 aa, Homo sapiens
QRQMIKEAFAGDDVIRDFLKEKREAVEASKPKDVDLTLPGWGEWGGVGLKPSAKKRRQFLIKAPEGPPRKDKNLPNVIISEKRNIHAAAHQVQVLPYPFTHHRQFERTIQTPIGSTWNTQRAFQKLTTPKVVTKPGHIIKPIKAEDVGYQSSSRSDLPVIQRNPKRITTRHNKEEKL

SEQ ID NO: 749197 - protein, 177 aa, Homo sapiens; identical to SEQ ID NO: 749196

SEQ ID NO: 749198 - protein, 177 aa, Homo sapiens; identical to SEQ ID NO: 749196

SEQ ID NO: 749199 - protein, 121 aa, Homo sapiens
MLALDSCRTHCWGHCSPLGQPSPWDLQLLISVSSLSLLKSSCGTFTHDADLMGPGTPVICRFKGDLTSICCQDMLGATLHHCQSHLKVHIHLSLPGSAPHLHTYLPGEASFICQDQPQHRL

SEQ ID NO: 749200 - protein, 117 aa, Homo sapiens
NVGENRREAIGVQNIWMCLQPAVSPIGPGGPKDAYSHPTSTCFLITSQSPAAVSWIVRENNCKLREAEGWKGPEAGLEKSIGPGEPALGQRLSPTQQHLAQQGPPPLALAHPTPALS

SEQ ID NO: 749201 - protein, 168 aa, Homo sapiens
WRSGPQSLSRRRGFSSLPLEPPRFPTFRSPLPAFSRHRRRRLPQAVSTEEKESYRMSAIQNLHSFDPFADASKGDDLLPAGTEDYIHIRIQQRNGRKTLTTVQGIADDYDKKKLVKAFKKKFACNGTVIEHPEYGEVIQLQGDQRKNICQFLVEIGLAKDDQLKVHGF

SEQ ID NO: 749202 - protein, 126 aa, Homo sapiens
LRLKGGDEKESYRMSAIQNLHSFDPFADASKGDDLLPAGTEDYIHIRIQQRNGRKTLTTVQGIADDYDKKKLVKAFKKKFACNGTVIEHPEYGEVIQLQGDQRKNICQFLVEIGLAKDDQLKVHGF

SEQ ID NO: 749203 - protein, 157 aa, Homo sapiens
MTCSGRASKGHIRPGPSPDDFSVVFCTRKTPGDRGDGSGILSLTALNELNLVFSDPFADASKGDDLLPAGTEDYIHIRIQQRNGRKTLTTVQGIADDYDKKKLVKAFKKKFACNGTVIEHPEYGEVIQLQGDQRKNICQFLVEIGLAKDDQLKVHGF

SEQ ID NO: 749204 - protein, 135 aa, Homo sapiens
WRSGPQSLSRRRGFSSLPLEPPRFPTFRSPLPAFSRHRRRRLPQAVSTEEKESYRMSAIQNLHSFDPFADASKGDDLLPAGTEDYIHIRIQQRNGRKTLTTVQGIADDYDKKKLVKAFKKFSYRVTNARTYASSS

SEQ ID NO: 749205 - protein, 68 aa, Homo sapiens
PSGDRGIQGEYHVMMKAEVGVMQLQAKECLRLPPSRQKLGRGKEGFPYRLQRKHGTTDILIQTQPSEL

SEQ ID NO: 749206 - protein, 112 aa, Homo sapiens
MSVSRTPLFRPFADASKGDDLLPAGTEDYIHIRIQQRNGRKTLTTVQGIADDYDKKKLVKAFKKKFACNGTVIEHPEYGEVIQLQGDQRKNICQFLVEIGLAKDDQLKVHGF

SEQ ID NO: 749207 - protein, 161 aa, Homo sapiens
MSVSRTPLFRPFADASKGDDLLPAGTEDYIHIRIQQRNGRKTLTTVQGIADDYDKKKLVKAFKKVESSVRFWESHNGFVHKGVPAVLYVLLAEGVINAFMLLLGLIRFPLCLQKFACNGTVIEHPEYGEVIQLQGDQRKNICQFLVEIGLAKDDQLKVHGF

SEQ ID NO: 749208 - protein, 110 aa, Homo sapiens
AQDKKWQKAQSCFSSLMGSQGTKQSRVLVSVTELREHTCLISQPDIGDLSGALQMLSSTVSGTEGSGNKDLFHWIKKKAFFNFYDGLFHPHSALTRRSHFSFFPTFVLSI

SEQ ID NO: 749209 - protein, 94 aa, Homo sapiens
KKVFFPRSADLVFNPRGSGRSGAGSTEPHRHLVTTRRHRPCPTPRFHLLLSGASCFCFGEKSRGDFAAQQVRRLHRLFYPFPFPTFRSAKGCLL

SEQ ID NO: 749210 - protein, 135 aa, Homo sapiens
MSVVHQLSAGWLLDHLSFINKINYQLHQHHEPCCRKKEFTTSVHFESLQMDSVSSSGVCAAFIASDSSTKPENDDGGNYEMFTRKFVFRPELFDVTKPYITPAVHKECQQSNEKEDLMNGVKKEISISIIGKVES

SEQ ID NO: 749211 - protein, 136 aa, Homo sapiens
MCVRTLVWEMKAFPHSLTCIGFLSSVSSFVYSNRTGTTEGFPTLFTFIGLFSSVNPFMNSKRTGTTKSFSTLLTFIGFFSNVSPLMSLKGLVIYEGFSTLFTFIGFFSSVTPFMSLKGFEITKGFLTLLTFIWLLK

SEQ ID NO: 749212 - protein, 107 aa, Homo sapiens
TVLPTSPSIAPSSSQASAHTGSDGRVTSYPGTSDLSPPHPTRRRLISPREGIRLTPVQGGCLESEPLSKSLRPGLTWWLCQSYLLTVKCSQNIWSKSANIGALRPTS

SEQ ID NO: 749213 - protein, 95 aa, Homo sapiens
TPTPATTCTRPRSPASDSPFWVPRSRPGLGQPRLGTGGSAKSPGTRHGVGGSDSGCGGQRRIPASLAHLHPQPTPSPKASLRLSLPNNNMMSEGL

SEQ ID NO: 749214 - protein, 541 aa, Homo sapiens
MDFESGQVDPLASVILPPNLLENLSPEDSVLVRRAQFTFFNKTGLFQDVGPQRKTLVSYVMACSIGNITIQNLKDPVQIKIKHTRTQEVHHPICAFWDLNKNKSFGGWNTSGCVAHRDSDASETVCLCNHFTHFGVLMDLPRSASQLDARNTKVLTFISYIGCGISAIFSAATLLTYVAFEKLRRDYPSKILMNLSTALLFLNLLFLLDGWITSFNVDGLCIAVAVLLHFFLLATFTWMGLEAIHMYIALVKVFNTYIRRYILKFCIIGWGLPALVVSVVLASRNNNEVYGKESYGKEKGDEFCWIQDPVIFYVTCAGYFGVMFFLNIAMFIVVMVQICGRNGKRSNRTLREEVLRNLRSVVSLTFLLGMTWGFAFFAWGPLNIPFMYLFSIFNSLQGLFIFIFHCAMKENVQKQWRRHLCCGRFRLADNSDWSKTATNIIKKSSDNLGKSLSSSSIGSNSTYLTSKSKSSSTTYFKRNSHTDSASMDKSLSKLAHADGDQTSIIPVHQVIDKVKGYCNAHSDNFYKNIIMSDTFSHSTKF

SEQ ID NO: 749215 - protein, 512 aa, Homo sapiens
MDFESGQVDPLASVILPPNLLENLSPEDSVLVRRAQFTFFNKTGLFQDVGPQRKTLVSYVMACSIGNITIQNLKDPVQIKIKHTRTQEVHHPICAFWDLNKNKSFGGWNTSGCVAHRDSDASETVCLCNHFTHFGVLMDLPRSASQLDARNTKVLTFISYIGCGISAIFSAATLLTYVAFEKLRRDYPSKILMNLSTALLFLNLLFLLDGWITSFNVDGLCIAVAVLLHFFLLATFTWMGLEAIHMYIALVKVFNTYIRRYILKFCIIGWGLPALVVSVVLASRNNNEVYGKESYGKEKGDEFCWIQDPVIFYVTCAGYFGVMFFLNIAMFIVVMVQICGRNGKRSNRTLREEVLRNLRSVVSLTFLLGMTWGFAFFAWGPLNIPFMYLFSIFNSLQGLFIFIFHCAMKENVQKQWRRHLCCGRFRLADNSDWSKTATNIIKKSSDNLGKSLSSSSIGSNSTYLTSKSKSSSTTYFKRNSHTDNVSYEHSFNKSGSLRQCFHGQVLVKTGPC

SEQ ID NO: 749216 - protein, 576 aa, Homo sapiens
FFVVTSRALKTIDELAFKIDLNSTSHVNITTRNLALSVSSLLPGTNAISNFSIGLPSNNESYFQMDFESGQVDPLASVILPPNLLENLSPEDSVLVRRAQFTFFNKTGLFQDVGPQRKTLVSYVMACSIGNITIQNLKDPVQIKIKHTRTQEVHHPICAFWDLNKNKSFGGWNTSGCVAHRDSDASETVCLCNHFTHFGVLMDLPRSASQLDARNTKVLTFISYIGCGISAIFSAATLLTYVAFEKLRRDYPSKILMNLSTALLFLNLLFLLDGWITSFNVDGLCIAVAVLLHFFLLATFTWMGLEAIHMYIALVKVFNTYIRRYILKFCIIGWGLPALVVSVVLASRNNNEVYGKESYGKEKGDEFCWIQDPVIFYVTCAGYFGVMFFLNIAMFIVVMVQICGRNGKRSNRTLREEVLRNLRSVVSLTFLLGMTWGFAFFAWGPLNIPFMYLFSIFNSLQGLFIFIFHCAMKENVQKQWRRHLCCGRFRLADNSDWSKTATNIIKKSSDNLGKSLSSSSIGSNSTYLTSKSKSSSTTYFKRNSHTDNVSYEHSFNKSGSLRQCFHGQVLVKTGPC

SEQ ID NO: 749217 - protein, 576 aa, Homo sapiens; identical to SEQ ID NO: 749216

SEQ ID NO: 749218 - protein, 403 aa, Homo sapiens
MDFESGQVDPLASVILPPNLLENLSPEDSVLVRRAQFTFFNKTGLFQDVGPQRKTLVSYVMACSIGNITIQNLKDPVQIKIKHTRTQEVHHPICAFWDLNKNKSFGGWNTSGCVAHRDSDASETVCLCNHFTHFGVLMDLPRSASQLDARNTKVLTFISYIGCGISAIFSAATLLTYVAFEKLRRDYPSKILMNLSTALLFLNLLFLLDGWITSFNVDGLCIAVAVLLHFFLLATFTWMGLEAIHMYIALVKVFNTYIRRYILKFCIIGWGLPALVVSVVLASRNNNEVYGKESYGKEKGDEFCWIQDPVIFYVTCAGYFGVMFFLNIAMFIVVMVQICGRNGKRSNRTLREEVLRNLRSVVSLTFLLGMTWGFAFFAWGPLNIPFMYLFSIFNSLQGKINCT

SEQ ID NO: 749219 - protein, 130 aa, Homo sapiens
MDRSNPVKPALDYFSNRLVNYQISVKCSNQFKLEVCLLNAENKVVDNQAGTQGQLKVLGANLWWPYLMHEHPAYLYSWEDGDCSHQSLGPLPACDLCDQLHLRSRQGGSVCGCDPCEQLLLLVSQLRAPG

SEQ ID NO: 749220 - protein, 50 aa, Homo sapiens
MVIAHTKALDPSQPVTFVTNSTYAADKGALYVDVIRVNSYYSWYRNYGHL

SEQ ID NO: 749221 - protein, 130 aa, Homo sapiens; identical to SEQ ID NO: 749219

SEQ ID NO: 749222 - protein, 199 aa, Homo sapiens
VIAHTKALDPSQPVTFVTNSTYAADKGALYVDVIRVNSYYSWYHNYGHLELIQLQLAAQFENWCKTSQSHYSERVWSGNACRVSPGLVNYQISVKCSNQFKLEVCLLNAENKVVDNQAGTQGQLKVLGANLWWPYLMHEHPAYLYSWEDGDCSHQSLGPLPACDLCDQLHLRSRQGGSVCGCDPCEQLLLLVSQLRAPG

SEQ ID NO: 749223 - protein, 114 aa, Homo sapiens
GDSLDGWGQNEERNGGSMWAQVSVLLIAPFAFKEIKLFLVCATAGETPEEAFPSLRSSGSCQVWSSARFWEPPRAGGRGVTIWGLWGQAGVCLLPEVLVALASLSRVALACREQ

SEQ ID NO: 749224 - protein, 112 aa, Homo sapiens
DPSRYLKRRRRRRKKEKGKRKRKRKKKEEEEEKEQEEEEEEEEQEEKKKKRKRKKKEERRKNKKKKEEKKWEESMNRSSFTKIGDNRETVFIASSCVGHLVSCGLRLTFYLV

SEQ ID NO: 749225 - protein, 439 aa, Homo sapiens
SGDLIPTSLCRRPFPILARPQGAQLLRTARYWESRRQGRGKGKGETVQTAWPPSCLCPRFARAPFSVTHTSPSPPPRLGLCIARLRRSAGAAPALPGLLSRVVEMSTEGGFGGTSSSDAQQSLQSFWPRVMEEIRNLTVKDFRVQELPLARIKKIMKLDEDVKMISAEAPVLFAKAAQIFITELTLRAWIHTEDNKRRTLQRNDIAMAITKFDQFDFLIDIVPRDELKPPKRQEEVRQSVTPAEPVQYYFTLAQQPTAVQVQGQQQGQQTTSSTTTIQPGQIIIAQPQQGQTTPVTMQVGEGQQVQIVQAQPQGQAQQAQSGTGQTMQVMQQIITNTGEIQQIPVQLNAGQLQYIRLAQPVSGTQVVQGQIQTLATNAQQITQTEVQQGQQQFSQFTDGQQLYQIQQVTMPAGQDLAQPMFIQSANQPSDGQAPQVTGD

SEQ ID NO: 749226 - protein, 439 aa, Homo sapiens; identical to SEQ ID NO: 749225

SEQ ID NO: 749227 - protein, 446 aa, Homo sapiens
MQFPVVEMSTEGGFGGTSSSDAQQSLQSFWPRVMEEIRNLTVKDFRVQELPLARIKKIMKLDEDVKMISAEAPVLFAKAAQIFITELTLRAWIHTEDNKRRTLQRNDIAMAITKFDQFDFLIDIVPRDELKPPKRQEEVRQSVTPAEPVQYYFTLAQQPTAVQVQGQQQGQQTTSSTTTIQPGQIIIAQPQQGQTTPVTMQVGEGQQVQIVQAQPQGQAQQAQSGTGQTMQVMQQIITNTGEIQQIPVQLNAGQLQYIRLAQPVSGTQVVQGQIQTLATNAQQITQTEVQQGQQQFSQFTDGQRNSVQQARVSELTGEAEPREVKATGNSTPCTSSLPTTHPPSHRAGASCVCCSQPQQSSTSPPPSDALQWVVVEVSGTPNQLETHRELHAPLPGMTSLSPLHPSQQLYQIQQVTMPAGQDLAQPMFIQSANQPSDGQAPQVTGD

SEQ ID NO: 749228 - protein, 165 aa, Homo sapiens
SGCKVSSGPPKRQEEVRQSVTPAEPVQYYFTLAQQPTAVQVQGQQQGQQTTSSTTTIQPGQIIIAQPQQGQTTPVTMQVGEGQQVQIVQAQPQGQAQQAQSGTGQTMQVMQQIITNTGEIQQIPVQLNAGQLQYIRLAQPVSGTQVVQGQIQNCIQRHLHPEGTS

SEQ ID NO: 749229 - protein, 562 aa, Homo sapiens
SGDLIPTSLCRRPFPILARPQGAQLLRTARYWESRRQGRGKGKGETVQTAWPPSCLCPRFARAPFSVTHTSPSPPPRLGLCIARLRRSAGAAPALPGLLSRVVEMSTEGGFGGTSSSDAQQSLQSFWPRVMEEIRNLTVKDFRVQELPLARIKKIMKLDEDVKMISAEAPVLFAKAAQIFITELTLRAWIHTEDNKRRTLQRNDIAMAITKFDQFDFLIDIVPRDELKPPKRQEEVRQSVTPAEPVQYYFTLAQQPTAVQVQGQQQGQQTTSSTTTIQPGQIIIAQPQQGQTTPVTMQVGEGQQVQIVQAQPQGQAQQAQSGTGQTMQVMQQIITNTGEIQQIPVQLNAGQLQYIRLAQPVSGTQVVQGQIQTLATNAQQGQRNASQGKPRRCLKETLQITQTEVQQGQQQFSQFTDGQRNSVQQARVSELTGEAEPREVKATGNSTPCTSSLPTTHPPSHRAGASCVCCSQPQQSSTSPPPSDALQWVVVEVSGTPNQLETHRELHAPLPGMTSLSPLHPSQQLYQIQQVTMPAGQDLAQPMFIQSANQPSDGQAPQVTGD

SEQ ID NO: 749230 - protein, 458 aa, Homo sapiens
SGDLIPTSLCRRPFPILARPQGAQLLRTARYWESRRQGRGKGKGETVQTAWPPSCLCPRFARAPFSVTHTSPSPPPRLGLCIARLRRSAGAAPALPGLLSRVVEMSTEGGFGGTSSSDAQQSLQSFWPRVMEEIRNLTVKDFRVQELPLARIKKIMKLDEDVKMISAEAPVLFAKAAQIFITELTLRAWIHTEDNKRRTLQRNDIAMAITKFDQFDFLIDIVPRDELKPPKRQEEVRQSVTPAEPVQYYFTLAQQPTAVQVQGQQQGQQTTSSTTTIQPGQIIIAQPQQGQTTPVTMQVGEGQQVQIVQAQPQGQAQQAQSGTGQTMQVMQQIITNTGEIQQIPVQLNAGQLQYIRLAQPVSGTQVVQGQIQTLATNAQQGQRNASQGKPRRCLKETLQITQTEVQQGQQQFSQFTDGQQLYQIQQVTMPAGQDLAQPMFIQSANQPSDGQAPQVTGD

SEQ ID NO: 749231 - protein, 439 aa, Homo sapiens; identical to SEQ ID NO: 749225

SEQ ID NO: 749232 - protein, 439 aa, Homo sapiens; identical to SEQ ID NO: 749225

SEQ ID NO: 749233 - protein, 377 aa, Homo sapiens
LASVQRYRPGNCASFSFDLSSLHGRLCQDEACPGTHAIKVVEMSTEGGFGGTSSSDAQQSLQSFWPRVMEEIRNLTVKDFRVQELPLARIKKIMKLDEDVKMISAEAPVLFAKAAQIFITELTLRAWIHTEDNKRRTLQRNDIAMAITKFDQFDFLIDIVPRDELKPPKRQEEVRQSVTPAEPVQYYFTLAQQPTAVQVQGQQQGQQTTSSTTTIQPGQIIIAQPQQGQTTPVTMQVGEGQQVQIVQAQPQGQAQQAQSGTGQTMQVMQQIITNTGEIQQIPVQLNAGQLQYIRLAQPVSGTQVVQGQIQTLATNAQQITQTEVQQGQQQFSQFTDGQQLYQIQQVTMPAGQDLAQPMFIQSANQPSDGQAPQVTGD

SEQ ID NO: 749234 - protein, 484 aa, Homo sapiens
SGDLIPTSLCRRPFPILARPQGAQLLRTARYWESRRQGRGKGKGETVQTAWPPSCLCPRFARAPFSVTHTSPSPPPRLGLCIARLRRSAGAAPALPGLLSRDEVSLCCQGWCARLECRGLIMTHCSLHLLGLKQSSYFSLLSSWDTVVEMSTEGGFGGTSSSDAQQSLQSFWPRVMEEIRNLTVKDFRVQELPLARIKKIMKLDEDVKMISAEAPVLFAKAAQIFITELTLRAWIHTEDNKRRTLQRNDIAMAITKFDQFDFLIDIVPRDELKPPKRQEEVRQSVTPAEPVQYYFTLAQQPTAVQVQGQQQGQQTTSSTTTIQPGQIIIAQPQQGQTTPVTMQVGEGQQVQIVQAQPQGQAQQAQSGTGQTMQVMQQIITNTGEIQQIPVQLNAGQLQYIRLAQPVSGTQVVQGQIQTLATNAQQITQTEVQQGQQQFSQFTDGQQLYQIQQVTMPAGQDLAQPMFIQSANQPSDGQAPQVTGD

SEQ ID NO: 749235 - protein, 421 aa, Homo sapiens
SGDLIPTSLCRRPFPILARPQGAQLLRTARYWESRRQGRGKGKGETVQTAWPPSCLCPRFARAPFSVTHTSPSPPPRLGLCIARLRRSAGAAPALPGLLSRVVEMSTEGGFGGTSSSDAQQSLQSFWPRVMEEIRNLTVKDFRVQELPLARIKKIMKLDEDVKMISAEAPVLFAKAAQIFITELTLRAWIHTEDNKRRTLQRNDIAMAITPPKRQEEVRQSVTPAEPVQYYFTLAQQPTAVQVQGQQQGQQTTSSTTTIQPGQIIIAQPQQGQTTPVTMQVGEGQQVQIVQAQPQGQAQQAQSGTGQTMQVMQQIITNTGEIQQIPVQLNAGQLQYIRLAQPVSGTQVVQGQIQTLATNAQQITQTEVQQGQQQFSQFTDGQQLYQIQQVTMPAGQDLAQPMFIQSANQPSDGQAPQVTGD

SEQ ID NO: 749236 - protein, 417 aa, Homo sapiens
SGDLIPTSLCRRPFPILARPQGAQLLRTARYWESRRQGRGKGKGETVQTAWPPSCLCPRFARAPFSVTHTSPSPPPRLGLCIARLRRSAGAAPALPGLLSRVVEMSTEGGFGGTSSSDAQQSLQSFWPRVMEEIRNLTVKDFRVQELPLARIKKIMKLDEDVKMISAEAPVLFAKAAQIFITELTLRAWIHTEDNKRRTLQRNDIAMAITKFDQFDFLIDIVPRDELKPPKRQEEVRQSVTPAEPVQYYFTLAQQPTAVQVQGQQQGQQTTSSTTTIQPGQIIIAQPQQGQTTPVTMQVGEGQQVQIVQAQPQGQAQQAQSGTGQTMQVMQQIITNTGEIQQIPVQLNAGQLQYIRLAQPVSGTQVVQGQIQTLATNAQQITQTEVQQGQQQFSQFTDGQVGYPTWAGQRVRICGAG

SEQ ID NO: 749237 - protein, 101 aa, Homo sapiens
IGPQLNVTGNVRRLPGNPPSFQPLWFEGNVDQIPRHLPPMLNITQTEVQQGQQQFSQFTDGQQLYQIQQVTMPAGQDLAQPMFIQSANQPSDGQAPQVTGD

SEQ ID NO: 749238 - protein, 355 aa, Homo sapiens
MSTEGGFGGTSSSDAQQSLQSFWPRVMEEIRNLTVKDFRVQELPLARIKKIMKLDEDVKMISAEAPVLFAKAAQIFITELTLRAWIHTEDNKRRTLQRNDIAMAITKFDQLIFLIDIVPRDELKPPKRQEEVRQSVTPAEPVQYYFTLAQQPTAVQVQGQQQGQQTTSSTTTIQPGQIIIAQPQQGQTTPVTMQVGEGQQVQMSRLSHRVKPNEAQSGTGQTMQVMQQIITNTGEIQQIPVQLKPAAAVYPLSPACIRHSSVQRTDPDTCTMSTDTQTEVQQTAASQPSSKMQGGLQIRKSMLGADLARRHPAATASREPQERLGVVGGGPKLDSPRGLPKGTREGTPRAKKISK

SEQ ID NO: 749239 - protein, 364 aa, Homo sapiens
LRVYLEPSESSMDKNRVAHGLPAKGHCGAALGRDSQLDFSIRPCNVSQHQLPTMLCPEEIEIMELTGRNSIDNIHRLTEARPSNYHETEAYRWRCFDWAGIIDTLLIHHFFYKAYVKRVLLKVEGQLPGSHELFHYLIRDLLAPGLVLCDELKPPKRQEEVRQSVTPAEPVQYYFTLAQQPTAVQVQGQQQGQQTTSSTTTIQPGQIIIAQPQQGQTTPVTMQVGEGQQVQIVQAQPQGQAQQAQSGTGQTMQVMQQIITNTGEIQQIPVQLNAGQLQYIRLAQPVSGTQVVQGQIQTLATNAQQITQTEVQQGQQQFSQFTDGQQLYQIQQVTMPAGQDLAQPMFIQSANQPSDGQAPQVTGD

SEQ ID NO: 749240 - protein, 484 aa, Homo sapiens; identical to SEQ ID NO: 749234

SEQ ID NO: 749241 - protein, 109 aa, Homo sapiens
MQQFSQFTDGQQLTITQTEVQQGQQQFSQFTDGQQLYQIQQVTMPAGQDLAQQYEEKAAAYDKLEKTKNRQQQDSCDDLVVDLGQPCGNIVSNLEKKQRQILNPLLARA

SEQ ID NO: 749242 - protein, 342 aa, Homo sapiens
MQFPVVEMSTEGGFGGTSSSDAQQSLQSFWPRVMEEIRNLTVKDFRVQELPLARIKKIMKLDEDVKMISAEAPVLFAKAAQIFITELTLRAWIHTEDNKRRTLQRNDIAMAITKFDQFDFLIDIVPRDELKPPKRQEEVRQSVTPAEPVQYYFTLAQQPTAVQVQGQQQGQQTTSSTTTIQPGQIIIAQPQQGQTTPVTMQVGEGQQVQIVQAQPQGQAQQAQSGTGQTMQVMQQIITNTGEIQQIPVQLNAGQLQYIRLAQPVSGTQVVQGQIQTLATNAQQITQTEVQQGQQQFSQFTDGQQLYQIQQVTMPAGQDLAQPMFIQSANQPSDGQAPQVTGD

SEQ ID NO: 749243 - protein, 439 aa, Homo sapiens; identical to SEQ ID NO: 749225

SEQ ID NO: 749244 - protein, 543 aa, Homo sapiens
SGDLIPTSLCRRPFPILARPQGAQLLRTARYWESRRQGRGKGKGETVQTAWPPSCLCPRFARAPFSVTHTSPSPPPRLGLCIARLRRSAGAAPALPGLLSRVVEMSTEGGFGGTSSSDAQQSLQSFWPRVMEEIRNLTVKDFRVQELPLARIKKIMKLDEDVKMISAEAPVLFAKAAQIFITELTLRAWIHTEDNKRRTLQRNDIAMAITKFDQFDFLIDIVPRDELKPPKRQEEVRQSVTPAEPVQYYFTLAQQPTAVQVQGQQQGQQTTSSTTTIQPGQIIIAQPQQGQTTPVTMQVGEGQQVQIVQAQPQGQAQQAQSGTGQTMQVMQQIITNTGEIQQIPVQLNAGQLQYIRLAQPVSGTQVVQGQIQTLATNAQQITQTEVQQGQQQFSQFTDGQRNSVQQARVSELTGEAEPREVKATGNSTPCTSSLPTTHPPSHRAGASCVCCSQPQQSSTSPPPSDALQWVVVEVSGTPNQLETHRELHAPLPGMTSLSPLHPSQQLYQIQQVTMPAGQDLAQPMFIQSANQPSDGQAPQVTGD

SEQ ID NO: 749245 - protein, 417 aa, Homo sapiens; identical to SEQ ID NO: 749236

SEQ ID NO: 749246 - protein, 328 aa, Homo sapiens
PGPYSGLCKDFRVQELPLARIKKIMKLDEDVKMISAEAPVLFAKAAQIFITELTLRAWIHTEDNKRRTLQRNDIAMAITKFDQIDFLIDIVPRDELKPPKRQEEVRQSVTPAEPVQYYFTLAQQPTAVQVQGQQQGQQTTSSTTTIQPGQIIIAQPQQGQTTPVTMQVGEGQQVQMSRLSHRVKPNKAQSGTGQTMQVMQQIITNTGEIQQIPVQLKPAAAVYPLSPACIRHSSVQRTDPDTCTMSTDTQTEVQQTAASQPSSKMQGGLQIRKSMLGADLARRHPAATASREPQERLGVVGGGPKLDSPRGLPKGTREGTPRAKKISK

SEQ ID NO: 749247 - protein, 69 aa, Homo sapiens
KGSGEVGTARIMRTMTSMTVLETTVIRFSLEITEAGVGTIIRPVLWIWGAELCSAMSESRGLPLIHSVI

SEQ ID NO: 749248 - protein, 106 aa, Homo sapiens
MVRDMQLKITPVKMAPVTFANIHKLHNTLLASPRGGRCFCTFLVGVSSGVATEEGNLAVSINIKNACWLGVVAHAYNPSTLGGRGGWITRSRAQDHPGQHGENPFL

SEQ ID NO: 749249 - protein, 86 aa, Homo sapiens
GLSIGDVAKKLGEMWNNTAADDKQPYEKKAAKLKEKYEKELLHIELKESLMQQKREFQGRKSKKNKEDEEDEEDEEEEDEEDDDDE

SEQ ID NO: 749250 - protein, 65 aa, Homo sapiens
MLLGPPFEFLERVSRVRRVWEDADEVTWEVQARGQSLSAEPFPRIHPLWSSYWNPTEIPLAEEIS

SEQ ID NO: 749251 - protein, 110 aa, Homo sapiens
LQTLGSCCSVVCFVPCVVLLGAHVSLEASLEEVADLAVPAPFHAPPKPLLALHQILDCPSPAVSPPLCIVLPNGHLFISSLYVQSAVQRGGRDKSLKNRITEKPKRIERK

SEQ ID NO: 749252 - protein, 166 aa, Homo sapiens
MLLEEVRAGDRLSGAAARGDVQEVRRLLHRELVHPDALNRFGKTALQVMMFGSTAIALELLKQGASPNVQDTSGTSPVHDAARTGFLDTLKVLVEHGADVNVPDGTGALPIHLAVQEGHTAVVSFLAAESDLHRRDARGLTPLELALQRGAQDLVDILQGHMVAPL

SEQ ID NO: 749253 - protein, 166 aa, Homo sapiens; identical to SEQ ID NO: 749252

SEQ ID NO: 749254 - protein, 209 aa, Homo sapiens
QLRSGRGREHVGSAPWRLPQRRRRRRLRADPARRGGGRAASVDMLLEEVRAGDRLSGAAARGDVQEVRRLLHRELVHPDALNRFGKTALQVMMFGSTAIALELLKQGASPNVQDTSGTSPVHDAARTGFLDTLKVLVEHGADVNVPDGTGALPIHLAVQEGHTAVVSFLAAESDLHRRDARGLTPLELALQRGAQDLVDILQGHMVAPL

SEQ ID NO: 749255 - protein, 123 aa, Homo sapiens
GRAPGGLFGPAPAGCSALTAPGWGGAGGFAGRQCRHAAGGGSRRRPAEWGGGPGRRAGGAPPSAPRAGASRRPQPLRQDGAAGEAGPVQVGAGRLSGMRIETPELLSGLLALVVTHWEPVLLL

SEQ ID NO: 749256 - protein, 410 aa, Homo sapiens
RGPTAPPRGRAGRAATAAEVQVPRGAAGSPSSPSASRPGPAPRPASLPPSQMQAAALPEEIRWLLEDAEEFLAEGLRNENLSAVARDHRDHILRGFQQIKARYYWDFQPQGGDIGQDSSDDNHSGTLGLSLTSDAPFLSDYQDEGMEDIVKGAQELDNVIKQGYLEKKSKDHSFFGSEWQKRWCVVSRGLFYYYANEKSKQPKGTFLIKGYSVRMAPHLRRDSKKESCFELTSQDRRSYEFTATSPAEARDWVDQISFLLKDLSSLTIPYEEDEEEEEKEETYDDIDGFDSPSCGSQCRPTILPGSVGIKEPTEEKEEEDIYEVLPDEEHDLEEDESGTRRKGVDYASYYQGLWDCHGDQPDELSFQRGDLIRILSKEYNMYGWWVGELNSLVGIVPKEYLTTAFEVEER

SEQ ID NO: 749257 - protein, 410 aa, Homo sapiens; identical to SEQ ID NO: 749256

SEQ ID NO: 749258 - protein, 265 aa, Homo sapiens
MEDIVKGAQELDNVIKQGYLEKKSKDHSFFGSEWQKRWCVVSRGLFYYYANEKSKQPKGTFLIKGYSVRMAPHLRRDSKKESCFELTSQDRRSYEFTATSPAEARDWVDQISFLLKDLSSLTIPYEEDEEEEEKEETYDDIDGFDSPSCGSQCRPTILPGSVGIKEPTEEKEEEDIYEVLPDEEHDLEEDESGTRRKGVDYASYYQGLWDCHGDQPDELSFQRGDLIRILSKEYNMYGWWVGELNSLVGIVPKEYLTTAFEVEER

SEQ ID NO: 749259 - protein, 267 aa, Homo sapiens
MHLLLFQLLVLLPLGKTTRHQDGRQNQSSLSPVLLPRNQRELPTGNHEEAEEKPDLFVAVPHLVATSPAGEGQRQREKMLSRFGRFWKKPEREMHPSRDSDSEPFPPGTQSLIQPIDGMKMEKSPLREEAKKFWHHFMFRKTPASQGVILPIKSHEVHWETCRTVPFSQTITHEGCEKVVVQNNLCFGKCGSVHFPGAAQHSHTSCSHCLPAKFTTMHLPLNCTELSSVIKVVMLVEECQCKVKTEHEDGHILHAGSQDSFIPGVSA

SEQ ID NO: 749260 - protein, 573 aa, Homo sapiens
MTNSKGRSITDKTSGGPSSGGGFVDWTLRLNTIQSDKFLNLLLSMVPVIYQKNQEDRHKKANGIWQDGLSTAVQTFSNRSEQHMEYHSFSEQSFHANNGHASSSCSQKYDDYANYNYCDGRETSETTAMLQDEDISSDGDEDAIVEVTPKLPKESSGIMALQILVPFLLAGFGTVSAGMVLDIVQHWEVFRKVTEVFILVPALLGLKGNLEMTLASRLSTAVNIGKMDSPIEKWNLIIGNLALKQVQATVVGFLAAVAAIILGWIPEGKYYLDHSILLCSSSVATAFIASLLQGIIMVGVIVGSKKTGINPDNVATPIAASFGDLITLAILAWISQGLYSCLETYYYISPLVGVFFLALTPIWIIIAAKHPATRTVLHSGWEPVITAMVISSIGGLILDTTVSDPNLVGIVVYTPVINGIGGNLVAIQASRISTYLHLHSIPGELPDEPKGCYYPFRTFFGPGVNNKSAQVLLLLVIPGHLIFLYTIHLMKSGHTSLTIIFIVVYLFGAVLQVFTLLWIADWMVHHFWRKGKDPDSFSIPYLTALGDLLGTALLALSFHFLWLIGDRDGDVGD

SEQ ID NO: 749261 - protein, 83 aa, Homo sapiens
  misc_feature (18)..(18): Xaa can be any naturally occurring amino acid
  misc_feature (31)..(31): Xaa can be any naturally occurring amino acid
QAAAPPGAQNPLSYLPPXGRVLLTLTLGSAXWMVHHFWRKGKDPDSFSIPYLTALGDLLGTALLALSFHFLWLIGDRDGDVGD

SEQ ID NO: 749262 - protein, 423 aa, Homo sapiens
MTNSKGRSITDKTSGGPSSGGGFVDWTLRLNTIQSDKFLNLLLSMVPVIYQKNQEDRHKKANGIWQDGLSTAVQTFSNRSEQHMEYHSFSEQSFHANNGHASSSCSQKYDDYANYNYCDGRETSETTAMLQDEDISSDGDEDAIVEVTPKLPKESSGIMALQILVPFLLAGFGTVSAGMVLDIVQHWEVFRKVTEVFILVPALLGLKGNLEMTLASRLSTAVNIGKMDSPIEKWNLIIGNLALKQVQATVVGFLAAVAAIILGWIPEGKYYLDHSILLCSSSVATAFIASLLQGIIMVGVIVGSKKTGINPDNVATPIAASFGDLITLAILAWISQGLYSCLETYYYISPLVGVFFLALTPIWIIIAAKHPATRTVLHSGWEPVITAMVISSIGGLILDTTVSDPNLVGIVVYTPVINDDMRK

SEQ ID NO: 749263 - protein, 573 aa, Homo sapiens; identical to SEQ ID NO: 749260

SEQ ID NO: 749264 - protein, 289 aa, Homo sapiens
MTNSKGRSITDKTSGGPSSGGGFVDWTLRLNTIQSDKFLNLLLSMVPVIYQKNQEDRHKKANGIWQDGLSTAVQTFSNRSEQHMEYHSFSEQSFHANNGHASSSCSQKYDDYANYNYCDGRETSETTAMLQDEDISSDGDEDAIVEVTPKLPKESSGIMALQILVPFLLAGFGTVSAGMVLDIVQVNIGKMDSPIEKWNLIIGNLALKQVQATVVGFLAAVAAIILGWIPEGKYYLDHSILLCSSSVATAFIASLLQELRWGYRGQETYNLIVLTMCIGTISAMVVAAY

SEQ ID NO: 749265 - protein, 298 aa, Homo sapiens
GRVGRHTISVRVKAAPYWLDEPKNLILAPGEDGRLVCRANGNPKPTVQWMVNGEPLQSAPPNPNREVAGDTIIFRDTQISSRAVYQCNTSNEHGYLLANAFVSVLDVPPRMLSPRNQLIRVILYNRTRLDCPFFGSPIPTLRWFKNGQGSNLDGGNYHVYENGSLEIKMIRKEDQGIYTCVATNILGKAENQVRLEVKDPTRIYRMPEDQVARRGTTVQLECRVKHDPSLKLTVSWLKDDEPLYIGNRMKKEDDSLTIFGVAERDQGSYTCVASTELDQDLAKAYLTVLGNCPCSPWH

SEQ ID NO: 749266 - protein, 1176 aa, Homo sapiens
AHGLVSALMRRLAARGAAGDAGEVAAPAADSSDSAQGRSPSPWRLIDLCAIWDAGVYLPSAAWNRASSGVARKRLNEAEKLSAVQEAQLKRLEVTRPRVLGSREQGQVPRMARQPPPPWVHAAFLLCLLSLGGAIEIPMDPSIQNELTQPPTITKQSAKDHIVDPRDNILIECEAKGNPAPSFHWTRNSRFFNIAKDPRVSMRRRSGTLVIDFRSGGRPEEYEGEYQCFARNKFGTALSNRIRLQVSKSPLWPKENLDPVVVQEGAPLTLQCNPPPGLPSPVIFWMSSSMEPITQDKRVSQGHNGDLYFSNVMLQDMQTDYSCNARFHFTHTIQQKNPFTLKVLTTRGVAERTPSFMYPQGTASSQMVLRGMDLLLECIASGVPTPDIAWYKKGGDLPSDKAKFENFNKALRITNVSEEDSGEYFCLASNKMGSIRHTISVRVKAAPYWLDEPKNLILAPGEDGRLVCRANGNPKPTVQWMVNGEPLQSAPPNPNREVAGDTIIFRDTQISSRAVYQCNTSNEHGYLLANAFVSVLDVPPRMLSPRNQLIRVILYNRTRLDCPFFGSPIPTLRWFKNGQGSNLDGGNYHVYENGSLEIKMIRKEDQGIYTCVATNILGKAENQVRLEVKDPTRIYRMPEDQVARRGTTVQLECRVKHDPSLKLTVSWLKDDEPLYIGNRMKKEDDSLTIFGVAERDQGSYTCVASTELDQDLAKAYLTVLADQATPTNRLAALPKGRPDRPRDLELTDLAERSVRLTWIPGDANNSPITDYVVQFEEDQFQPGVWHDHSKYPGSVNSAVLRLSPYVNYQFRVIAINEVGSSHPSLPSERYRTSGAPPESNPGDVKGEGTRKNNMEITWTPMNATSAFGPNLRYIVKWRRRETREAWNNVTVWGSRYVVGQTPVYVPYEIRVQAENDFGKGPEPESVIGYSGEDLPSAPRRFRVRQPNLETINLEWDHPEHPNGIMIGYTLKYVAFNGTKVGKQIVENFSPNQTKFTVQRTDPVSRYRFTLSARTQVGSGEAVTEESPAPPNEAYTNNQADIATQGWFIGLMCAIALLVLILLIVCFIKRSRGGKYPVREKKDVPLGPEDPKEEDGSFDYSDEDNKPLQGSQTSLDGTIKQQESDDSLVDYGEGGEGQFNEDGSFIGQYTVKKDKEETEGNESSEATSPVNAIYSLA

SEQ ID NO: 749267 - protein, 1140 aa, Homo sapiens
RARAGLCPNAAAGGERRCRGRGGSGGAGSGQLGQRPGPEPEPLELSAVQEAQLKRLEVTRPRVLGSREQGQVPRMARQPPPPWVHAAFLLCLLSLGGAIEIPMDPSIQNELTQPPTITKQSAKDHIVDPRDNILIECEAKGNPAPSFHWTRNSRFFNIAKDPRVSMRRRSGTLVIDFRSGGRPEEYEGEYQCFARNKFGTALSNRIRLQVSKSPLWPKENLDPVVVQEGAPLTLQCNPPPGLPSPVIFWMSSSMEPITQDKRVSQGHNGDLYFSNVMLQDMQTDYSCNARFHFTHTIQQKNPFTLKVLTTRGVAERTPSFMYPQGTASSQMVLRGMDLLLECIASGVPTPDIAWYKKGGDLPSDKAKFENFNKALRITNVSEEDSGEYFCLASNKMGSIRHTISVRVKAAPYWLDEPKNLILAPGEDGRLVCRANGNPKPTVQWMVNGEPLQSAPPNPNREVAGDTIIFRDTQISSRAVYQCNTSNEHGYLLANAFVSVLDVPPRMLSPRNQLIRVILYNRTRLDCPFFGSPIPTLRWFKNGQGSNLDGGNYHVYENGSLEIKMIRKEDQGIYTCVATNILGKAENQVRLEVKDPTRIYRMPEDQVARRGTTVQLECRVKHDPSLKLTVSWLKDDEPLYIGNRMKKEDDSLTIFGVAERDQGSYTCVASTELDQDLAKAYLTVLADQATPTNRLAALPKGRPDRPRDLELTDLAERSVRLTWIPGDANNSPITDYVVQFEEDQFQPGVWHDHSKYPGSVNSAVLRLSPYVNYQFRVIAINEVGSSHPSLPSERYRTSGAPPESNPGDVKGEGTRKNNMEITWTPMNATSAFGPNLRYIVKWRRRETREAWNNVTVWGSRYVVGQTPVYVPYEIRVQAENDFGKGPEPESVIGYSGEDLPSAPRRFRVRQPNLETINLEWDHPEHPNGIMIGYTLKYVAFNGTKVGKQIVENFSPNQTKFTVQRTDPVSRYRFTLSARTQVGSGEAVTEESPAPPNEAYTNNQADIATQGWFIGLMCAIALLVLILLIVCFIKRSRGGKYPVREKKDVPLGPEDPKEEDGSFDYSDEDNKPLQGSQTSLDGTIKQQESDDSLVDYGEGGEGQFNEDGSFIGQYTVKKDKEETEGNESSEATSPVNAIYSLA

SEQ ID NO: 749268 - protein, 1170 aa, Homo sapiens
AHGLVSALMRRLAARGAAGDAGEVAAPAADSSDSAQGRSPSPWRLIDLCAIWDAGVYLPSAAWNRASSGVARKRLNEAEKLSAVQEAQLKRLEVTRPRVLGSREQGQVPRMARQPPPPWVHAAFLLCLLSLGGAIEIPMDLTQPPTITKQSAKDHIVDPRDNILIECEAKGNPAPSFHWTRNSRFFNIAKDPRVSMRRRSGTLVIDFRSGGRPEEYEGEYQCFARNKFGTALSNRIRLQVSKSPLWPKENLDPVVVQEGAPLTLQCNPPPGLPSPVIFWMSSSMEPITQDKRVSQGHNGDLYFSNVMLQDMQTDYSCNARFHFTHTIQQKNPFTLKVLTTRGVAERTPSFMYPQGTASSQMVLRGMDLLLECIASGVPTPDIAWYKKGGDLPSDKAKFENFNKALRITNVSEEDSGEYFCLASNKMGSIRHTISVRVKAAPYWLDEPKNLILAPGEDGRLVCRANGNPKPTVQWMVNGEPLQSAPPNPNREVAGDTIIFRDTQISSRAVYQCNTSNEHGYLLANAFVSVLDVPPRMLSPRNQLIRVILYNRTRLDCPFFGSPIPTLRWFKNGQGSNLDGGNYHVYENGSLEIKMIRKEDQGIYTCVATNILGKAENQVRLEVKDPTRIYRMPEDQVARRGTTVQLECRVKHDPSLKLTVSWLKDDEPLYIGNRMKKEDDSLTIFGVAERDQGSYTCVASTELDQDLAKAYLTVLADQATPTNRLAALPKGRPDRPRDLELTDLAERSVRLTWIPGDANNSPITDYVVQFEEDQFQPGVWHDHSKYPGSVNSAVLRLSPYVNYQFRVIAINEVGSSHPSLPSERYRTSGAPPESNPGDVKGEGTRKNNMEITWTPMNATSAFGPNLRYIVKWRRRETREAWNNVTVWGSRYVVGQTPVYVPYEIRVQAENDFGKGPEPESVIGYSGEDLPSAPRRFRVRQPNLETINLEWDHPEHPNGIMIGYTLKYVAFNGTKVGKQIVENFSPNQTKFTVQRTDPVSRYRFTLSARTQVGSGEAVTEESPAPPNEAYTNNQADIATQGWFIGLMCAIALLVLILLIVCFIKRSRGGKYPVREKKDVPLGPEDPKEEDGSFDYSDEDNKPLQGSQTSLDGTIKQQESDDSLVDYGEGGEGQFNEDGSFIGQYTVKKDKEETEGNESSEATSPVNAIYSLA

SEQ ID NO: 749269 - protein, 1138 aa, Homo sapiens
AHGLVSALMRRLAARGAAGDAGEVAAPAADSSDSAQGRSPSPWRLIDLCAIWDAGVYLPSAAWNRASSGVARKRLNEAEKLSAVQEAQLKRLEVTRPRVLGSREQGQVPRMARQPPPPWVHAAFLLCLLSLGGAIEIPMDPSIQNELTQPPTITKQSAKDHIVDPRDNILIECEAKGNPAPSFHWTRNSRFFNIAKDPRVSMRRRSGTLVIDFRSGGRPEEYEGEYQCFARNKFGTALSNRIRLQVSKSPLWPKENLDPVVVQEGAPLTLQCNPPPGLPSPVIFWMSSSMEPITQDKRVSQGHNGDLYFSNVMLQDMQTDYSCNARFHFTHTIQQKNPFTLKVLTTRGVAERTPSFMYPQGTASSQMVLRGMDLLLECIASGVPTPDIAWYKKGGDLPSDKAKFENFNKALRITNVSEEDSGEYFCLASNKMGSIRHTISVRVKAAPYWLDEPKNLILAPGEDGRLVCRANGNPKPTVQWMVNGEPLQSAPPNPNREVAGDTIIFRDTQISSRAVYQCNTSNEHGYLLANAFVSVLDVPPRMLSPRNQLIRVILYNRTRLDCPFFGSPIPTLRWFKNGQGSNLDGGNYHVYENGSLEIKMIRKEDQGIYTCVATNILGKAENQVRLEVKDPTRIYRMPEDQVARRGTTVQLECRVKHDPSLKLTVSWLKDDEPLYIGNRMKKEDDSLTIFGVAERDQGSYTCVASTELDQDLAKAYLTVLGRPDRPRDLELTDLAERSVRLTWIPGDANNSPITDYVVQFEEDQFQPGVWHDHSKYPGSVNSAVLRLSPYVNYQFRVIAINEVGSSHPSLPSERYRTSGAPPESNPGDVKGEGTRKNNMEITWTPMNATSAFGPNLRYIVKWRRRETREAWNNVTVWGSRYVVGQTPVYVPYEIRVQAENDFGKGPEPESVIGYSGEDYPRAAPTEVKVRVMNSTAISLQWNRVYSDTVQGQLREYRAYYWRESSLLKNLWVSQKRQQASFPGDRLRGVVSRLFPYSNYKLEMVVVNGRGDGPRSETKEFTTPEGVPSAPRRFRVRQPNLETINLEWDHPEHPNGIMIGYTLKYVAFNGTKVGKQIVENFSPNQTKFTVQRTDPVSRYRFTLSARTQVGSGEAVTEESPAPPNEGRCMAAAPGVKGPS

SEQ ID NO: 749270 - protein, 745 aa, Homo sapiens
GRVGRHTISVRVKAAPYWLDEPKNLILAPGEDGRLVCRANGNPKPTVQWMVNGEPLQSAPPNPNREVAGDTIIFRDTQISSRAVYQCNTSNEHGYLLANAFVSVLDVPPRMLSPRNQLIRVILYNRTRLDCPFFGSPIPTLRWFKNGQGSNLDGGNYHVYENGSLEIKMIRKEDQGIYTCVATNILGKAENQVRLEVKDPTRIYRMPEDQVARRGTTVQLECRVKHDPSLKLTVSWLKDDEPLYIGNRMKKEDDSLTIFGVAERDQGSYTCVASTELDQDLAKAYLTVLADQATPTNRLAALPKGRPDRPRDLELTDLAERSVRLTWIPGDANNSPITDYVVQFEEDQFQPGVWHDHSKYPGSVNSAVLRLSPYVNYQFRVIAINEVGSSHPSLPSERYRTSGAPPESNPGDVKGEGTRKNNMEITWTPMNATSAFGPNLRYIVKWRRRETREAWNNVTVWGSRYVVGQTPVYVPYEIRVQAENDFGKGPEPESVIGYSGEDLPSAPRRFRVRQPNLETINLEWDHPEHPNGIMIGYTLKYVAFNGTKVGKQIVENFSPNQTKFTVQRTDPVSRYRFTLSARTQVGSGEAVTEESPAPPNEAYTNNQADIATQGWFIGLMCAIALLVLILLIVCFIKRSRGGKYPVREKKDVPLGPEDPKEEDGSFDYSDEDNKPLQGSQTSLDGTIKQQESDDSLVDYGEGGEGQFNEDGSFIGQYTVKKDKEETEGNESSEATSPVNAIYSLA

SEQ ID NO: 749271 - protein, 309 aa, Homo sapiens
FTDTALLQERSSLINARLAKKKDWSYYSNQSHDGAAQINYKLEMVVVNGRGDGPRSETKEFTTPEGVPSAPRRFRVRQPNLETINLEWDHPEHPNGIMIGYTLKYVAFNGTKVGKQIVENFSPNQTKFTVQRTDPVSRYRFTLSARTQVGSGEAVTEESPAPPNEAYTNNQADIATQGWFIGLMCAIALLVLILLIVCFIKRSRGGKYPVREKKDVPLGPEDPKEEDGSFDYSDEDNKPLQGSQTSLDGTIKQQESDDSLVDYGEGGEGQFNEDGSFIGQYTVKKDKEETEGNESSEATSPVNAIYSLA

SEQ ID NO: 749272 - protein, 986 aa, Homo sapiens
AHGLVSALMRRLAARGAAGDAGEVAAPAADSSDSAQGRSPSPWRLIDLCAIWDAGVYLPSAAWNRASSGVARKRLNEAEKLSAVQEAQLKRLEVTRPRVLGSREQGQVPRMARQPPPPWVHAAFLLCLLSLGGAIEIPMDPSIQNELTQPPTITKQSAKDHIVDPRDNILIECEAKGNPAPSFHWTRNSRFFNIAKDPRVSMRRRSGTLVIDFRSGGRPEEYEGEYQCFARNKFGTALSNRIRLQVSKSPLWPKENLDPVVVQEGAPLTLQCNPPPGLPSPVIFWMSSSMEPITQDKRVSQGHNGDLYFSNVMLQDMQTDYSCNARFHFTHTIQQKNPFTLKVLTTRGVAERTPSFMYPQGTASSQMVLRGMDLLLECIASGVPTPDIAWYKKGGDLPSDKAKFENFNKALRITNVSEEDSGEYFCLASNKMGSIRHTISVRVKAAPYWLDEPKNLILAPGEDGRLVCRANGNPKPTVQWMVNGEPLQSAPPNPNREVAGDTIIFRDTQISSRAVYQCNTSNEHGYLLANAFVSVLDVPPRMLSPRNQLIRVILYNRTRLDCPFFGSPIPTLRWFKNGQGSNLDGGNYHVYENGSLEIKMIRKEDQGIYTCVATNILGKAENQVRLEVKDPTRIYRMPEDQVARRGTTVQLECRVKHDPSLKLTVSWLKDDEPLYIGNRMKKEDDSLTIFGVAERDQGSYTCVASTELDQDLAKAYLTVLADQATPTNRLAALPKGRPDRPRDLELTDLAERSVRLTWIPGDANNSPITDYVVQFEEDQFQPGVWHDHSKYPGSVNSAVLRLSPYVNYQFRVIAINEVGSSHPSLPSERYRTSGAPPESNPGDVKGEGTRKNNMEITWTPMNATSAFGPNLRYIVKWRRRETREAWNNVTVWGSRYVVGQTPVYVPYEIRVQAENDFGKGPEPESVIGYSGEDYPRAAPTEVKVRVMNSTAISLQWNRVYSDTVQGQLREYRVRKPAPDSPNYPAH

SEQ ID NO: 749273 - protein, 329 aa, Homo sapiens
AHGLVSALMRRLAARGAAGDAGEVAAPAADSSDSAQGRSPSPWRLIDLCAIWDAGVYLPSAAWNRASSGVARKRLNEAEKLSAVQEAQLKRLEVTRPRVLGSREQGQVPRMARQPPPPWVHAAFLLCLLSLGGAIEIPMDLTQPPTITKQSAKDHIVDPRDNILIECEAKGNPAPSFHWTRNSRFFNIAKDPRVSMRRRSGTLVIDFRSGGRPEEYEGEYQCFARNKFGTALSNRIRLQVSKSPLWPKENLDPVVVQEGAPLTLQCNPPPGLPSPVIFWMSSSMEPITQDKRVSQGHNGDLYFSNVMLQDMQTDYSCNARFQHLVLNSW

SEQ ID NO: 749274 - protein, 109 aa, Homo sapiens
RARAGLCPNAAAGGERRCRGRGGSGGAGSGQLGQRPGPEPEPLELSAVQEAQLKRLEVTRPRVLGSREQGQVPRMARQPPPPWVHAAFLLCLLSLGGAIEIPMDRPLWS

SEQ ID NO: 749275 - protein, 111 aa, Homo sapiens
VLPGNMKYDRGNMKYNSLAQCFLALCQLTTSLENNSHASSPGCRGRVSPMAGALHILIRVSPQNLHCVEGRKGEGDRGGRAAQEKPTVLGNWKWKSREKEWFREYPWFHCG

SEQ ID NO: 749276 - protein, 115 aa, Homo sapiens
  misc_feature (87)..(87): Xaa can be any naturally occurring amino acid
HWVVWGWFPLTIPPPNKAAPNLLDGCLSSEVLREILMPSPHICSVGKSLVSQEGSGGFLDANETPATAGPQILDIITRKNSQMVHKXVSPDAGLVILDFPASRTIMAAPSAWFLE

SEQ ID NO: 749277 - protein, 121 aa, Homo sapiens
HWVVWGWFPLTIPPPNKAAPNLLDGCLSSEVLREILMPSPHICSVGKSLVSQEGSGGFLDANETPATAGPQILDIITRKNSQVSQNEVKCKKLLLESKSLHLREKWVHARENESRKQSLGF

SEQ ID NO: 749278 - protein, 108 aa, Homo sapiens
AGQACCPQTPWAHFTCDSSLNLLRSSHSPVTSYRLLASCQAYNKLEICHWFLTLSKKLNKLKSQQLVKIPQRWLGTPSLSGLLTPSSLMTPSSTCYGAHILRSLSREF

SEQ ID NO: 749279 - protein, 834 aa, Homo sapiens
MEDPAAPGTGGPPANGNGNGGGKGKQAAPKGREAFRSQRRESEGSVDCPTLEFEYGDADGHAAELSELYSYTENLEFTNNRRCFEEDFKTQVQGKEWLELEEDAQKAYIMGLLDRLEVVSRERRLKVARAVLYLAQGTFGECDSEVDVLHWSRYNCFLLYQMGTFSTFLELLHMEIDNSQACSSALRKPAVSIADSTELRVLLSVMYLMVENIRLERETDPCGWRTARETFRTELSFSMHNEEPFALLLFSMVTKFCSGLAPHFPIKKVLLLLWKVVMFTLGGFEHLQTLKVQKRAELGLPPLAEDSIQVVKSMRAASPPSYTLDLGESQLAPPPSKLRGRRGSRRQLLTKQDSLDIYNERDLFKTEEPATEEEEESAGDGERTLDGELDLLEQDPLVPPPPSQAPLSAERVAFPKGLPWAPKVRQKDIEHFLEMSRNKFIGFTLGQDTDTLVGLPRPIHESVKTLKQHKYISIADVQIKNEEELEKCPMSLGEEVVPETPCEILYQGMLYSLPQYMIALLKILLAAAPTSKAKTDSINILADVLPEEMPITVLQSMKLGIDVNRHKEIIVKSISTLLLLLLKHFKLNHIYQFEYVSQHLVFANCIPLILKFFNQNILSYITAKNSISVLDYPCCTIQDLPELTTESLEAGDNSQFCWRNLFSCINLLRLLNKLTKWKHSRTMMLVVFKSAPILKRALKVKQAMLQLYVLKLLKLQTKYLGRQWRKSNMKTMSAIYQKVRHRMNDDWAYGNDIDARPWDFQAEECTLRANIEAFNSRRYDRPQDSEFSPVDNCLQSVLGQRLDLPEDFHYSYELWLEREVFSQPICWEELLQNH

SEQ ID NO: 749280 - protein, 532 aa, Homo sapiens
MFSQGLCSDSMFPEMWRPVDMGWPQTRMPRVRSLHAYPPFFPLQQLLTKQDSLDIYNERDLFKTEEPATEEEEESAGDGERTLDGELDLLEQDPLVPPPPSQAPLSAERVAFPKGLPWAPKVRQKDIEHFLEMSRNKFIGFTLGQDTDTLVGLPRPIHESVKTLKQHKYISIADVQIKNEEELEKCPMSLGEEVVPETPCEILYQGMLYSLPQYMIALLKILLAAAPTSKAKTDSINILADVLPEEMPITVLQSMKLGIDVNRHKEIIVKSISTLLLLLLKHFKLNHIYQFEYVSQHLVFANCIPLILKFFNQNILSYITAKNSISVLDYPCCTIQDLPELTTESLEAGDNSQFCWRNLFSCINLLRLLNKLTKWKHSRTMMLVVFKSAPILKRALKVKQAMLQLYVLKLLKLQTKYLGRQWRKSNMKTMSAIYQKVRHRMNDDWAYGNDIDARPWDFQAEECTLRANIEAFNSRRYDRPQDSEFSPVDNCLQSVLGQRLDLPEDFHYSYELWLEREVFSQPICWEELLQNH

SEQ ID NO: 749281 - protein, 834 aa, Homo sapiens; identical to SEQ ID NO: 749279

SEQ ID NO: 749282 - protein, 758 aa, Homo sapiens
MEDPAAPGTGGPPANGNGNGGGKGKQAAPKGREAFRSQRRESEGSVDCPTLEFEYGDADGHAAELSELYSYTENLEFTNNRRCFEEDFKTQVQGKEWLELEEDAQKAYIMGLLDRLEVVSRERRLKVARAVLYLAQGTFGECDSEVDVLHWSRYNCFLLYQMGTFSTFLELLHMEIDNSQACSSALRKPAVSIADSTELRVLLSVMYLMVENIRLERETDPCGWRTARETFRTELSFSMHNEEPFALLLFSMVTKFCSGLAPHFPIKKVLLLLWKVVMFTLGGFEHLQTLKVQKRAELGLPPLAEDSIQVVKSMRAASPPSYTLDLGESQLAPPPSKLRGRRGSRRQLLTKQDSLDIYNERDLFKTEEPATEEEEESAGDGERTLDGELDLLEQDPLVPPPPSQAPLSAERVAFPKGLPWAPKVRQKDIEHFLEMSRNKFIGFTLGQDTDTLVGLPRPIHESVKTLKQHKYISIADVQIKNEEELEKCPMSLGEEVVPETPCEILYQGMLYSLPQYMIALLKILLAAAPTSKAKTDSINILADVLPEEMPITVLQSMKLGIDVNRHKEIIVKSISTLLLLLLKHFKLNHIYQFEYVSQHLVFANCIPLILKFFNQNILSYITAKNSISVLDYPCCTIQDLPELTTESLEAGDNSQFCWRNLFSCINLLRLLNKLTKWKHSRTMMLVVFKSAPILKRALKVKQAMLQLYVLKLLKLQTKYLGRQWRKSNMKTMSAIYQKVRHRMNDDWAYGNGESSQSS

SEQ ID NO: 749283 - protein, 538 aa, Homo sapiens
MEDPAAPGTGGPPANGNGNGGGKGKQAAPKGREAFRSQRRESEGSVDCPTLEFEYGDADGHAAELSELYSYTENLEFTNNRRCFEEDFKTQVQGKEWLELEEDAQKAYIMGLLDRLEVVSRERRLKVARAVLYLAQGTFGECDSEVDVLHWSRYNCFLLYQMGTFSTFLELLHMEIDNSQACSSALRKPAVSIADSTELRVLLSVMYLMVENIRLERETDPCGWRTARETFRTELSFSMHNEEPFALLLFSMVTKFCSGLAPHFPIKKVLLLLWKVVMFTLGGFEHLQTLKVQKRAELGLPPLAEDSIQVVKSMRAASPPSYTLDLGESQLAPPPSKLRGRRGSRRQLLTKQDSLDIYNERDLFKTEEPATEEEEESAGDGERTLDGELDLLEQDPLVPPPPSQAPLSAERVAFPKGLPWAPKVRQKDIEHFLEMSRNKFIGFTLGQDTDTLVGLPRPIHESVKTLKQHKYISIADVQIKNEEELEKCPMSLVSQGSPTQEESRRKPVFSVVTEHVCMHSFSILGCNCVPGKTRSLLS

SEQ ID NO: 749284 - protein, 325 aa, Homo sapiens
MVCGSPGGMLLLRAGLLALAALCLLRVPGARAAACEPVRIPLCKSLPWNMTKMPNHLHHSTQANAILAIEQFEGLLGTHCSPDLLFFLCAMYAPICTIDFQHEPIKPCKSVCERARQGCEPILIKYRHSWPENLACEELPVYDRGVCISPEAIVTADGADFPMDSSNGNCRGASSERCKCKPIRATQKTYFRNNYNYVIRAKVKEIKTKCHDVTAVVEVKEILKSSLVNIPRDTVNLYTSSGCLCPPLNVNEEYIIMGYEDEERSRLLLVEGSIAEKWKDRLGKKVKRWDMKLRHLGLSKSDSSNSDSTQSQKSGRNSNPRQARN

SEQ ID NO: 749285 - protein, 151 aa, Homo sapiens
  misc_feature (151)..(151): Xaa can be any naturally occurring amino acid
RGSRYILCTADGADFPMDSSNGNCRGASSERCKCKPIRATQKTYFRNNYNYVIRAKVKEIKTKCHDVTAVVEVKEILKSSLVNIPRDTVNLYTSSGCLCPPLNVNEEYIIMGYEDEERSRLLLVEGSIAEKWKDRLGKKVKPWMLRFRHFX

SEQ ID NO: 749286 - protein, 325 aa, Homo sapiens; identical to SEQ ID NO: 749284

SEQ ID NO: 749287 - protein, 325 aa, Homo sapiens; identical to SEQ ID NO: 749284

SEQ ID NO: 749288 - protein, 325 aa, Homo sapiens; identical to SEQ ID NO: 749284

SEQ ID NO: 749289 - protein, 325 aa, Homo sapiens; identical to SEQ ID NO: 749284

SEQ ID NO: 749290 - protein, 325 aa, Homo sapiens; identical to SEQ ID NO: 749284

SEQ ID NO: 749291 - protein, 297 aa, Homo sapiens
  misc_feature (297)..(297): Xaa can be any naturally occurring amino acid
MVCGSPGGMLLLRAGLLALAALCLLRVPGARAAACEPVRIPLCKSLPWNMTKMPNHLHHSTQANAILAIEQFEGLLGTHCSPDLLFFLCAMYAPICTIDFQHEPIKPCKSVCERARQGCEPILIKYRHSWPENLACEELPVYDRGVCISPEAIVTADGADFPMDSSNGNCRGASSERCKCKPIRATQKTYFRNNYNYVIRAKVKEIKTKCHDVTAVVEVKEILKSSLVNIPRDTVNLYTSSGCLCPPLNVNEEYIIMGYEDEERSRLLLVEGSIAEKWKDRLGKKVKPWMLRFRHFX

SEQ ID NO: 749292 - protein, 400 aa, Homo sapiens
MGTPASGRKRTPVKDRFSAEDEALSNIAREAEARLAAKRAARAEARDIRMRELERQQKELDEKSDKQYAENYTRPSSRNSASATTPLSGNSSRRGSGDTSSLIDPDTSLSELRESLSEVEEKYKKAMVSNAQLDNEKNNLIYQVDTLKDVIEEQEEQMAEFYRENEEKSKELERQKHMCSVLQHKMEELKEGLRQRDELIEKHGLVIIPDGTPNGDVSHEPVAGAITVVSQEAAQVLESAGEGPLDVRLRKLAGEKEELLSQIRKLKLQLEEERQKCSRNDGTVGDLAGLQNGSDLQFIEMQRDANRQISEYKFKLSKAEQDITTLEQSISRLEGQVLRYKTAAENAEKVEDELKAEKRKLQRELRTALDKIEEMEMTNSHLAKRLEKMKANRTALLAQQ

SEQ ID NO: 749293 - protein, 721 aa, Homo sapiens
MGTPASGRKRTPVKDRFSAEDEALSNIAREAEARLAAKRAARAEARDIRMRELERQQKEYSLHSFDRKWGQIQKWLEDSERARYSHRSSHHRPYLGVEDALSIRSVGSHRYDMFKDRSSRLSSLNHSYSHSHGMKKRSSDSHKDLLSGLYFDQRNYSSLRHSKPTSAYYTRQSSSLYSDPLATYKSDRASPTANSGLLRSASLASLYNGGLYNPYGPRTPSECSYYSSRISSARSSPGFTNDDTASIVSSDRASRGRRESVVSAADYFSRSNRRGSVVSEVDDISIPDLSSLDEKSDKQYAENYTRPSSRNSASATTPLSGNSSRRGSGDTSSLIDPDTSLSELRDIYDLKDQIQDVEGRYMQGLKELKESLSEVEEKYKKAMVSNAQLDNEKNNLIYQVDTLKDVIEEQEEQMAEFYRENEEKSKELERQKHMCSVLQHKMEELKEGLRQRDELIEEKQRMQQKIDTMTKEVFDLQETLLWKDKKIGALEKQKEYIACLRNERDMLREELADLQETVKTGEKHGLVIIPDGTPNGDVSHEPVAGAITVVSQEAAQVLESAGEGPLDVRLRKLAGEKEELLSQIRKLKLQLEEERQKCSRNDGTVGDLAGLQNGSDLQFIEMQRDANRQISEYKFKLSKAEQDITTLEQSISRLEGQVLRYKTAAENAEKVEDELKAEKRKLQRELRTALDKIEEMEMTNSHLAKRLEKMKANRTALLAQQ

SEQ ID NO: 749294 - protein, 721 aa, Homo sapiens; identical to SEQ ID NO: 749293

SEQ ID NO: 749295 - protein, 721 aa, Homo sapiens; identical to SEQ ID NO: 749293

SEQ ID NO: 749296 - protein, 295 aa, Homo sapiens [sequence omitted]

SEQ ID NO: 749297 - protein, 424 aa, Homo sapiens
MGTPASGRKRTPVKDRFSAEDEALSNIAREAEARLAAKRAARAEARDIRMRELERQQKELDEKSDKQYAENYTRPSSRNSASATTPLSGNSSRRGSGDTSSLIDPDTSLSELRDIYDLKDQIQDVEGRYMQGLKELKESLSEVEEKYKKAMVSNAQLDNEKNNLIYQVDTLKDVIEEQEEQMAEFYRENEEKSKELERQKHMCSVLQHKMEELKEGLRQRDELIEKHGLVIIPDGTPNGDVSHEPVAGAITVVSQEAAQVLESAGEGPLDVRLRKLAGEKEELLSQIRKLKLQLEEERQKCSRNDGTVGDLAGLQNGSDLQFIEMQRDANRQISEYKFKLSKAEQDITTLEQSISRLEGQVLRYKTAAENAEKVEDELKAEKRKLQRELRTALDKIEEMEMTNSHLAKRLEKMKANRTALLAQQ

SEQ ID NO: 749298 - protein, 295 aa, Homo sapiens [sequence omitted]

SEQ ID NO: 749299 - protein, 295 aa, Homo sapiens [sequence omitted]

SEQ ID NO: 749300 - protein, 295 aa, Homo sapiens [sequence omitted]

SEQ ID NO: 749301 - protein, 216 aa, Homo sapiens [sequence omitted]

SEQ ID NO: 749302 - protein, 217 aa, Homo sapiens
  misc_feature (11)..(11): Xaa can be any naturally occurring amino acid
MTRYLREDWLXQEQEAGEKHGLVIIPDGTPNGDVSHEPVAGAITVVSQEAAQVLESAGEGPLDVRLRKLAGEKEELLSQIRKLKLQLEEERQKCSRNDGTVGDLAGLQNGSDLQFIEMQRDANRQISEYKFKLSKAEQDITTLEQSISRLEGQVLRYKTAAENAEKVEDELKAEKRKLQRELRTALDKIEEMEMTNSHLAKRLEKMKANRTALLAQQ

SEQ ID NO: 749303 - protein, 174 aa, Homo sapiens
RISGIVVLLRSVSSRRRALDVRLRKLAGEKEELLSQIRKLKLQLEEERQKCSRNDGTVGDLAGLQNGSDLQFIEMQRDANRQISEYKFKLSKAEQDITTLEQSISRLEGQVLRYKTAAENAEKVEDELKAEKRKLQRELRTALDKIEEMEMTNSHLAKRLEKMKANRTALLAQQ

SEQ ID NO: 749304 - protein, 316 aa, Homo sapiens
MQGLKELKESLSEVEEKYKKAMVSNAQLDNEKNNLIYQVDTLKDVIEEQEEQMAEFYRENEEKSKELERQKHMCSVLQHKMEELKEGLRQRDELIEKHGLVIIPDGTPNGDVSHEPVAGAITVVSQEAAQVLESAGEGPLDVRLRKLAGEKEELLSQIRKLKLQLEEERQKCSRNDGTVGDLAGLQNGSDLQFIEMQRDANRQISEYKFKLSKAEQDITTLEQSISRLEGQVLRYKTAAENAEKVEDELKAEKRKLQRELRTALDKIEEMEMTNSHLAKRLEKMKANRTALLAQHCLSNWALGGLGTGSGGQTAIL

SEQ ID NO: 749305 - protein, 106 aa, Homo sapiens
MSVERRATITKGLTLMPTLESSGMNTDHCSLDFLGSGDSPTSASQVAETTCIHHHTGPIFVFFVETGCPHVAHAGLYLLGSHRSPTLASQSAGITGMSHRSWLSLM

SEQ ID NO: 749306 - protein, 94 aa, Homo sapiens
MVGITILTQVFLTPKSEQHASPSGQVFKQACACHPVRASDSSATLVGASRKEMPSAPLESLGLKAKPWKTDQSLEGIRPAVASSEALHHASPER

SEQ ID NO: 749307 - protein, 58 aa, Homo sapiens
MSKPSEALFQSDLYKNAILITLFLYVRKKKSINGCLHCQSPNSFLSNGLIYPHYIIAY

SEQ ID NO: 749308 - protein, 550 aa, Homo sapiens
ENHRARGQGGGPQGVGRMAEGKAGGAAGLFAKQVQKKFSRAQEKVLQKLGKAVETKDERFEQSASNFYQQQAEGHKLYKDLKNFLSAVKVMHESSKRVSETLQEIYSSEWDGHEELKAIVWERIAKRGRKLVDYDSARHHLEAVQNAKKKDEAKTAKAEEEFNKAQTVFEDLNQELLEELPILYNSRIGCYVTIFQNISNLRDVFYREMSKLNHNLYEVMSKLEKQHSNKVFVVKGLSSSSRRSLVISPPVRTATVSSPLTSPTSPSTLSLKSESESVSATEDLAPDAAQGEDNSEIKELLEEEEIEKEGSEASSSEEDEPLPACNGPAQAQPSPTTERAKSQEEVLPSSTTPSPGGALSPSGQPSSSATEVVLRTRTASEGSEQPKKRASIQRTSAPPSRPPPPRATASPRPSSGNIPSSPTASGGGSPTSPRASLGTGTASPRTSLEVSPNPEPPEKPVRTPEAKENENIHNQNPEELCTSPTLMTSQVASEPGEAKKMEDKEKDNKLISADSSEGQDQLQVSMVPENNNLTAPEPQEEVSTSENPQL

SEQ ID NO: 749309 - protein, 85 aa, Homo sapiens
ENHRARGQGGGPQGVGRMAEGKAGGAAGLFAKQVQKKFSRAQEKNIFFASNLSLCSPPTNPLVDKAVWEDMSARRKSEGRKTRRT

SEQ ID NO: 749310 - protein, 125 aa, Homo sapiens
ENHRARGQGGGPQGVGRMAEGKAGGAAGLFAKQVQKKFSRAQEKVLQKLGKAVETKDERFEQSASNFYQQQAEGHKLYKDLKNFLSAVKVMHESSKRVSETLQEIYSSEWDGHEELKAIVWVRVA

SEQ ID NO: 749311 - protein, 136 aa, Homo sapiens
PASDSILQNNDLLWEDYEEKLADQAVRTMEIYVAQFSEIKERIAKRGRKLVDYDSARHHLEAVQNAKKKDEAKTAKLPPLSSGSGPQSHHLLSLPPRCLGPVVAGPPTSRRGRLYSPNPWSNALSGLQNQNKTGSL

SEQ ID NO: 749312 - protein, 492 aa, Homo sapiens
MHESSKRVSETLQEIYSSEWDGHEELKAIVWNNDLLWEDYEEKLADQAVRTMEIYVAQFSEIKERIAKRGRKLVDYDSARHHLEAVQNAKKKDEAKTAKAEEEFNKAQTVFEDLNQELLEELPILYNSRIGCYVTIFQNISNLRDVFYREMSKLNHNLYEVMSKLEKQHSNKVFVVKGLSSSSRRSLVISPPVRTATVSSPLTSPTSPSTLSLKSESESVSATEDLAPDAAQGEDNSEIKELLEEEEIEKEGSEASSSEEDEPLPACNGPAQAQPSPTTERAKSQEEVLPSSTTPSPGGALSPSGQPSSSATEVVLRTRTASEGSEQPKKRASIQRTSAPPSRPPPPRATASPRPSSGNIPSSPTASGGGSPTSPRASLGTGTASPRTSLEVSPNPEPPEKPVRTPEAKENENIHNQNPEELCTSPTLMTSQVASEPGEAKKMEDKEKDNKLISADSSEGQDQLQVSMVPENNNLTAPEPQEEVSTSENPQL

SEQ ID NO: 749313 - protein, 155 aa, Homo sapiens
CTATLILLASSDPPASASQGAGTTGVHPCTWSRLGFLHLGFPSQNLKFFPKKLFYHLLLLTACHELGSLKCESCSTFLRTVHLKVAGSNFKTSHSLIDTHPHHVTQITWCLIMETTQEFKDLVSCPSKSFYPLNLSLFICKRGWMKAFPDAFRLW

SEQ ID NO: 749314 - protein, 582 aa, Homo sapiens
ENHRARGQGGGPQGVGRMAEGKAGGAAGLFAKQVQKKFSRAQEKVLQKLGKAVETKDERFEQSASNFYQQQAEGHKLYKDLKNFLSAVKVMHESSKRVSETLQEIYSSEWDGHEELKAIVWNNDLLWEDYEEKLADQAVRTMEIYVAQFSEIKERIAKRGRKLVDYDSARHHLEAVQNAKKKDEAKTAKAEEEFNKAQTVFEDLNQELLEELPILYNSRIGCYVTIFQNISNLRDVFYREMSKLNHNLYEVMSKLEKQHSNKVFVVKGLSSSSRRSLVISPPVRTATVSSPLTSPTSPSTLSLKSESESVSATEDLAPDAAQGEDNSEIKELLEEEEIEKEGSEASSSEEDEPLPACNGPAQAQPSPTTERAKSQEEVLPSSTTPSPGGALSPSGQPSSSATEVVLRTRTASEGSEQPKKRASIQRTSAPPSRPPPPRATASPRPSSGNIPSSPTASGGGSPTSPRASLGTGTASPRTSLEVSPNPEPPEKPVRTPEAKENENIHNQNPEELCTSPTLMTSQVASEPGEAKKMEDKEKDNKLISADSSEGQDQLQVSMVPENNNLTAPEPQEEVSTSENPQL

SEQ ID NO: 749315 - protein, 128 aa, Homo sapiens
MPYSYVFVVLLPNSRIGCYVTIFQNISNLRDVFYREMSKLNHNLYEVMSKLEKQHSNKVFVVKGLSSSSRRSLVISPPVRTATVSSPLTSPTSPSTLSLKSESESVSATEDLAPDAAQGEDRRWWSYC

SEQ ID NO: 749316 - protein, 82 aa, Homo sapiens
TVHSPEVRFQNVRCLALNSQPTLQNEFTHRKETKMGRGPKHHKEQLRKPVRKAWSRAHASCLQACVEEKLDLLYEYRRPTQD

SEQ ID NO: 749317 - protein, 218 aa, Homo sapiens
ENHRARGQGGGPQGVGRMAEGKAGGAAGLFAKQVQKKFSRAQEKVLQKLGKAVETKDERFEQSASNFYQQQAEGHKLYKDLKNFLSAVKVMHESSKRVSETLQEIYSSEWDGHEELKAIVWNNDLLWEDYEEKLADQAVRTMEIYVAQFSEIKERIAKRGRKLVDYDSARHHLEAVQNAKKKDEAKTAKAEEEFNKAQTVFEDLNQELLEELPILYNS

SEQ ID NO: 749318 - protein, 31 aa, Homo sapiens
MCGKCKPEPSKSPGPSLGHAASHQDLKILRL

SEQ ID NO: 749319 - protein, 127 aa, Homo sapiens
SDYGLFLSDEDPRKGIWLEAGRTLDYYMLRNGDILEYKKKQRPQKIRMLDGSVKTVMVDDSKTVGELLVTICSRIGITNYEEYSLIQETIEEKKEEGTGTLKKDRTLLRDERKMEKLKAKLHTDDDR

SEQ ID NO: 749320 - protein, 109 aa, Homo sapiens [sequence omitted]

SEQ ID NO: 749321 - protein, 161 aa, Homo sapiens
DPFDGVLGDETEEEETKPIELPVKEEEPPEKTVDVAAEKKVVKITSEIPQTERMQKRAERFNVPVSLESKKAARAARFGISSVPTKGLSSDNKPMVNLDKLKERAQRFGLNVSSISRKSEDDEKLKKRKERFGIVTSSAGTGTTEDTEAKKRKRAERFGIA

SEQ ID NO: 749322 - protein, 239 aa, Homo sapiens
KAAVPSESRMREPAAAAAAMRQKHYLEAAARGLHDSCPGQARYLLWAYTSSHDDKSTFEETCPYCFQLLVLDNSRVRLKPKARLTPKIQKLLNREARNYTLSFKEAKMVKKFKDSKSVLLITCKTCNRTVKHHGKSRSFVSTLKSNPATPTSKLSLKTPERRTANPNHDMSGSKGKSPASVFRTPTSGQSVSTCSSKNTSKTKKHFSQLKMLLSQNESQKIPKVDFRNFLSSLKGGLLK

SEQ ID NO: 749323 - protein, 254 aa, Homo sapiens
LESGHQRRGRWEADFRRPIFSPGSRGEPAAAAAAMRQKHYLEAAARGLHDSCPGQARYLLWAYTSSHDDKSTFEETCPYCFQLLVLDNSRVRLKPKARLTPKIQKLLNREARNYTLSFKEAKMVKKFKDSKSVLLITCKTCNRTVKHHGKSRSFVSTLKSNPATPTSKLSLKTPERRTANPNHDMSGSKGKSPASVFRTPTSGQSVSTCSSKNTSKTKKHFSQLKMLLSQNESQKIPKVDFRNFLSSLKGGLLK

SEQ ID NO: 749324 - protein, 207 aa, Homo sapiens
KIQKNYLAWWCTPVIPATREDDKSTFEETCPYCFQLLVLDNSRVRLKPKARLTPKIQKLLNREARNYTLSFKEAKMVKKFKDSKSVLLITCKTCNRTVKHHGKSRSFVSTLKSNPATPTSKLSLKTPERRTANPNHDMSGSKGKSPASVFRTPTSGQSVSTCSSKNTSKTKKHFSQLKMLLSQNESQKIPKVDFRNFLSSLKGGLLK

SEQ ID NO: 749325 - protein, 132 aa, Homo sapiens
MVKKFKDSKSVLLITCKTCNRTVKHHGKSRSFVSTLKSNPATPTSKLSLKTPERRTANPNHDMSGSKGKSPASVFRTPTSGQSVSTCSSKNTSKTKKHFSQLKMLLSQNESQKIPKVDFRNFLSSLKGGLLK

SEQ ID NO: 749326 - protein, 69 aa, Homo sapiens
HETMSQYPVVSCCDEREPGQIARSLVEFRVPPARPSTEPRVPPMGLHSEPVGTDAPHSATNPPHPSLNW

SEQ ID NO: 749327 - protein, 117 aa, Homo sapiens
DLRLHDVHHGLVWEDPGVTGQNIGIFHDGEGCGGVFPNLQQCSSFGKVLLGELKGRGEYFAIKALKKDVVLIDDDVECTMVEKRVLTLAAENPFLTHLICTFQTKTTCLCDESSRGD

SEQ ID NO: 749328 - protein, 745 aa, Homo sapiens
MTRGSTHVVDPRRPPAARRPGPHLTGRLAHPSQRRAEPRPRAPGSGAPAAAAATLGACPCNGSPTAGPTMAPFLRIAFNSYELGSLQAEDEANQPFCAVKMKEALSTERGKTLVQKKPTMYPEWKSTFDAHIYEGRVIQIVLMRAAEEPVSEVTVGVSVLAERCKKNNGKAEFWLDLQPQAKVLMSVQYFLEDVDCKQSMRSEDEAKFPTMNRRGAIKQAKIHYIKNHEFIATFFGQPTFCSVCKDFVWGLNKQGYKCRQCNAAIHKKCIDKIIGRCTGTAANSRDTIFQKERFNIDMPHRFKVHNYMSPTFCDHCGSLLWGLVKQGLKCEDCGMNVHHKCREKVANLCGINQKLLAEALNQVTQRASRRSDSASSEPVGIYQGFEKKTGVAGEDMQDNSGTYGKIWEGSSKCNINNFIFHKVLGKGSFGKVLLGELKGRGEYFAIKALKKDVVLIDDDVECTMVEKRVLTLAAENPFLTHLICTFQTKDHLFFVMEFLNGGDLMYHIQDKGRFELYRATFYAAEIMCGLQFLHSKGIIYRDLKLDNVLLDRDGHIKIADFGMCKENIFGESRASTFCGTPDYIAPEILQGLKYTFSVDWWSFGVLLYEMLIGQSPFHGDDEDELFESIRVDTPHYPRWITKESKDILEKLFEREPTKRLGVTGNIKIHPFFKTINWTLLEKRRLEPPFRPKVKSPRDYSNFDQEFLNEKARLSYSDKNLIDSMDQSAFAGFSFVNPKFEHLLED

SEQ ID NO: 749329 - protein, 752 aa, Homo sapiens
CRGAGARGGCSPHLPSDPRRPPAARRPGPHLTGRLAHPSQRRAEPRPRAPGSGAPAAAAATLGACPCNGSPTAGPTMAPFLRIAFNSYELGSLQAEDEANQPFCAVKMKEALSTERGKTLVQKKPTMYPEWKSTFDAHIYEGRVIQIVLMRAAEEPVSEVTVGVSVLAERCKKNNGKAEFWLDLQPQAKVLMSVQYFLEDVDCKQSMRSEDEAKFPTMNRRGAIKQAKIHYIKNHEFIATFFGQPTFCSVCKDFVWGLNKQGYKCRQCNAAIHKKCIDKIIGRCTGTAANSRDTIFQKERFNIDMPHRFKVHNYMSPTFCDHCGSLLWGLVKQGLKCEDCGMNVHHKCREKVANLCGINQKLLAEALNQVTQRASRRSDSASSEPVGIYQGFEKKTGVAGEDMQDNSGTYGKIWEGSSKCNINNFIFHKVLGKGSFGKVLLGELKGRGEYFAIKALKKDVVLIDDDVECTMVEKRVLTLAAENPFLTHLICTFQTKDHLFFVMEFLNGGDLMYHIQDKGRFELYRATFYAAEIMCGLQFLHSKGIIYRDLKLDNVLLDRDGHIKIADFGMCKENIFGESRASTFCGTPDYIAPEILQGLKYTFSVDWWSFGVLLYEMLIGQSPFHGDDEDELFESIRVDTPHYPRWITKESKDILEKLFEREPTKRLGVTGNIKIHPFFKTINWTLLEKRRLEPPFRPKVKSPRDYSNFDQEFLNEKARLSYSDKNLIDSMDQSAFAGFSFVNPKFEHLLED

SEQ ID NO: 749330 - protein, 779 aa, Homo sapiens
AAAPEPEAAVAHISRATPGARPPRGGPGHTSLAAWPIPVSAAPNPVRARRGAAPPPLPPRPLAPAPATGGWSAVARSRLTATSTSRVQVILLPQPPSPTAGPTMAPFLRIAFNSYELGSLQAEDEANQPFCAVKMKEALSTERGKTLVQKKPTMYPEWKSTFDAHIYEGRVIQIVLMRAAEEPVSEVTVGVSVLAERCKKNNGKAEFWLDLQPQAKVLMSVQYFLEDVDCKQSMRSEDEAKFPTMNRRGAIKQAKIHYIKNHEFIATFFGQPTFCSVCKDFVWGLNKQGYKCRQCNAAIHKKCIDKIIGRCTGTAANSRDTIFQKERFNIDMPHRFKVHNYMSPTFCDHCGSLLWGLVKQGLKCEDCGMNVHHKCREKVANLCGINQKLLAEALNQVTQRASRRSDSASSEPVGIYQGFEKKTGVAGEDMQDNSGTYGKIWEGSSKCNINNFIFHKVLGKGSFGKVLLGELKGRGEYFAIKALKKDVVLIDDDVECTMVEKRVLTLAAENPFLTHLICTFQTKDHLFFVMEFLNGGDLMYHIQDKGRFELYRATFYAAEIMCGLQFLHSKGIIYRDLKLDNVLLDRDGHIKIADFGMCKENIFGESRASTFCGTPDYIAPEILQGLKYTFSVDWWSFGVLLYEMLIGQSPFHGDDEDELFESIRVDTPHYPRWITKESKDILEKLFEREPTKRLGVTGNIKIHPFFKTINWTLLEKRRLEPPFRPKVKSPRDYSNFDQEFLNEKARLSYSDKNLIDSMDQSAFAGFSFVNPKFEHLLED

SEQ ID NO: 749331 - protein, 593 aa, Homo sapiens
QPARKIADVSPASQGAPHRPAPRVGSIRPIVRCPRWAGWDRVDCKQSMRSEDEAKFPTMNRRGAIKQAKIHYIKNHEFIATFFGQPTFCSVCKDFVWGLNKQGYKCRQCNAAIHKKCIDKIIGRCTGTAANSRDTIFQKERFNIDMPHRFKVHNYMSPTFCDHCGSLLWGLVKQGLKCEDCGMNVHHKCREKVANLCGINQKLLAEALNQVTQRASRRSDSASSEPVGIYQGFEKKTGVAGEDMQDNSGTYGKIWEGSSKCNINNFIFHKVLGKGSFGKVLLGELKGRGEYFAIKALKKDVVLIDDDVECTMVEKRVLTLAAENPFLTHLICTFQTKDHLFFVMEFLNGGDLMYHIQDKGRFELYRATFYAAEIMCGLQFLHSKGIIYRDLKLDNVLLDRDGHIKIADFGMCKENIFGESRASTFCGTPDYIAPEILQGLKYTFSVDWWSFGVLLYEMLIGQSPFHGDDEDELFESIRVDTPHYPRWITKESKDILEKLFEREPTKRLGVTGNIKIHPFFKTINWTLLEKRRLEPPFRPKVKSPRDYSNFDQEFLNEKARLSYSDKNLIDSMDQSAFAGFSFVNPKFEHLLED

SEQ ID NO: 749332 - protein, 448 aa, Homo sapiens [sequence omitted]

SEQ ID NO: 749333 - protein, 361 aa, Homo sapiens
DLRLHDVHHGLVWEDPGVTGQNIGIFHDGEGCGGVFPNLQQCSSFGKVLLGELKGRGEYFAIKALKKDVVLIDDDVECTMVEKRVLTLAAENPFLTHLICTFQTKDHLFFVMEFLNGGDLMYHIQDKGRFELYRATFYAAEIMCGLQFLHSKGIIYRDLKLDNVLLDRDGHIKIADFGMCKENIFGESRASTFCGTPDYIAPEILQGLKYTFSVDWWSFGVLLYEMLIGQSPFHGDDEDELFESIRVDTPHYPRWITKESKDILEKLFEREPTKRLGVTGNIKIHPFFKTINWTLLEKRRLEPPFRPKVKSPRDYSNFDQEFLNEKARLSYSDKNLIDSMDQSAFAGFSFVNPKFEHLLED

SEQ ID NO: 749334 - protein, 761 aa, Homo sapiens
CRGAGARGGCSPHLPSDPRRPPAARRPGPHLTGRLAHPSQRRAEPRPRAPGSGAPAAAAATLGACPCNGSPTAGPTMAPFLRIAFNSYELGSLQAEDEANQPFCAVKMKEALSTERGKTLVQKKPTMYPEWKSTFDAHIYEGRVIQIVLMRAAEEPVSEVTVGVSVLAERCKKNNGKAEFWLDLQPQAKVLMSVQYFLEDVDCKQSMRSEDEAKFPTMNRRGAIKQAKIHYIKNHEFIATFFGQPTFCSVCKDFVWGLNKQGYKCRQCNAAIHKKCIDKIIGRCTGTAANSRDTIFQKERFNIDMPHRFKVHNYMSPTFCDHCGSLLWGLVKQGLKCEDCGMNVHHKCREKVANLCGINQKLLAEALNQVTQRASRRSDSASSEPVGIYQGFEKKTGVAGEDMQDNSGTYGKIWEGSSKCNINNFIFHKVLGKGSFGKVLLGELKGRGEYFAIKALKKDVVLIDDDVECTMVEKRVLTLAAENPFLTHLICTFQTKDHLFFVMEFLNGGDLMYHIQDKGRFELYRATFYAAEIMCGLQFLHSKGIIYRDLKLDNVLLDRDGHIKIADFGMCKENIFGESRASTFCGTPDYIAPEILQGLKYTFSVDWWSFGVLLYEMLIGQSPFHGDDEDELFESIRVDTPHYPRWITKESKDILEKLFEREPTKRLGVTGNIKIHPFFKTINWTLLEKRRLEPPFRPKVKSPRDYSNFDQEFLNEKARLSYSDKNLIDSMDQSAFAGLAPPLPPERPWLPSGRALMVLPL

SEQ ID NO: 749335 - protein, 145 aa, Homo sapiens
CHIYIFLKKINIHQSPFHGDDEDELFESIRVDTPHYPRWITKESKDILEKLFEREPTKRLGVTGNIKIHPFFKTINWTLLEKRRLEPPFRPKVKSPRDYSNFDQEFLNEKARLSYSDKNLIDSMDQSAFAGFSFVNPKFEHLLED

SEQ ID NO: 749336 - protein, 654 aa, Homo sapiens
CRGAGARGGCSPHLPSDPRRPPAARRPGPHLTGRLAHPSQRRAEPRPRAPGSGAPAAAAATLGACPCNGSPTAGPTMAPFLRIAFNSYELGSLQAEDEANQPFCAVKMKEALSTERGKTLVQKKPTMYPEWKSTFDAHIYEGRVIQIVLMRAAEEPVSEVTVGVSVLAERCKKNNGKAEFWLDLQPQAKVLMSVQYFLEDVDCKQSMRSEDEAKFPTMNRRGAIKQAKIHYIKNHEFIATFFGQPTFCSVCKDFVWGLNKQGYKCRQCNAAIHKKCIDKIIGRCTGTAANSRDTIFQKERFNIDMPHRFKVHNYMSPTFCDHCGSLLWGLVKQGLKCEDCGMNVHHKCREKVANLCGINQKLLAEALNQVTQRASRRSDSASSEPVGIYQGFEKKTGVAGEDMQDNSGTYGKIWEGSSKCNINNFIFHKVLGKGSFGKVLLGELKGRGEYFAIKALKKDVVLIDDDVECTMVEKRVLTLAAENPFLTHLICTFQTKDHLFFVMEFLNGGDLMYHIQDKGRFELYRATFYAAEIMCGLQFLHSKGIIYRDLKLDNVLLDRDGHIKIADFGMCKENIFGESRASTFCGTPDYIAPEILQGLKYTFSVDWWSFGVLLYEMLIGSWYFLCELCVNLLFLCLRREIVNPVFHYLNVVIY

SEQ ID NO: 749337 - protein, 565 aa, Homo sapiens
CRGAGARGGCSPHLPSDPRRPPAARRPGPHLTGRLAHPSQRRAEPRPRAPGSGAPAAAAATLGACPCNGSPTAGPTMAPFLRIAFNSYELGSLQAEDEANQPFCAVKMKEALSTERGKTLVQKKPTMYPEWKSTFDAHIYEGRVIQIVLMRAAEEPVSEVTVGVSVLAERCKKNNGKAEFWLDLQPQAKVLMSVQYFLEDVDCKQSMRSEDEAKFPTMNRRGAIKQAKIHYIKNHEFIATFFGQPTFCSVCKDFVWGLNKQGYKCRQCNAAIHKKCIDKIIGRCTGTAANSRDTIFQKERFNIDMPHRFKVHNYMSPTFCDHCGSLLWGLVKQGLKCEDCGMNVHHKCREKVANLCGINQKLLAEALNQVTQRASRRSDSASSEPVGIYQGFEKKTGVAGEDMQDNSGTYGKIWEGSSKCNINNFIFHKVLGKGSFGKVLLGELKGRGEYFAIKALKKDVVLIDDDVECTMVEKRVLTLAAENPFLTHLICTFQTKDHLFFVMEFLNGGDLMYHIQDKGRFELYRATYVRAMVGKGPVWRKGYWLRAHFQSALHAFFPLPRKASL

SEQ ID NO: 749338 - protein, 367 aa, Homo sapiens
CRGAGARGGCSPHLPSDPRRPPAARRPGPHLTGRLAHPSQRRAEPRPRAPGSGAPAAAAATLGACPCNGSPTAGPTMAPFLRIAFNSYELGSLQAEDEANQPFCAVKMKEALSTERGKTLVQKKPTMYPEWKSTFDAHIYEGRVIQIVLMRAAEEPVSEVTVGVSVLAERCKKNNGKAEFWLDLQPQAKVLMSVQYFLEDVDCKQSMRSEDEAKFPTMNRRGAIKQAKIHYIKNHEFIATFFGQPTFCSVCKDFVWGLNKQGYKCRQCNAAIHKKCIDKIIGRCTGTAANSRDTIFQKERFNIDMPHRFKVHNYMSPTFCDHCGCPLPTISTSGTVVTSAAGPAPAPRASLAAVWPGSHGTSSVNCV

SEQ ID NO: 749339 - protein, 77 aa, Homo sapiens
YVDEACMKCDDCGMNVHHKCREKVANLCGINQKLLAEALNQVTQRASRRSDSASSEPVGIYQGFEKKTGVAGEDMQG

SEQ ID NO: 749340 - protein, 201 aa, Homo sapiens
AAAPEPEAAVAHISRATPGARPPRGGPGHTSLAAWPIPVSAAPNPVRARRGAAPPPLPPRPLAPAPATGGWSAVARSRLTATSTSRVQVILLPQPPSPTAGPTMAPFLRIAFNSYELGSLQAEDEANQPFCAVKMKEALSTERGKTLVQKKPTMYPEWKSTFDAHIYEGRVIQIAGPAPAPRASLAAVWPGSHGTSSVNCV

SEQ ID NO: 749341 - protein, 107 aa, Homo sapiens
DSRVSQISQRGKTLVQKKPTMYPEWKSTFDAHIYEGRVIQIVLMRAAEEPVSEVTVGVSVLAERCKKNNGKAEFWLDLQPQAKVLMSVQYFLEDVDLQTVYAQMGYG

SEQ ID NO: 749342 - protein, 752 aa, Homo sapiens; identical to SEQ ID NO: 749329

SEQ ID NO: 749343 - protein, 752 aa, Homo sapiens; identical to SEQ ID NO: 749329

SEQ ID NO: 749344 - protein, 676 aa, Homo sapiens
MAPFLRIAFNSYELGSLQAEDEANQPFCAVKMKEALSTERGKTLVQKKPTMYPEWKSTFDAHIYEGRVIQIVLMRAAEEPVSEVTVGVSVLAERCKKNNGKAEFWLDLQPQAKVLMSVQYFLEDVDCKQSMRSEDEAKFPTMNRRGAIKQAKIHYIKNHEFIATFFGQPTFCSVCKDFVWGLNKQGYKCRQCNAAIHKKCIDKIIGRCTGTAANSRDTIFQKERFNIDMPHRFKVHNYMSPTFCDHCGSLLWGLVKQGLKCEDCGMNVHHKCREKVANLCGINQKLLAEALNQVTQRASRRSDSASSEPVGIYQGFEKKTGVAGEDMQDNSGTYGKIWEGSSKCNINNFIFHKVLGKGSFGKVLLGELKGRGEYFAIKALKKDVVLIDDDVECTMVEKRVLTLAAENPFLTHLICTFQTKDHLFFVMEFLNGGDLMYHIQDKGRFELYRATFYAAEIMCGLQFLHSKGIIYRDLKLDNVLLDRDGHIKIADFGMCKENIFGESRASTFCGTPDYIAPEILQGLKYTFSVDWWSFGVLLYEMLIGQSPFHGDDEDELFESIRVDTPHYPRWITKESKDILEKLFEREPTKRLGVTGNIKIHPFFKTINWTLLEKRRLEPPFRPKVKSPRDYSNFDQEFLNEKARLSYSDKNLIDSMDQSAFAGFSFVNPKFEHLLED

SEQ ID NO: 749345 - protein, 655 aa, Homo sapiens
ELATCFWILKMQDALSTERGKTLVQKKPTMYPEWKSTFDAHIYEGRVIQIVLMRAAEEPVSEVTVGVSVLAERCKKNNGKAEFWLDLQPQAKVLMSVQYFLEDVDCKQSMRSEDEAKFPTMNRRGAIKQAKIHYIKNHEFIATFFGQPTFCSVCKDFVWGLNKQGYKCRQCNAAIHKKCIDKIIGRCTGTAANSRDTIFQKERFNIDMPHRFKVHNYMSPTFCDHCGSLLWGLVKQGLKCEDCGMNVHHKCREKVANLCGINQKLLAEALNQVTQRASRRSDSASSEPVGIYQGFEKKTGVAGEDMQDNSGTYGKIWEGSSKCNINNFIFHKVLGKGSFGKVLLGELKGRGEYFAIKALKKDVVLIDDDVECTMVEKRVLTLAAENPFLTHLICTFQTKDHLFFVMEFLNGGDLMYHIQDKGRFELYRATFYAAEIMCGLQFLHSKGIIYRDLKLDNVLLDRDGHIKIADFGMCKENIFGESRASTFCGTPDYIAPEILQGLKYTFSVDWWSFGVLLYEMLIGQSPFHGDDEDELFESIRVDTPHYPRWITKESKDILEKLFEREPTKRLGVTGNIKIHPFFKTINWTLLEKRRLEPPFRPKVKSPRDYSNFDQEFLNEKARLSYSDKNLIDSMDQSAFAGFSFVNPKFEHLLED

SEQ ID NO: 749346 - protein, 342 aa, Homo sapiens
KASARLVCESAEEHFIFHKVLGKGSFGKVLLGELKGRGEYFAIKALKKDVVLIDDDVECTMVEKRVLTLAAENPFLTHLICTFQTKDHLFFVMEFLNGGDLMYHIQDKGRFELYRATFYAAEIMCGLQFLHSKGIIYRDLKLDNVLLDRDGHIKIADFGMCKENIFGESRASTFCGTPDYIAPEILQGLKYTFSVDWWSFGVLLYEMLIGQSPFHGDDEDELFESIRVDTPHYPRWITKESKDILEKLFEREPTKRLGVTGNIKIHPFFKTINWTLLEKRRLEPPFRPKVKSPRDYSNFDQEFLNEKARLSYSDKNLIDSMDQSAFAGFSFVNPKFEHLLED

SEQ ID NO: 749347 - protein, 310 aa, Homo sapiens
SSSQSVMKGRGTTAQKDVVLIDDDVECTMVEKRVLTLAAENPFLTHLICTFQTKDHLFFVMEFLNGGDLMYHIQDKGRFELYRATFYAAEIMCGLQFLHSKGIIYRDLKLDNVLLDRDGHIKIADFGMCKENIFGESRASTFCGTPDYIAPEILQGLKYTFSVDWWSFGVLLYEMLIGQSPFHGDDEDELFESIRVDTPHYPRWITKESKDILEKLFEREPTKRLGVTGNIKIHPFFKTINWTLLEKRRLEPPFRPKVKSPRDYSNFDQEFLNEKARLSYSDKNLIDSMDQSAFAGFSFVNPKFEHLLED

SEQ ID NO: 749348 - protein, 433 aa, Homo sapiens
CRGAGARGGCSPHLPSDPRRPPAARRPGPHLTGRLAHPSQRRAEPRPRAPGSGAPAAAAATLGACPCNGSPTAGPTMAPFLRIAFNSYELGSLQAEDEANQPFCAVKMKEALSTERGKTLVQKKPTMYPEWKSTFDAHIYEGRVIQIVLMRAAEEPVSEVTVGVSVLAERCKKNNGKAEFWLDLQPQAKVLMSVQYFLEDVDCKQSMRSEDEAKFPTMNRRGAIKQAKIHYIKNHEFIATFFGQPTFCSVCKDFVWGLNKQGYKCRQCNAAIHKKCIDKIIGRCTGTAANSRDTIFQKERFNIDMPHRFKVHNYMSPTFCDHCGSLLWGLVKQGLKCEDCGMNVHHKCREKVANLCGINQKLLAEALNQVTQRASRRSDSASSEPVGIYQGFEKKTGVAGEDMQDNSGTYGKIWEGSSKCNINKSKSTPSSRP

SEQ ID NO: 749349 - protein, 597 aa, Homo sapiens
CRGAGARGGCSPHLPSDPRRPPAARRPGPHLTGRLAHPSQRRAEPRPRAPGSGAPAAAAATLGACPCNGSPTAGPTMAPFLRIAFNSYELGSLQAEDEANQPFCAVKMKEALSTERGKTLVQKKPTMYPEWKSTFDAHIYEGRVIQIVLMRAAEEPVSEVTVGVSVLAERCKKNNGKAEFWLDLQPQAKVLMSVQYFLEDVDCKQSMRSEDEAKFPTMNRRGAIKQAKIHYIKNHEFIATFFGQPTFCSVCKDFVWGLNKQGYKCRQCNAAIHKKCIDKIIGRCTGTAANSRDTIFQKERFNIDMPHRFKVHNYMSPTFCDHCGSLLWGLVKQGLKCEDCGMNVHHKCREKVANLCGINQKLLAEALNQVTQRASRRSDSASSEPVGIYQGFEKKTGVAGEDMQDNSGTYGKIWEGSSKCNINNFIFHKVLGKGSFGKVLLGELKGRGEYFAIKALKKDVVLIDDDVECTMVEKRVLTLAAENPFLTHLICTFQTKDHLFFVMEFLNGGDLMYHIQDKGRFELYRATFYAAEIMCGLQFLHSKGIIYRDLKLDNVLLDRDGHIKIADFGMCKENIFGESRASTFCGTVWTLGTVWTL

SEQ ID NO: 749350 - protein, 513 aa, Homo sapiens
CRGAGARGGCSPHLPSDPRRPPAARRPGPHLTGRLAHPSQRRAEPRPRAPGSGAPAAAAATLGACPCNGSPTAGPTMAPFLRIAFNSYELGSLQAEDEANQPFCAVKMKEALSTERGKTLVQKKPTMYPEWKSTFDAHIYEGRVIQIVLMRAAEEPVSEVTVGVSVLAERCKKNNGKAEFWLDLQPQAKVLMSVQYFLEDVDCKQSMRSEDEAKFPTMNRRGAIKQAKIHYIKNHEFIATFFGQPTFCSVCKDFVWGLNKQGYKCRQCNAAIHKKCIDKIIGRCTGTAANSRDTIFQKERFNIDMPHRFKVHNYMSPTFCDHCGSLLWGLVKQGLKCEDCGMNVHHKCREKVANLCGINQKLLAEALNQVTQRASRRSDSASSEPVGIYQGFEKKTGVAGEDMQDNSGTYGKIWEGSSKCNINNFIFHKVLGKGSFGKVLLGELKGRGEYCDEGRGSCPFGGNCFYKHAYPDAVERSHRDRKWEHQADTGPNEGYHFWELIEERENSNPFDIR

SEQ ID NO: 749351 - protein, 287 aa, Homo sapiens
MAPFLRIAFNSYELGSLQAEDEANQPFCAVKMKEALSTERGKTLVQKKPTMYPEWKSTFDAHIYEGRVIQIVLMRAAEEPVSEVTVGVSVLAERCKKNNGKAEFWLDLQPQAKVLMSVQYFLEDVDCKQSMRSEDEAKFPTMNRRGAIKQAKIHYIKNHEFIATFFGQPTFCSVCKDFVWGLNKQGYKCRQCNAAIHKKCIDKIIGRCTGTAANSRDTILPAPHDKHQWDCGDFCCWPRPCPQSVLGCRLAGLSWYFLCELCVNLLFLCLRREIVNPVFHYLNVVIY

SEQ ID NO: 749352 - protein, 112 aa, Homo sapiens
MPHVAAGRKEVIRSLPRVAATTHCWRTQCQAALMARQRLTQEVGHILGVTSEMWRAGRKVGFLHLSPSASSHGSKPPRPVPTHPGSLGSHLQVLQTGGRRQPGRPRGTASQD

SEQ ID NO: 749353 - protein, 112 aa, Homo sapiens
WGEEQRESKPIVVLNIISGINLFSNHFSPSPHLLALRPKKPYRNNQNDQLFPTGLNLPTDFKKSPSKLPVSLPFPKHTHIPKLWSIFSIYGGGAPAHAPIKSKGGYQFSVIV

SEQ ID NO: 749354 - protein, 361 aa, Homo sapiens
MASLLAKDAYLQSLAKKICSHSAPEQQARTRAGKTQGSETAGPPKKKRKKTQKKFRKREEKAAEHKAKSLGEKSPAASGARRPEAAKEEAAWASSSAGNPADGLATEPESVFALDVLRQRLHEKIQEARGQGSAKELSPAALEKRRRRKQERDRKKRKRKELRAKEKARKAEEATEAQEVVEATPEGACTEPREPPGLIFNKVEVSEDEPASKAQRRKEKRQRVKGNLTPLTGRNYRQLLERLQARQSRLDELRGQDEGKAQELEAKMKWTNLLYKAEGVKIRDDERLLQEALKRKEKRRAQRQRRWEKRTAGVVEKMQQRQDRRRQNLRRKKAARAERRLLRARKKGRILPQDLERAGLV

SEQ ID NO: 749355 - protein, 365 aa, Homo sapiens
SSSAGNPADGLATEPESVFALDVLRQRLHEKIQEARGQGSAKELSPAALEKRKKTQKKFRKREEKAAEHKAKSLGEKSPAASGARRPEAAKEEAAWASSSAGNPADGLATEPESVFALDVLRQRLHEKIQEARGQGSAKELSPAALEKRRRRKQERDRKKRKRKELRAKEKARKAEEATEAQEVVEATPEGACTEPREPPGLIFNKVEVSEDEPASKAQRRKEKRQRVKGNLTPLTGRNYRQLLERLQARQSRLDELRGQDEGKAQELEAKMKWTNLLYKAEGVKIRDDERLLQEALKRKEKRRAQRQRRWEKRTAGVVEKMQQRQDRRRQNLRRKKAARAERRLLRARKKGRILPQDLERAGLV

SEQ ID NO: 749356 - protein, 365 aa, Homo sapiens; identical to SEQ ID NO: 749355

SEQ ID NO: 749357 - protein, 365 aa, Homo sapiens; identical to SEQ ID NO: 749355

SEQ ID NO: 749358 - protein, 365 aa, Homo sapiens; identical to SEQ ID NO: 749355

SEQ ID NO: 749359 - protein, 116 aa, Homo sapiens [sequence omitted]

SEQ ID NO: 749360 - protein, 115 aa, Homo sapiens
MAPLTRGLLLRGRRLPSSRKALPSPTRNRQPRPRSRLLWPQVSTLPAAQSLVYSRRLINTGWANTTHPSCSDVGVGLIAECRPAPPCLLALKGWAGPRPAPWSSPGRAGVGMFAQ

SEQ ID NO: 749361 - protein, 113 aa, Homo sapiens
ERELERENLSHHVVPKEFKLNLCPREICSASLSTHLSLLEMPGRANASGASQYIHIWNFHLAPLFTSTHHPGQVCFLPGKPGFTARTAQCGCEIMIKCQKHSDIRELVKVDLT

SEQ ID NO: 749362 - protein, 109 aa, Homo sapiens
MWSTRSPNSTAWPLSLEPDPGMSGWPDGRMETSTPTIMDIVVIAGVIAAVAIVLVSLLFVMLRYMYRHKGTYHTNEAKGTEFAESADAALQGDPALQDAGDSSRKEYFI

SEQ ID NO: 749363 - protein, 128 aa, Homo sapiens
MWSTRSPNSTAWPLSLEPDPGMASASTTMHTTTIAEPDPGMSGWPDGRMETSTPTIMDIVVIAGVIAAVAIVLVSLLFVMLRYMYRHKGTYHTNEAKGTEFAESADAALQGDPALQDAGDSSRKEYFI

SEQ ID NO: 749364 - protein, 91 aa, Homo sapiens
LRARAPPLGPRGRSVTQVPLPLAAEGQEPGSATLPRPGLARPGQSPRSLPGLTPRNVVDEKPQQHGVASQPRSWVKGTGATVIIPIQSLRR

SEQ ID NO: 749365 - protein, 128 aa, Homo sapiens; identical to SEQ ID NO: 749363

SEQ ID NO: 749366 - protein, 128 aa, Homo sapiens; identical to SEQ ID NO: 749363

SEQ ID NO: 749367 - protein, 128 aa, Homo sapiens; identical to SEQ ID NO: 749363

SEQ ID NO: 749368 - protein, 128 aa, Homo sapiens; identical to SEQ ID NO: 749363

SEQ ID NO: 749369 - protein, 128 aa, Homo sapiens; identical to SEQ ID NO: 749363

SEQ ID NO: 749370 - protein, 128 aa, Homo sapiens; identical to SEQ ID NO: 749363

SEQ ID NO: 749371 - protein, 128 aa, Homo sapiens; identical to SEQ ID NO: 749363

SEQ ID NO: 749372 - protein, 181 aa, Homo sapiens
  misc_feature (149)..(149): Xaa can be any naturally occurring amino acid
MLRRRYAGFVIPFHGAGVFLVLFHVPAVSARADAQECGRREAPTARRGLSASFPECLPHLHQEKYTPSPSTPADTTRQRERALDSSRDSHLETLGACPGRNGGGLALTRGHSQGPREAMATPEATFCSTEVGENLGTWGPLGKVAGQHXAHCAGQHQLTGRKVLVEGEGVLGYPGAGEARK

SEQ ID NO: 749373 - protein, 213 aa, Homo sapiens
GFPAEAAAMAASSLTVTLGRLASACSHSILRPSGPGAASLWSASRRFNSQSTSYLPGYVPKTSLSSPPWPEVVLPDPVEETRHHAEVVKKVNEMIVTGQYGRLFAVVHFASRQWKVTSEDLILIGNELDLACGERIRLEKVLLVGADNFTLLGKPLLGKDLVRVEATVIEKTESWPRIIMRFRKRKNFKKKRIVTTPQTVLRINSIEIAPCLL

SEQ ID NO: 749374 - protein, 213 aa, Homo sapiens; identical to SEQ ID NO: 749373

SEQ ID NO: 749375 - protein, 213 aa, Homo sapiens; identical to SEQ ID NO: 749373

SEQ ID NO: 749376 - protein, 202 aa, Homo sapiens
GFPAEAAAMAASSLTVTLGRLASACSHSILRPSGPGAASLWSASRRYVPKTSLSSPPWPEVVLPDPVEETRHHAEVVKKVNEMIVTGQYGRLFAVVHFASRQWKVTSEDLILIGNELDLACGERIRLEKVLLVGADNFTLLGKPLLGKDLVRVEATVIEKTESWPRIIMRFRKRKNFKKKRIVTTPQTVLRINSIEIAPCLL

SEQ ID NO: 749377 - protein, 195 aa, Homo sapiens
GFPAEAAAMAASSLTVTLGRLASACSHSILRPSGPGAASLWSASRRFNSQSTSYLPGYVPEETRHHAEVVKKVNEMIVTGQYGRLFAVVHFASRQWKVTSEDLILIGNELDLACGERIRLEKVLLVGADNFTLLGKPLLGKDLVRVEATVIEKTESWPRIIMRFRKRKNFKKKRIVTTPQTVLRINSIEIAPCLL

SEQ ID NO: 749378 - protein, 146 aa, Homo sapiens
MCFTDMFLYVPEETRHHAEVVKKVNEMIVTGQYGRLFAVVHFASRQWKVTSEDLILIGNELDLACGERIRLEKVLLVGADNFTLLGKPLLGKDLVRVEATVIEKTESWPRIIMRFRKRKNFKKKRIVTTPQTVLRINSIEIAPCLL

SEQ ID NO: 749379 - protein, 188 aa, Homo sapiens
MPAYLDLLGPGAASLWSASRRFNSQSTSYLPGYVPKTSLSSPPWPEVVLPDPVEETRHHAEVVKKVNEMIVTGQYGRLFAVVHFASRQWKVTSEDLILIGNELDLACGERIRLEKVLLVGADNFTLLGKPLLGKDLVRVEATVIEKTESWPRIIMRFRKRKNFKKKRIVTTPQTVLRINSIEIAPCLL

SEQ ID NO: 749380 - protein, 181 aa, Homo sapiens
LFLLHLLQKVQVCRFNSQSTSYLPGYVPKTSLSSPPWPEVVLPDPVEETRHHAEVVKKVNEMIVTGQYGRLFAVVHFASRQWKVTSEDLILIGNELDLACGERIRLEKVLLVGADNFTLLGKPLLGKDLVRVEATVIEKTESWPRIIMRFRKRKNFKKKRIVTTPQTVLRINSIEIAPCLL

SEQ ID NO: 749381 - protein, 158 aa, Homo sapiens
GFPAEAAAMAASSLTVTLGRLASACSHSILRPSGPGAASLWSASRRFNSQSTSYLPGYVPKTSLSSPPWPEVVLPDPVEETRHHAEVVKKVNEMIVTGQYGRLFAVVHFASRQWKVTSEDLILIGNELDLACGERIRLEKVLLVGADNFTLLGKPLLG

SEQ ID NO: 749382 - protein, 207 aa, Homo sapiens
TQESALEGEARGTRPHQPNIKDTIGTAAPAAPTPHRRLHLHGHPLRRTVDHQPPHHHSILRPSGPGAASLWSASRRFNSQSTSYLPGYVPKTSLSSPPWPEVVLPDPVEVTSEDLILIGNELDLACGERIRLEKVLLVGADNFTLLGKPLLGKDLVRVEATVIEKTESWPRIIMRFRKRKNFKKKRIVTTPQTVLRINSIEIAPCLL

SEQ ID NO: 749383 - protein, 392 aa, Homo sapiens
MELVAGCYEQVLFGFAVHPEPEACGDHEQWTLVADFTHHAHTASLSAVAVNSRFVVTGSKDETIHIYDMKKKIEHGALVHHSGTITCLKFYGNRHLISGAEDGLICIWDAKKWECLKSIKAHKGQVTFLSIHPSGKLALSVGTDKTLRTWNLVEGRSAFIKNIKQNAHIVEWSPRGEQYVVIIQNKIDIYQLDTASISGTITNEKRISSVKFLSESVLAVAGDEEVIRFFDCDSLVCLCEFKAHENRVKDMFSFEIPEHHVIVSASSDGFIKMWKLKQDKKVPPSLLCEINTNARLTCLGVWLDKVADMKESLPPAAEPSPVSKEQSKIGKKEPGDTVHKEEKRSKPNTKKRGLTGDSKKATKESGLISTKKRKMVEMLEKKRKKKKIKTMQ

SEQ ID NO: 749384 - protein, 131 aa, Homo sapiens
MLSSNPVKQYLNCSRTSRRQNPSASEFKKEGLYSAGIFGKTHVSNNQAPQRRGFTMFGQGWSRSLDLVKSAGITGMREPLRLAILFYFLRQSPDLKQSACLGLAKCWDYRSEPPCPAKKDFGRVNEYKDFH

SEQ ID NO: 749385 - protein, 392 aa, Homo sapiens; identical to SEQ ID NO: 749383

SEQ ID NO: 749386 - protein, 392 aa, Homo sapiens; identical to SEQ ID NO: 749383

SEQ ID NO: 749387 - protein, 324 aa, Homo sapiens [sequence omitted]

SEQ ID NO: 749388 - protein, 335 aa, Homo sapiens
RQAKAKVEAGCNIGRGEHGALVHHSGTITCLKFYGNRHLISGAEDGLICIWDAKKWECLKSIKAHKGQVTFLSIHPSGKLALSVGTDKTLRTWNLVEGRSAFIKNIKQNAHIVEWSPRGEQYVVIIQNKIDIYQLDTASISGTITNEKRISSVKFLSESVLAVAGDEEVIRFFDCDSLVCLCEFKAHENRVKDMFSFEIPEHHVIVSASSDGFIKMWKLKQDKKVPPSLLCEINTNARLTCLGVWLDKVADMKESLPPAAEPSPVSKEQSKIGKKEPGDTVHKEEKRSKPNTKKRGLTGDSKKATKESGLISTKKRKMVEMLEKKRKKKKIKTMQ

SEQ ID NO: 749389 - protein, 142 aa, Homo sapiens
MFSFEIPEHHVIVSASSDGFIKMWKLKQDKKVPPSLLCEINTNARLTCLGVWLDKVADMKESLPPAAEPSPVSKEQSKIGKKEPGDTVHKEEKRSKPNTKKRGLTGDSKKATKESGLISTKKRKMVEMLEKKRKKKKIKTMQ

SEQ ID NO: 749390 - protein, 217 aa, Homo sapiens
MELVAGCYEQVLFGFAVHPEPEACGDHEQWTLVADFTHHAHTASLSAVAVNSRFVVTGSKDETIHIYDMKKKIEHGALVHHSGTITCLKFYGNRHLISGAEDGLICIWDAKKWECLKSIKAHKGQVTFLSIHPSGKLALSVGTDKTLRTWNLVEGRSAFIKNIKQNAHIVEWSPRGEQYVVIIQNKIDIYQLDTASISGTITNEKRISSVKFLSELA

SEQ ID NO: 749391 - protein, 125 aa, Homo sapiens
  misc_feature (6)..(6): Xaa can be any naturally occurring amino acid
RTPGKXRTVVQPSVGAAAGPVVPPCPGRIRHFKVWLDKVADMKESLPPAAEPSPVSKEQSKIGKKEPGDTVHKEEKRSKPNTKKRGLTGDSKKATKESGLISTKKRKMVEMLEKKRKKKKIKTMQ

SEQ ID NO: 749392 - protein, 231 aa, Homo sapiens
MELVAGCYEQVLFGFAVHPEPEACGDHEQWTLVADFTHHAHTASLSAVAVNSRFVVTGSKDETIHIYDMKKKIEHGALVHHSGTITCLKFYGNRHLISGAEDGLICIWDAKKWECLKSIKAHKGQVTFLSIHPSGKLALSVGTDKTLRTWNLVEGRSAFIKNIKQNAHIVEWSPRGEQYVVIIQNKIDIYQLDTASISGTITNEKRISSVKFLSESGLAGAGKTMKQGKAL

SEQ ID NO: 749393 - protein, 256 aa, Homo sapiens
MELVAGCYEQVLFGFAVHPEPEACGDHEQWTLVADFTHHAHTASLSAVAVNSRFVVTGSKDETIHIYDMKKKIEHGALVHHSGTITCLKFYGNRHLISGAEDGLICIWDAKKWECLKSIKAHKGQVTFLSIHPSGKLALSVGTDKTLRTWNLVEGRSAFIKNIKQNAHIVEWSPRGEQYVVIIQNKIDIYQLDTASISGTITKKKKKKKKLGAAGLKIKPLVGRARVRTVQGPKNGRRAGPKKRGPAEPGGAVKAA

SEQ ID NO: 749394 - protein, 111 aa, Homo sapiens
YLLNCRSGGDPDNFTLLTACVYFIQRGKQSFFKSTLFCVLVSKEQSKIGKKEPGDTVHKEEKRSKPNTKKRGLTGDSKKATKESGLISTKKRKMVEMLEKKRKKKKIKTMQ

SEQ ID NO: 749395 - protein, 30 aa, Homo sapiens
YPETCRSLLAPGVETFSMIRRVSCSKGPLR

SEQ ID NO: 749396 - protein, 71 aa, Homo sapiens
ELLVATSDPHRQSLLENKANMQEEEEESWMHINPSIDKEPGGILRPRMQLCCNRKHLCISRLRQATDSLFD

SEQ ID NO: 749397 - protein, 72 aa, Homo sapiens
RRHMVSVGSKLRISFPDKLHHILTVHEEGSRPLSREASRLSRPGWCHHLQFAHEEHSAYEEDLRETLQGSWG

SEQ ID NO: 749398 - protein, 87 aa, Homo sapiens
LRRSGGGGEAHTLRRLKPGFTHWRRELALRCQPCAPGAVHPDARGAPGAAADRARTDCRSYSPCRRRPGPGDIEVFVYRRWADRASF

SEQ ID NO: 749399 - protein, 35 aa, Homo sapiens
MFYNPSAAAPDLHSSSFSYIHLTLNSYIKSLYSRI

SEQ ID NO: 749400 - protein, 218 aa, Homo sapiens
MFLVPCPKPSRTLGPLVIVRAGSPQGLGACGQNQWAGAQHSKPEKGLRRHHLHRGRGREKAPPSDPPLPRQELQAVDTSLAEDGQQRLSKSSLPSQKETLPGRTHCSPLEENPMQGAMGLNPHIVIRVLSHTVSPPLSQHPSSLSPGDPWMEDWASPEWEAGPACLRAHVCACRHAPRPQRRPGPSHMVSELPWQLAFLVQSKLGSEAPGICRETHCT

SEQ ID NO: 749401 - protein, 205 aa, Homo sapiens
EGQPHQGTGAPRLLAFDWRPLSASSAPWGTRQDCQPLSWQVTSAFKLTVPSPFHAPQGPGHVFSWVSSQDRHWHWSPGTCFWVPCFPGVMVNAECQLDWIEGCKVLVTGCVCEGVARGDSHLSQWAGRGRPTLNPGGHHLIGCQHSQDTSRQRNVERLDWLNLASIFLPCWMLPALARRPPGSSAFGLSDLHQWLAGALQPLATG

SEQ ID NO: 749402 - protein, 106 aa, Homo sapiens
SLELLTSSDLLTSASQSSGITGVSHCAWPPPLHFNSTDTLELFMDYAPFRRRQIVVIAKTFFTCHRTNFCPLGDDTASPHSAIGVISSILLGKNNNLCKRLHTHGF

SEQ ID NO: 749403 - protein, 72 aa, Homo sapiens
EQERAQQKLQATTQVAMRCGTDELAEPKVPEVSVVGTDACEVYDKTLQENHNVDTWGSGAGHAICSQEFYTS

SEQ ID NO: 749404 - protein, 309 aa, Homo sapiens
MVGFKATDVPPTATVKFLGAGTAACIADLITFPLDTAKVRLQIQGESQGPVRATASAQYRGVMGTILTMVRTEGPRSLYNGLVAGLQRQMSFASVRIGLYDSVKQFYTKGSEHASIGSRLLAGSTTGALAVAVAQPTDVVKVRFQAQARAGGGRRYQSTVNAYKTIAREEGFRGLWKGTSPNVARNAIVNCAELVTYDLIKDALLKANLMTDDLPCHFTSAFGAGFCTTVIASPVDVVKTRYMNSALGQYSSAGHCALTMLQKEGPRAFYKGFMPSFLRLGSWNVVMFVTYEQLKRALMAACTSREAPF

SEQ ID NO: 749405 - protein, 309 aa, Homo sapiens; identical to SEQ ID NO: 749404

SEQ ID NO: 749406 - protein, 309 aa, Homo sapiens; identical to SEQ ID NO: 749404

SEQ ID NO: 749407 - protein, 309 aa, Homo sapiens; identical to SEQ ID NO: 749404

SEQ ID NO: 749408 - protein, 309 aa, Homo sapiens; identical to SEQ ID NO: 749404

SEQ ID NO: 749409 - protein, 309 aa, Homo sapiens; identical to SEQ ID NO: 749404

SEQ ID NO: 749410 - protein, 309 aa, Homo sapiens; identical to SEQ ID NO: 749404

SEQ ID NO: 749411 - protein, 309 aa, Homo sapiens; identical to SEQ ID NO: 749404

SEQ ID NO: 749412 - protein, 309 aa, Homo sapiens; identical to SEQ ID NO: 749404

SEQ ID NO: 749413 - protein, 309 aa, Homo sapiens; identical to SEQ ID NO: 749404

SEQ ID NO: 749414 - protein, 309 aa, Homo sapiens; identical to SEQ ID NO: 749404

SEQ ID NO: 749415 - protein, 309 aa, Homo sapiens; identical to SEQ ID NO: 749404

SEQ ID NO: 749416 - protein, 309 aa, Homo sapiens; identical to SEQ ID NO: 749404

SEQ ID NO: 749417 - protein, 294 aa, Homo sapiens
MVGFKATDVPPTATVKFLGAGTAACIADLITFPLDTAKVRLQIQGESQGPVRATASAQYRGVMGTILTMVRTEGPRSLYNGLVAGLQRQMSFASVRIGLYDSVKQFYTKGSEHASIGSRLLAGSTTGALAVAVAQPTDVVKVRFQAQARAGGGRRYQSTVNAYKTIAREEGFRGLWKGTSPNVARNAIVNCAELVTYDLIKDALLKANLMTDDLPCHFTSAFGAGFCTTVIASPVDVVKTRYMNSALGQYSSAGHCALLKANLMTDDLPCHFTSAFGQIALTPCNVSDETSSIA

SEQ ID NO: 749418 - protein, 299 aa, Homo sapiens
MVGFKATDVPPTATVKFLGAGTAACIADLITFPLDTAKVRLQIQGESQGPVRATASAQYRGVMGTILTMVRTEGPRSLYNGLVAGLQRQMSFASVRIGLYDSVKQFYTKGSEHASIGSRLLAGSTTGALAVAVAQPTDVVKVRFQAQARAGGGRRYQSTVNAYKTIAREEGFRGLWKGTSPNVARNAIVNCAELVTYDLIKDALLKANLMTVGAGFCTTVIASPVDVVKTRYMNSALGQYSSAGHCALTMLQKEGPRAFYKGFMPSFLRLGSWNVVMFVTYEQLKRALMAACTSREAPF

SEQ ID NO: 749419 - protein, 299 aa, Homo sapiens; identical to SEQ ID NO: 749418

SEQ ID NO: 749420 - protein, 225 aa, Homo sapiens
MVGFKATDVPPTATVKFLGAGTAACIADLITFPLDTAKVRLQIQGESQGPVRATASAQYRGVMGTILTMVRTEGPRSLYNGLVAGLQRQMSFASVRIGLYDSVKQFYTKGSEHASIGSRLLAGSTTGALAVAVAQPTDVVKVRFQAQARAGGGRRYQSTVNAYKTIAREEGFRGLWKGTSPNVARNAIVNCAELVTYDLIKDALLKANLMTGSCPPFSAWVPGTW

SEQ ID NO: 749421 - protein, 329 aa, Homo sapiens
TTLLLSFHRDLELSLGLYHLRLLCKLQRRGEGCSGNTGWGQPPGQLRQWGVQAGSVLHGRPRGGVILLLTLPLSSELRGRGVMGTILTMVRTEGPRSLYNGLVAGLQRQMSFASVRIGLYDSVKQFYTKGSEHASIGSRLLAGSTTGALAVAVAQPTDVVKVRFQAQARAGGGRRYQSTVNAYKTIAREEGFRGLWKGTSPNVARNAIVNCAELVTYDLIKDALLKANLMTDDLPCHFTSAFGAGFCTTVIASPVDVVKTRYMNSALGQYSSAGHCALTMLQKEGPRAFYKGFMPSFLRLGSWNVVMFVTYEQLKRALMAACTSREAPF

SEQ ID NO: 749422 - protein, 269 aa, Homo sapiens
MVGFKATDVPPTATVKFLGAGTAACIADLITFPLDTAKVRLQIQGESQGPVRATASAQYRGVMGTILTMVRTEGPRSLYNGLVAGLQRQMSFASVRIGLYDSVKQFYTKGSEHASIGSRLLAGSTTGALAVAVAQPTDVVKVRFQAQARAGGGRRYQSTVNAYKTIAREEGFRGLWKGTSPNVARNAIVNCAELVTYDLIKDALLKANLMTDDLPCHFTSAFGAGFCTTVIASPEFCFLWELILFPKAHMLLASALCTHAHTRMGSSRT

SEQ ID NO: 749423 - protein, 299 aa, Homo sapiens; identical to SEQ ID NO: 749418

SEQ ID NO: 749424 - protein, 225 aa, Homo sapiens; identical to SEQ ID NO: 749420

SEQ ID NO: 749425 - protein, 225 aa, Homo sapiens
MVGFKATDVPPTATVKFLGAGTAACIADLITFPLDTAKVRLQIQGESQGPVRATASAQYRGVMGTILTMVRTEGPRSLYNGLVAGLQRQMSFASVRIGLYDSVKQFYTKGSEHASIGSRLLAGSTTGALAVAVAQPTDVVKVRFQAQARAGGGRRYQSTVNAYKTIAREEGFRGLWKGTSPNVARNAIVNCAELVTYDLIKDALLKANLMTASLATSLLPLGRLH

SEQ ID NO: 749426 - protein, 212 aa, Homo sapiens
MSASPLATDPSGSPTDASIGSRLLAGSTTGALAVAVAQPTDVVKVRFQAQARAGGGRRYQSTVNAYKTIAREEGFRGLWKGTSPNVARNAIVNCAELVTYDLIKDALLKANLMTDDLPCHFTSAFGAGFCTTVIASPVDVVKTRYMNSALGQYSSAGHCALTMLQKEGPRAFYKGFMPSFLRLGSWNVVMFVTYEQLKRALMAACTSREAPF

SEQ ID NO: 749427 - protein, 229 aa, Homo sapiens
MVGFKATDVPPTATVKFLGAGTAACIADLITFPLDTAKVRLQIQGESQGPVRATASAQYRGVMGTILTMVRTEGPRSLYNGLVAGLQRQMSFASVRIGLYDSVKQFYTKGSEHASIGSRLLAGSTTGALAVAVAQPTDVVKVRFQAQARAGGGRRYQSTVNAYKTIAREEGFRGLWKGTSPNVARNAIVSVLVELTFDSVGGLVPARIPSVPSLGKFSQNLRPAPDSPA

SEQ ID NO: 749428 - protein, 200 aa, Homo sapiens
MVGFKATDVPPTATVKFLGAGTAACIADLITFPLDTAKVRLQIQGESQGPVRATASAQYRGVMGTILTMVRTEGPRSLYNGLVAGLQRQMSFASVRIGLYDSVKQFYTKGSEHASIGSRLLAGSTTGALAVAVAQPTDVVKVRFQVSSRAMLSFSSFFLFPPSLLSFPLSPPLPSAPLPTTFPLSTFSSTHCLSAGGVDI

SEQ ID NO: 749429 - protein, 144 aa, Homo sapiens
MGRTETGVEKVMERTLGGAVPAERRLLQGLRTQVGAGRPGPAPQAPPRAPPPRLKPRRRLRGAPLRSPAARALGLTVHARPARPTRPPPADRHSRTHCRVLPAARTHSMTIRCFVSHPFSMENQGDRAMIATGSFEERDTFREA

SEQ ID NO: 749430 - protein, 163 aa, Homo sapiens
AGYLPLGHGLVGIDGCFGISDHLQPGPELGKGTSPNVARNAIVNCAELVTYDLIKDALLKANLMTDDLPCHFTSAFGAGFCTTVIASPVDVVKTRYMNSALGQYSSAGHCALTMLQKEGPRAFYKGFMPSFLRLGSWNVVMFVTYEQLKRALMAACTSREAPF

SEQ ID NO: 749431 - protein, 138 aa, Homo sapiens
RGGLDSASAQRTCRLDLRRVSSEVTYDLIKDALLKANLMTDDLPCHFTSAFGAGFCTTVIASPVDVVKTRYMNSALGQYSSAGHCALTMLQKEGPRAFYKGFMPSFLRLGSWNVVMFVTYEQLKRALMAACTSREAPF

SEQ ID NO: 749432 - protein, 144 aa, Homo sapiens; identical to SEQ ID NO: 749429

SEQ ID NO: 749433 - protein, 144 aa, Homo sapiens; identical to SEQ ID NO: 749429

SEQ ID NO: 749434 - protein, 144 aa, Homo sapiens; identical to SEQ ID NO: 749429

SEQ ID NO: 749435 - protein, 80 aa, Homo sapiens
QSPRLLIAIIIRGIVRDTLGSSLQQKEPGRRTSVGGLGAGGRDGRVQNLLFLTTHVIFMDPQASVTTALIHAHRLSWGHL

SEQ ID NO: 749436 - protein, 122 aa, Homo sapiens
GLQLESQDKDVCWRIVKNAYKFSKHQESASFFSSLESSMPGNINVFWPDKGQGVKGAMPSKKNLQVVKVPVQGWGQGLGQNVQTSASLQEVQSAFSSDSEAPGIKEFHAAEAMLHARARTAF

SEQ ID NO: 749437 - protein, 111 aa, Homo sapiens
PHACLPILPGSRGRPEDPGILQWLCPVALFQSSAWCLHPLFLFLFPVSPLYTSVSNTVAIITMKENNTFSPSVPLAIFPVLGSHMWLMAVKLDSMVGNMSIIKESSRVSAP

SEQ ID NO: 749438 - protein, 70 aa, Homo sapiens
QSQDVCKTQMRAGIRVLWKLQSCVFSNVIHGPEAAESGNLLECSLSLSQRAAGSGQEGDSPLERQLPSEA

SEQ ID NO: 749439 - protein, 156 aa, Homo sapiens
QAPTITKIQIIFVFLVQTGFHHVGQAGLTLLASSDPPASASQSAGITGVSHRTQPPPTLFEGLMFQVCELWMGLAFSPPVSAALRIPMNTTPRTCLSYLELKMLTFRSEKPQNLPWGYWTVMSLEPSLVEREPPRKVDRAAGCSPEHGRVLTRGPV

SEQ ID NO: 749440 - protein, 138 aa, Homo sapiens
RRVGPAGPRAGRGRGEGCRVVFRPAARSPLRPGPRLPAVGGGGPHSVPGPSRPRQPPARGAPPFVWVSAPRTRGRELRSAASPAGCAMGCGNSTATSAGAGQGPAGAAKDVNYGGVYVGLPSEAVNMVSSQTKTVRKN

SEQ ID NO: 749441 - protein, 150 aa, Homo sapiens
RRVGPAGPRAGRGRGEGCRVVFRPAARSPLRPGPRLPAVGGGGPHSVPGPSRPRQPPARGAPPFVWVSAPRTRGRELRSAASPAGCAMGCGNSTATSAGAGQGPAGAAKDVTEESVTEDDKRRNYGGVYVGLPSEAVNMVSSQTKTVRKN

SEQ ID NO: 749442 - protein, 150 aa, Homo sapiens; identical to SEQ ID NO: 749441

SEQ ID NO: 749443 - protein, 138 aa, Homo sapiens; identical to SEQ ID NO: 749440

SEQ ID NO: 749444 - protein, 150 aa, Homo sapiens; identical to SEQ ID NO: 749441

SEQ ID NO: 749445 - protein, 150 aa, Homo sapiens; identical to SEQ ID NO: 749441

SEQ ID NO: 749446 - protein, 111 aa, Homo sapiens
RRVGPAGPRAGRGRGEGCRVVFRPAARSPLRPGPRLPAVGGGGPHSVPGPSRPRQPPARGAPPFVWVSAPRTRGRELRSAASPAGCAMGCGNSTATSAGAGQGPAGAAKDV

SEQ ID NO: 749447 - protein, 842 aa, Homo sapiens
MVTVGNYCEAEGPVGPAWMQDGLSPCFFFTLVPSTRMALGTLALVLALPCRRRERPAGADSLSWGAGPRISPYVLQLLLATLQAALPLAGLAGRVGTARGAPLPSYLLLASVLESLAGACGLWLLVVERSQARQRLAMGIWIKFRHSPGLLLLWTVAFAAENLALVSWNSPQWWWARADLGQQVQFSLWVLRYVVSGGLFVLGLWAPGLRPQSYTLQVHEEDQDVERSQVRSAAQQSTWRDFGRKLRLLSGYLWPRGSPALQLVVLICLGLMGLERALNVLVPIFYRNIVNLLTEKAPWNSLAWTVTSYVFLKFLQGGGTGSTGFVSNLRTFLWIRVQQFTSRRVELLIFSHLHELSLRWHLGRRTGEVLRIADRGTSSVTGLLSYLVFNVIPTLADIIIGIIYFSMFFNAWFGLIVFLCMSLYLTLTIVVTEWRTKFRRAMNTQENATRARAVDSLLNFETVKYYNAESYEVERYREAIIKYQGLEWKSSASLVLLNQTQNLVIGLGLLAGSLLCAYFVTEQKLQVGDYVLFGTYIIQLYMPLNWFGTYYRMIQTNFIDMENMFDLLKEETEVKDLPGAGPLRFQKGRIEFENVHFSYADGRETLQDVSFTVMPGQTLALVGPSGAGKSTILRLLFRFYDISSGCIRIDGQDISQVTQASLRSHIGVVPQDTVLFNDTIADNIRYGRVTAGNDEVEAAAQAAGIHDAIMAFPEGYRTQVGERGLKLSGGEKQRVAIARTILKAPGIILLDEATSALDTSNERAIQASLAKVCANRTTIVVAHRLSTVVNADQILVIKDGCIVERGRHEALLSRGGVYADMWQLQQGQEETSEDTKPQTMER

SEQ ID NO: 749448 - protein, 100 aa, Homo sapiens
LKVPGLFWWGGKFGVENFKERPIQAFSAKVRANRTTIVGATLLSTVVNADQILVIKDGCIVERGRHEALLSRGGVYADMWQLQQGQEETSEDTKPQTMER

SEQ ID NO: 749449 - protein, 842 aa, Homo sapiens; identical to SEQ ID NO: 749447

SEQ ID NO: 749450 - protein, 842 aa, Homo sapiens; identical to SEQ ID NO: 749447

SEQ ID NO: 749451 - protein, 436 aa, Homo sapiens
MFFNAWFGLIVFLCMSLYLTLTIVVTEWRTKFRRAMNTQENATRARAVDSLLNFETVKYYNAESYEVERYREAIIKYQGLEWKSSASLVLLNQTQNLVIGLGLLAGSLLCAYFVTEQKLQVGDYVLFGTYIIQLYMPLNWFGTYYRMIQTNFIDMENMFDLLKEETEVKDLPGAGPLRFQKGRIEFENVHFSYADGRETLQDVSFTVMPGQTLALVGPSGAGKSTILRLLFRFYDISSGCIRIDGQDISQVTQASLRSHIGVVPQDTVLFNDTIADNIRYGRVTAGNDEVEAAAQAAGIHDAIMAFPEGYRTQVGERGLKLSGGEKQRVAIARTILKAPGIILLDEATSALDTSNERAIQASLAKVCANRTTIVVAHRLSTVVNADQILVIKDGCIVERGRHEALLSRGGVYADMWQLQQGQEETSEDTKPQTMER

SEQ ID NO: 749452 - protein, 842 aa, Homo sapiens; identical to SEQ ID NO: 749447

SEQ ID NO: 749453 - protein, 851 aa, Homo sapiens
MVTVGNYCEAEGPVGPAWMQDGLSPCFFFTLVPSTRMALGTLALVLALPCRRRERPAGADSLSWGAGPRISPYVLQLLLATLQAALPLAGLAGRVGTARGAPLPSYLLLASVLESLAGACGLWLLVVERSQARQRLAMGIWIKFRHSPGLLLLWTVAFAAENLALVSWNSPQWWWARADLGQQVQFSLWVLRYVVSGGLFVLGLWAPGLRPQSYTLQVHEEDQDVERSQVRSAAQQSTWRDFGRKLRLLSGYLWPRGSPALQLVVLICLGLMGLERALNVLVPIFYRNIVNLLTEKAPWNSLAWTVTSYVFLKFLQGGGTGSTGFVSNLRTFLWIRVQQFTSRRVELLIFSHLHELSLRWHLGRRTGEVLRIADRGTSSVTGLLSYLVFNVIPTLADIIIGIIYFSMFFNAWFGLIVFLCMSLYLTLTIVVTEWRTKFRRAMNTQENATRARAVDSLLNFETVKYYNAESYEVERYREAIIKYQGLEWKSSASLVLLNQTQNLVIGLGLLAGSLLCAYFVTEQKLQVGDYVLFGTYIIQLYMPLNWFGTYYRMIQTNFIDMENMFDLLKEETEVKDLPGAGPLRFQKGRIEFENVHFSYADGRETLQDVSFTVMPGQTLALVGPSGAGKSTILRLLFRFYDISSGCIRIDGQDISQVTQASLRSHIGVVPQDTVLFNDTIADNIRYGRVTAGNDEVEAAAQAAGIHDAIMAFPEGNVWWVISTGYRTQVGERGLKLSGGEKQRVAIARTILKAPGIILLDEATSALDTSNERAIQASLAKVCANRTTIVVAHRLSTVVNADQILVIKDGCIVERGRHEALLSRGGVYADMWQLQQGQEETSEDTKPQTMER

SEQ ID NO: 749454 - protein, 692 aa, Homo sapiens
MVTVGNYCEAEGPVGPAWMQDGLSPCFFFTLVPSTRMALGTLALVLALPCRRRERPAGADSLSWGAGPRISPYVLQLLLATLQAALPLAGLAGRVGTARGAPLPSYLLLASVLESLAGACGLWLLVVERSQARQRLAMGIWIKFRHSPGLLLLWTVAFAAENLALVSWNSPQWWWARADLGQQVQFSLWVLRYVVSGGLFVLGLWAPGLRPQSYTLQVHEEDQDVERSQVRSAAQQSTWRDFGRKLRLLSGYLWPRGSPALQLVVLICLGLMGLERALNVLVPIFYRNIVNLLTEKAPWNSLAWTVTSYVFLKFLQGGGTGSTGFVSNLRTFLWIRVQQFTSRRVELLIFSHLHELSLRWHLGRRTGEVLRIADRGTSSVTGLLSYLVFNVIPTLADIIIGIIYFSMFFNAWFGLIVFLCMSLYLTLTIVVTEWRTKFRRAMNTQENATRARAVDSLLNFETVKYYNAESYEVERYREAIIKYQGLEWKSSASLVLLNQTQNLVIGLGLLAGSLLCAYFVTEQKLQVGDYVLFGTYIIQLYMPLNWFGTYYRMIQTNFIDMENMFDLLKEETEVKDLPGAGPLRFQKGRIEFENVHFSYADGRETLQDVSFTVMPGQTLALVGPSGAGKSTILRLLFRFYDISSGCIRIDGQDISQVQDTGGRAGTEAERRGEAARRHCPHHPQGSGHHSAG

SEQ ID NO: 749455 - protein, 985 aa, Homo sapiens
MVTVGNYCEAEGPVGPAWMQDGLSPCFFFTLVPSTRMALGTLALVLALPCRRRERPAGADSLSWGAGPRISPYVLQLLLATLQAALPLAGLAGRVGTARGAPLPSYLLLASVLESLAGACGLWLLVVERSQARQRLAMGIWIKFRHSPGLLLLWTVAFAAENLALVSWNSPQWWWARADLGQQVQFSLWVLRYVVSGGLFVLGLWAPGLRPQSYTLQVHEEDQDVERSQVRSAAQQSTWRDFGRKLRLLSGYLWPRGSPALQLVVLICLGLMGLERALNVLVPIFYRNIVNLLTEKAPWNSLAWTVTSYVFLKFLQGGGTGSTGFVSNLRTFLWIRVQQFTSRRVELLIFSHLHELSLRWHLGRRTGEVLRIADRGTSSVTGLLSYLVFNVIPTLADIIIGIIYFSMFFNAWFGLIVFLCMSLYLTLTIVVTEWRTKFRRAMNTQENATRARAVDSLLNFETVKYYNAESYEVERYREAIIKYQGLEWKSSASLVLLNQTQNLVIGLGLLAGSLLCAYFVTEQKLQVGDYVLFGTYIIQLYMPLNWFGTYYRMIQTNFIDMENMFDLLKEETEVKDLPGAGPLRFQKGRIEFENVHFSYADGEAFLLLPLLFRSFAHCLPASQCSESLLLEKSLGRGGAGPTSSSGDGRCLLSNPTFPCRRETLQDVSFTVMPGQTLALVRGDPATWPRCLKLPSFSAHGELVTQAVESESPVTIGNRMNGAASMDTGDLLEREPQKPVGLGRLRWHMPVIPALWEAEVARSPKVGPSGAGKSTILRLLFRFYDISSGCIRIDGQDISQVTQASLRSHIGVVPQDTVLFNDTIADNIRYGRVTAGNDEVEAAAQAAGIHDAIMAFPEGYRTQVGERGLKLSGGEKQRVAIARTILKAPGIILLDEATSALDTSNERAIQASLAKVCANRTTIVVAHRLSTVVNADQILVIKDGCIVERGRHEALLSRGGVYADMWQLQQGQEETSEDTKPQTMER

SEQ ID NO: 749456 - protein, 399 aa, Homo sapiens
MTRVPCAVPMPNKFGLNSQVKYYNAESYEVERYREAIIKYQGLEWKSSASLVLLNQTQNLVIGLGLLAGSLLCAYFVTEQKLQVGDYVLFGTYIIQLYMPLNWFGTYYRMIQTNFIDMENMFDLLKEETEVKDLPGAGPLRFQKGRIEFENVHFSYADGRETLQDVSFTVMPGQTLALVGPSGAGKSTILRLLFRFYDISSGCIRIDGQDISQVTQASLRSHIGVVPQDTVLFNDTIADNIRYGRVTAGNDEVEAAAQAAGIHDAIMAFPEGYRTQVGERGLKLSGGEKQRVAIARTILKAPGIILLDEATSALDTSNERAIQASLAKVCANRTTIVVAHRLSTVVNADQILVIKDGCIVERGRHEALLSRGGVYADMWQLQQGQEETSEDTKPQTMER

SEQ ID NO: 749457 - protein, 565 aa, Homo sapiens
MVTVGNYCEAEGPVGPAWMQDGLSPCFFFTLVPSTRMALGTLALVLALPCRRRERPAGADSLSWGAGPRISPYVLQLLLATLQAALPLAGLAGRVGTARGAPLPSYLLLASVLESLAGACGLWLLVVERSQARQRLAMGIWIKFRHSPGLLLLWTVAFAAENLALVSWNSPQWWWARADLGQQVQFSLWVLRYVVSGGLFVLGLWAPGLRPQSYTLQVHEEDQDVERSQVRSAAQQSTWRDFGRKLRLLSGYLWPRGSPALQLVVLICLGLMGLERALNVLVPIFYRNIVNLLTEKAPWNSLAWTVTSYVFLKFLQGGGTGSTGFVSNLRTFLWIRVQQFTSRRVELLIFSHLHELSLRWHLGRRTGEVLRIADRGTSSVTGLLSYLVFNVIPTLADIIIGIIYFSMFFNAWFGLIVFLCMSLYLTLTIVVTEWRTKFRRAMNTQENATRARAVDSLLNFETVKYYNAESYEVERYREAIIKYQGLEWKSSASLVLLNQTQNLVIGLGLLAGSLLCAYFVTEQKLQVGDYVLFGTYIIQLYMPLNWFGTYYRMIRPLLDMRLFDC

SEQ ID NO: 749458 - protein, 462 aa, Homo sapiens
MVTVGNYCEAEGPVGPAWMQDGLSPCFFFTLVPSTRMALGTLALVLALPCRRRERPAGADSLSWGAGPRISPYVLQLLLATLQAALPLAGLAGRVGTARGAPLPSYLLLASVLESLAGACGLWLLVVERSQARQRLAMGIWIKFRHSPGLLLLWTVAFAAENLALVSWNSPQWWWARADLGQQVQFSLWVLRYVVSGGLFVLGLWAPGLRPQSYTLQVHEEDQDVERSQVRSAAQQSTWRDFGRKLRLLSGYLWPRGSPALQLVVLICLGLMGLERALNVLVPIFYRNIVNLLTEKAPWNSLAWTVTSYVFLKFLQGGGTGSTGFVSNLRTFLWIRVQQFTSRRVELLIFSHLHELSLRWHLGRRTGEVLRIADRGTSSVTGLLSYLVFNVIPTLADIIIGIIYFSMFFNAWFGLIVFLCMSLYLTLTIVVTEWRTKFRRAMNTQENATRARAVDSLLNFET

SEQ ID NO: 749459 - protein, 302 aa, Homo sapiens
MPMGEAFLLLPLLFRSFAHCLPASQCSESLLLEKSLGRGGAGPTSSSGDGRCLLSNPTFPCRRETLQDVSFTVMPGQTLALVGPSGAGKSTILRLLFRFYDISSGCIRIDGQDISQVTQASLRSHIGVVPQDTVLFNDTIADNIRYGRVTAGNDEVEAAAQAAGIHDAIMAFPEGYRTQVGERGLKLSGGEKQRVAIARTILKAPGIILLDEATSALDTSNERAIQASLAKVCANRTTIVVAHRLSTVVNADQILVIKDGCIVERGRHEALLSRGGVYADMWQLQQGQEETSEDTKPQTMER

SEQ ID NO: 749460 - protein, 514 aa, Homo sapiens
MDLANHGLILLQQLNAQREFGFLCDCTVAIGDVYFKAHKSVLASFSNYFKMLFVHQTSECVRLKPTDIQPDIFSYLLHLMYTGKMAPQLIDPVRLEQGIKFLHAYPLIQEASLASQGAFSHPDQVFPLASSLYGIQIADHQLRQATKIASAPEKLGRDPRPQTSRISQEQVPEASQLSQLTSNLAQVNRTNMTPSDPLQTSLSPELVSTPVPPPPPGEETNLEASSSDEQPASLTIAHVKPSIMKRNGSFPKYYACHLCGRRFTLRSSLREHLQIHTGVPFTSSQQGESRVPLTLCSNAADLGKDAMEVPEAGMISDSELQHISDSPIIDGQQQSETPPPSDIADIDNLEQADQEREVKRRKYECTICGRKFIQKSHWREHMYIHTGKPFKCSTCDKSFCRANQAARHVCLNQSIDTYTMVDKQTLELCTFEEGSQMDNMLVQTNKPYKCNLCDKTFSTPNEVVKHSCQNQNSDVFALDEGRSILLGSGDSEVTEPDHPVLASIKKEQETVLLD

SEQ ID NO: 749461 - protein, 514 aa, Homo sapiens; identical to SEQ ID NO: 749460

SEQ ID NO: 749462 - protein, 232 aa, Homo sapiens
MPSLWDRFSSSSTSSSPSSLPRTPTPDRPPRSAWGSATREEGFDRSTSLESSDCESLDSSNSGFGPEEDTAYLDGVSLPDFELLSDPEDEHLCANLMQLLQESLAQARLGSRRPARLLMPSQLVSQVGKELLRLAYSEPCGLRGALLDVCVEQGKSCHSVGQLALDPSLVPTFQLTLVLRLDSRLWPKIQGLFSSANSPFLPGFSQSLTLSTGFRVIKKKLYSSEQLLIEEC

SEQ ID NO: 749463 - protein, 149 aa, Homo sapiens
  misc_feature (142)..(142): Xaa can be any naturally occurring amino acid
MPSLWDRFSSSSTSSSPSSLPRTPTPDRPPRSAWGSATREEGFDRSTSLESSDCESLDSSNSGFGPEEDTAYLDGVSLPDFELLSDPEDEHLCANLMQLLQESLAQARLGSRRPARLLMPSQSGKNMAGYTSVARGCEFVTXKSTGTDH

SEQ ID NO: 749464 - protein, 232 aa, Homo sapiens; identical to SEQ ID NO: 749462

SEQ ID NO: 749465 - protein, 232 aa, Homo sapiens; identical to SEQ ID NO: 749462

SEQ ID NO: 749466 - protein, 232 aa, Homo sapiens; identical to SEQ ID NO: 749462

SEQ ID NO: 749467 - protein, 232 aa, Homo sapiens; identical to SEQ ID NO: 749462

SEQ ID NO: 749468 - protein, 232 aa, Homo sapiens; identical to SEQ ID NO: 749462

SEQ ID NO: 749469 - protein, 232 aa, Homo sapiens; identical to SEQ ID NO: 749462

SEQ ID NO: 749470 - protein, 136 aa, Homo sapiens
MQLLQESLAQARLGSRRPARLLMPSQLVSQVGKELLRLAYSEPCGLRGALLDVCVEQGKSCHSVGQLALDPSLVPTFQLTLVLRLDSRLWPKIQGLFSSANSPFLPGFSQSLTLSTGFRVIKKKLYSSEQLLIEEC

SEQ ID NO: 749471 - protein, 106 aa, Homo sapiens
MRAFWGSMEAGPGRCHRAGENVAYVRPESIGQGGPHSRVWIGSWRREGVASPRYVLIGCSALVLGGSRPRGRCERGPGTGLGGSRWLARVRTPIQAAGRTCLSSSR

SEQ ID NO: 749472 - protein, 119 aa, Homo sapiens
MPSLWDRFSSSSTSSSPSSLPRTPTPDRPPRSAWGSATREEGFDRSTSLESSDCESLDSSNSGFGPEEDTAYLDGVSLPDFELLSDPEAGFSQSLTLSTGFRVIKKKLYSSEQLLIEEC

SEQ ID NO: 749473 - protein, 106 aa, Homo sapiens; identical to SEQ ID NO: 749471

SEQ ID NO: 749474 - protein, 116 aa, Homo sapiens
RERERERERERERERERESPQYCSMKQRLRGQQGFQLDVCVACTLLFLLLTVNSGVTSREQLGCSRPSPAQGEGRGTCSSEQPEGGGRSEVVEVVCVSYWSEGTKCVCCLFCILFF

SEQ ID NO: 749475 - protein, 200 aa, Homo sapiens
  misc_feature (143)..(144): Xaa can be any naturally occurring amino acid
  misc_feature (148)..(152): Xaa can be any naturally occurring amino acid
  misc_feature (154)..(154): Xaa can be any naturally occurring amino acid
  misc_feature (160)..(160): Xaa can be any naturally occurring amino acid
  misc_feature (173)..(173): Xaa can be any naturally occurring amino acid
  misc_feature (192)..(192): Xaa can be any naturally occurring amino acid
MPSLWDRFSSSSTSSSPSSLPRTPTPDRPPRSAWGSATREEGFDRSTSLESSDCESLDSSNSGFGPEEDTAYLDGVSLPDFELLSDPEDEHLCANLMQLLQESLAQARLGSRRPARLLMPSQLVSQVGKELLRLAYSEPCGPXXFSSXXXXXSXQYLPHXFPSFTLPHPFSHXPSYPLSSPLLTTLSQYPFXFYLLQPPV

SEQ ID NO: 749476 - protein, 232 aa, Homo sapiens; identical to SEQ ID NO: 749462

SEQ ID NO: 749477 - protein, 232 aa, Homo sapiens; identical to SEQ ID NO: 749462

SEQ ID NO: 749478 - protein, 232 aa, Homo sapiens; identical to SEQ ID NO: 749462

SEQ ID NO: 749479 - protein, 232 aa, Homo sapiens; identical to SEQ ID NO: 749462

SEQ ID NO: 749480 - protein, 136 aa, Homo sapiens; identical to SEQ ID NO: 749470

SEQ ID NO: 749481 - protein, 229 aa, Homo sapiens
MYQRTSGRVRTRKSLARDRACERQTCEVVGKIGEGGGLDQDRQSLEEHERGDPWRGGTVGCGPEEDTAYLDGVSLPDFELLSDPEDEHLCANLMQLLQESLAQARLGSRRPARLLMPSQLVSQVGKELLRLAYSEPCGLRGALLDVCVEQGKSCHSVGQLALDPSLVPTFQLTLVLRLDSRLWPKIQGLFSSANSPFLPGFSQSLTLSTGFRVIKKKLYSSEQLLIEEC

SEQ ID NO: 749482 - protein, 106 aa, Homo sapiens; identical to SEQ ID NO: 749471

SEQ ID NO: 749483 - protein, 170 aa, Homo sapiens
MEDPNPEENMKQQDSPKERSPQSPGGNICHLGAPKCTRCLITFADSKFQERHMKREHPADFVAQKLQGVLFICFTCARSFPSSKALITHQRSHGPAAKPTLPVATTTAQPTFPCPDCGKTFGQAVSLRRHRQMHEVRAPPGTFACTECGQDFAQEAGLHQHYIRHARGEL

SEQ ID NO: 749484 - protein, 170 aa, Homo sapiens; identical to SEQ ID NO: 749483

SEQ ID NO: 749485 - protein, 170 aa, Homo sapiens; identical to SEQ ID NO: 749483

SEQ ID NO: 749486 - protein, 170 aa, Homo sapiens; identical to SEQ ID NO: 749483

SEQ ID NO: 749487 - protein, 170 aa, Homo sapiens; identical to SEQ ID NO: 749483

SEQ ID NO: 749488 - protein, 124 aa, Homo sapiens [sequence omitted]

SEQ ID NO: 749489 - protein, 124 aa, Homo sapiens [sequence omitted]

SEQ ID NO: 749490 - protein, 119 aa, Homo sapiens
MSTVGLFHFPTPLTRICPAPWGLRLWEKLTLLSPGIAVTPVQMAGKKDYPALLSLDENELEEQFVKGHGPGGQATNKTSNCVVLKHIPSGIVVKVDHRRPLRGEAPPKGSTASRDFSQV

SEQ ID NO: 749491 - protein, 124 aa, Homo sapiens [sequence omitted]

SEQ ID NO: 749492 - protein, 119 aa, Homo sapiens; identical to SEQ ID NO: 749490

SEQ ID NO: 749493 - protein, 728 aa, Homo sapiens
MCLQKHENHFYIANLIEFYHEHKLSVRLVCGAGSVRQAHTLMCAFSINIFGRLPTFSLQTCHKSFLLTEECDYCSIRAIMPAEEALDSLQTLMEVGHISQAGGMLARSRSTLKGHVESRSHFMFPLGEKLKPMDAVICLTAKKEPRIVSRSSRVLISGMFPWLHGISQFDIVGAEKCHMASKEINPCTFKCFPRFSDASTLAELITSCISREVLWGNSLDFWQVMNGWISFIYSYIVIQFFEIQSYPKVVVKVKHIKKVFVFSSPTNSSQSHSNCDYNFWNLYHFLALYGVIIYGIFNNFVAELITSGLHFFHVSLKKLPLSTRIGEMTFLHYNTLYIRFFLIIFSRQGFKLTEVLIRNMLKLLNNMKTTLYFNFQTLFSYLKILTSCEILIFEGERKNTFVVEIFPQQFCLTSKFFLSYLPCLLPKSELHIPVVRRMNGFKFSNHYFGPMLAVETIKFLTLSCFRMILDCEHKINPFCQHRIEHRMEQGLHSQPVAVLMLGLNCSINSLKRPTASKELLIIRCPKFRNPKSGKEGNSDNDFNFFKSLQDFSQRKHLKMVEKVVQIINYFTEGLKARENKEQNDSEYLDIKFASEMSKICQYEIFEIKFRFTCIVHSSRNNAYSCKKKNIYIYMYQQVECGSSNFVVKADNRDMILSSYKILYYFSYSKQYINDSQQLRLLPDIKASSIFTADDRRLSKTCRGPLHPNLSACSHTHTHTHTHTHIFGF

SEQ ID NO: 749494 - protein, 728 aa, Homo sapiens; identical to SEQ ID NO: 749493

SEQ ID NO: 749495 - protein, 202 aa, Homo sapiens
RTEQKNPLGLDDLGIQNLGQTVSLAPAVEAASMLKMEPLNSTHPGTAASSSPLESRAAGGGSGNGNEYFYILVVMSFYGIFLIGIMLGYMKSKRREKKSSLLLLYKDEERLWGEAMKPLPVVSGLRSVQVPLMLNMLQESVAPALSCTLCSMEGDSVSSESSSPDVHLTIQEEGADEELEETSETPLNESSEGSSENIHQNS

SEQ ID NO: 749496 - protein, 76 aa, Homo sapiens
AGQSRRTLLDWTIWEFKTWDKLSALLQRQSGSHSTLLPQCRELPRLMTPEGKPWRFSFSLRFQGFRGNRAASVFSH

SEQ ID NO: 749497 - protein, 481 aa, Homo sapiens [sequence omitted]

SEQ ID NO: 749498 - protein, 103 aa, Homo sapiens [sequence omitted]

SEQ ID NO: 749499 - protein, 339 aa, Homo sapiens
MYDAERGWSLSFAGCGFLGFYHVGATRCLSEHAPHLLRDARMLFGASAGALHCVGVLSGIPLEQTLQVLSDLVRKARSRNIGIFHPSFNLSKFLRQGLCKCLPANVHQLISGKIGISLTRVSDGENVLVSDFRSKDEVVDALVCSCFMPFYSGLIPPSFRGVRYVDGGVSDNVPFIDAKTTITVSPFYGEYDICPKVKSTNFLHVDITKLSLRLCTGNLYLLSRAFVPPDLKVLGEICLRGYLDAFRFLEEKGICNRPQPGLKSSSEGMDPEVAMPSWANMSLDSSPESAALAVRLEGDELLDHLRLSILPWDESILDTLSPRLATAMILEMDMSFQGK

SEQ ID NO: 749500 - protein, 144 aa, Homo sapiens
SCFKAPYPFLRVTNTCARSLPFPSSPCIWLITGQLPASLQFGRWVGNDHHSHVRLMGLFSVPFTGICNRPQPGLKSSSEGMDPEVAMPSWANMSLDSSPESAALAVRLEGDELLDHLRLSILPWDESILDTLSPRLATGTHSSG

SEQ ID NO: 749501 - protein, 162 aa, Homo sapiens
MADEKDREEIIVAEFHKKIKEAFEVFDHESNNTVDVREIGTIIRSLGCCPTEGELHDLIAEVEEEEPTGYIRFEKFLPVMTEILLERKYRPIPEDVLLRAFEVLDSAKRGFLTKDELIKYMTEEGEPFSQEEMEEMLSAAIDPESNSINYKDYITMMVIDEN

SEQ ID NO: 749502 - protein, 162 aa, Homo sapiens; identical to SEQ ID NO: 749501

SEQ ID NO: 749503 - protein, 172 aa, Homo sapiens
MEGGRRDHHTMTVLWGTQEIIVAEFHKKIKEAFEVFDHESNNTVDVREIGTIIRSLGCCPTEGELHDLIAEVEEEEPTGYIRFEKFLPVMTEILLERKYRPIPEDVLLRAFEVLDSAKRGFLTKDELIKYMTEEGEPFSQEEMEEMLSAAIDPESNSINYKDYITMMVIDEN

SEQ ID NO: 749504 - protein, 115 aa, Homo sapiens
MTEILLERKYRPIPEDVLLRAFEVLDSAKRGFLTKDELIKYMTEEDGVSLRPQAEVQWRDLGSLQPPPPGFKRFSCLSLLSSWDDRHTPPRLANFCIFSRDGVSPWSGDLLVSNS

SEQ ID NO: 749505 - protein, 175 aa, Homo sapiens
MADEKDREEIIVAEFHKKIKEAFEVFDHESNNTVDVREIGTIIRSLGCCPTEGELHDLIAEEEKPGVIRALVFQVEEEEPTGYIRFEKFLPVMTEILLERKYRPIPEDVLLRAFEVLDSAKRGFLTKDELIKYMTEEGEPFSQEEMEEMLSAAIDPESNSINYKDYITMMVIDEN

SEQ ID NO: 749506 - protein, 135 aa, Homo sapiens
MADEKDREEIIVAEFHKKIKEAFEVFDHESNNTVDVREIGTIIRSLGCCPTEGELHDLIAEVEEEEPTGYIRFEKFLPVMTEILLERKYRPIPEDVLLRAFEVLDSAKRGFLTKDELIKYMTEEETGKLRWGAVK

SEQ ID NO: 749507 - protein, 144 aa, Homo sapiens
MADEKDREEIIVAEFHKKIKEAFEVFDHESNNTVDVREIGTIIRSLGCCPTEGELHDLIAEVEEEEPTGYIRFEKFLPVMTEILLERKYRPIPEDVLLRAFEVLDSAKRGFLTKDELIKYMTEEGGVVITPILETGKLRWGAVK

SEQ ID NO: 749508 - protein, 702 aa, Homo sapiens
MIPVKHKKNYCTLIFFMKLNDFENTIKNRGEGLARWLMLVIPALWKAEVVDNLRSRVQDQPGQHDETLSLLKIQKLAGRVARACNSSYLERLRQETRLNLGVGGCSENEIAPLHSSLSEEAKSVSQKQNKTNRIEGRCVLKNHTHENLIISTTGKRWSRSKRKVKCKLKVLLDLGRGCLNTDELELIVFLKINFKYVKVSTIFKGNCKISDFTQHTFIISWFLRMKNSDMAELGPLLQDLCMAAVKMEPGLGSQGWSQGDGQGWASSLSEEGHAFQAHVVVGIWFPPADGLRALVGSCPSAEGHLQFVSTCTSSTWPLPSSKHVNQEGSGESNKTAVTTLCSVIMEVTSRGLCWILMVRRKSQVSSTLRSRGTLKGVSTRRLGSLGAVLELTHYHSSFIIRPVRQGRLGHTPELYKSSSSLPMVDKVSCSYASVPGVRCSHIINHCLLNEHELLQIKAVLKKQFGAINRLFLICIVKWVWQFCILKGQNVMPGKIKQELKHSRTKFSTGCPCVCLSHLDCCHSPAIRSNLHLSHISLLRSKYSTVLPFKCPLLKEKNVFGVHIFTTILAINFKICVQMGGDCIMLGCSENVFKMTGLRIDSLTLLLFFQSSFRKTMSESQEVWILVPVPQPMAEWPWQVTQSAPVFLSVECWAWMNSKFKDLSLCSVLSGDHEWMLSVDALVLFTVLVQLPPTVRKMSPSGL

SEQ ID NO: 749509 - protein, 144 aa, Homo sapiens
MVTTEVAGEPPGQGRKWAAHGTMAAPRVHTDYHPGGGSACSSVKVRSHVGHTGVFFFVDQDPLAVSLTSQSLIPPLIKPGLLKAWGFLLLCAQPSANGHSLCCLLYTDLVSSHELSPFRALCLGPSDAPSACASCNCLASTYYL

SEQ ID NO: 749510 - protein, 290 aa, Homo sapiens
MEAAAEPGNLAGVRHIILVLSGKGGVGKSTISTELALALRHAGKKVGILDVDLCGPSIPRMLGAQGRAVHQCDRGWAPVFLDREQSISLMSVGFLLEKPDEAVVWRGPKKNALIKQFVSDVAWGELDYLVVDTPPGTSDEHMATIEALRPYQPLGALVVTTPQAVSVGDVRRELTFCRKTGLRVMGIVENMSGFTCPHCTECTSVFSRGGGEELAQLAGVPFLGSVPLDPALMRTLEEGHDFIQEFPGSRLCWIPHRQKFGATRWLPDMDSETFRHRLAPKKNAADGPRA

SEQ ID NO: 749511 - protein, 271 aa, Homo sapiens
MEAAAEPGNLAGVRHIILVLSGKGGVGKSTISTELALALRHAGKKVGILDVDLCGPSIPRMLGAQGRAVHQCDRGWAPVFLDREQSISLMSVGFLLEKPDEAVVWRGPKKNALIKQFVSDVAWGELDYLVVDTPPGTSDEHMATIEALRPYQPLGALVVTTPQAVSVGDVRRELTFCRKTGLRVMGIVENMSGFTCPHCTECTSVFSRGGGEELAQLAGVPFLGSVPLDPALMRTLEEGHDFIQEFPGSPAFAALTSIAQKILDATPACLP

SEQ ID NO: 749512 - protein, 271 aa, Homo sapiens; identical to SEQ ID NO: 749511

SEQ ID NO: 749513 - protein, 271 aa, Homo sapiens; identical to SEQ ID NO: 749511

SEQ ID NO: 749514 - protein, 271 aa, Homo sapiens; identical to SEQ ID NO: 749511

SEQ ID NO: 749515 - protein, 271 aa, Homo sapiens; identical to SEQ ID NO: 749511

SEQ ID NO: 749516 - protein, 359 aa, Homo sapiens
MEAAAGVWGWGCLFRVPWRRPQAASVGLRTRLHARFSGRLWTWEPLNVPLRGGSEGGRFYASCVEPLTCTLQGPVGDGAACWRQGAWPQRWRREPGNLAGVRHIILVLSGKGGVGKSTISTELALALRHAGKKVGILDVDLCGPSIPRMLGAQGRAVHQCDRGWAPVFLDREQSISLMSVGFLLEKPDEAVVWRGPKKNALIKQFVSDVAWGELDYLVVDTPPGTSDEHMATIEALRPYQPLGALVVTTPQAVSVGDVRRELTFCRKTGLRVMGIVENMSGFTCPHCTECTSVFSRGGGEELAQLAGVPFLGSVPLDPALMRTLEEGHDFIQEFPGSPAFAALTSIAQKILDATPACLP

SEQ ID NO: 749517 - protein, 292 aa, Homo sapiens
MKVRRTPESHMLLSSLWKWRSQCSEKEPGNLAGVRHIILVLSGKGGVGKSTISTELALALRHAGKKVGILDVDLCGPSIPRMLGAQGRAVHQCDRGWAPVFLDREQSISLMSVGFLLEKPDEAVVWRGPKKNALIKQFVSDVAWGELDYLVVDTPPGTSDEHMATIEALRPYQPLGALVVTTPQAVSVGDVRRELTFCRKTGLRVMGIVENMSGFTCPHCTECTSVFSRGGGEELAQLAGVPFLGSVPLDPALMRTLEEGHDFIQEFPGSPAFAALTSIAQKILDATPACLP

SEQ ID NO: 749518 - protein, 237 aa, Homo sapiens [sequence omitted]

SEQ ID NO: 749519 - protein, 255 aa, Homo sapiens
MVRPGVKSDEEEEPRAGTHCPLVGRPFALAGRLTARGRKRTAAASSWRRRDGGGGRAWKPGRRQAHHPGPLRKGGRWEKHHLHGAGPGTAPCRQEALIKQFVSDVAWGELDYLVVDTPPGTSDEHMATIEALRPYQPLGALVVTTPQAVSVGDVRRELTFCRKTGLRVMGIVENMSGFTCPHCTECTSVFSRGGGEELAQLAGVPFLGSVPLDPALMRTLEEGHDFIQEFPGSPAFAALTSIAQKILDATPACLP

SEQ ID NO: 749520 - protein, 269 aa, Homo sapiens
MEAAAEPGNLAGVRHIILVLSGKGGVGKSTISTELALALRHAGKKVGILDVDLCGPSIPRMLGAQGRAVHQCDRGWAPVFLDREQSISLMSVGFLLEKPDEAVVWRGPKKNALIKQFVSDVAWGELDYLVVDTPPGTSDEHMATIEALRPYQPLGALVVTTPQAVSVGDVRRELTFCRKTGLRVMGIVENMSGFTCPHCTECTSVFSRGGGEELAQLAGVPFLGSVPLDPALMRTLEEGHDFIQEFPGSPAFAALTSIAQKILDEGRCS

SEQ ID NO: 749521 - protein, 214 aa, Homo sapiens
MILPLWPLRVLGLLAAWKPGRRQAHHPGPLRKGGRWEKHHLHGAGPGTAPCRQEALIKQFVSDVAWGELDYLVVDTPPGTSDEHMATIEALRPYQPLGALVVTTPQAVSVGDVRRELTFCRKTGLRVMGIVENMSGFTCPHCTECTSVFSRGGGEELAQLAGVPFLGSVPLDPALMRTLEEGHDFIQEFPGSPAFAALTSIAQKILDATPACLP

SEQ ID NO: 749522 - protein, 218 aa, Homo sapiens
PEEKPGKACPYYQDGFTTKAWKPGRRQAHHPGPLRKGGRWEKHHLHGAGPGTAPCRQEALIKQFVSDVAWGELDYLVVDTPPGTSDEHMATIEALRPYQPLGALVVTTPQAVSVGDVRRELTFCRKTGLRVMGIVENMSGFTCPHCTECTSVFSRGGGEELAQLAGVPFLGSVPLDPALMRTLEEGHDFIQEFPGSPAFAALTSIAQKILDATPACLP

SEQ ID NO: 749523 - protein, 347 aa, Homo sapiens
MVRPGVKSDEEEEPRAGTHCPLVGRPFALAGRLTARGRKRTAAASSWRRRDGGGGRAWKPGRRQAHHPGPLRKGGRWEKHHLHGAGPGTAPCRQEALIKQFVSDVAWGELDYLVVDTPPGTSDEHMATIEALRPYQPLGALVVTTPQAVSVGDVRRELTFCRKTGLRVMGIVENMSGFTCPHCTGRRRGAGPARRGALLRLRAPGPCAHEDPGGGPRLHPGVPREPRLRCTHLHSPEDSGRDARVPPLTKATLQPLSRATKGSAPASQRNRGLGSVPGPCRGRPRQRQRESFSPTSPAPGCVAPAALPGWPAVPWSACSAAVRRGRPGLSSHPCCLPVPLAAACPHS

SEQ ID NO: 749524 - protein, 215 aa, Homo sapiens
PVLNRHSGGGGWRRRRAWKPGRRQAHHPGPLRKGGRWEKHHLHGAGPGTAPCRQEALIKQFVSDVAWGELDYLVVDTPPGTSDEHMATIEALRPYQPLGALVVTTPQAVSVGDVRRELTFCRKTGLRVMGIVENMSGFTCPHCTECTSVFSRGGGEELAQLAGVPFLGSVPLDPALMRTLEEGHDFIQEFPGSPAFAALTSIAQKILDATPACLP

SEQ ID NO: 749525 - protein, 172 aa, Homo sapiens
MQARRLCRSLQVGILDVDLCGPSIPRMLGAQGRAVHQCDRGWAPVFLDREQSISLMSVGFLLEKPDEAVVWRGPKKNALIKQFVSDVAWGELDYLVVDTPPGTSDEHMATIEALRPYQPLGALVVTTPQAVSVGDVRRELTFCRKTGLRVMGIVENMSGFTCPHCTVSPGGC

SEQ ID NO: 749526 - protein, 210 aa, Homo sapiens
MEAAAGVWGWGCLFRVPWRRPQAASVGLRTRLHARFSGRLWTWEPLNVPLRGGSEGGRFYASCVEPLTCTLQGPVGDGAACWRQGAWPQRWRREPGNLAGVRHIILVLSGKGGVGKSTISTELALALRHAGKKVGILDVDLCGPSIPRMLGAQGRAVHQCDRGWAPVFLDREQSISLMSVGFLLEKPDEAVVWRGPKKNGNGRAARPPSW

SEQ ID NO: 749527 - protein, 159 aa, Homo sapiens [sequence omitted]

SEQ ID NO: 749528 - protein, 176 aa, Homo sapiens
MEAAAEPGNLAGVRHIILVLSGKGGVGKSTISTELALALRHAGKKVSALPLTGRSPGQLPASPWRPGGAPGLGCAAPCRWESWMWTCVAPVYPACSGRRAGLCIHHGECGCSHVWVQTPGGSWLRVLIWGLGESAGALWAGARHCRKGRCNGPGPIFALLQRARASREPVMEAGGK

SEQ ID NO: 749529 - protein, 158 aa, Homo sapiens
HGATASTVPCRLRAPGPCAHEDPGGGPRLHPGVPREPRLRCTHLHSPEDSGRDARVPPLTKATLQPLSRATKGSAPASQRNRGLGSVPGPCRGRPRQRQRESFSPTSPAPGCVAPAALPGWPAVPWSACSAAVRRGRPGLSSHPCCLPVPLAAACPHS

SEQ ID NO: 749530 - protein, 106 aa, Homo sapiens [sequence omitted]

SEQ ID NO: 749531 - protein, 106 aa, Homo sapiens [sequence omitted]

SEQ ID NO: 749532 - protein, 103 aa, Homo sapiens
QKPPPPSSLPCLPQAEQLLLGTHLHESTSSPPTPPSCLRRAQGMCSMKPVAWGLQVQASEKPTSLVQPSPQVAYHRATFSLLLFLSPSWFWAGGGLDRTPSCR

SEQ ID NO: 749533 - protein, 90 aa, Homo sapiens
ENNCHRGNYSLPELQQDEGFGELIPLSPSTTDQLLLPMGQPQTEARKQVTLSNAICRGQPSREQSRAVKSGEWIGWGKQNNQNHHGQKNG

SEQ ID NO: 749534 - protein, 117 aa, Homo sapiens
  misc_feature (26)..(26): Xaa can be any naturally occurring amino acid
PTLYVWFNNGYWQQCPSSLGQLQIRXGIQGGPSEEGGNISGSLGLKAPYHCKRPTPLQCPTPIPQTRPFLGESVPLKPNSRLKVCDDPSTFLFIHCPWNSSSKMRIPSPEQFLVINL

SEQ ID NO: 749535 - protein, 159 aa, Homo sapiens
MRNARSIRPARAESWRLSLCFLNWQDAIISKPHCPAGRTCPTAAASHGPRGAGHSDKDQGRSPKHVVCHVEHKKQCPAEFTDSRGVHNAAASISSQVGFPGHLTARTAAHKREALAVSPTPTLQVNAPGAKLRAPKAPRTPEALGRGPKRAGEWKTGCF

SEQ ID NO: 749536 - protein, 103 aa, Homo sapiens
MSVARGGTLYTKKVAVIQPRFLAERGGMPFSPGRSRRYTIMILRRNRNDTVTLLQVLIPGLVLHEHTFGYDTRTGKNRQTSGLCSGNGPRMNVLTLNLGKRGL

SEQ ID NO: 749537 - protein, 72 aa, Homo sapiens
KGWEDLAAQPGARRALGESEREIRLKSESEGGLTTDRFRSDYSLKGTRHCQENGARGPRAGTGGAGGARQLY

SEQ ID NO: 749538 - protein, 330 aa, Homo sapiens
MEAVAKFDFTASGEDELSFHTGDVLKILSNQEEWFKAELGSQEGYVPKNFIDIQFPKWFHEGLSRHQAENLLMGKEVGFFIIRASQSSPGDFSISVRHEDDVQHFKVMRDNKGNYFLWTEKFPSLNKLVDYYRTNSISRQKQIFLRDRTREDQGHRGNSLDRRSQGGPHLSGAVGEEIRPSMNRKLSDHPPTLPLQQHQHQPQPPQYAPAPQQLQQPPQQRYLQHHHFHQERRGGSLDINDGHCGTGLGSEMNAALMHRRHTDPVQLQAAGRVRWARALYDFEALEDDELGFHSGEVVEVLDSSNPSWWTGRLHNKLGLFPANYVAPMTR

SEQ ID NO: 749539 - protein, 79 aa, Homo sapiens
  misc_feature (17)..(17): Xaa can be any naturally occurring amino acid
RHPRSGETTKPRSPPRXGLSILSNQEEWFKAELGSQEGYVPKNFIDIQFPNPAWATERDSDSKRNLHLLSEVSLLSETL

SEQ ID NO: 749540 - protein, 330 aa, Homo sapiens; identical to SEQ ID NO: 749538

SEQ ID NO: 749541 - protein, 427 aa, Homo sapiens
DDERRRERLRMAFISCSWHLGIPRMIPGPRSYRFRQLFLQTQALVVCLSLALRPGDIHLPTLLGTADYQEAPSALLPSPWQRGTMTTLFLLPASRYSMEAVAKFDFTASGEDELSFHTGDVLKILSNQEEWFKAELGSQEGYVPKNFIDIQFPKWFHEGLSRHQAENLLMGKEVGFFIIRASQSSPGDFSISVRHEDDVQHFKVMRDNKGNYFLWTEKFPSLNKLVDYYRTNSISRQKQIFLRDRTREDQGHRGNSLDRRSQGGPHLSGAVGEEIRPSMNRKLSDHPPTLPLQQHQHQPQPPQYAPAPQQLQQPPQQRYLQHHHFHQERRGGSLDINDGHCGTGLGSEMNAALMHRRHTDPVQLQAAGRVRWARALYDFEALEDDELGFHSGEVVEVLDSSNPSWWTGRLHNKLGLFPANYVAPMTR

SEQ ID NO: 749542 - protein, 119 aa, Homo sapiens
RTQPGPNSAFPSSPRLETPYGHSCGLSHLTLQAPLISPIPPPSLPTHQEQPYNSFPCCPMETSSLCASEGLPSPCGPPLHPLPVDALAWPASSLRHLSPSWHTPGSAHTSDLPPHPPIP

SEQ ID NO: 749543 - protein, 325 aa, Homo sapiens
MVSPATRKSLPKVKAMDFITSTAILPLLFGCLGVFGLFRLLQWVRGKAYLRNAVVVITGATSGLGKECAKVFYAAGAKLVLCGRNGGALEELIRELTASHATKVQTHKPYLVTFDLTDSGAIVAAAAEILQCFGYVDILVNNAGISYRGTIMDTTVDVDKRVMETNYFGPVALTKALLPSMIKRRQGHIVAISSIQGKMSIPFRSAYAASKHATQAFFDCLRAEMEQYEIEVTVISPGYIHTNLSVNAITADGSRYGVMDTTTAQGRSPVEVAQDVLAAVGKKKKDVILADLLPSLAVYLRTLAPGLFFSLMASRARKERKSKNS

SEQ ID NO: 749544 - protein, 350 aa, Homo sapiens
KLGRGRVLNRQRLSGYRKSLPKVKAMDFITSTAILPLLFGCLGVFGLFRLLQWVRGKAYLRNAVVVITGATSGLGKECAKVFYAAGAKLVLCGRNGGALEELIRELTASHATKVQTHKPYLVTFDLTDSGAIVAAAAEILQCFGYVDILVNNAGISYRGTIMDTTVDVDKRVMETNYFGPVALTKALLPSMIKRRQGHIVAISSIQGKMSIPFRSAYAASKHATQAFFDCLRAEMEQYEIEVTVISPGYIHTNLSVNAITADGSRYGVMDTTQPGEACGGGRCLLWAESKKMCLVNRLLVVFQPGRVFTSGSAKKESNLSATRRGKALGSPGGLEGGRRKLAGANPGGMG

SEQ ID NO: 749545 - protein, 325 aa, Homo sapiens; identical to SEQ ID NO: 749543

SEQ ID NO: 749546 - protein, 174 aa, Homo sapiens [sequence omitted]

SEQ ID NO: 749547 - protein, 297 aa, Homo sapiens
MVSPATRKSLPKVKAMDFITSTAILPLLFGCLGVFGLFRLLQWVRGKAYLRNAVVVITGATSGLGKECAKVFYAAGAKLVLCGRNGGALEELIRELTASHATKVQTHKPYLVTFDLTDSGAIVAAAAEILQCFGYVDILVNNAGISYRGTIMDTTVDVDKRVMETNYFGPVALTKALLPSMIKRRQGHIVAISSIQGKMSIPFRSAYAASKHATQAFFDCLRAEMEQYEIEVTVITQGRSPVEVAQDVLAAVGKKKKDVILADLLPSLAVYLRTLAPGLFFSLMASRARKERKSKNS

SEQ ID NO: 749548 - protein, 148 aa, Homo sapiens
QGLELESTEGDLGFISDERKSLGKSPELCYFVTGVFGFGSSRKSLPKVKAMDFITSTAILPLLFGCLGVFGLFRLLQWVRGKAYLRNAVVVITGATSGLGKGGSWRQCCQGAGVSQPGMRSGPAAQGPPAQMPEAAAEGQIREVGRMA

SEQ ID NO: 749549 - protein, 118 aa, Homo sapiens
MGAAFLCPRASCPRWEARSGGGWSSCTSGAPCTRPPPPAATRIARAALPGPCRYMDPWGFSSFLHGCSFSSCWARCCLPWSLCGGQGLQGKLGRGWELAQAGQAEPQGGPSRTNHGVK

SEQ ID NO: 749550 - protein, 158 aa, Homo sapiens
MPDQISVSEFIAETTEDYNSPTTSSFTTRLHNCRNTVTLLEEALDQDRTALQKVKKSVKAIYNSGQDHVQNEENYAQVLDKFGSNFLSRDNPDLGTAFVKFSTLTKELSTLLKNLLQGLSHNVIFTLDSLLKGDLKGVKGDLKKPFDKAWKDYETKFT

SEQ ID NO: 749551 - protein, 169 aa, Homo sapiens
MPDQISVSEFIAETTEDYNSPTTSSFTTRLHNCRNTVTLLEEALDQDRTALQKVKKSVKAIYNSGQDHVQNEENYAQVLDKFGSNFLSRDNPDLGTAFVKFSTLTKELSTLLKNLLQGLSHNVIFTLDSLLKGDLKGVKGVSVQKFDFHFNLKGLIFFFLFQDHSSTCI

SEQ ID NO: 749552 - protein, 74 aa, Homo sapiens
MTPGSPFGCAPDFSSLLPLLSARDTHASVQVEAYQGREVHREISTLLKKAAALPRKSSRETSFLRTAGSAEQGD

SEQ ID NO: 749553 - protein, 126 aa, Homo sapiens
QHLGKGMAGAAPQPSFRTPACWGAVRIQPPSCDSLPSSLPGDWTVWTRVPVQPGSQSLWHSFIPQKCVCPFTQEHLPSVSNGPCLLGARKPNTIEAPPWRTSPRTGVSWARRQTSSQVNPGAGQEP

SEQ ID NO: 749554 - protein, 544 aa, Homo sapiens
MRVAVAGCCHGELDKIYETLALAERRGPGPVDLLLCCGDFQAVRNEADLRCMAVPPKYRHMQTFYRYYSGEKKAPVLTLFIGGNHEASNHLQELPYGGWVAPNIYYLGLAGVVKYRGVRIGGISGIFKSHDYRKGHFECPPYNSSTIRSIYHVRNIEVYKLKQLKQPIDIFLSHDWPRSIYHYGNKKQLLKTKSFFRQEVENNTLGSPAASELLEHLKPTYWFSAHLHVKFAALMQHQAKDKGQTARATKFLALDKCLPHRDFLQILEIEHDPSAPDYLEYDIEWLTILRATDDLINVTGRLWNMPENNGLHARWDYSATEEGMKEVLEKLNHDLKVPCNFSVTAACYDPSKPQTQMQLIHRINPQTTEFCAQLGIIDINVRLQKSKEEHHVCGEYEEQDDVESNDSGEDQSEYNTDTSALSSINPDEIMLDEEEDEDSIVSAHSGMNTPSVEPSDQASEFSASFSDVRILPGSMIVSSDDTVDSTIDREGKPGGTVESGNGEDLTKVPLKRLSDEHEPEQRKKIKRRNQAIYAAVDDDDDDAA

SEQ ID NO: 749555 - protein, 312 aa, Homo sapiens
MIHIVQAKDKGQTARATKFLALDKCLPHRDFLQILEIEHDPSAPDYLEYDIEWLTILRATDDLINVTGRLWNMPENNGLHARWDYSATEEGMKEVLEKLNHDLKVPCNFSVTAACYDPSKPQTQMQLIHRINPQTTEFCAQLGIIDINVRLQKSKEEHHVCGEYEEQDDVESNDSGEDQSEYNTDTSALSSINPDEIMLDEEEDEDSIVSAHSGMNTPSVEPSDQASEFSASFSDVRILPGSMIVSSDDTVDSTIDREGKPGGTVESGNGEDLTKVPLKRLSDEHEPEQRKKIKRRNQAIYAAVDDDDDDAA

SEQ ID NO: 749556 - protein, 544 aa, Homo sapiens; identical to SEQ ID NO: 749554

SEQ ID NO: 749557 - protein, 507 aa, Homo sapiens
MRRWRWQSGAARGLSTSCCAAATSRRCATRRIYAAWPCRPSIVTCKPSTASNHLQELPYGGWVAPNIYYLGLAGVVKYRGVRIGGISGIFKSHDYRKGHFECPPYNSSTIRSIYHVRNIEVYKLKQLKQPIDIFLSHDWPRSIYHYGNKKQLLKTKSFFRQEVENNTLGSPAASELLEHLKPTYWFSAHLHVKFAALMQHQAKDKGQTARATKFLALDKCLPHRDFLQILEIEHDPSAPDYLEYDIEWLTILRATDDLINVTGRLWNMPENNGLHARWDYSATEEGMKEVLEKLNHDLKVPCNFSVTAACYDPSKPQTQMQLIHRINPQTTEFCAQLGIIDINVRLQKSKEEHHVCGEYEEQDDVESNDSGEDQSEYNTDTSALSSINPDEIMLDEEEDEDSIVSAHSGMNTPSVEPSDQASEFSASFSDVRILPGSMIVSSDDTVDSTIDREGKPGGTVESGNGEDLTKVPLKRLSDEHEPEQRKKIKRRNQAIYAAVDDDDDDAA

SEQ ID NO: 749558 - protein, 544 aa, Homo sapiens; identical to SEQ ID NO: 749554

SEQ ID NO: 749559 - protein, 207 aa, Homo sapiens
ARPKMAEVQVLVLDGRGHLLGRLAAIVAKQVLLGRKVVVVRCEGINISGNFYRNKLKYLAFLRKRMNTNPSRGPYHFRAPSRIFWRTVRGMLPHKTKRGQAALDRLKVFDGIPPPYDKKKRMVVPAALKVVRLKPTRKFAYLGRLAHEVGWKYQAVTATLEEKRKEKAKIHYRKKKQLMRLRKQAEKNVEKKIDKYTEVLKTHGLLV

SEQ ID NO: 749560 - protein, 208 aa, Homo sapiens
NSRPVTAEVQVLVLDGRGHLLGRLAAIVAKQVLLGRKVVVVRCEGINISGNFYRNKLKYLAFLRKRMNTNPSRGPYHFRAPSRIFWRTVRGMLPHKTKRGQAALDRLKVFDGIPPPYDKKKRMVVPAALKVVRLKPTRKFAYLGRLAHEVGWKYQAVTATLEEKRKEKAKIHYRKKKQLMRLRKQAEKNVEKKIDKYTEVLKTHGLLV

SEQ ID NO: 749561 - protein, 222 aa, Homo sapiens
ARPKMAEVQVLVLDGRGHLLGRLAAIVAKQVLLGRKVVVVRCEGINISGNFYRNKLKYLAFLRKRMNTNPSRGPYHFRAPSRIFWRTVRGMLPHKTKRGQAALDRLKVFDGIPPPYDKKKRMVVPAALKVVRLKPTRKFAYLGRLAHEVGWKYQAVLGRLAHEVGWKYQAVTATLEEKRKEKAKIHYRKKKQLMRLRKQAEKNVEKKIDKYTEVLKTHGLLV

SEQ ID NO: 749562 - protein, 143 aa, Homo sapiens
ARPKMAEVQVLVLDGRGHLLGRLAAIVAKQVLLGRKVVVVRCEGINISGNFYRNKLKYLAFLRKRMNTNPSRGPYHFRAPSRIFWRTVRGMLPHKTKRGQAALDRLKVFDGIPPPYDKKKRMVVPAALIWGAWLTRLAGSTRQ

SEQ ID NO: 749563 - protein, 110 aa, Homo sapiens
ARPKMAEVQVLVLDGRGHLLGRLAAIVAKQVLLGRKVVVVRCEGINISGNFYRNKLKYLAFLRKRMNTNPSRGPYHFRAPSRIFWRTVRGMLPHKTKRGQAALDRLRSCV

SEQ ID NO: 749564 - protein, 81 aa, Homo sapiens
VLVLDGRGHLLGRLAAIVAKQVLLGEVAARGPSVMGPRWRSVMSNIHHLSFESHGHEINPMHRSETCQPLFPRVGDSRLKK

SEQ ID NO: 749565 - protein, 74 aa, Homo sapiens
LHSRRRLQKTGSEKGLCPPGLHRGWCGQDRAGYSGQASGRAGAESLHSVESTICRMPGTPDKDVVQAGHGGSHL

SEQ ID NO: 749566 - protein, 245 aa, Homo sapiens
  misc_feature (229)..(229): Xaa can be any naturally occurring amino acid
MEESGYESVLCVKPDVHVYRIPPRATNRGYRAAEWQLDQPSWSGRLRITAKGQMAYIKLEDRTSGELFAQAPVDQFPGTAVESVTDSSRYFVIRIEDGNGRRAFIGIGFGDRGDAFDFNVALQDHFKWVKQQCEFAKQAQNPDQGPKLDLGFKEGQTIKLNIANMKKKEGAAGNPRVRPASTGGLSLLPPPPGGKTSTLIPPPGEQLAVGGSLVQPAVAPSSRLNFQAXDPSQGNKGLGSQVPEP

SEQ ID NO: 749567 - protein, 61 aa, Homo sapiens
MPNIRAQPIILSLTNCCSGRWSLKLSDLPTVTKARNLDFYMKHLDFELLTTNLKADKTQFD

SEQ ID NO: 749568 - protein, 71 aa, Homo sapiens
TLISDVSSYTSEMSCTKCTDGLFCQGAIFLISRNSMIGFRDSYFLQIMEQLSYPCVKLFSHKGELNSPCQI

SEQ ID NO: 749569 - protein, 98 aa, Homo sapiens
MKVSAVLLCLLLMTAAFNPQGLAQPDALNVPSTCCFTFSSKKISLQRLKSYVITTSRCPQKAVIFRTKLGKEICADPKEKWVQNYMKHLGRKAHTLKT

SEQ ID NO: 749570 - protein, 98 aa, Homo sapiens; identical to SEQ ID NO: 749569

SEQ ID NO: 749571 - protein, 48 aa, Homo sapiens
MATTCKMASRPWSSRSVALRAQSAHDTRVCQSRKWAERRTVPAVMAKL

SEQ ID NO: 749572 - protein, 134 aa, Homo sapiens
HPLQRLPPPGRTPGQFTSSLLCPSPLCPSPKCLALPMQDPHRLGPLPGALSGGGDESGGAAGALCVWAGDRGGHPGDGDPWARLLVSGPKAAPPHCFPIGRGSREPGSGGLSTEPGGCGWCPGPMPRSAAWCLT

SEQ ID NO: 749573 - protein, 328 aa, Homo sapiens
HPTAPQVRAFLQPPLKGVVMETFGSGNGPTKPDLLQELRVATERGLVIVNCTHCLQGAVTTDYAAGMAMAGAGVISGFDMTSEAALAKLSYVLGQPGLSLDVRKELLTKDLRGEMTPPSVEERRPSLQGNTLGGGVSWLLSLSGSQEADALRNALVPSLACAAAHAGDVEALQALVELGSDLGLVDFNGQTPLHAAARGGHTEAVTMLLQRGVDVNTRDTDGFSPLLLAVRGRHPGVIGLLREAGASLSTQELEEAGTELCRLAYRADLEGLQVWWQAGADLGQPGYDGHSALHVAEAAGNLAVVAFLQSLEGAVGAQAPCPEVLPGV

SEQ ID NO: 749574 - protein, 250 aa, Homo sapiens
PSQTAWRPEAPLTVARKSSPALHSSSRLLTKDLRGEMTPPSVEERRPSLQGNTLGGGVSWLLSLSGSQEADALRNALVPSLACAAAHAGDVEALQALVELGSDLGLVDFNGQTPLHAAARGGHTEAVTMLLQRGVDVNTRDTDGFSPLLLAVRGRHPGVIGLLREAGASLSTQELEEAGTELCRLAYRADLEGLQVWWQAGADLGQPGYDGHSALHVAEAAGNLAVVAFLQSLEGAVGAQAPCPEVLPGV

SEQ ID NO: 749575 - protein, 218 aa, Homo sapiens
PSQTAWRPEAPLTVARKSSPALHSSSRLLTKDLRGEMTPPSVEERRPSLQGNTLGGGVSWLLSLSGSQGSDLGLVDFNGQTPLHAAARGGHTEAVTMLLQRGVDVNTRDTDGFSPLLLAVRGRHPGVIGLLREAGASLSTQELEEAGTELCRLAYRADLEGLQVWWQAGADLGQPGYDGHSALHVAEAAGNLAVVAFLQSLEGAVGAQAPCPEVLPGV

SEQ ID NO: 749576 - protein, 334 aa, Homo sapiens
HPTAPQVRAFLQPPLKGVVMETFGSGNGPTKPDLLQELRVATERGLVIVNCTHCLQGAVTTDYAAGMAMAGAGVISGFDMTSEAALAKLSYVLGQPGLSLDVRKELLTKDLRGEMTPPSVEERRPSLQGNTLGGGVSWLLSLSGSQEADALRNALVPSLACAAAHAGDVEALQALVELGSDLGLVDFNGQTPLHAAARGGHTEAVTMLLQRGVDVNTRDTDGFSPLLLAVRGRHPGVIGLLREAGASLSTQELEEAGTELCRLAYRADLEGLQVWWQAGADLGQPGYDGHSALHVAEAAGNLAVVAFLQSLEGAVGAQAPCPEPSCFQEVLPGV

SEQ ID NO: 749577 - protein, 310 aa, Homo sapiens
HPTAPQVRAFLQPPLKGVVMETFGSGNGPTKPDLLQELRVATERGLVIVNCTHCLQGAVTTDYAAGMAMAGAGVISGFDMTSEAALAKLSYVLGQPGLSLDVRKELLTKDLRGEMTPPSVEERRPSLQGNTLGGGVSWLLSLSGSQEADALRNALVPSLACAAAHAGDVEALQALVELGSDLGLVDFNGQTPLHAAARGGHTEAVTMLLQRGVDVNTRDTDGFSPLLLAVRGRHPGVIGLLREAGASLSTQELEEAGTELCRQRQPGTWQWWPFYRAWRVRLVPRPHAQKCCLVSNLKASCCSISHSFLP

SEQ ID NO: 749578 - protein, 1466 aa, Homo sapiens
PAGLSSLLSRFLSSRLQLPARVGAMYAVYKQAHPPTGLEFSMYCNFFNNSERNLVVAGTSQLYVYRLNRDAEALTKNDRSTEGKAHREKLELAASFSFFGNVMSMASVQLAGAKRDALLLSFKDAKLSVVEYDPGTHDLKTLSLHYFEEPELRDGFVQNVHTPRVRVDPDGRCAAMLVYGTRLVVLPFRRESLAEEHEGLVGEGQRSSFLPSYIIDVRALDEKLLNIIDLQFLHGYYEPTLLILFEPNQTWPGRVAVRQDTCSIVAISLNITQKVHPVIWSLTSLPFDCTQALAVPKPIGGVVVFAVNSLLYLNQSVPPYGVALNSLTTGTTAFPLRTQEGVRITLDCAQATFISYDKMVISLKGGEIYVLTLITDGMRSVRAFHFDKAAASVLTTSMVTMEPGYLFLGSRLGNSLLLKYTEKLQEPPASAVREAADKEEPPSKKKRVDATAGWSAAGKSVPQDEVDEIEVYGSEAQSGTQLATYSFEVCDSILNIGPCANAAVGEPAFLSEEFQNSPEPDLEIVVCSGHGKNGALSVLQKSIRPQVVTTFELPGCYDMWTVIAPVRKEEEDNPKGEGTEQEPSTTPEADDDGRRHGFLILSREDSTMILQTGQEIMELDTSGFATQGPTVFAGNIGDNRYIVQVSPLGIRLLEGVNQLHFIPVDLGAPIVQCAVADPYVVIMSAEGHVTMFLLKSDSYGGRHHRLALHKPPLHHQSKVITLCLYRDLSGMFTTESRLGGARDELGGRSGPEAEGLGSETSPTVDDEEEMLYGDSGSLFSPSKEEARRSSQPPADRDPAPFRAEPTHWCLLVRENGTMEIYQLPDWRLVFLVKNFPVGQRVLVDSSFGQPTTQGEARREEATRQGELPLVKEVLLVALGSRQSRPYLLVHVDQELLIYEAFPHDSQLGQGNLKVRFKKVPHNINFREKKPKPSKKKAEGGGAEEGAGARGRVARFRYFEDIYGYSGVFICGPSPHWLLVTGRGALRLHPMAIDGPVDSFAPFHNVNCPRGFLYFNRQGELRISVLPAYLSYDAPWPVRKIPLRCTAHYVAYHVESKVYAVATSTNTPCARIPRMTGEEKEFETIERDERYIHPQQEAFSIQLISPVSWEAIPNARIELQEWEHVTCMKTVSLRSEETVSGLKGYVAAGTCLMQGEEVTCRGRILIMDVIEVVPEPGQPLTKNKFKVLYEKEQKGPVTALCHCNGHLVSAIGQKIFLWSLRASELTGMAFIDTQLYIHQMISVKNFILAADVMKSISLLRYQEESKTLSLVSRDAKPLEVYSVDFMVDNAQLGFLVSDRDRNLMVYMYLPEAKESFGGMRLLRRADFHVGAHVNTFWRTPCRATEGLSKKSVVWENKHITWFATLDGGIGLLLPMQEKTYRRLLMLQNALTTMLPHHAGLNPRAFRMLHVDRRTLQNAVRNVLDGELLNRYLYLSTMERSELAKKIGTTPDIILDDLLETDRVTAHF

SEQ ID NO: 749579 - protein, 1489 aa, Homo sapiens
PAGLSSLLSRFLSSRLQLPARVGAMYAVYKQAHPPTGLEFSMYCNFFNNSERNLVVAGTSQLYVYRLNRDAEALTKNDRSTEGKAHREKLELAASFSFFGNVMSMASVQLAGAKRDALLLSFKDAKLSVVEYDPGTHDLKTLSLHYFEEPELRDGFVQNVHTPRVRVDPDGRCAAMLVYGTRLVVLPFRRESLAEEHEGLVGEGQRSSFLPSYIIDVRALDEKLLNIIDLQFLHGYYEPTLLILFEPNQTWPGRVAVRQDTCSIVAISLNITQKVHPVIWSLTSLPFDCTQALAVPKPIGGVVVFAVNSLLYLNQSVPPYGVALNSLTTGTTAFPLRTQEGVRITLDCAQATFISYDKMVISLKGGEIYVLTLITDGMRSVRAFHFDKAAASVLTTSVVGTRGWVWVQTRPSHHTPALPQMVTMEPGYLFLGSRLGNSLLLKYTEKLQEPPASAVREAADKEEPPSKKKRVDATAGWSAAGKSVPQDEVDEIEVYGSEAQSGTQLATYSFEVCDSILNIGPCANAAVGEPAFLSEEFQNSPEPDLEIVVCSGHGKNGALSVLQKSIRPQVVTTFELPGCYDMWTVIAPVRKEEEDNPKGEGTEQEPSTTPEADDDGRRHGFLILSREDSTMILQTGQEIMELDTSGFATQGPTVFAGNIGDNRYIVQVSPLGIRLLEGVNQLHFIPVDLGAPIVQCAVADPYVVIMSAEGHVTMFLLKSDSYGGRHHRLALHKPPLHHQSKVITLCLYRDLSGMFTTESRLGGARDELGGRSGPEAEGLGSETSPTVDDEEEMLYGDSGSLFSPSKEEARRSSQPPADRDPAPFRAEPTHWCLLVRENGTMEIYQLPDWRLVFLVKNFPVGQRVLVDSSFGQPTTQGEARREEATRQGELPLVKEVLLVALGSRQSRPYLLVHVDQELLIYEAFPHDSQLGQGNLKVRFKKVPHNINFREKKPKPSKKKAEGGGAEEGAGARGRVARFRYFEDIYGYSGVFICGPSPHWLLVTGRGALRLHPMAIDGPVDSFAPFHNVNCPRGFLYFNRQGELRISVLPAYLSYDAPWPVRKIPLRCTAHYVAYHVESKVYAVATSTNTPCARIPRMTGEEKEFETIERDERYIHPQQEAFSIQLISPVSWEAIPNARIELQEWEHVTCMKTVSLRSEETVSGLKGYVAAGTCLMQGEEVTCRGRILIMDVIEVVPEPGQPLTKNKFKVLYEKEQKGPVTALCHCNGHLVSAIGQKIFLWSLRASELTGMAFIDTQLYIHQMISVKNFILAADVMKSISLLRYQEESKTLSLVSRDAKPLEVYSVDFMVDNAQLGFLVSDRDRNLMVYMYLPEAKESFGGMRLLRRADFHVGAHVNTFWRTPCRATEGLSKKSVVWENKHITWFATLDGGIGLLLPMQEKTYRRLLMLQNALTTMLPHHAGLNPRAFRMLHVDRRTLQNAVRNVLDGELLNRYLYLSTMERSELAKKIGTTPDIILDDLLETDRVTAHF

SEQ ID NO: 749580 - protein, 424 aa, Homo sapiens
PAGLSSLLSRFLSSRLQLPARVGAMYAVYKQAHPPTGLEFSMYCNFFNNSERNLVVAGTSQLYVYRLNRDAEALTKNDRSTEGKAHREKLELAASFSFFGNVMSMASVQLAGAKRDALLLSFKDAKLSVVEYDPGTHDLKTLSLHYFEEPELRDGFVQNVHTPRVRVDPDGRCAAMLVYGTRLVVLPFRRESLAEEHEGLVGEGQRSSFLPSYIIDVRALDEKLLNIIDLQFLHGYYEPTLLILFEPNQTWPGRVAVRQDTCSIVAISLNITQKVHPVIWSLTSLPFDCTQALAVPKPIGGVVVFAVNSLLYLNQSVPPYGVALNSLTTGTTAFPLRTQEGVRITLDCAQATFISYDKMVISLKGGEIYVLTLITDGMRSVRAFHFDKAAASVLTTSMVTMEPGYLFLGSRLGNSLLLKYNLPW

SEQ ID NO: 749581 - protein, 1505 aa, Homo sapiens
PGRTEFAAVPVPLESAPTARWAAGRAAEAAARGRGGARCGAGLLRGRPRSPFLSRPCAARVGAMYAVYKQAHPPTGLEFSMYCNFFNNSERNLVVAGTSQLYVYRLNRDAEALTKNDRSTEGKAHREKLELAASFSFFGNVMSMASVQLAGAKRDALLLSFKDAKLSVVEYDPGTHDLKTLSLHYFEEPELRDGFVQNVHTPRVRVDPDGRCAAMLVYGTRLVVLPFRRESLAEEHEGLVGEGQRSSFLPSYIIDVRALDEKLLNIIDLQFLHGYYEPTLLILFEPNQTWPGRVAVRQDTCSIVAISLNITQKVHPVIWSLTSLPFDCTQALAVPKPIGGVVVFAVNSLLYLNQSVPPYGVALNSLTTGTTAFPLRTQEGVRITLDCAQATFISYDKMVISLKGGEIYVLTLITDGMRSVRAFHFDKAAASVLTTSMVTMEPGYLFLGSRLGNSLLLKYTEKLQEPPASAVREAADKEEPPSKKKRVDATAGWSAAGKSVPQDEVDEIEVYGSEAQSGTQLATYSFEVCDSILNIGPCANAAVGEPAFLSEEFQNSPEPDLEIVVCSGHGKNGALSVLQKSIRPQVVTTFELPGCYDMWTVIAPVRKEEEDNPKGEGTEQEPSTTPEADDDGRRHGFLILSREDSTMILQTGQEIMELDTSGFATQGPTVFAGNIGDNRYIVQVSPLGIRLLEGVNQLHFIPVDLGAPIVQCAVADPYVVIMSAEGHVTMFLLKSDSYGGRHHRLALHKPPLHHQSKVITLCLYRDLSGMFTTESRLGGARDELGGRSGPEAEGLGSETSPTVDDEEEMLYGDSGSLFSPSKEEARRSSQPPADRDPAPFRAEPTHWCLLVRENGTMEIYQLPDWRLVFLVKNFPVGQRVLVDSSFGQPTTQGEARREEATRQGELPLVKEVLLVALGSRQSRPYLLVHVDQELLIYEAFPHDSQLGQGNLKVRFKKVPHNINFREKKPKPSKKKAEGGGAEEGAGARGRVARFRYFEDIYGYSGVFICGPSPHWLLVTGRGALRLHPMAIDGPVDSFAPFHNVNCPRGFLYFNRQGELRISVLPAYLSYDAPWPVRKIPLRCTAHYVAYHVESKVYAVATSTNTPCARIPRMTGEEKEFETIERDERYIHPQQEAFSIQLISPVSWEAIPNARIELQEWEHVTCMKTVSLRSEETVSGLKGYVAAGTCLMQGEEVTCRGRILIMDVIEVVPEPGQPLTKNKFKVLYEKEQKGPVTALCHCNGHLVSAIGQKIFLWSLRASELTGMAFIDTQLYIHQMISVKNFILAADVMKSISLLRYQEESKTLSLVSRDAKPLEVYSVDFMVDNAQLGFLVSDRDRNLMVYMYLPEAKESFGGMRLLRRADFHVGAHVNTFWRTPCRATEGLSKKSVVWENKHITWFATLDGGIGLLLPMQEKTYRRLLMLQNALTTMLPHHAGLNPRAFRMLHVDRRTLQNAVRNVLDGELLNRYLYLSTMERSELAKKIGTTPDIILDDLLETDRVTAHF

SEQ ID NO: 749582 - protein, 1364 aa, Homo sapiens
MSMASVQLAGAKRDALLLSFKDAKLSVVEYDPGTHDLKTLSLHYFEEPELRDGFVQNVHTPRVRVDPDGRCAAMLVYGTRLVVLPFRRESLAEEHEGLVGEGQRSSFLPSYIIDVRALDEKLLNIIDLQFLHGYYEPTLLILFEPNQTWPGRVAVRQDTCSIVAISLNITQKVHPVIWSLTSLPFDCTQALAVPKPIGGVVVFAVNSLLYLNQSVPPYGVALNSLTTGTTAFPLRTQEGVRITLDCAQATFISYDKMVISLKGGEIYVLTLITDGMRSVRAFHFDKAAASVLTTSMVTMEPGYLFLGSRLGNSLLLKYTEKLQEPPASAVREAADKEEPPSKKKRVDATAGWSAAGKSVPQDEVDEIEVYGSEAQSGTQLATYSFEVCDSILNIGPCANAAVGEPAFLSEEFQNSPEPDLEIVVCSGHGKNGALSVLQKSIRPQVVTTFELPGCYDMWTVIAPVRKEEEDNPKGEGTEQEPSTTPEADDDGRRHGFLILSREDSTMILQTGQEIMELDTSGFATQGPTVFAGNIGDNRYIVQVSPLGIRLLEGVNQLHFIPVDLGAPIVQCAVADPYVVIMSAEGHVTMFLLKSDSYGGRHHRLALHKPPLHHQSKVITLCLYRDLSGMFTTESRLGGARDELGGRSGPEAEGLGSETSPTVDDEEEMLYGDSGSLFSPSKEEARRSSQPPADRDPAPFRAEPTHWCLLVRENGTMEIYQLPDWRLVFLVKNFPVGQRVLVDSSFGQPTTQGEARREEATRQGELPLVKEVLLVALGSRQSRPYLLVHVDQELLIYEAFPHDSQLGQGNLKVRFKKVPHNINFREKKPKPSKKKAEGGGAEEGAGARGRVARFRYFEDIYGYSGVFICGPSPHWLLVTGRGALRLHPMAIDGPVDSFAPFHNVNCPRGFLYFNRQGELRISVLPAYLSYDAPWPVRKIPLRCTAHYVAYHVESKVYAVATSTNTPCARIPRMTGEEKEFETIERDERYIHPQQEAFSIQLISPVSWEAIPNARIELQEWEHVTCMKTVSLRSEETVSGLKGYVAAGTCLMQGEEVTCRGRILIMDVIEVVPEPGQPLTKNKFKVLYEKEQKGPVTALCHCNGHLVSAIGQKIFLWSLRASELTGMAFIDTQLYIHQMISVKNFILAADVMKSISLLRYQEESKTLSLVSRDAKPLEVYSVDFMVDNAQLGFLVSDRDRNLMVYMYLPEAKESFGGMRLLRRADFHVGAHVNTFWRTPCRATEGLSKKSVVWENKHITWFATLDGGIGLLLPMQEKTYRRLLMLQNALTTMLPHHAGLNPRAFRMLHVDRRTLQNAVRNVLDGELLNRYLYLSTMERSELAKKIGTTPDIILDDLLETDRVTAHF

SEQ ID NO: 749583 - protein, 1364 aa, Homo sapiens; identical to SEQ ID NO: 749582

SEQ ID NO: 749584 - protein, 1546 aa, Homo sapiens
PGRTEFAAVPVPLESAPTARWAAGRAAEAAARGRGGARCGAGLLRGRPRSPFLSRPCAARVGAMYAVYKQAHPPTGLEFSMYCNFFNNSERNLVVAGTSQLYVYRLNRDAEHGKFSDGCSCGNLVLRSWNNSTQLCYNTPACHWAHLRRFEEALTKNDRSTEGKAHREKLELAASFSFFGNVMSMASVQLAGAKRDALLLSFKDAKLSVVEYDPGTHDLKTLSLHYFEEPELRDGFVQNVHTPRVRVDPDGRCAAMLVYGTRLVVLPFRRESLAEEHEGLVGEGQRSSFLPSYIIDVRALDEKLLNIIDLQFLHGYYEPTLLILFEPNQTWPGRVAVRQDTCSIVAISLNITQKVHPVIWSLTSLPFDCTQALAVPKPIGGVVVFAVNSLLYLNQSVPPYGVALNSLTTGTTAFPLRTQEGVRITLDCAQATFISYDKMVISLKGGEIYVLTLITDGMRSVRAFHFDKAAASVLTTSMVTMEPGYLFLGSRLGNSLLLKYTEKLQEPPASAVREAADKEEPPSKKKRVDATAGWSAAGKSVPQDEVDEIEVYGSEAQSGTQLATYSFEVCDSILNIGPCANAAVGEPAFLSEEFQNSPEPDLEIVVCSGHGKNGALSVLQKSIRPQVVTTFELPGCYDMWTVIAPVRKEEEDNPKGEGTEQEPSTTPEADDDGRRHGFLILSREDSTMILQTGQEIMELDTSGFATQGPTVFAGNIGDNRYIVQVSPLGIRLLEGVNQLHFIPVDLGAPIVQCAVADPYVVIMSAEGHVTMFLLKSDSYGGRHHRLALHKPPLHHQSKVITLCLYRDLSGMFTTESRLGGARDELGGRSGPEAEGLGSETSPTVDDEEEMLYGDSGSLFSPSKEEARRSSQPPADRDPAPFRAEPTHWCLLVRENGTMEIYQLPDWRLVFLVKNFPVGQRVLVDSSFGQPTTQGEARREEATRQGELPLVKEVLLVALGSRQSRPYLLVHVDQELLIYEAFPHDSQLGQGNLKVRFKKVPHNINFREKKPKPSKKKAEGGGAEEGAGARGRVARFRYFEDIYGYSGVFICGPSPHWLLVTGRGALRLHPMAIDGPVDSFAPFHNVNCPRGFLYFNRQGELRISVLPAYLSYDAPWPVRKIPLRCTAHYVAYHVESKVYAVATSTNTPCARIPRMTGEEKEFETIERDERYIHPQQEAFSIQLISPVSWEAIPNARIELQEWEHVTCMKTVSLRSEETVSGLKGYVAAGTCLMQGEEVTCRGRILIMDVIEVVPEPGQPLTKNKFKVLYEKEQKGPVTALCHCNGHLVSAIGQKIFLWSLRASELTGMAFIDTQLYIHQMISVKNFILAADVMKSISLLRYQEESKTLSLVSRDAKPLEVYSVDFMVDNAQLGFLVSDRDRNLMVYMYLPEAKESFGGMRLLRRADFHVGAHVNTFWRTPCRATEGLSKKSVVWENKHITWFATLDGGIGLLLPMQEKTYRRLLMLQNALTTMLPHHAGLNPRAFRMLHVDRRTLQNAVRNVLDGELLNRYLYLSTMERSELAKKIGTTPDIILDDLLETDRVTAHF

SEQ ID NO: 749585 - protein, 1364 aa, Homo sapiens; identical to SEQ ID NO: 749582

SEQ ID NO: 749586 - protein, 1367 aa, Homo sapiens
SSVPVLLHKQLAGAKRDALLLSFKDAKLSVVEYDPGTHDLKTLSLHYFEEPELRDGFVQNVHTPRVRVDPDGRCAAMLVYGTRLVVLPFRRESLAEEHEGLVGEGQRSSFLPSYIIDVRALDEKLLNIIDLQFLHGYYEPTLLILFEPNQTWPGRVAVRQDTCSIVAISLNITQKVHPVIWSLTSLPFDCTQALAVPKPIGGVVVFAVNSLLYLNQSVPPYGVALNSLTTGTTAFPLRTQEGVRITLDCAQATFISYDKMVISLKGGEIYVLTLITDGMRSVRAFHFDKAAASVLTTSMVTMEPGYLFLGSRLGNSLLLKYTEKLQEPPASAVREAADKEEPPSKKKRVDATAGWSAAGKSVPQDEVDEIEVYGSEAQSGTQLATYSFEVCDSILNIGPCANAAVGEPAFLSEEFQNSPEPDLEIVVCSGHGKNGALSVLQKSIRPQVVTTFELPGCYDMWTVIAPVRKEEEDNPKGEGTEQEPSTTPEADDDGRRHGFLILSREDSTMILQTGQEIMELDTSGFATQGPTVFAGNIGDNRYIVQVSPLGIRLLEGVNQLHFIPVDLGAPIVQCAVADPYVVIMSAEGHVTMFLLKSDSYGGRHHRLALHKPPLHHQSKVITLCLYRDLSGMFTTESRLGGARDELGGRSGPEAEGLGSETSPTVDDEEEMLYGDSGSLFSPSKEEARRSSQPPADRDPAPFRAEPTHWCLLVRENGTMEIYQLPDWRLVFLVKNFPVGQRVLVDSSFGQPTTQGEARREEATRQGELPLVKEVLLVALGSRQSRPYLLVHVDQELLIYEAFPHDSQLGQGNLKVRFKKVPHNINFREKKPKPSKKKAEGGGAEEGAGARGRVARFRYFEDIYGYSGVFICGPSPHWLLVTGRGALRLHPMAIDGPVDSFAPFHNVNCPRGFLYFNRQGELRISVLPAYLSYDAPWPVRKIPLRCTAHYVAYHVESKVYAVATSTNTPCARIPRMTGEEKEFETIERDERYIHPQQEAFSIQLISPVSWEAIPNARIELQEWEHVTCMKTVSLRSEETVSGLKGYVAAGTCLMQGEEVTCRGRILIMDVIEVVPEPGQPLTKNKFKVLYEKEQKGPVTALCHCNGHLVSAIGQKIFLWSLRASELTGMAFIDTQLYIHQMISVKNFILAADVMKSISLLRYQEESKTLSLVSRDAKPLEVYSVDFMVDNAQLGFLVSDRDRNLMVYMYLPEAKESFGGMRLLRRADFHVGAHVNTFWRTPCRATEGLSKKSVVWENKHITWFATLDGGIGLLLPMQEKTYRRLLMLQNALTTMLPHHAGLNPRAFRMLHVDRRTLQNAVRNVLDGELLNRYLYLSTMERSELAKKIGTTPDIILDDLLETDRVTAHF

SEQ ID NO: 749587 - protein, 649 aa, Homo sapiens
MAQYGHPSPLGMAAREELYSKVTPRRNRQQRPGTIKHGSALDVLLSMGFPRARAQKALASTGGRSVQAACDWLFSHVGDPFLDDPLPREYVLYLRPTGPLAQKLSDFWQQSKQICGKNKAHNIFPHITLCQFFMCEDSKVDALGEALQTTVSRWKCKFSAPLPLELYTSSNFIGLFVKEDSAEVLKKFAADFAAEAASKTEVHVEPHKKQLHVTLAYHFQASHLPTLEKLAQNIDVKLGCDWVATIFSRDIRFANHETLQVIYPYTPQNDDELELVPGDFIFMSPMEQTSTSEGWIYGTSLTTGCSGLLPENYITKADECSTWIFHGSYSILNTSSSNSLTFGDGVLERRPYEDQGLGETTPLTIICQPMQPLRVNSQPGPQKRCLFVCRHGERMDVVFGKYWLSQCFDAKGRYIRTNLNMPHSLPQRSGGFRDYEKDAPITVFGCMQARLVGEALLESNTIIDHVYCSPSLRCVQTAHNILKGLQQENHLKIRVEPGLFEWTKWVAGSTLPAWIPPSELAAANLSVDTTYRPHIPISKLVVSESYDTYISRSFQVTKEIISECKSKGNNILIVAHASSLEACTCQLQGLSPQNSKDFVQMVRKIPYLGFCSCEELGETGIWQLTDPPILPLTHGPTGGFNWRETLLQE

SEQ ID NO: 749588 - protein, 338 aa, Homo sapiens
LIANSRTARRGEGRGRRRQGYCRRRAGGSRGPEWLRLVPQRPLAGVLAPVASPGSVRVPTLGKLGAPPPLPPPPAWLWVPEPPPLAQPDSLLLPEPSGSGSFPGDGWPLSHGSVRPPQSARHGCERGAVQQSHPPEEPPTAPRHHQAWIGAGRAPLHGVPQSPRVSGRARSPRRPLPRARPALGFAPARLPAPAGQAARSPLPETCWGRDGRAGNPGLGSGRGCGGRRGAGALGQARRGMPKAGGRGRGVRVPGIVLSLRPSRVELSVSLARSPEVSSAERLGRRGPAEDSGTLSVWNTGLVWDPPVSGKGRETAGQGGRRPRCSGFQLRMSLSGSVS

SEQ ID NO: 749589 - protein, 649 aa, Homo sapiens; identical to SEQ ID NO: 749587

SEQ ID NO: 749590 - protein, 516 aa, Homo sapiens
MCEDSKVDALGEALQTTVSRWKCKFSAPLPLELYTSSNFIGLFVKEDSAEVLKKFAADFAAEAASKTEVHVEPHKKQLHVTLAYHFQASHLPTLEKLAQNIDVKLGCDWVATIFSRDIRFANHETLQVIYPYTPQNDDELELVPGDFIFMSPMEQTSTSEGWIYGTSLTTGCSGLLPENYITKADECSTWIFHGSYSILNTSSSNSLTFGDGVLERRPYEDQGLGETTPLTIICQPMQPLRVNSQPGPQKRCLFVCRHGERMDVVFGKYWLSQCFDAKGRYIRTNLNMPHSLPQRSGGFRDYEKDAPITVFGCMQARLVGEALLESNTIIDHVYCSPSLRCVQTAHNILKGLQQENHLKIRVEPGLFEWTKWVAGSTLPAWIPPSELAAANLSVDTTYRPHIPISKLVVSESYDTYISRSFQVTKEIISECKSKGNNILIVAHASSLEACTCQLQGLSPQNSKDFVQMVRKIPYLGFCSCEELGETGIWQLTDPPILPLTHGPTGGFNWRETLLQE

SEQ ID NO: 749591 - protein, 516 aa, Homo sapiens; identical to SEQ ID NO: 749590

SEQ ID NO: 749592 - protein, 649 aa, Homo sapiens; identical to SEQ ID NO: 749587

SEQ ID NO: 749593 - protein, 649 aa, Homo sapiens; identical to SEQ ID NO: 749587

SEQ ID NO: 749594 - protein, 527 aa, Homo sapiens
MAQYGHPSPLGMAAREELYSKVTPRRNRQQRPGTIKHGSALDVLLSMGFPRARAQKALASTGGRSVQAACDWLFSHVGDPFLDDPLPREYVLYLRPTGPLAQKLSDFWQQSKQICGKNKAHNIFPHITLCQFFMCEDSKVDALGEALQTTVSRWKCKFSAPLPLELYTSSNFIGLFVKEDSAEVLKKFAADFAAEAASKTEVHVEPHKKQLHVTLAYHFQASHLPTLEKLAQNIDVKLGCDWVATIFSRDIRFANHETLQVIYPYTPQNDDELELVPGDFIFMSPMEQTSTSEGWIYGTSLTTGCSGLLPENYITKADECSTWIFHGSYSILNTSSSNSLTFGDGVLERRPYEDQGLGETTPLTIICQPMQPLRVNSQPGPQKRCLFVCRHGERMDVVFGKYWLSQCFDAKGRYIRTNLNMPHSLPQRSGGFRDYEKDAPITVFGCMQARLVGKYPGVTALQAFLASSFKTLVPWICKTLPVGFYNFPTSFLNSKGTYYTTIKFRTLCSALGWLTKVNEVWSLLRST

SEQ ID NO: 749595 - protein, 1239 aa, Homo sapiens
MLLVLECVLFSVAQGYFRMDSSATQFHIETHENTSGLWSIWYRNHFDRSVVLNDVFLSKETKHMLKILNFTGPLFLPPGCWNIFSLKLAVKDIAINLFTNVFLTTNIGAIFAIPLQIYSAPTKEGSLGFEVIAHCGMHYFMGKSKAGNPNWNGSLSLDQSTWNVDSELANKLYERWKKYKNGDVCKRNVLGTTRFAHLKKSKESESFVFFLPRLIAEPGLMLNFSATALRSRMIKYFVVQNPSSWPVSLQLLPLSLYPKPEALVHLLHRWFGTDMQMINFTTGEFQLTEACPYLGTHSEESRFGILHLHLQPLEMKRVGVVFTPADYGKVTSLILIRNNLTVIDMIGVEGFGARELLKVGGRLPGAGGSLRFKVPESTLMDCRRQLKDSKQILSITKNFKVENIGPLPITVSSLKINGYNCQGYGFEVLDCHQFSLDPNTSRDISIVFTPDFTSSWVIRDLSLVTAADLEFRFTLNVTLPHHLLPLCADVVPGPSWEESFWRLTVFFVSLSLLGVILIAFQQAQYILMEFMKTRQRQNASSSSQQNNGPMDVISPHSYKSNCKNFLDTYGPSDKGRGKNCLPVNTPQSRIQNAAKRSPATYGHSQKKHKCSVYYSKHKTSTAAASSTSTTTEEKQTSPLGSSLPAAKEDICTDAMRENWISLRYASGINVNLQKNLTLPKNLLNKEENTLKNTIVFSNPSSECSMKEGIQTCMFPKETDIKTSENTAEFKERELCPLKTSKKLPENHLPRNSPQYHQPDLPEISRKNNGNNQQVPVKNEVDHCENLKKVDTKPSSEKKIHKTSREDMFSEKQDIPFVEQEDPYRKKKLQEKREGNLQNLNWSKSRTCRKNKKRGVAPVSRPPEQSDLKLVCSDFERSELSSDINVRSWCIQESTREVCKADAEIASSLPAAQREAEGYYQKPEKKCVDKFCSDSSSDCGSSSGSVRASRGSWGSWSSTSSSDGDKKPMVDAQHFLPAGDSVSQNDFPSEAPISLNLSHNICNPMTVNSLPQYAEPSCPSLPAGPTGVEEDKGLYSPGDLWPTPPVCVTSSLNCTLENGVPCVIQESAPVHNSFIDWSATCEGQFSSAYCPLELNDYNAFPEENMNYANGFPCPADVQTDFIDHNSQSTWNTPPNMPAAWGHASFISSPPYLTSTRSLSPMSGLFGSIWAPQSDVYENCCPINPTTEHSTHMENQAVVCKEYYPGFNPFRAYMNLDIWTTTANRNANFPLSRDSSYCGNV

SEQ ID NO: 749596 - protein, 1239 aa, Homo sapiens; identical to SEQ ID NO: 749595

SEQ ID NO: 749597 - protein, 1019 aa, Homo sapiens
MLNFSATALRSRMIKYFVVQNPSSWPVSLQLLPLSLYPKPEALVHLLHRWFGTDMQMINFTTGEFQLTEACPYLGTHSEESRFGILHLHLQPLEMKRVGVVFTPADYGKVTSLILIRNNLTVIDMIGVEGFGARELLKVGGRLPGAGGSLRFKVPESTLMDCRRQLKDSKQILSITKNFKVENIGPLPITVSSLKINGYNCQGYGFEVLDCHQFSLDPNTSRDISIVFTPDFTSSWVIRDLSLVTAADLEFRFTLNVTLPHHLLPLCADVVPGPSWEESFWRLTVFFVSLSLLGVILIAFQQAQYILMEFMKTRQRQNASSSSQQNNGPMDVISPHSYKSNCKNFLDTYGPSDKGRGKNCLPVNTPQSRIQNAAKRSPATYGHSQKKHKCSVYYSKHKTSTAAASSTSTTTEEKQTSPLGSSLPAAKEDICTDAMRENWISLRYASGINVNLQKNLTLPKNLLNKEENTLKNTIVFSNPSSECSMKEGIQTCMFPKETDIKTSENTAEFKERELCPLKTSKKLPENHLPRNSPQYHQPDLPEISRKNNGNNQQVPVKNEVDHCENLKKVDTKPSSEKKIHKTSREDMFSEKQDIPFVEQEDPYRKKKLQEKREGNLQNLNWSKSRTCRKNKKRGVAPVSRPPEQSDLKLVCSDFERSELSSDINVRSWCIQESTREVCKADAEIASSLPAAQREAEGYYQKPEKKCVDKFCSDSSSDCGSSSGSVRASRGSWGSWSSTSSSDGDKKPMVDAQHFLPAGDSVSQNDFPSEAPISLNLSHNICNPMTVNSLPQYAEPSCPSLPAGPTGVEEDKGLYSPGDLWPTPPVCVTSSLNCTLENGVPCVIQESAPVHNSFIDWSATCEGQFSSAYCPLELNDYNAFPEENMNYANGFPCPADVQTDFIDHNSQSTWNTPPNMPAAWGHASFISSPPYLTSTRSLSPMSGLFGSIWAPQSDVYENCCPINPTTEHSTHMENQAVVCKEYYPGFNPFRAYMNLDIWTTTANRNANFPLSRDSSYCGNV

SEQ ID NO: 749598 - protein, 1155 aa, Homo sapiens
MLLVLECVLFSVAQGYFRMDSSATQFHIETHENTSGLWSIWYRNHFDRSVVLNDVFLSKETKHMLKILNFTGPLFLPPGCWNIFSLKLAVKDIAINLFTNVFLTTNIGAIFAIPLQIYSAPTKEGSLGFEVIAHCGMHYFMGKSKAGNPNWNGSLSLDQSTWNVDSELANKLYERWKKYKNGDVCKFGTDMQMINFTTGEFQLTEACPYLGTHSEESRFGILHLHLQPLEMKRVGVVFTPADYGKVTSLILIRNNLTVIDMIGVEGFGARELLKVGGRLPGAGGSLRFKVPESTLMDCRRQLKDSKQILSITKNFKVENIGPLPITVSSLKINGYNCQGYGFEVLDCHQFSLDPNTSRDISIVFTPDFTSSWVIRDLSLVTAADLEFRFTLNVTLPHHLLPLCADVVPGPSWEESFWRLTVFFVSLSLLGVILIAFQQAQYILMEFMKTRQRQNASSSSQQNNGPMDVISPHSYKSNCKNFLDTYGPSDKGRGKNCLPVNTPQSRIQNAAKRSPATYGHSQKKHKCSVYYSKHKTSTAAASSTSTTTEEKQTSPLGSSLPAAKEDICTDAMRENWISLRYASGINVNLQKNLTLPKNLLNKEENTLKNTIVFSNPSSECSMKEGIQTCMFPKETDIKTSENTAEFKERELCPLKTSKKLPENHLPRNSPQYHQPDLPEISRKNNGNNQQVPVKNEVDHCENLKKVDTKPSSEKKIHKTSREDMFSEKQDIPFVEQEDPYRKKKLQEKREGNLQNLNWSKSRTCRKNKKRGVAPVSRPPEQSDLKLVCSDFERSELSSDINVRSWCIQESTREVCKADAEIASSLPAAQREAEGYYQKPEKKCVDKFCSDSSSDCGSSSGSVRASRGSWGSWSSTSSSDGDKKPMVDAQHFLPAGDSVSQNDFPSEAPISLNLSHNICNPMTVNSLPQYAEPSCPSLPAGPTGVEEDKGLYSPGDLWPTPPVCVTSSLNCTLENGVPCVIQESAPVHNSFIDWSATCEGQFSSAYCPLELNDYNAFPEENMNYANGFPCPADVQTDFIDHNSQSTWNTPPNMPAAWGHASFISSPPYLTSTRSLSPMSGLFGSIWAPQSDVYENCCPINPTTEHSTHMENQAVVCKEYYPGFNPFRAYMNLDIWTTTANRNANFPLSRDSSYCGNV

SEQ ID NO: 749599 - protein, 1239 aa, Homo sapiens; identical to SEQ ID NO: 749595

SEQ ID NO: 749600 - protein, 136 aa, Homo sapiens
MNYANGFPCPADVQTDFIDHNSQSTWNTPPNMPAAWGHASFISSPPYLTSTRSLSPMSGLFGSIWAPQSDVYENCCPINPTTEHSTHMENQAVVCKEYYPGFNPFRAYMNLDIWTTTANRNANFPLSRDSSYCGNV

SEQ ID NO: 749601 - protein, 392 aa, Homo sapiens
MLLVLECVLFSVAQGYFRMDSSATQFHIETHENTSGLWSIWYRNHFDRSVVLNDVFLSKETKHMLKILNFTGPLFLPPGCWNIFSLKLAVKDIAINLFTNVFLTTNIGAIFAIPLQIYSAPTKEGSLGFEVIAHCGMHYFMGKSKAGNPNWNGSLSLDQSTWNVDSELANKLYERWKKYKNGDVCKRNVLGTTRFAHLKKSKESESFVFFLPRLIAEPGLMLNFSATALRSRMIKYFVVQNPSSWPVSLQLLPLSLYPKPEALVHLLHRWFGTDMQMINFTTGEFQLTEACPYLGTHSEESRFGILHLHLQPLEMKRVGVVFTPADYGKVTSLILIRNNLTVIDMIGVEGFGARELLKVGGRLPGAGGSLRFKVPESTLMDCRRREFICVAL

SEQ ID NO: 749602 - protein, 308 aa, Homo sapiens
MLLVLECVLFSVAQGYFRMDSSATQFHIETHENTSGLWSIWYRNHFDRSVVLNDVFLSKETKHMLKILNFTGPLFLPPGCWNIFSLKLAVKDIAINLFTNVFLTTNIGAIFAIPLQIYSAPTKEGSLGFEVIAHCGMHYFMGKSKAGNPNWNGSLSLDQSTWNVDSELANKLYERWKKYKNGDVCKRNVLGTTRFAHLKKSKESESFVFFLPRLIAEPGLMLNFSATALRSRMIKYFVVQNPSSWPVSLQLLPLSLYPKPEALVHLLHRWFGTDMQMINFTTGEFQLTEACPYLVGCYPKTEKRMPTN

SEQ ID NO: 749603 - protein, 154 aa, Homo sapiens
DICTDAMRENWISLRYASGINVNLQKNLTLPKNLLNKEENTLKNTIVFSNPSSECSMKEGIQTCMFPKETDIKTSENTAEFKERELCPLKTSKKLPENHLPRNSPQYHQPDLPEISRKNNGNLFIPFDNSLLFVPSLFLMELFSPVTVSFNCGC

SEQ ID NO: 749604 - protein, 168 aa, Homo sapiens
MNSKGQYPTQPTYPVQPPGNPVYPQTLHLPQAPPYTDAPPAYSELYRPSFVHPGAATVPTMSAAFPGASLYLPMAQSVAVGPLGSTIPMAYYPVGPIYPPGSTVLVEGGYDAGARFGAGATAGNIPPPPPGCPPNAAQLAVMQGANVLVTQRKGNFFMGGSDGGYTIW

SEQ ID NO: 749605 - protein, 168 aa, Homo sapiens; identical to SEQ ID NO: 749604

SEQ ID NO: 749606 - protein, 168 aa, Homo sapiens; identical to SEQ ID NO: 749604

SEQ ID NO: 749607 - protein, 168 aa, Homo sapiens; identical to SEQ ID NO: 749604

SEQ ID NO: 749608 - protein, 168 aa, Homo sapiens; identical to SEQ ID NO: 749604

SEQ ID NO: 749609 - protein, 168 aa, Homo sapiens; identical to SEQ ID NO: 749604

SEQ ID NO: 749610 - protein, 168 aa, Homo sapiens; identical to SEQ ID NO: 749604

SEQ ID NO: 749611 - protein, 168 aa, Homo sapiens; identical to SEQ ID NO: 749604

SEQ ID NO: 749612 - protein, 108 aa, Homo sapiens
MSAAFPGASLYLPMAQSVAVGPLGSTIPMAYYPVGPIYPPGSTVLVEGGYDAGARFGAGATAGNIPPPPPGCPPNAAQLAVMQGANVLVTQRKGNFFMGGSDGGYTIW

SEQ ID NO: 749613 - protein, 144 aa, Homo sapiens
MNSKGQYPTQPTYPVQPPGNPVYPQTLHLPQAPPYTDASTSWMPSQCCSACSHAGSQRPRNSAEGELLHGWFRWWLHHLVRNQGHLCAGKDITYLQHFSQCNCFSHINLKLQFRHMLLGCLSGAQTFRHFSNLIRNHVMVAVPP

SEQ ID NO: 749614 - protein, 181 aa, Homo sapiens
RQGGKSAEANRKRTKKITVRDAETNRTRNHHEQQRSISNTANLPCAASWESSIPSDLASSSGSTLYRCSTCLLRASTSWMPSQCCSACSHAGSQRPRNSAEGELLHGWFRWWLHHLVRNQGHLCAGKDITYLQHFSQCNCFSHINLKLQFRHMLLGCLSGAQTFRHFSNLIRNHVMVAVPP

SEQ ID NO: 749615 - protein, 168 aa, Homo sapiens; identical to SEQ ID NO: 749604

SEQ ID NO: 749616 - protein, 33 aa, Homo sapiens
MGIRTGATERPTPPNQLWIRAREPPLVTSGGTV

SEQ ID NO: 749617 - protein, 135 aa, Homo sapiens
VDLAGWHSQVQPVQALRVLQRGSCKQPQSWPWWGSVPMRLQILDCATLTLKQEYTLLAGTDCFCWTPPGRATPLPVAVLYIRKILLSDLLGYQESSMGRNAIPRPGNLGRCTRWPDLGTPRCPNPAFQRLRTEWT

SEQ ID NO: 749618 - protein, 98 aa, Homo sapiens
LGQRTVLGQRTVLGQRTGLGQRTVLGQRTVLGQRTVLGQRTVLGQRTVEDNILNGFLEQGDGIGACSVHSTHRPGIAVPPGTVHPLRGYNVFPKSRGR

SEQ ID NO: 749619 - protein, 194 aa, Homo sapiens
MGHRKDRPDGQHFRGSEPQLGQNHPPGLKPLLLPQPEQVGELCFSLRYVPSSGRLTVVVLEARGLRPGLAEPYVKVQLMLNQRKWKKRKTATKKGTAAPYFNEAFTFLVPFSQVQNVDLVLAVWDRSLPLRTEPVGKVHLGARASGQPLQHWADMLAHARRPIAQRHPLRPAREVDRMLALQPRLRLRLPLPHS

SEQ ID NO: 749620 - protein, 608 aa, Homo sapiens
MGHPPVSPSAPAPAGTTAIPGLIPDLVAGTPCELWDSQEGCGDNPAKWGLQLSTDALSLASTPGPRWALIAGALAAGVLLVSCLLCAACCCCRRHRKKPRDKESVGLGSARGTTTTHLVRSGSLLTQSREGLKSRLQSPGQRGEFSPRDGLTPTEAGRGGPSWQGKWVNRGEKEAMQQGLPHGPEGATAGFLRKAGGTPDATFWVGLAGLTERSRRFVPVGWPGLEAGGLDPCHARAAREPRALMRHDVSTTCPLSQLTQVQPDVDGLESSPGDAQQWGCLQLSLEFDFGSQEVKGPAAQDQRFCEFPERVTGEGQTPCPGWWGADRAGALGWAHPAGSQIRVGLRQAADLRPGGTVDPYARVSVSTQAGHRHETKVHRGTLCPVFDETCCFHIPQAELPGATLQVQLFNFKRFSGHEPLGELRLPLGTVDLQHVLEHWYLLGPPAATQPEQVGELCFSLRYVPSSGRLTVVVLEARGLRPGLAEPYVKVQLMLNQRKWKKRKTATKKGTAAPYFNEAFTFLVPFSQVQNVDLVLAVWDRSLPLRTEPVGKVHLGARASGQPLQHWADMLAHARRPIAQRHPLRPAREVDRMLALQPRLRLRLPLPHS

SEQ ID NO: 749621 - protein, 103 aa, Homo sapiens
MSAIQNLHSFDPFADASKGDDLLPAGTEDYIHIRIQQRNGRKTLTTVQGIADDYDKKKLVKAFKKKFACNGTVIEHPEYGEVIQLQGDQRKNIMPVPRRDWTG

SEQ ID NO: 749622 - protein, 92 aa, Homo sapiens
DSAASPLGPVASLLSVPSARLLPPPPPPPSAGRFHRGKGIVSYVRYPEPPLFRKKFACNGTVIEHPEYGEVIQLQGDQRKNIMPVPRRDWTG

SEQ ID NO: 749623 - protein, 113 aa, Homo sapiens
  misc_feature (17)..(17): Xaa can be any naturally occurring amino acid
GTIGTSGSPDSPDMCSXSQGGREARAFPEPGEAGRPGLTCSGRASKGHIRPGPSPDDFSVVFCTRKTPGDRGDGSGILSLTALNELNLFFQTPLLMQVRVMTCFLLALRIISI

SEQ ID NO: 749624 - protein, 75 aa, Homo sapiens
TTKFAAASTRNGRKTLTTVQGIADDYDKKKLVKAFKKKFACNGTVIEHPEYGEVIQLQGDQRKNIMPVPRRDWTG

SEQ ID NO: 749625 - protein, 113 aa, Homo sapiens; identical to SEQ ID NO: 749623
  misc_feature (17)..(17): Xaa can be any naturally occurring amino acid

SEQ ID NO: 749626 - protein, 103 aa, Homo sapiens; identical to SEQ ID NO: 749621

SEQ ID NO: 749627 - protein, 103 aa, Homo sapiens; identical to SEQ ID NO: 749621

SEQ ID NO: 749628 - protein, 103 aa, Homo sapiens; identical to SEQ ID NO: 749621

SEQ ID NO: 749629 - protein, 94 aa, Homo sapiens
LVLARDLELAHASADVPFPPARLLPPPPPPPSAGRFHRGKGIVSYVRYPEPPLFRKKFACNGTVIEHPEYGEVIQLQGDQRKNIMPVPRRDWTG

SEQ ID NO: 749630 - protein, 103 aa, Homo sapiens; identical to SEQ ID NO: 749621

SEQ ID NO: 749631 - protein, 103 aa, Homo sapiens; identical to SEQ ID NO: 749621

SEQ ID NO: 749632 - protein, 103 aa, Homo sapiens; identical to SEQ ID NO: 749621

SEQ ID NO: 749633 - protein, 103 aa, Homo sapiens; identical to SEQ ID NO: 749621

SEQ ID NO: 749634 - protein, 113 aa, Homo sapiens; identical to SEQ ID NO: 749623
  misc_feature (17)..(17): Xaa can be any naturally occurring amino acid

SEQ ID NO: 749635 - protein, 103 aa, Homo sapiens; identical to SEQ ID NO: 749621

SEQ ID NO: 749636 - protein, 98 aa, Homo sapiens
  misc_feature (7)..(7): Xaa can be any naturally occurring amino acid
  misc_feature (10)..(10): Xaa can be any naturally occurring amino acid
  misc_feature (18)..(18): Xaa can be any naturally occurring amino acid
  misc_feature (23)..(23): Xaa can be any naturally occurring amino acid
THKEQVXPPXALNSDPGXRIAEXVVPLPASPPPPPSAGRFHRGKGIVSYVRYPEPPLFRKKFACNGTVIEHPEYGEVIQLQGDQRKNIMPVPRRDWTG

SEQ ID NO: 749637 - protein, 103 aa, Homo sapiens; identical to SEQ ID NO: 749621

SEQ ID NO: 749638 - protein, 76 aa, Homo sapiens
AAAFGAPPSSRNRPGRVAARSCGLARGRGGLPRWGCLTRTPSWPQPGALRELMLAAVGMSSSRNGDEFPWIQPWLG

SEQ ID NO: 749639 - protein, 536 aa, Homo sapiens
KKGRGGCVGQGAPDRRMPQLSLSSLGLWPMAASPWLLLLLVGASWLLARILAWTYTFYDNCCRLRCFPQPPKRNWFLGHLGLIHSSEEGLLYTQSLACTFGDMCCWWVGPWHAIVRIFHPTYIKPVLFAPAAIVPKDKVFYSFLKPWLGDGLLLSAGEKWSRHRRMLTPAFHFNILKPYMKIFNESVNIMHAKWQLLASEGSARLDMFEHISLMTLDSLQKCVFSFDSHCQEKPSEYIAAILELSALVTKRHQQILLYIDFLYYLTPDGQRFRRACRLVHDFTDAVIQERRRTLPSQGVDDFLQAKAKSKTLDFIDVLLLSKDEDGKKLSDEDIRAEADTFMFEGHDTTASGLSWVLYHLAKHPEYQERCRQEVQELLKDREPKEIEWDDLAQLPFLTMCIKESLRLHPPVPAVSRCCTQDIVLPDGRVIPKGIICLISVFGTHHNPAVWPDPEVYDPFRFDPKNIKERSPLAFIPFSAGPRNCIGQAFAMAEMKVVLGLTLLAFRVLPDHTEPRRKPELVLRAEGGLWLRVEPLS

SEQ ID NO: 749640 - protein, 536 aa, Homo sapiens; identical to SEQ ID NO: 749639

SEQ ID NO: 749641 - protein, 536 aa, Homo sapiens; identical to SEQ ID NO: 749639

SEQ ID NO: 749642 - protein, 328 aa, Homo sapiens
KKGRGGCVGQGAPDRRMPQLSLSSLGLWPMAASPWLLLLLVGASWLLARILAWTYTFYDNCCRLRCFPQPPKRNWFLGHLGLIHSSEEGLLYTQSLACTFGDMCCWWVGPWHAIVRIFHPTYIKPVLFAPAAIVPKDKVFYSFLKPWLGDGLLLSAGEKWSRHRRMLTPAFHFNILKPYMKIFNESVNIMHAKWQLLASEGSARLDMFEHISLMTLDSLQKCVFSFDSHCQEKPSEYIAAILELSALVTKRHQQILLYIDFLYYLTPDGQRFRRACRLVHDFTDAVIQERRRTLPSQGVDDFLQAKAKSKTLDFIDVLLLSKVGLSGI

SEQ ID NO: 749643 - protein, 536 aa, Homo sapiens; identical to SEQ ID NO: 749639

SEQ ID NO: 749644 - protein, 530 aa, Homo sapiens
PHSPPHLPCRMPQLSLSSLGLWPMAASPWLLLLLVGASWLLARILAWTYTFYDNCCRLRCFPQPPKRNWFLGHLGLVTPTEQGMRVLTQLVATYPQGFKVWMGPIFPVIRFCHPNIIRSVINASAAIVPKDKVFYSFLKPWLGDGLLLSAGEKWSRHRRMLTPAFHFNILKPYMKIFNESVNIMHAKWQLLASEGSARLDMFEHISLMTLDSLQKCVFSFDSHCQEKPSEYIAAILELSALVTKRHQQILLYIDFLYYLTPDGQRFRRACRLVHDFTDAVIQERRRTLPSQGVDDFLQAKAKSKTLDFIDVLLLSKDEDGKKLSDEDIRAEADTFMFEGHDTTASGLSWVLYHLAKHPEYQERCRQEVQELLKDREPKEIEWDDLAQLPFLTMCIKESLRLHPPVPAVSRCCTQDIVLPDGRVIPKGIICLISVFGTHHNPAVWPDPEVYDPFRFDPKNIKERSPLAFIPFSAGPRNCIGQAFAMAEMKVVLGLTLLAFRVLPDHTEPRRKPELVLRAEGGLWLRVEPLS

SEQ ID NO: 749645 - protein, 330 aa, Homo sapiens
MFEHISLMTLDSLQKCVFSFDSHCQEKPSEYIAAILELSALVTKRHQQILLYIDFLYYLTPDGQRFRRACRLVHDFTDAVIQERRRTLPSQGVDDFLQAKAKSKTLDFIDVLLLSKDEDGKKLSDEDIRAEADTFMFEGHDTTASGLSWVLYHLAKHPEYQERCRQEVQELLKDREPKEIEWDDLAQLPFLTMCIKESLRLHPPVPAVSRCCTQDIVLPDGRVIPKGIICLISVFGTHHNPAVWPDPEVYDPFRFDPKNIKERSPLAFIPFSAGPRNCIGQAFAMAEMKVVLGLTLLAFRVLPDHTEPRRKPELVLRAEGGLWLRVEPLS

SEQ ID NO: 749646 - protein, 328 aa, Homo sapiens; identical to SEQ ID NO: 749642

SEQ ID NO: 749647 - protein, 355 aa, Homo sapiens
MAGCCCLSAEEKESQRISAEIERQLRRDKKDARRELKLLLLGTGESGKSTFIKQMRIIHGSGYSDEDRKGFTKLVYQNIFTAMQAMIRAMDTLRIQYVCEQNKENAQIIREVEVDKVSMLSREQVEAIKQLWQDPGIQECYDRRREYQLSDSAKYYLTDIDRIATPSFVPTQQDVLRVRVPTTGIIEYPFDLENIIFRMVDVGGQRSERRKWIHCFESVTSIIFLVALSEYDQVLAECDNENRMEESKALFKTIITYPWFLNSSVILFLNKKDLLEEKIMYSHLISYFPEYTGPKQDVRAARDFILKLYQDQNPDKEKVIYSHFTCATDTDNIRFVFAAVKDTILQLNLREFNLV

SEQ ID NO: 749648 - protein, 240 aa, Homo sapiens
MEFVCLCGAHCEWGVTSFEVGWTFPPALKGESVPRSLIYSYLTDIDRIATPSFVPTQQDVLRVRVPTTGIIEYPFDLENIIFRMVDVGGQRSERRKWIHCFESVTSIIFLVALSEYDQVLAECDNENRMEESKALFKTIITYPWFLNSSVILFLNKKDLLEEKIMYSHLISYFPEYTGPKQDVRAARDFILKLYQDQNPDKEKVIYSHFTCATDTDNIRFVFAAVKDTILQLNLREFNLV

SEQ ID NO: 749649 - protein, 38 aa, Homo sapiens
MEESKALFKTIITYPWFLNSSVILFLNKKDLLEEKIMY

SEQ ID NO: 749650 - protein, 118 aa, Homo sapiens
MSCVHYKFSSKLNYDTVTFDGLHISLCDLKKQIMGREKLKAADCDLQITNAQTKEEYTDDNALIPKNSSVIVRRIPIGGVKSTSKTYVISRTEPAMATTKAVCKNTISHFFYTLLLPL

SEQ ID NO: 749651 - protein, 71 aa, Homo sapiens
MSCVHYKFSSKLNYDTVTFDGLHISLCDLKKQIMGREKLKAADCDLQITNAQTKEGKGRLVLRYLVAGERY

SEQ ID NO: 749652 - protein, 63 aa, Homo sapiens
MSCVHYKFSSKLNYDTVTFDGLHISLCDLKKQIMGREKLKAADCDWSYQGRTCRFSVGAICLR

SEQ ID NO: 749653 - protein, 173 aa, Homo sapiens
  misc_feature (41)..(41): Xaa can be any naturally occurring amino acid
  misc_feature (50)..(50): Xaa can be any naturally occurring amino acid
IKKIRGPQTSTGPRAGGDPKKRSVPKFPGPPFRDGEPRVTXHRPVAKLVXTSHMLATPGHFGQMEVPEDDFALLQIHRQEGWATWGAMLLLDERHDPHLLITNSIKNGLGLGKLTPVVRKPGGGVRPLVDSGPRPSPLNLLPGPGSPQSTERETRREVRPRYGPLTPWGRSDS

SEQ ID NO: 749654 - protein, 118 aa, Homo sapiens; identical to SEQ ID NO: 749650

SEQ ID NO: 749655 - protein, 434 aa, Homo sapiens
MALRVTRNSKINAENKAKINMAGAKRVPTAPAATSKPGLRPRTALGDIGNKVSEQLQAKMPMKKEAKPSATGKVIDKKLPKPLEKVPMLVPVPVSEPVPEPEPEPEPEPVKEEKLSPEPILVDTASPSPMETSGCAPAEEDLCQAFSDVILAVNDVDAEDGADPNLCSEYVKDIYAYLRQLEEEQAVRPKYLLGREVTGNMRAILIDWLVQVQMKFRLLQETMYMTVSIIDRFMQNNCVPKKMLQLVGVTAMFIASKYEEMYPPEIGDFAFVTDNTYTKHQIRQMEMKILRALNFGLGRPLPLHFLRRASKIGEVDVEQHTLAKYLMELTMLDYDMVHFPPSQIAAGAFCLALKILDNGEWTPTLQHYLSYTGRNLFFQLCQHLAQNVVMVNQGLTKHLTVKNKYATSKHAKISTLPQLNSALVQDLAKAVAKV

SEQ ID NO: 749656 - protein, 411 aa, Homo sapiens
MALRVTRNSKINAENKAKINMAGAKRVPTAPAATSKPGLRPRTALGDIGNKVSEQLQAKMPMKKEAKPSATGKVIDKKLPKPLEKVPMLVPVPVSEPVPEPEPEPEPEPVKEEKLSPEPILVDTASPSPMETSGCAPAEEDLCQAFSDVILAVNDVDAEDGADPNLCSEYVKDIYAYLRQLEEEQAVRPKYLLGREVTGNMRAILIDWLVQVQMKFRLLQETMYMTVSIIDRFMQNNCVPKKMLQLVGVTAMFIASKYEEMYPPEIGDFAFVTDNTYTKHQIRQMEMKILRALNFGLGRPLPLHFLRRASKIGEVDVEQHTLAKYLMELTMLDYDMVHFPPSQIAAGAFCLALKILDNGEWTPTLQHYLSYTGRNLFFQLCQHLAQNVVHGKSRTYKAPDCQEQVCHIEAC

SEQ ID NO: 749657 - protein, 280 aa, Homo sapiens
MALRVTRNSKINAENKAKINMAGAKRVPTAPAATSKPGLRPRTALGDIGNKVSEQLQAKMPMKKEAKPSATGKVIDKKLPKPLEKVPMLVPVPVSEPVPEPEPEPEPEPVKEEKLSPEPILVDTASPSPMETSGCAPAEEDLCQAFSDVILAVNDVDAEDGADPNLCSEYVKDIYAYLRQLEEEQAVRPKYLLGREVTGNMRAILIDWLVQVQMKFRLLQETMYMTVSIIDRFMQNNVCPKICWWVLPFCGIEKSPMGCLGHFISYGRSQYWGAQAEKGG

SEQ ID NO: 749658 - protein, 480 aa, Homo sapiens
NYTAVGTRPGVEGERLLVSAGCRSLAGRASGVLLLPAELLPGEEEAMALRVTRNSKINAENKAKINMAGAKRVPTAPAATSKPGLRPRTALGDIGNKVSEQLQAKMPMKKEAKPSATGKVIDKKLPKPLEKVPMLVPVPVSEPVPEPEPEPEPEPVKEEKLSPEPILVDTASPSPMETSGCAPAEEDLCQAFSDVILAVNDVDAEDGADPNLCSEYVKDIYAYLRQLEEEQAVRPKYLLGREVTGNMRAILIDWLVQVQMKFRLLQETMYMTVSIIDRFMQNNCVPKKMLQLVGVTAMFIASKYEEMYPPEIGDFAFVTDNTYTKHQIRQMEMKILRALNFGLGRPLPLHFLRRASKIGEVDVEQHTLAKYLMELTMLDYDMVHFPPSQIAAGAFCLALKILDNGEWTPTLQHYLSYTGRNLFFQLCQHLAQNVVMVNQGLTKHLTVKNKYATSKHAKISTLPQLNSALVQDLAKAVAKV

SEQ ID NO: 749659 - protein, 256 aa, Homo sapiens
MALRVTRNSKINAENKAKINMAGAKRVPTAPAATSKPGLRPRTALGDIGNKVSEQLQAKMPMKKEAKPSATGKVIDKKLPKPLEKVPMLVPVPVSEPVPEPEPEPEPEPVKEEKLSPEPILVDTASPSPMETSGCAPAEEDLCQAFSDVILAVNDVDAEDGADPNLCSEYVKDIYAYLRQLEEEQAVRPKYLLGREVTGNMRAILIDWLVQVQMKSVCAGPVCGPIDGPAKLGAQIAGGPAVWPLKGPRGRWGTLA

SEQ ID NO: 749660 - protein, 96 aa, Homo sapiens
GFATSAASLLGQLSHCPCCSQFFSPPELGFKGCSPGSPVQFLPYSTIWSGLSEFYHEHPSPLSSFQPLVSDPSSQTGNFHIENLTKCLLTACYSRF

SEQ ID NO: 749661 - protein, 113 aa, Homo sapiens
KQTVEKLPHLIKTKQNETRKLLMPADPPLSTAKMAAECCHYIQKQDNLKLNGCHCRVNRPSLTVQVLSYRPSKRHLLHSLDAKQGASEFVSFVLFFLQIYIYIYTHTHTQLIT

SEQ ID NO: 749662 - protein, 133 aa, Homo sapiens
  misc_feature (114)..(114): Xaa can be any naturally occurring amino acid
  misc_feature (131)..(131): Xaa can be any naturally occurring amino acid
CWALFLQEALTGCWALFLQEALTHCWALFFQEALTRYWALFLQEALICCWALFLQEALICCWALFLQEALTLLGLLSGHLMAAGSLAHLVPPEGRGVLEIGGAQGCNKASFPHXWAWLMRAILLLLFGGRXHP

SEQ ID NO: 749663 - protein, 112 aa, Homo sapiens [sequence omitted]

SEQ ID NO: 749664 - protein, 150 aa, Homo sapiens
IFFMCRRCSCCGGQGMVLRLANGVMFPGGLWLPLLHHTGYHRSGEKPVVTGLTAEPEGPVLLPPCPTNSTEFIYRQLVSRAENLPQATSLPAEKASRAFRFPASPHATVSVLVSVLLGCPLPWIRSRKLRLQSKVLQSLSGNFLLPLVFL

SEQ ID NO: 749665 - protein, 37 aa, Homo sapiens
MSHVEAVPFVSCEKSSTSATLSLPSASASVAAPAFVG

SEQ ID NO: 749666 - protein, 104 aa, Homo sapiens
MRAHLHLPAWKQPWQMGCVPLPPFGATVGFILTAANPRAGLHSCLNEAGACRTNCMECHVGFSTLAHSELAMPGHVCSVVFELDLGGQNFKRKMKAPAREVFLS

SEQ ID NO: 749667 - protein, 167 aa, Homo sapiens
TQTPNRNLFSPSTEVFWQDGQGVPLTGNVTTSQMANEQGLFDVHSILRVVLGANGTYSCLVRNPVLQQDAHSSVTITPQRSPTGSLLKCPLGGGGFCFCRQGLGAPNLAPPSISQNSKLPPNDREKDNGEVGMFTGGVGGGEITGLLKALLTSRLWKPLGRMEPHLG

SEQ ID NO: 749668 - protein, 393 aa, Homo sapiens
GLRTHRSRLSGPQADSPARPARPSDSPGRPRPPFGPGLAAAATEPGCGRGPESQSRRGAAGAAFHHGEPSCQPPHRKMLRRRGSPGMGVHVGAALGALWFCLTGALEVQVPEDPVVALVGTDATLCCSFSPEPGFSLAQLNLIWQLTDTKQLVHSFAEGQDQGSAYANRTALFPDLLAQGNASLRLQRVRVADEGSFTCFVSIRDFGSAAVSLQVAAPYSKPSMTLEPNKDLRPGDTVTITCSSYRGYPEAEVFWQDGQGVPLTGNVTTSQMANEQGLFDVHSVLRVVLGANGTYSCLVRNPVLQQDAHGSVTITGQPMTFPPEALWVTVGLSVCLIALLVALAFVCWRKIKQSCEEENAGAEDQDGEGEGSKTALQPLKHSDSKEDDGQEIA

SEQ ID NO: 749669 - protein, 611 aa, Homo sapiens
GLRTHRSRLSGPQADSPARPARPSDSPGRPRPPFGPGLAAAATEPGCGRGPESQSRRGAAGAAFHHGEPSCQPPHRKMLRRRGSPGMGVHVGAALGALWFCLTGALEVQVPEDPVVALVGTDATLCCSFSPEPGFSLAQLNLIWQLTDTKQLVHSFAEGQDQGSAYANRTALFPDLLAQGNASLRLQRVRVADEGSFTCFVSIRDFGSAAVSLQVAAPYSKPSMTLEPNKDLRPGDMVTITCSSYQGYPEAEVFWQDGQGVPLTGNVTTSQMANEQGLFDVHSILRVVLGANGTYSCLVRNPVLQQDAHSSVTITPQRSPTGAVEVQVPEDPVVALVGTDATLRCSFSPEPGFSLAQLNLIWQLTDTKQLVHSFTEGRDQGSAYANRTALFPDLLAQGNASLRLQRVRVADEGSFTCFVSIRDFGSAAVSLQVAAPYSKPSMTLEPNKDLRPGDTVTITCSSYRGYPEAEVFWQDGQGVPLTGNVTTSQMANEQGLFDVHSVLRVVLGANGTYSCLVRNPVLQQDAHGSVTITGQPMTFPPEALWVTVGLSVCLIALLVALAFVCWRKIKQSCEEENAGAEDQDGEGEGSKTALQPLKHSDSKEDDGQEIA

SEQ ID NO: 749670 - protein, 153 aa, Homo sapiens
MASCFHDVNPSTVFWQDGQGVPLTGNVTTSQMANEQGLFDVHSVLRVVLGANGTYSCLVRNPVLQQDAHGSVTITGQPMTFPPEALWVTVGLSVCLIALLVALAFVCWRKIKQSCEEENAGAEDQDGEGEGSKTALQPLKHSDSKEDDGQEIA

SEQ ID NO: 749671 - protein, 383 aa, Homo sapiens
LVAGARDGHRVPWPQVPVGLQGQEVFWQDGQGVPLTGNVTTSQMANEQGLFDVHSILRVVLGANGTYSCLVRNPVLQQDAHSSVTITPQRSPTGAVEVQVPEDPVVALVGTDATLRCSFSPEPGFSLAQLNLIWQLTDTKQLVHSFTEGRDQGSAYANRTALFPDLLAQGNASLRLQRVRVADEGSFTCFVSIRDFGSAAVSLQVAAPYSKPSMTLEPNKDLRPGDTVTITCSSYRGYPEAEVFWQDGQGVPLTGNVTTSQMANEQGLFDVHSVLRVVLGANGTYSCLVRNPVLQQDAHGSVTITGQPMTFPPEALWVTVGLSVCLIALLVALAFVCWRKIKQSCEEENAGAEDQDGEGEGSKTALQPLKHSDSKEDDGQEIA

SEQ ID NO: 749672 - protein, 287 aa, Homo sapiens
GLRTHRSRLSGPQADSPARPARPSDSPGRPRPPFGPGLAAAATEPGCGRGPESQSRRGAAGAAFHHGEPSCQPPHRKMLRRRGSPGMGVHVGAALGALWFCLTGALEVQVPEDPVVALVGTDATLCCSFSPEPGFSLAQLNLIWQLTDTKQLVHSFAEGQDQGSAYANRTALFPDLLAQGNASLRLQRVRVADEGSFTCFVSIRDFGSAAVSLQVAAPYSKPSMTLEPNKDLRPGDMVTITCSSYQGYPEAEVFWQDGQGVPLTGNVTTSQMANEQGLFDVHSIGSL

SEQ ID NO: 749673 - protein, 101 aa, Homo sapiens
GANGAVLRDMGPGMTVSLLLLFLRQPMTFPPEALWVTVGLSVCLIALLVALAFVCWRKIKQSCEEENAGAEDQDGEGEGSKTALQPLKHSDSKEDDGQEIA

SEQ ID NO: 749674 - protein, 393 aa, Homo sapiens; identical to SEQ ID NO: 749668

SEQ ID NO: 749675 - protein, 393 aa, Homo sapiens; identical to SEQ ID NO: 749668

SEQ ID NO: 749676 - protein, 393 aa, Homo sapiens; identical to SEQ ID NO: 749668

SEQ ID NO: 749677 - protein, 393 aa, Homo sapiens; identical to SEQ ID NO: 749668

SEQ ID NO: 749678 - protein, 393 aa, Homo sapiens; identical to SEQ ID NO: 749668

SEQ ID NO: 749679 - protein, 393 aa, Homo sapiens; identical to SEQ ID NO: 749668

SEQ ID NO: 749680 - protein, 393 aa, Homo sapiens; identical to SEQ ID NO: 749668

SEQ ID NO: 749681 - protein, 393 aa, Homo sapiens; identical to SEQ ID NO: 749668

SEQ ID NO: 749682 - protein, 393 aa, Homo sapiens; identical to SEQ ID NO: 749668

SEQ ID NO: 749683 - protein, 112 aa, Homo sapiens
MLDNHRGSAQMGELFSSPQGHTEPQEWVRERAGEGPKPFFPSLHSASDAEWGLKDESLGWPSTWRQEAQGKEEGPCRVTLRETSVEGTLGRLPAGRGSWARPWRVDGMDKQE

SEQ ID NO: 749684 - protein, 125 aa, Homo sapiens [sequence omitted]

SEQ ID NO: 749685 - protein, 393 aa, Homo sapiens; identical to SEQ ID NO: 749668

SEQ ID NO: 749686 - protein, 393 aa, Homo sapiens; identical to SEQ ID NO: 749668

SEQ ID NO: 749687 - protein, 638 aa, Homo sapiens
GLRTHRSRLSGPQADSPARPARPSDSPGRPRPPFGPGLAAAATEPGCGRGPESQSRRGAAGAAFHHGEPSCQPPHRKMLRRRGSPGMGVHVGAALGALWFCLTGALEVQVPEDPVVALVGTDATLCCSFSPEPGFSLAQLNLIWQLTDTKQLVHSFAEGQDQGSAYANRTALFPDLLAQGNASLRLQRVRVADEGSFTCFVSIRDFGSAAVSLQVAAPYSKPSMTLEPNKDLRPGDMVTITCSSYQGYPEAEVFWQDGQGVPLTGNVTTSQMANEQGLFDVHSILRVVLGANGTYSCLVRNPVLQQDAHSSVTITPQRSPTGAVEVQVPEDPVVALVGTDATLRCSFSPEPGFSLAQLNLIWQLTDTKQLVHSFTEGRDQGSAYANRTALFPDLLAQGNASLRLQRVRVADEGSFTCFVSIRDFGSAAVSLQVAAPYSKPSMTLEPNKDLRPGDTVTITCSSYRGYPEAEVFWQDGQGVPLTGNVTTSQMANEQGLFDVHSVLRVVLGANGTYSCLVRNPVLQQDAHGSVTITGQPMTFPPEALWVTVGLSVCLIALLVALAFVCWRKIKQSCEEENAGECVCMCVRAHAHLCVLGYVAVFDVNRVSLSSDRTSVCVQMGLDLSVCDLESTSCVCEQA

SEQ ID NO: 749688 - protein, 317 aa, Homo sapiens
MKRLSLVTTNRLSPHGNFFTLCTFPLAVDMAALFQEASSCPVCSDYLEKPMSLECGCAVCLKCINSLQKEPHGEDLLCCCSSMVSRKNKIRRNRQLERLASHIKELEPKLKKILQMNPRMRKFQVDMTLDANTANNFLLISDDLRSVRSGRIRQNRQDLAERFDVSVCILGSPRFTCGRHCWEVDVGTSTEWDLGVCRESVHRKGRIQLTTELGFWTVSLRDGGRLSASTVPLTFLFVDRKLQRVGIFLDMGMQNVSFFDAEGGSHVYTFRSVSAEEPLCPFLAPSVPPNGDQGVLSICPLMNSGTTDAPVRPGEAK

SEQ ID NO: 749689 - protein, 288 aa, Homo sapiens
MAALFQEASSCPVCSDYLEKPMSLECGCAVCLKCINSLQKEPHGEDLLCCCSSMVSRKNKIRRNRQLERLASHIKELEPKLKKILQMNPRMRKFQVDMTLDANTANNFLLISDDLRSVRSGRIRQNRQDLAERFDVSVCILGSPRFTCGRHCWEVDVGTSTEWDLGVCRESVHRKGRIQLTTELGFWTVSLRDGGRLSASTVPLTFLFVDRKLQRVGIFLDMGMQNVSFFDAEGGSHVYTFRSVSAEEPLCPFLAPSVPPNGDQGVLSICPLMNSGTTDAPVRPGEAK

SEQ ID NO: 749690 - protein, 288 aa, Homo sapiens; identical to SEQ ID NO: 749689

SEQ ID NO: 749691 - protein, 264 aa, Homo sapiens
MDTPSPDPLPSPLPGEEEKPLALSPPVPRGRRGRRPGGATSSNRTLKASLPRKRGRPPKSGQEPPLVQVQGVTAPVGSSGGSDLLLIDDQGVPYTVSEGSAAGPEGSGPRKAPHFCPVCLRAFPYLSDLERHSISHSELKPHQCKVCGKTFKRSSHLRRHCNIHAGLRPFRCPLCPRRFREAGELAHHHRVHSGERPYQCPICRLRFTEANTLRRHAKRKHPEAMGVPLCAPDPGSEPPWDEEGIPATAGAEEEEETEGKGEPA

SEQ ID NO: 749692 - protein, 264 aa, Homo sapiens; identical to SEQ ID NO: 749691

SEQ ID NO: 749693 - protein, 312 aa, Homo sapiens
TKLEPESYLDDMVTCSQIVYNYNPEKTKKDSGWRTAICPDYCPNMYEEMETLASVLQSDIGQDMRVHNSTFLWFIPFVQSLMDLKDLGVAYIAQVVNHLYSEVKEVLNQTDAVCDKVTEFFLLILVSVIELHRNKKCLHLLWVSSQQWVEAVVKCAKLPTTAFTRSSEKSSGNCSKGTAMISSLSLHSMPSNSVQLAYVQLIRSLLKEGYQLGQQSLCKRFWDKLNLFLRGNLSLGWQLTSQETHELQSCLKQIIRNIKFKAPPCNTFVDLTSACKISPASYNKEESEQMGKTSRKDMHCLEASSPTFSKEP

SEQ ID NO: 749694 - protein, 74 aa, Homo sapiens
HPGSYTVDAGAQACAPFSRVTQQDGITARTGSDGSRGPGSETHSETKCHLIPPLANSSFLRGPPPSIRSGSVLS

SEQ ID NO: 749695 - protein, 42 aa, Homo sapiens
IFHESSSLKSPPQVHHDMASCLQFVLTILILEALKMIPWNIG

SEQ ID NO: 749696 - protein, 112 aa, Homo sapiens
LPPRMPFPSFSHIAIFDISLKTELSHQPGRPGLIWKTVQHVFLCCHSAGFLSIFSRSFQTASLWRAVTRSHSAPYPHYQHGMHWGCPYIYRTETFRVWPILLFLSMYYHKVM

SEQ ID NO: 749697 - protein, 111 aa, Homo sapiens [sequence omitted]

SEQ ID NO: 749698 - protein, 196 aa, Homo sapiens [sequence omitted]

SEQ ID NO: 749699 - protein, 196 aa, Homo sapiens [sequence omitted]

SEQ ID NO: 749700 - protein, 152 aa, Homo sapiens [sequence omitted]

SEQ ID NO: 749701 - protein, 956 aa, Homo sapiens
MAPVQKTGKNLPGSLANLSSSPRSTTISWVTLPARFPRLETEDGNPHPRRAGGKTQSDVGKCQAHMVKYPTNLAPLRTYRGRVLHLITGKRSFPGRLTAHPLRPGCSLPGPASRSSAAGRTSAAPRDARCEDTLGLCPPTSTALLSAVANQHEACRLPFLDWLRLYLRPPHLATVSGGEAAASGLGRSCSGTVTARAAPRVSRRGRVGGKDNRAGTRGVRVTAASREQTSVGTVRRNGAAGQELFWAGEGRLVAEGPPSYLPQGLEVKTPVGVYVVVVLLLFVFAFLVCGTDFAETATDLKVSSYCSWGGGCLRRCGSLYPGLLGPPSFSSAAFIPRGVYPQALLLFPILVTFEEAMETPTPLPPVPASPTCNPAPRTIQIEFPQHSSSLLESLNRHRLEGKFCDVSLLVQGRELRAHKAVLAAASPYFHDKLLLGDAPRLTLPSVIEADAFEGLLQLIYSGRLRLPLDALPAHLLVASGLQMWQVVDQCSEILRELETSGGGISARGGNSYHALLSTTSSTGGWCIRSSPFQTPVQSSASTESPASTESPVGGEGSELGEVLQIQVEEEEEEEEDDDDEDQGSATLSQTPQPQRVSGVFPRPHGPHPLPMTATPRKLPEGESAPLELPAPPALPPKIFYIKQEPFEPKEEISGSGTQPGGAKEETKVFSGGDTEGNGELGFLLPSGPGPTSGGGGPSWKPVDLHGNEILSGGGGPGGAGQAVHGPVKLGGTPPADGKRFGCLCGKRFAVKPKRDRHIMLTFSLRPFGCGICNKRFKLKHHLTEHMKTHAGALHACPHCGRRFRVHACFLRHRDLCKGQGWATAHWTYKWLLRLYTSFYNKITTAADGYFSLTAMAHQSWILESCQENRYIMDLLFLDMGLSAWQMWKLKFLVPLQVLASQPCRKVVYRPFILKLITCPWWTFLWWRCPLRKPDFQLFSERRVRAKDSGKCFIPSP

SEQ ID NO: 749702 - protein, 872 aa, Homo sapiens
MAPVQKTGKNLPGSLANLSSSPRSTTISWVTLPARFPRLETEDGNPHPRRAGGKTQSDVGKCQAHMVKYPTNLAPLRTYRGRVLHLITGKRSFPGRLTAHPLRPGCSLPGPASRSSAAGRTSAAPRDARCEDTLGLCPPTSTALLVCSSQINTRLVGCRSSIGYGSSSARRTWRRCPAEEAAASGLGRSCSGTVTARAAPRVSRRGRVGGKDNRAGTRGVRVTAASREQTSVGTVRRNGAAGQELFWAAFIPRGVYPQALLLFPILVTFEEAMETPTPLPPVPASPTCNPAPRTIQIEFPQHSSSLLESLNRHRLEGKFCDVSLLVQGRELRAHKAVLAAASPYFHDKLLLGDAPRLTLPSVIEADAFEGLLQLIYSGRLRLPLDALPAHLLVASGLQMWQVVDQCSEILRELETSGGGISARGGNSYHALLSTTSSTGGWCIRSSPFQTPVQSSASTESPASTESPVGGEGSELGEVLQIQVEEEEEEEEDDDDEDQGSATLSQTPQPQRVSGVFPRPHGPHPLPMTATPRKLPEGESAPLELPAPPALPPKIFYIKQEPFEPKEEISGSGTQPGGAKEETKVFSGGDTEGNGELGFLLPSGPGPTSGGGGPSWKPVDLHGNEILSGGGGPGGAGQAVHGPVKLGGTPPADGKRFGCLCGKRFAVKPKRDRHIMLTFSLRPFGCGICNKRFKLKHHLTEHMKTHAGALHACPHCGRRFRVHACFLRHRDLCKGQGWATAHWTYKWLLRLYTSFYNKITTAADGYFSLTAMAHQSWILESCQENRYIMDLLFLDMGLSAWQMWKLKFLVPLQVLASQPCRKVVYRPFILKLITCPWWTFLWWRCPLRKPDFQLFSERRVRAKDSGKCFIPSP

SEQ ID NO: 749703 - protein, 872 aa, Homo sapiens; identical to SEQ ID NO: 749702

SEQ ID NO: 749704 - protein, 196 aa, Homo sapiens [sequence omitted]

SEQ ID NO: 749705 - protein, 198 aa, Homo sapiens
MPASERTVAWVSNMPHLSADIESAHIEREEYKLKEYSKSMDESRLDRVKEYEEEIHSLKERLHMSNRKLEEYERRLLSQEEQTSKILMQYQARLEQSEKRLRQQQAEKDSQIKSIIGRLMLVEEELRRDHPAMAEPLPEPKKRLLDAQVEITMSFIFSVSHPHPSHCLSCTHYTSHLAPSPSVSHSLLFVHWLLLAAP

SEQ ID NO: 749706 - protein, 561 aa, Homo sapiens
PGAPLALSPLLPARPAPRSAVSSPPAPPPAPGTARPQPEPGPPPSSGPGQQAGRGQVRAPTMRGELWLLVLVLREAARALSPQPGAGHDEGPGSGWAAKGTVRGWNRRARESPGHVSEPDRTQLSQDLGGGTLAMDTLPDNRTRVVEDNHSYYVSRLYGPSEPHSRELWVDVAEANRSQVKIHTILSNTHRQASRVVLSFDFPFYGHPLRQITIATGGFIFMGDVIHRMLTATQYVAPLMANFNPGYSDNSTVVYFDNGTVFVVQWDHVYLQGWEDKGSFTFQAALHHDGRIVFAYKEIPMSVPEISSSQHPVKTGLSDAFMILNPSPDVPESRRRSIFEYHRIELDPSKVTSMSAVEFTPLPTCLQHRSCDACMSSDLTFNCSWCHVLQRCSSGFDRYRQEWMDYGCAQEAEGRMCEDFQDEDHDSASPDTSFSPYDGDLTTTSSSLFIDSLTTEDDTKLNPYAGGDGLQNNLSPKTKGTPVHLGTIVGIVLAVLLVAAIILAGIYINGHPTSNAALFFIERRPHHWPAMKFRSHPDHSTYAEVEPSGHEKEGFMEAEQC

SEQ ID NO: 749707 - protein, 561 aa, Homo sapiens; identical to SEQ ID NO: 749706

SEQ ID NO: 749708 - protein, 427 aa, Homo sapiens
MDTLPDNRTRVVEDNHSYYVSRLYGPSEPHSRELWVDVAEANRSQVKIHTILSNTHRQASRVVLSFDFPFYGHPLRQITIATGGFIFMGDVIHRMLTATQYVAPLMANFNPGYSDNSTVVYFDNGTVFVVQWDHVYLQGWEDKGSFTFQAALHHDGRIVFAYKEIPMSVPEISSSQHPVKTGLSDAFMILNPSPDVPESRRRSIFEYHRIELDPSKVTSMSAVEFTPLPTCLQHRSCDACMSSDLTFNCSWCHVLQRCSSGFDRYRQEWMDYGCAQEAEGRMCEDFQDEDHDSASPDTSFSPYDGDLTTTSSSLFIDSLTTEDDTKLNPYAGGDGLQNNLSPKTKGTPVHLGTIVGIVLAVLLVAAIILAGIYINGHPTSNAALFFIERRPHHWPAMKFRSHPDHSTYAEVEPSGHEKEGFMEAEQC

SEQ ID NO: 749709 - protein, 427 aa, Homo sapiens; identical to SEQ ID NO: 749708

SEQ ID NO: 749710 - protein, 146 aa, Homo sapiens
MDYGCAQEAEGRMCEDFQDEDHDSASPDTSFSPYDGDLTTTSSSLFIDSLTTEGLQNNLSPKTKGTPVHLGTIVGIVLAVLLVAAIILAGIYINGHPTSNAALFFIERRPHHWPAMKFRSHPDHSTYAEVEPSGHEKEGFMEAEQC

SEQ ID NO: 749711 - protein, 367 aa, Homo sapiens
  misc_feature (365)..(365): Xaa can be any naturally occurring amino acid
PGAPLALSPLLPARPAPRSAVSSPPAPPPAPGTARPQPEPGPPPSSGPGQQAGRGQVRAPTMRGELWLLVLVLREAARALSPQPGAGHDEGPGSGWAAKGTVRGWNRRARESPGHVSEPDRTQLSQDLGGGTLAMDTLPDNRTRVVEDNHSYYVSRLYGPSEPHSRELWVDVAEANRSQVKIHTILSNTHRQASRVVLSFDFPFYGHPLRQITIATGGFIFMGDVIHRMLTATQYVAPLMANFNPGYSDNSTVVYFDNGTVFVVQWDHVYLQGWEDKGSFTFQAALHHDGRIVFAYKEIPMSVPEISSSQHPVKTGLSDAFMILNPSPDVPAFQQSLQSIFGEKKSHVQLAASGLQRHSKHTGQXDP

SEQ ID NO: 749712 - protein, 142 aa, Homo sapiens
MWNVGVLRPAESESDSQEDNHSYYVSRLYGPSEPHSRELWVDVAEANRSQVKIHTILSNTHRQASRVVLSFDFPFYGHPLRQITIATGGFIFMGDVIHRMLTATQYVAPLMANFNPGYSDNSTVVYFDNGTVLVGQWDTYIS

SEQ ID NO: 749713 - protein, 107 aa, Homo sapiens
KNMNALLIMIPTPTQPLPVLDEVDPKALSAFISETLLEPKTPWFDLPCSPAAPVCPNDLSTGLQNNLSPKTKGTPVHLGTIVGIVLAVLLVAAIILAGIYINGHPTS

SEQ ID NO: 749714 - protein, 146 aa, Homo sapiens
PGAPLALSPLLPARPAPRSAVSSPPAPPPAPGTARPQPEPGPPPSSGPGQQAGRGQVRAPTMRGELWLLVLVLREAARALSPQPGAGRTGGSRPGWAGGGEGRAVRCGHGQVWTAWRCPRGGHCPQEARRAVGCGQVDRDPTFPNT

SEQ ID NO: 749715 - protein, 432 aa, Homo sapiens
MWNVGVLRPAESESDSQEDNHSYYVSRLYGPSEPHSRELWVDVAEANRSQVKIHTILSNTHRQASRVVLSFDFPFYGHPLRQITIATGGFIFMGDVIHRMLTATQYVAPLMANFNPGYSDNSTVVYFDNGTVFVVQWDHVYLQGWEDKGSFTFQAALHHDGRIVFAYKEIPMSVPEISSSQHPVKTGLSDAFMILNPSPDVPESRRRSIFEYHRIELDPSKVTSMSAVEFTPLPTCLQHRSCDACMSSDLTFNCSWCHVLQRCSSGFDRYRQEWMDYGCAQEAEGRMCEDFQDEDHDSASPDTSFSPYDGDLTTTSSSLFIDSLTTEDDTKLNPYAGGDGLQNNLSPKTKGTPVHLGTIVGIVLAVLLVAAIILAGIYINGHPTSNAALFFIERRPHHWPAMKFRSHPDHSTYAEVEPSGHEKEGFMEAEQC

SEQ ID NO: 749716 - protein, 419 aa, Homo sapiens
PGAPLALSPLLPARPAPRSAVSSPPAPPPAPGTARPQPEPGPPPSSGPGQQAGRGQVRAPTMRGELWLLVLVLREAARALSPQPGAGHDEGPGSGWAAKGTVRGWNRRARESPGHVSEPDRTQLSQDLGGGTLAMDTLPDNRTRVVEDNHSYYVSRLYGPSEPHSRELWVDVAEANRSQVKIHTILSNTHRQASRVVLSFDFPFYGHPLRQITIATGGFIFMGDVIHRMLTATQYVAPLMANFNPGYSDNSTVVYFDNGTVFVVQWDHVYLQGWEDKGSFTFQAALHHDGRIVFAYKEIPMSVPEISSSQHPVKTGLSDAFMILNPSPDVPESRRRSIFEYHRIELDPSKVTSMSAVEFTPLPTCLQHRSCDACMSSDLTFNCSWCHVLQRSLNNQDENTYVNCLDSQQCHGSSESRRP

SEQ ID NO: 749717 - protein, 143 aa, Homo sapiens
MVPDWSPFIKINCPAQLSAGPPQSQSLVLGPKAGPRGCRKQSVASKWGLSYPLQCVGAERSLGDFSAGPPYSRDPSVFKTKQEGKEEWRNSSVLTLFPLVSAVLGPLCTSYHFPLESAPQGRVRDEDSGCKEVSQLGNGSGQL

SEQ ID NO: 749718 - protein, 88 aa, Homo sapiens
RAETACAHGPVLPTQRHSQLKEAQGRGQKVSEGVRDGEPRHVVYRLPLEEGLPEVPRLRDPQAEGLRALSRSCPGLPLQVLERAFPTE

SEQ ID NO: 749719 - protein, 42 aa, Homo sapiens
MAKRNDRDYATACIQNQSQVSSPTITIDTSSGKCSSTTNQIQ

SEQ ID NO: 749720 - protein, 79 aa, Homo sapiens
MGPSPKAWIFVMVLPMSLNFCLKTSCLMHHAALWLFKRDEHVNRHCLNKIPSTGWLKQPEFISHNSGDWKSKIKVLVGS

SEQ ID NO: 749721 - protein, 478 aa, Homo sapiens
MLLWVQQALLALLLPTLLAQGEARRSRNTTRPALLRLSDYLLTNYRKGVRPVRDWRKPTTVSIDVIVYAILNVDEKNQVLTTYIWYRQYWTDEFLQWNPEDFDNITKLSIPTDSIWVPDILINEFVDVGKSPNIPYVYIRHQGEVQNYKPLQVVTACSLDIYNFPFDVQNCSLTFTSWLHTIQDINISLWRLPEKVKSDRSVFMNQGEWELLGVLPYFREFSMESSNYYAEMKFYVVIRRRPLFYVVSLLLPSIFLMVMDIVGFYLPPNSGERVSFKITLLLGYSVFLIIVSDTLPATAIGTPLIGVYFVVCMALLVISLAETIFIVRLVHKQDLQQPVPAWLRHLVLERIAWLLCLREQSTSQRPPATSQATKTDDCSAMGNHCSHMGGPQDFEKSPRDRCSPPPPPREASLAVCGLLQELSSIRQFLEKRDEIREVARDWLRVGSVLDKLLFHIYLLAVLAYSITLVMLWSIWQYA

SEQ ID NO: 749722 - protein, 510 aa, Homo sapiens
MLLWVQQALLALLLPTLLAQGEARRSRNTTRPALLRLSDYLLTNYRKGVRPVRDWRKPTTVSIDVIVYAILNVDEKNQVLTTYIWYRQYWTDEFLQWNPEDFDNITKLSIPTDSIWVPDILINEFVDVGKSPNIPYVYIRHQGEVQNYKPLQVVTACSLDIYNFPFDVQNCSLTFTSWLHTIQDINISLWRLPEKVKSDRSVFMNQGEWELLGVLPYFREFSMESSNYYAEMKFYVVIRRRPLFYVVSLLLPSIFLMVMDIVGFYLPPNSGERVSFKITLLLGYSVFLIIVSDTLPATAIGTPLIGKAPPGSRAQSGEKPAPSHLLHVSLASALGCTGVYFVVCMALLVISLAETIFIVRLVHKQDLQQPVPAWLRHLVLERIAWLLCLREQSTSQRPPATSQATKTDDCSAMGNHCSHMGGPQDFEKSPRDRCSPPPPPREASLAVCGLLQELSSIRQFLEKRDEIREVARDWLRVGSVLDKLLFHIYLLAVLAYSITLVMLWSIWQYA

SEQ ID NO: 749723 - protein, 220 aa, Homo sapiens
MDIVGFYLPPNSGERVSFKITLLLGYSVFLIIVSDTLPATAIGTPLIGVYFVVCMALLVISLAETIFIVRLVHKQDLQQPVPAWLRHLVLERIAWLLCLREQSTSQRPPATSQATKTDDCSAMGNHCSHMGGPQDFEKSPRDRCSPPPPPREASLAVCGLLQELSSIRQFLEKRDEIREVARDWLRVGSVLDKLLFHIYLLAVLAYSITLVMLWSIWQYA

SEQ ID NO: 749724 - protein, 369 aa, Homo sapiens
MLLWVQQALLALLLPTLLAQGEARRSRNTTRPALLRLSDYLLTNYRKGVRPVRDWRKPTTVSIDVIVYAILNVDEKNQVLTTYIWYRQYWTDEFLQWNPEDFDNITKLSIPTDSIWVPDILINEFVDVGKSPNIPYVYIRHQGEVQNYKPLQVVTACSLDIYNFPFDVQNCSLTFTSWLHTIQDINISLWRLPEKVKSDRSVFMNQGEWELLGVLPYFREFSMESSNYYAEMKFYVVIRRRPLFYVVSLLLPSIFLMVMDIVGFYLPPNSGERVSFKITLLLGYSVFLIIVSDTLPATAIGTPLIGVYFVVCMALLVISLAETIFIVRCCRSCPPSGNSWKSGMRSERWPETGCAWAPCWTSCYSTFTC

SEQ ID NO: 749725 - protein, 426 aa, Homo sapiens
MPTCCLGTEGEVCLSCRRPSLEMEGAACDHPCSSPEYWTDEFLQWNPEDFDNITKLSIPTDSIWVPDILINEFVDVGKSPNIPYVYIRHQGEVQNYKPLQVVTACSLDIYNFPFDVQNCSLTFTSWLHTIQDINISLWRLPEKVKSDRSVFMNQGEWELLGVLPYFREFSMESSNYYAEMKFYVVIRRRPLFYVVSLLLPSIFLMVMDIVGFYLPPNSGERVSFKITLLLGYSVFLIIVSDTLPATAIGTPLIGVYFVVCMALLVISLAETIFIVRLVHKQDLQQPVPAWLRHLVLERIAWLLCLREQSTSQRPPATSQATKTDDCSAMGNHCSHMGGPQDFEKSPRDRCSPPPPPREASLAVCGLLQELSSIRQFLEKRDEIREVARDWLRVGSVLDKLLFHIYLLAVLAYSITLVMLWSIWQYA

SEQ ID NO: 749726 - protein, 463 aa, Homo sapiens
MHRSFLQARRSRNTTRPALLRLSDYLLTNYRKGVRPVRDWRKPTTVSIDVIVYAILNVDEKNQVLTTYIWYRQYWTDEFLQWNPEDFDNITKLSIPTDSIWVPDILINEFVDVGKSPNIPYVYIRHQGEVQNYKPLQVVTACSLDIYNFPFDVQNCSLTFTSWLHTIQDINISLWRLPEKVKSDRSVFMNQGEWELLGVLPYFREFSMESSNYYAEMKFYVVIRRRPLFYVVSLLLPSIFLMVMDIVGFYLPPNSGERVSFKITLLLGYSVFLIIVSDTLPATAIGTPLIGVYFVVCMALLVISLAETIFIVRLVHKQDLQQPVPAWLRHLVLERIAWLLCLREQSTSQRPPATSQATKTDDCSAMGNHCSHMGGPQDFEKSPRDRCSPPPPPREASLAVCGLLQELSSIRQFLEKRDEIREVARDWLRVGSVLDKLLFHIYLLAVLAYSITLVMLWSIWQYA

SEQ ID NO: 749727 - protein, 440 aa, Homo sapiens
MLLWVQQALLALLLPTLLAQGEARRSRNTTRPALLRLSDYLLTNYRKGVRPVRDWRKPTTVSIDVIVYAILNVDEKNQVLTTYIWYRQYWTDEFLQWNPEDFDNITKLSIPTDSIWVPDILINEFVDVGKSPNIPYVYIRHQGEVQNYKPLQVVTACSLDIYNFPFDVQNCSLTFTSWLHTIQDINISLWRLPEKVKSDRSVFMNQGEWELLGVLPYFREFSMESSNYYAEMKFYVVIRRRPLFYVVSLLLPSIFLMVMDIVGFYLPPNSGERVSFKITLLLGYSVFLIIVSDTLPATAIGTPLIGKAPPGSRAQSGEKPAPSHLLHVSLASALGCTGVYFVVCMALLVISLAETIFIVRLVHKQDLQQPVPAWLRHLVLERIAWLLCLREQSTSQRPPATSQATKTDDCSVHSSCGLFPIDPHLNKGLWNSASLSQLCF

SEQ ID NO: 749728 - protein, 446 aa, Homo sapiens [sequence omitted]

SEQ ID NO: 749729 - protein, 231 aa, Homo sapiens
MALPSYMFMRQGFDTQVLYLSARGFLNYHRFKHMLSKVGMWDFDIFLFDRLTNGNSLVTLLCHLFNTHGLIHHFKLDMVTLHRFLVMVQEDYHSQNPYHNAVHAADVTQAMHCYLKEPKLASFLTPLDIMLGLLAAAAHDVDHPGVNQPFLIKTNHHLANLYQVREPNLEPATVWSIALGPVLKPESCPWRKPCFRVLEVQRRMKHNLCPQKFVQTQMLKMSKIQANLIPV

SEQ ID NO: 749730 - protein, 446 aa, Homo sapiens [sequence omitted]

SEQ ID NO: 749731 - protein, 187 aa, Homo sapiens
MALPSYMFMRQGFDTQVLYLSARGFLNYHRFKHMLSKVGMWDFDIFLFDRLTNGNSLVTLLCHLFNTHGLIHHFKLDMVTLHRFLVMVQEDYHSQNPYHNAVHAADVTQAMHCYLKEPKLASFLTPLDIMLGLLAAAAHDVDHPGVNQPFLIKTNHHLANLYQNMSVLENHHWRSTIGMLRESRRIA

SEQ ID NO: 749732 - protein, 407 aa, Homo sapiens
VHVRLRQRIILYELKVELEETVVRRQAAVRTLGQQARVWLVRVLLNLLVVALLGAAFYGVYWATGCTVELQEMPLVQELPLLKLLGVNYLPSIFIAGVNFVLPPVFKLIAPLEGYTRSRQIVFILLRTVFLRLASLVVLLFSLWNQITCGGDSEAEDCKTCGYNYKQLPCWETVLGQEMYKLLLFDLLTVLAVALLIQFPRKLLCGLCPGALGRLAGTQEFQVPDEVLGLIYAQTVVWVGSFFCPLLPLLNTVKFLLLFYLKKLTLFSTCSPAARTFRASAANFFFPLVLLLGLAISSVPLLYSIFLIPPSKLCGPFRGQSSIWAQIPESISSLPETTQNFLFFLGTQAFAVPLLLISSILMAYTVALANSYGRLISELKRQRETEAQNKVFLARRAVALTSTKPAL

SEQ ID NO: 749733 - protein, 382 aa, Homo sapiens
VHVRLRQRIILYELKVELEETVVRRQAAVRTLGQQARVWLVRVLLNLLVVALLGAAFYGVYWATGCTVELQEMPLVQELPLLKLLGVNYLPSIFIAGVNFVLPPVFKLIAPLEGYTRSRQIVFILLRTVFLRLASLVVLLFSLWNQITCGGDSEAEDCKTCGYNYKQLPCWETVLGQEMYKLLLFDLLTVLAVALLIQFPRKLLCGLCPGALGRLAGTQEFQVPDEVLGLIYAQTVVWVGSFFCPLLPLLNTVKFLLLFYLKKLTLFSTCSPAARTFRASAANFFFPLVLLLGLAISSVPLLYSIFLIPPSKLCGPFRGQSSIWAQIPESISSLPETTQNFLFFLGTQAFAVPLLLISRSQTFGYNGRACQEWLPFLSPSAS

SEQ ID NO: 749734 - protein, 407 aa, Homo sapiens; identical to SEQ ID NO: 749732

SEQ ID NO: 749735 - protein, 407 aa, Homo sapiens; identical to SEQ ID NO: 749732

SEQ ID NO: 749736 - protein, 89 aa, Homo sapiens
LNLLVVALLGAAFYGVYWATGCTVELQVRTVLEEEARGSWNLHFQRWREGTEVWDARDLREEVWERVCSDPGLRDFKGKREAGRGGLHL

SEQ ID NO: 749737 - protein, 128 aa, Homo sapiens
TLCICASVSLATYSLLPFSASLSAVWVLFSAASSPFIYSPLSHWFLALATHYFLPFATSPQCSCTPFSHIILLAASCSCLSRSPACHCFCFVLAFSLHPLLSPFPLPLGIEEALISFCLSLEKQIIDH

SEQ ID NO: 749738 - protein, 85 aa, Homo sapiens
NAPGLSTTPYAQGLKELNQGIISLLLPSSDMGGGDQSQTAEVGMTQEDPETRGRLRELQEMTSGRPGMVAHDCDLRTYGRQGGRI

SEQ ID NO: 749739 - protein, 128 aa, Homo sapiens
HSWDSNPGLSGCLPHRVACSLAAGSLPIYLRLWLCVCDVVSGPSTMSAVCLAGLSLCLGPCLFCRATGLGPPSEAPPPLLQVLSARLFSLTIEYVLGSQNLCLLHLSPLQLGPPSTGPGTDGAPINIF

SEQ ID NO: 749740 - protein, 890 aa, Homo sapiens
MDSNTAPLGPSCPQPPPAPQPQARSRLNATASLEQERSERPRAPGPQAGPGPGVRDAAAPAEPQAQHTRSRERADGTGPTKGDMEIPFEEVLERAKAGDPKAQTEVGKHYLQLAGDTDEELNSCTAVDWLVLAAKQGRREAVKLLRRCLADRRGITSENEREVRQLSSETDLERAVRKAALVMYWKLNPKKKKQVAVAELLENVGQVNEHDGGAQPGPVPKSLQKQRRMLERLVSSESKNYIALDDFVEITKKYAKGVIPSSLFLQDDEDDDELAGKSPEDLPLRLKVVKYPLHAIMEIKEYLIDMASRAGMHWLSTIIPTHHINALIFFFIISNLTIDFFAFFIPLVIFYLSFISMVICTLKVFQDSKAWENFRTLTDLLLRFEPNLDVEQAEVNFGWNHLEPYAHFLLSVFFVIFSFPIASKDCIPCSELAVITGFFTVTSYLSLSTHAEPYTRRALATEVTAGLLSLLPSMPLNWPYLKVLGQTFITVPVGHLVVLNVSVPCLLYVYLLYLFFRMAQLRNFKGTYCYLVPYLVCFMWCELSVVILLESTGLGLLRASIGYFLFLFALPILVAGLALVGVLQFARWFTSLELTKIAVTVAVCSVPLLLRWWTKASFSVVGMVKSLTRSSMVKLILVWLTAIVLFCWFYVYRSEGMKVYNSTLTWQQYGALCGPRAWKETNMARTQILCSHLEGHRVTWTGRFKYVRVTDIDNSAESAINMLPFFIGDWMRCLYGEAYPACSPGNTSTAEEELCRLKLLAKHPCHIKKFDRYKFEITVGMPFSSGADGSRSREEDDVTKDIVLRASSEFKSVLLSLRQGSLIEFSTILEGRLGSKWPVFELKAISCLNCMAQLSPTRRHVKIEHDWRSTVHGAVKFAFDFFFFPFLSAA

SEQ ID NO: 749741 - protein, 199 aa, Homo sapiens
REGHLGWGTAHPGAGGQEWRLALGKPAPFLLTQPGPQPSGRPGKGFLHLNPLSSFLSLAPRHRPQPIALCEGGSGAAVWGAHAVFSHASAKNYIALDDFVEITKKYAKGVIPSSLFLQDDEDDDELAGKSPEDLPLRLKVVKYPLHAIMEIKEYLIDMASRAGMHWLSTIIPTHHINALIFFFIISNRITRSRVMRLRL

SEQ ID NO: 749742 - protein, 890 aa, Homo sapiens; identical to SEQ ID NO: 749740

SEQ ID NO: 749743 - protein, 742 aa, Homo sapiens
REGHLGWGTAHPGAGGQEWRLALGKPAPFLLTQPGPQPSGRPGKGFLHLNPLSSFLSLAPRHRPQPIALCEGGSGAAVWGAHAVFSHASAKNYIALDDFVEITKKYAKGVIPSSLFLQDDEDDDELAGKSPEDLPLRLKVVKYPLHAIMEIKEYLIDMASRAGMHWLSTIIPTHHINALIFFFIISNLTIDFFAFFIPLVIFYLSFISMVICTLKVFQDSKAWENFRTLTDLLLRFEPNLDVEQAEVNFGWNHLEPYAHFLLSVFFVIFSFPIASKDCIPCSELAVITGFFTVTSYLSLSTHAEPYTRRALATEVTAGLLSLLPSMPLNWPYLKVLGQTFITVPVGHLVVLNVSVPCLLYVYLLYLFFRMAQLRNFKGTYCYLVPYLVCFMWCELSVVILLESTGLGLLRASIGYFLFLFALPILVAGLALVGVLQFARWFTSLELTKIAVTVAVCSVPLLLRWWTKASFSVVGMVKSLTRSSMVKLILVWLTAIVLFCWFYVYRSEGMKVYNSTLTWQQYGALCGPRAWKETNMARTQILCSHLEGHRVTWTGRFKYVRVTDIDNSAESAINMLPFFIGDWMRCLYGEAYPACSPGNTSTAEEELCRLKLLAKHPCHIKKFDRYKFEITVGMPFSSGADGSRSREEDDVTKDIVLRASSEFKSVLLSLRQGSLIEFSTILEGRLGSKWPVFELKAISCLNCMAQLSPTRRHVKIEHDWRSTVHGAVKFAFDFFFFPFLSAA

SEQ ID NO: 749744 - protein, 339 aa, Homo sapiens
RYNRANDRPVVNRTRLFALPILVAGLALVGVLQFARWFTSLELTKIAVTVAVCSVPLLLRWWTKASFSVVGMVKSLTRSSMVKLILVWLTAIVLFCWFYVYRSEGMKVYNSTLTWQQYGALCGPRAWKETNMARTQILCSHLEGHRVTWTGRFKYVRVTDIDNSAESAINMLPFFIGDWMRCLYGEAYPACSPGNTSTAEEELCRLKLLAKHPCHIKKFDRYKFEITVGMPFSSGADGSRSREEDDVTKDIVLRASSEFKSVLLSLRQGSLIEFSTILEGRLGSKWPVFELKAISCLNCMAQLSPTRRHVKIEHDWRSTVHGAVKFAFDFFFFPFLSAA

SEQ ID NO: 749745 - protein, 286 aa, Homo sapiens
MCNEQGTLQTKASFSVVGMVKSLTRSSMVKLILVWLTAIVLFCWFYVYRSEGMKVYNSTLTWQQYGALCGPRAWKETNMARTQILCSHLEGHRVTWTGRFKYVRVTDIDNSAESAINMLPFFIGDWMRCLYGEAYPACSPGNTSTAEEELCRLKLLAKHPCHIKKFDRYKFEITVGMPFSSGADGSRSREEDDVTKDIVLRASSEFKSVLLSLRQGSLIEFSTILEGRLGSKWPVFELKAISCLNCMAQLSPTRRHVKIEHDWRSTVHGAVKFAFDFFFFPFLSAA

SEQ ID NO: 749746 - protein, 890 aa, Homo sapiens; identical to SEQ ID NO: 749740

SEQ ID NO: 749747 - protein, 347 aa, Homo sapiens
MDSNTAPLGPSCPQPPPAPQPQARSRLNATASLEQERSERPRAPGPQAGPGPGVRDAAAPAEPQAQHTRSRERADGTGPTKGDMEIPFEEVLERAKAGDPKAQTEVGKHYLQLAGDTDEELNSCTAVDWLVLAAKQGRREAVKLLRRCLADRRGITSENEREVRQLSSETDLERAVRKAALVMYWKLNPKKKKQVAVAELLENVGQVNEHDGGAQPGPVPKSLQKQRRMLERLVSSESKNYIALDDFVEITKKYAKGVIPSSLFLQDDEDDDELAGKSPEDLPLRLKVVKYPLHAIMEIKEYLIDMASRAGMHWLSTIIPTHHINALIFFFIISNRITRSRVMRLRL

SEQ ID NO: 749748 - protein, 141 aa, Homo sapiens
FFFWETESRSVAQAVVQWYDLAHCNLHLLGSRDYPASASQEAKTTGVHYHARLIFIFLVETGFHHVGRAGLELLTSSDAPASASQSAGITGMSNHSWSNSSLLPLFYTAQLLNFRELKRIIKFHLVHPRSSFRFTKLSYFL

SEQ ID NO: 749749 - protein, 73 aa, Homo sapiens
AVLFMWMVTRPTAGQTQVLPLDFPVPQHQPGDHVLIKEGKEGKLEPAREGPYLVLLTTETAVRKVGKRWTHHT

SEQ ID NO: 749750 - protein, 44 aa, Homo sapiens
MAIHRISPTRLWLLVDVGLTFGGIRAWTQPLDKLIQTSWPSPKE

SEQ ID NO: 749751 - protein, 123 aa, Homo sapiens
YTAGKITELERKLTFEQQRRISGKDVCVRQKIKMENKEQMDITHLDGHKVHISRDKITRPGAKLWKKGEGLPNFDNNNIKGSLIITFDVDFPKEQLTEEAREGIKQLLKQGSVQKVYNGLQGY

SEQ ID NO: 749752 - protein, 144 aa, Homo sapiens
VLTKDPQLTLTGEGEPHVDGEPGDLRFRIKVVKHPIFERRGDDLYTNVTISLVESLVGFEMDITHLDGHKVHISRDKITRPGAKLWKKGEGLPNFDNNNIKGSLIITFDVDFPKEQLTEEAREGIKQLLKQGSVQKVYNGLQGY

SEQ ID NO: 749753 - protein, 144 aa, Homo sapiens; identical to SEQ ID NO: 749752

SEQ ID NO: 749754 - protein, 358 aa, Homo sapiens
MAPQNLSTFCLLLLYLIGAVIAGRDFYKILGVPRSASIKDIKKAYRKLALQLHPDRNPDDPQAQEKFQDLGAAYEVLSDSEKRKQYDTYGEEGLKDGHQSSHGDIFSHFFGDFGFMFGGTPRQQDRNIPRGSDIIVDLEVTLEEVYAGNFVEVVRNKPVARQAPGKRKCNCRQEMRTTQLGPGRFQMTQEVVCDECPNVKLVNEERTLEVEIEPGVRDGMEYPFIGEGEPHVDGEPGDLRFRIKVVKHPIFERRGDDLYTNVTISLVESLVGFEMDITHLDGHKVHISRDKITRPGAKLWKKGEGLPNFDNNNIKGSLIITFDVDFPKEQLTEEAREGIKQLLKQGSVQKVYNGLQGY

SEQ ID NO: 749755 - protein, 358 aa, Homo sapiens; identical to SEQ ID NO: 749754

SEQ ID NO: 749756 - protein, 358 aa, Homo sapiens; identical to SEQ ID NO: 749754

SEQ ID NO: 749757 - protein, 358 aa, Homo sapiens; identical to SEQ ID NO: 749754

SEQ ID NO: 749758 - protein, 242 aa, Homo sapiens
MAPQNLSTFCLLLLYLIGAVIAGRDFYKILGVPRSASIKDIKKAYRKLALQLHPDRNPDDPQAQEKFQDLGAAYEVLSDSEKRKQYDTYGEEGLKDGHQSSHGDIFSHFFGDFGFMFGGTPRQQDRNIPRGSDIIVDLEVTLEEVYAGNFVEVVRNKPVARQAPGKRKCNCRQEMRTTQLGPGRFQMTQEVVCDECPNVKLVNEERTLEVEIEPGVRDGMEYPFIGEGTQYLKGEEMICTQM

SEQ ID NO: 749759 - protein, 374 aa, Homo sapiens
  misc_feature (247)..(247): Xaa can be any naturally occurring amino acid
  misc_feature (259)..(259): Xaa can be any naturally occurring amino acid
  misc_feature (261)..(261): Xaa can be any naturally occurring amino acid
  misc_feature (271)..(271): Xaa can be any naturally occurring amino acid
  misc_feature (273)..(273): Xaa can be any naturally occurring amino acid
  misc_feature (279)..(282): Xaa can be any naturally occurring amino acid
  misc_feature (284)..(284): Xaa can be any naturally occurring amino acid
  misc_feature (286)..(287): Xaa can be any naturally occurring amino acid
  misc_feature (289)..(291): Xaa can be any naturally occurring amino acid
  misc_feature (295)..(297): Xaa can be any naturally occurring amino acid
  misc_feature (303)..(304): Xaa can be any naturally occurring amino acid
  misc_feature (306)..(308): Xaa can be any naturally occurring amino acid
  misc_feature (313)..(313): Xaa can be any naturally occurring amino acid
  misc_feature (316)..(319): Xaa can be any naturally occurring amino acid
  misc_feature (324)..(325): Xaa can be any naturally occurring amino acid
  misc_feature (328)..(330): Xaa can be any naturally occurring amino acid
  misc_feature (333)..(334): Xaa can be any naturally occurring amino acid
  misc_feature (337)..(338): Xaa can be any naturally occurring amino acid
  misc_feature (340)..(345): Xaa can be any naturally occurring amino acid
  misc_feature (349)..(349): Xaa can be any naturally occurring amino acid
  misc_feature (351)..(351): Xaa can be any naturally occurring amino acid
  misc_feature (354)..(355): Xaa can be any naturally occurring amino acid
MAPQNLSTFCLLLLYLIGAVIAGRDFYKILGVPRSASIKDIKKAYRKLALQLHPDRNPDDPQAQEKFQDLGAAYEVLSDSEKRKQYDTYGEEGLKDGHQSSHGDIFSHFFGDFGFMFGGTPRQQDRNIPRGSDIIVDLEVTLEEVYAGNFVEVVRNKPVARQAPGKRKCNCRQEMRTTQLGPGRFQMTQEVVCDECPNVKLVNEERTLEVEIEPGVRDGMEYPFIGEGPHCGWGSPGDFTVPECKRXSKHPKYFEKERXTXRHTPPPHTPXPXPPPPPXXXXTXPXXSXXXPPPXXXPPPPPXXMXXXPSPPXPSXXXXQGPPXXHPXXXPPXXTPXXPXXXXXXTPTXTXPTXXGIQWTARILRVNKIGLCLK

SEQ ID NO: 749760 - protein, 339 aa, Homo sapiens
  misc_feature (296)..(297): Xaa can be any naturally occurring amino acid
MAPQNLSTFCLLLLYLIGAVIAGRDFYKILGVPRSASIKDIKKAYRKLALQLHPDRNPDDPQAQEKFQDLGAAYEVLSDSEKRKQYDTYGEEGLKDGHQSSHGDIFSHFFGDFGFMFGGTPRQQDRNIPRGSDIIVDLEVTLEEVYAGNFVEVVRNKPVARQAPGKRKCNCRQEMRTTQLGPGRFQMTQEVVCDECPNVKLVNEERTLEVEIEPGVRDGMEYPFIGEGEPHVDGEPGDLRFRIKVVKHPIFERRGDDLYTNVTISLVESLVGFEMDITHLDGHKGYIISRDKIYRXXRSYGRTGAAPPFGDTYPGPGNPLGGFPKKGSKERRRSYRLDG

SEQ ID NO: 749761 - protein, 289 aa, Homo sapiens
MAPQNLSTFCLLLLYLIGAVIAGRDFYKILGVPRSASIKDIKKAYRKLALQLHPDRNPDDPQAQEKFQDLGAAYEVLSDSEKRKQYDTYGEEGLKDGHQSSHGDIFSHFFGDFGFMFGGTPRQQDRNIPRGSDIIVDLEVTLEEVYAGNFVEVVRNKPVARQAPGKRKCNCRQEMRTTQLGPGRFQMTQEVVCDECPNVKLVNEERTLEVEIEPGVRDGMEYPFIGEGEPHVDGEPGDLRFRIKVVKHPIFERRGDDLYTNVTISLVESLVGFEMDITHLDGHKYIFPG

SEQ ID NO: 749762 - protein, 243 aa, Homo sapiens
MFGGTPRQQDRNIPRGSDIIVDLEVTLEEVYAGNFVEVVRNKPVARQAPGKRKCNCRQEMRTTQLGPGRFQMTQEVVCDECPNVKLVNEERTLEVEIEPGVRDGMEYPFIGEGEPHVDGEPGDLRFRIKVVKHPIFERRGDDLYTNVTISLVESLVGFEMDITHLDGHKVHISRDKITRPGAKLWKKGEGLPNFDNNNIKGSLIITFDVDFPKEQLTEEAREGIKQLLKQGSVQKVYNGLQGY

SEQ ID NO: 749763 - protein, 340 aa, Homo sapiens
MAPQNLSTFCLLLLYLIGAVIAGRDFYKILGVPRSASIKDIKKAYRKLALQLHPDRNPDDPQAQEKFQDLGAAYEVLSDSEKRKQYDTYGEEGLKDGHQSSHGDIFSHFFGDFGFMFGGTPRQQDRNIPRGSDIIVDLEVTLEEVYAGNFVEVVRNKPVARQAPGKRKCNCRQEMRTTQLGPGRFQMTQEVVCDECPNVKLVNEERTLEVEIEPGCNLLGLGEPHVDGEPGDLRFRIKVVKRGDDLYTNVTISLVESLVGFEMDITHLDGHKVHISRDKITRPGAKLWKKGEGLPNFDNNNIKGYVDFPKEQLTEEAREGIKQLLKQGSVQKVYNGLQGY

SEQ ID NO: 749764 - protein, 214 aa, Homo sapiens
GRVGRPTRPVRNKPVARQAPGKRKCNCRQEMRTTQLGPGRFQMTQEVVCDECPNVKLVNEERTLEVEIEPGVRDGMEYPFIGEGEPHVDGEPGDLRFRIKVVKHPIFERRGDDLYTNVTISLVESLVGFEMDITHLDGHKVHISRDKITRPGAKLWKKGEGLPNFDNNNIKGSLIITFDVDFPKEQLTEEAREGIKQLLKQGSVQKVYNGLQGY

SEQ ID NO: 749765 - protein, 144 aa, Homo sapiens; identical to SEQ ID NO: 749752

SEQ ID NO: 749766 - protein, 112 aa, Homo sapiens
YSFWLSIINYSWAGWFSCTTLLIYPSLQFYSVSRLPTRSLSDNICAVCGQKIIVELDEEGLIENTYQLSCNHVWERTHFLYGQILDWLRYLVAWQPVVIGIVQGINYSLGLE

SEQ ID NO: 749767 - protein, 328 aa, Homo sapiens
MAAGTAARKAAPVLEAPPQQEQLSHTKLSAEDTWNLQQERMYKMHRGHDSMHVEMILIFLCVLVIAQIVLVQWRQRHGRSYNLVTLLQMWVVPLYFTIKLYWWRFLSMWGMFSVITSYILFRATRKPLSGRTPRLVYKWFLLIYKLSYAFGVVGYLAIVFTMCGFNLFFKIKARDSMDFGIVSLFYGLYYGVMGRDFAEICSDYMASTIGFYSVSRLPTRSLSDNICAVCGQKIIVELDEEGLIENTYQLSCNHVFHEFCIRGWCIVGKKQTCPYCKEKVDLKRMISNPWERTHFLYGQILDWLRYLVAWQPVVIGIVQGINYSLGLE

SEQ ID NO: 749768 - protein, 256 aa, Homo sapiens
MAAGTAARKAAPVLEAPPQQEQLSHTKLSAEDTWNLQQERMYKMHRGHDSMHVEMILIFLCVLVIAQIVLVQWRQRHGRSYNLVTLLQMWVVPLYFTIKLYWWRFLSMWGMFSVITSYILFRATRKPLSGRTPRLVYKWFLLIYKLSYAFGVVGYLAIVFTMCGFNLFFKIKARDSMDFGIVSLFYGLYYGVMGRDFAEICSDYMASTIGFYSVSRLPTRSLSDNICAVCGQKIIVELDEEGLIENTYQLSCNHVC

SEQ ID NO: 749769 - protein, 256 aa, Homo sapiens; identical to SEQ ID NO: 749768

SEQ ID NO: 749770 - protein, 248 aa, Homo sapiens
MELVTLLQMWVVPLYFTIKLYWWRFLSMWGMFSVITSYILFRATRKPLSGRTPRLVYKWFLLIYKLSYAFGVVGYLAIVFTMCGFNLFFKIKARDSMDFGIVSLFYGLYYGVMGRDFAEICSDYMASTIGFYSVSRLPTRSLSDNICAVCGQKIIVELDEEGLIENTYQLSCNHVFHEFCIRGWCIVGKKQTCPYCKEKVDLKRMISNPWERTHFLYGQILDWLRYLVAWQPVVIGIVQGINYSLGLE

SEQ ID NO: 749771 - protein, 271 aa, Homo sapiens
MAAGTAARKAAPVLEAPPQQEQLSHTKLSAEDTWNLQQERMYKMHRGHDSMHVEMILIFLCVLVIAQIVLVQWRQRHGRSYNLVTLLQMWVVPLYFTIKLYWWRFLSMWGMFSVITSYILFRATRKPLSGRTPRLVYKWFLLIYKLSYAFGVVGYLAIVFTMCGFNLFFKIKARDSMDFGIVSLFYGLYYGVMGRDFAEICSDYMASTIGFYSVSRLPTRSLSDNICAVCGQKIIVELDEEGLIENTYQLSCNHVLNARKHSTLYVLYFPH

SEQ ID NO: 749772 - protein, 533 aa, Homo sapiens
SFIITVGIFLLLIFIINVVIITSRRKANLRLHLKELKKRRTNLTQTLTQQKKINNKDRAELNKIETDKHSNQKPSETSTDEHQHVPEDPREKSQDEVLRDDPPKKEHLRDTKSTFAGSPERESIHILSVDEKNKLGAKIIKAEMMGNMELAEQLKVQLEKANKFKETITQIPKKSGVENEDQQEVILVRTDQSGRVWPVNTPGKSLESQGGRRKRQMVSTHEERERVRYFHDDDNLSLNDLVKNEKMGTAENQNKLFMRMASKFMGKTDGDYYTLDDMFVSKAAERERLGEEEENQRKKAIAEHRSLAAQMEKCLYCFDSSQFPKHLIVAIGVKVYLCLPNVRSLTEGHCLIVPLQHHRAATLLDEDIWEEIQMFRKSLVKMFEDKGLDCIFLETNMSMKKQYHMVYECIPLPKEVGDMAPIYFKKAIMESDEEWSMNKKLIDLSSKDIRKSVPRGLPYFSVDFGLHGGFAHVIEDQHKFPHYFGKEIIGGMLDIEPRLWRKGIRESFEDQRKKALQFAQWWKPYDFTKSKNY

SEQ ID NO: 749773 - protein, 152 aa, Homo sapiens [sequence omitted]

SEQ ID NO: 749774 - protein, 633 aa, Homo sapiens
MEIFQSKLEDAEKAASTKEDYRRERWRKPTYSDKAQNCQESRESDLVKYGNSSRDRYATTDTAKNSNNEKFIGDEKDKRPGSLETCRRESNPRQNQEFSFGNLRAKFLRPSDDEELSFHSKGRKFEPLSSSSALVAQGSLCSGFRKPTKNSEERLTSWSRSDGRGDKKHSNQKPSETSTDEHQHVPEDPREKSQDEVLRDDPPKKEHLRDTKSTFAGSPERESIHILSVDEKNKLGAKIIKAEMMGNMELAEQLKVQLEKANKFKETITQIPKKSGVENEDQQEVILVRTDQSGRVWPVNTPGKSLESQGGRRKRQMVSTHEERERVRYFHDDDNLSLNDLVKNEKMGTAENQNKLFMRMASKFMGKTDGDYYTLDDMFVSKAAERERLGEEEENQRKKAIAEHRSLAAQMEKCLYCFDSSQFPKHLIVAIGVKVYLCLPNVRSLTEGHCLIVPLQHHRAATLLDEDIWEEIQMFRKSLVKMFEDKGLDCIFLETNMSMKKQYHMVYECIPLPKEVGDMAPIYFKKAIMESDEEWSMNKKLIDLSSKDIRKSVPRGLPYFSVDFGLHGGFAHVIEDQHKFPHYFGKEIIGGMLDIEPRLWRKGIRESFEDQRKKALQFAQWWKPYDFTKSKNY

SEQ ID NO: 749775 - protein, 490 aa, Homo sapiens
MEIFQSKLEDAEKAASTKEDYRRERWRKPTYSDKAQNCQESRESDLVKYGNSSRDRYATTDTAKNSNNEKFIGDEKDKRPGSLETCRRESNPRQNQEFSFGNLRAKFLRPSDDEELSFHSKGRKFEPLSSSSALVAQGSLCSGFRKPTKNSEERLTSWSRSDGRGDKKHSNQKPSETSTDEHQHVPEDPREKSQDEVLRDDPPKKEHLRDTKSTFAGSPERESIHILSVDEKNKLGAKIIKAEMMGNMELAEQLKVQLEKANKFKETITQIPKKSGVENEDQQEVILVRTDQSGRVWPVNTPGKSLESQGGRRKRQMVSTHEERERVRYFHDDDNLSLNDLVKNEKMGTAENQNKLFMRMASKFMGKTDGDYYTLDDMFVSKAAERERLGEEEENQRKKAIAEHRSLAAQMEKCLYCFDSSQFPKHLIVAIGVKVYLCLPNVRSLTEGHCLIVPLQHHRAATLLDEDIWEEIQVSIINVHYHFKTHEQFL

SEQ ID NO: 749776 - protein, 1597 aa, Homo sapiens
ESAEPPLTQSDKRETSHTTAAATGRSSHADARECAISTQAEQEAKTLQTSTDSVSKEGNTNCKGEGMQVNTLFETSQVPDWSDPPQVQVQETVRETISCSQMPAFSEPAGEESPFTGTTTISFSNLGGVHKENASLAQHSEVKPCTCGPQQEEKQDRDGNIPDNFREDLKYEQSISEANDETMSPGVFSRHLPKDARADFREPVAVSVASPEPTDTALTLENVCDEPRDREAVCAMECFEASDQGTCFDTIDSLVGTPVDNYSPQEICSVDTELAEGQNKVSDLCSSNDKTLEVFFQTQVSETSVSTCKSSKDGNSVMSPLFISTFTLNISHTASEGATGENLAKVEKSTYPLASTVHAGQEQPSPSNSGGLDETQLLSSENNPLVQFKEGGDKSPSPSAADTTATPASYSSIVSFPWEKPTTLTANNECFQATRETVTIATEVHPAKYLAVSIPEDKHAGGTEERFPRASHEKVSQFPSQVQVDHILSGATIKSTKELLCRAPSVPGVPHHVLQLPEGEGFCSNSPLQVDNLSGDKSQTVDRADFRSYEENFQERGSETKQGVQQQSLSQQGSLSAPDFQQSLPTTSAAQEERNLVPTAPSPASSREGAGQRSGWGTRVSVVAETAGEEDSQALSNVPSLSDILLEESKEYRPGNWEAGNKLKIITLEASASEIWPPRQLTNSESKASDGGLIIPDKVWAVPDSLKADAVVPELAPSEIAALAHSPEDAESALADSRESHKGEEPTISVHWRSLSSRGFSQPRLLESSVDPVDEKELSVTDSLSAASETGGKENVNNVSQDQEEKQLKMDHTAFFKKFLTCPKILESSVDPIDEISVIEYTRAGKPEPSETTPQGAREGGQSNDGNMGHEAEIQSAILQVPCLQGTILSENRISRSQEGSMKQEAEQIQPEEAKTAIWQVLQPSEGGERIPSGCSIGQIQESSDGSLGEAEQSKKDKAELISPTSPLSSCLPIMTHSSLGVDTHNSTGQIHDVPENDIVEPRKRQYVFPVSQKRGTIENERGKPLPSSPDLTRFPCTSSPEGNVTDFLISHKMEEPKIEVLQIGETKPPSSSSSSAKTLAFISGERELEKAPKLLQDPCQKGTLGCAKKSREREKSLEARAGKSPGTLTAVTGSEEVKRKPEAPGSGHLAEGVKKKILSRVAALRLKLEEKENIRKNSAFLKKMPKLETSLSHTEEKQDPKKPSCKREGRAPVLLKKIQAEMFPEHSGNVKLSCQFAEIHEDSTICWTKDSKSIAQVQRSAGDNSTVSFAIVQASPKDQGLYYCCIKNSYGKVTAEFNLTAEVLKQLSSRQDTKGCEEIEFSQLIFKEDFLHDSYFGGRLRGQIATEELHFGEGVHRKAFRSTVMHGLMPVFKPGHACVLKVHNAIAYGTRNNDELIQRNYKLAAQECYVQNTARYYAKIYAAEAQPLEGFGEVPEIIPIFLIHRPENNIPYATVEEELIGEFVKYSIRDGKEINFLRRESEAGQKCCTFQHWVYQKTSGCLLVTDMQGVGMKLTDVGIATLAKGYKGFKGNCSMTFIDQFKALHQCNKYCKMLGLKSLQNNNQKQKQPSIGKSKVQTNSMTVKKAGPETPGEKKT

SEQ ID NO: 749777 - protein, 1299 aa, Homo sapiens
ESAEPPLTQSDKRETSHTTAAATGRSSHADARECAISTQAEQEAKTLQTSTDSVSKEGNTNCKGEGMQVNTLFETSQVPDWSDPPQVQVQETVRETISCSQMPAFSEPAGEESPFTGTTTISFSNLGGVHKENASLAQHSEVKPCTCGPQQEEKQDRDGNIPDNFREDLKYEQSISEANDETMSPGVFSRHLPKDARADFREPVAVSVASPEPTDTALTLENVCDEPRDREAVCAMECFEASDQGTCFDTIDSLVGTPVDNYSPQEICSVDTELAEGQNKVSDLCSSNDKTLEVFFQTQVSETSVSTCKSSKDGNSVMSPLFISTFTLNISHTASEGATGENLAKVEKSTYPLASTVHAGQEQPSPSNSGGLDETQLLSSENNPLVQFKEGGDKSPSPSAADTTATPASYSSIVSFPWEKPTTLTANNECFQATRETVTIATEVHPAKYLAVSIPEDKHAGGTEERFPRASHEKVSQFPSQVQVDHILSGATIKSTKELLCRAPSVPGVPHHVLQLPEGEGFCSNSPLQVDNLSGDKSQTVDRADFRSYEENFQERGSETKQGVQQQSLSQQGSLSAPDFQQSLPTTSAAQEERNLVPTAPSPASSREGAGQRSGWGTRVSVVAETAGEEDSQALSNVPSLSDILLEESKEYRPGNWEAGNKLKIITLEASASEIWPPRQLTNSESKASDGGLIIPDKVWAVPDSLKADAVVPELAPSEIAALAHSPEDAESALADSRESHKGEEPTISVHWRSLSSRGFSQPRLLESSVDPVDEKELSVTDSLSAASETGGKENVNNVSQDQEEKQLKMDHTAFFKKFLTCPKILESSVDPIDEISVIEYTRAGKPEPSETTPQGAREGGQSNDGNMGHEAEIQSAILQVPCLQGTILSENRISRSQEGSMKQEAEQIQPEEAKTAIWQVLQPSEGGERIPSGCSIGQIQESSDGSLGEAEQSKKDKAELISPTSPLSSCLPIMTHSSLGVDTHNSTGQIHDVPENDIVEPRKRQYVFPVSQKRGTIENERGKPLPSSPDLTRFPCTSSPEGNVTDFLISHKMEEPKIEVLQIGETKPPSSSSSSAKTLAFISGERELEKAPKLLQDPCQKGTLGCAKKSREREKSLEARAGKSPGTLTAVTGSEEVKRKPEAPGSGHLAEGVKKKILSRVAALRLKLEEKENIRKNSAFLKKMPKLETSLSHTEEKQDPKKPSCKREGRGEALLLSIIVKVWACRPGIQFLCPRGSFAIKASVPQVGIDAMVVAKWLQHVASESPGGLVKTQIAPLPQCVKFALLTSSQVIYRENHD

SEQ ID NO: 749778 - protein, 839 aa, Homo sapiens [sequence omitted]

SEQ ID NO: 749779 - protein, 839 aa, Homo sapiens [sequence omitted]

SEQ ID NO: 749780 - protein, 708 aa, Homo sapiens
MSVVGIDLGFLNCYIAVARSGGIETIANEYSDRCTPACISLGSRTRAIGNAAKSQIVTNVRNTIHGFKKLHGRSFDDPIVQTERIRLPYELQKMPNGSAGVKVRYLEEERPFAIEQVTGMLLAKLKETSENALKKPVADCVISIPSFFTDAERRSVMAAAQVAGLNCLRLMNETTAVALAYGIYKQDLPPLDEKPRNVVFIDMGHSAYQVSVCAFNKGKLKVLATTFDPYLGGRNFDEALVDYFCDEFKTKYKINVKENSRALLRLYQECEKLKKLMSANASDLPLNIECFMNDLDVSSKMNRAQFEQLCASLLARVEPPLKAVMEQANLQREDISSIEIVGGATRIPAVKEQITKFFLKDISTTLNADEAVARGCALQCAILSPAFKVREFSITDLVPYSITLRWKTSFEDGSGECEVFCKNHPAPFSKVITFHKKEPFELEAFYTNLHEVPYPDARIGSFTIQNVFPQSDGDSSKVKVKVRVNIHGIFSVASASVIEKQNLEGDHSDAPMETETSFKNENKDNMDKMQVDQEEGHQKCHAEHTPEEEIDHTGAKTKSAVSDKQDRLNQTLKKGKVKSIDLPIQSSLCRQLGQDLLNSYIENEGKMIMQDKLEKERNDAKNAQNKLSLTQDPVVKVSEIVAKSKELDNFCNPIIYKPKPKAEVPEDKPKANSEHNGPMDGQSGTETKSDSTKDSSQHTKSSGEMEVD

SEQ ID NO: 749781 - protein, 613 aa, Homo sapiens
MSVVGIDLGFLNCYIAVARSGGIETIANEYSDRCTPACISLGSRTRAIGNAAKSQIVTNVRNTIHGFKKLHGRSFDDPIVQTERIRLPYELQKMPNGSAGVKVRYLEEERPFAIEQVTGMLLAKLKETSENALKKPVADCVISIPSFFTDAERRSVMAAAQVAGLNCLRLMNETTAVALAYGIYKQDLPPLDEKPRNVVFIDMGHSAYQVSVCAFNKGKLKVLATTFDPYLGGRNFDEALVDYFCDEFKTKYKINVKENSRALLRLYQECEKLKKLMSANASDLPLNIECFMNDLDVSSKMNRAQFEQLCASLLARVEPPLKAVMEQANLQREDISSIEIVGGATRIPAVKEQITKFFLKDISTTLNADEAVARGCALQCAILSPAFKVREFSITDLVPYSITLRWKTSFEDGSGECEVFCKNHPAPFSKVITFHKKEPFELEAFYTNLHEVPYPDARIGSFTIQNVFPQSDGDSSKVKVKVRVNIHGIFSVASASVIEKQNLEGDHSDAPMETETSFKNENKDNMDKMQVDQEEGHQKCHAEHTPEEEIDHTGAKTKSAVSDKQDRLNQTLKKGKVKSIDLPIQSSLCRQLGQDLLNSYIENEVCKSELMLK

SEQ ID NO: 749782 - protein, 140 aa, Homo sapiens
PSLHPPFLHPSMPLSLHPSVPPSLRPSIPPSLHPSILHSSTPPFSIPPSSIPPSLHLSIPSSSILHPPSLHLSIPPFSILPSLHPSISPSLHSPSLLHPPFSFHLSIPPFSIPPFSIPPSLHPSICPSLHPPSLYSSILH

SEQ ID NO: 749783 - protein, 90 aa, Homo sapiens
TVLYRESVFKLCPKLTYLDGYTERTRKHLYSDAEVDGVDEEEEDEEGEDEEDEDEGGRYTQCSHCAGSHSLVDQTRVDKDTRGFVGSLRA

SEQ ID NO: 749784 - protein, 292 aa, Homo sapiens
MPSELNKLRNCRVPQFPHVYNGNDYNKQDLFEELPGGLSDAKAPREALRFHAEAKGAQVRLDTRGCIAHRRTTFHDGIVFSQRPVRLGERVALRVLREESGWCGGLRVGFTRLDPACVSVPSLPPFLCPDLEEQSPTWAAVLPEGCALTGDLVRFWVDRRGCLFAKVNAGCRLLLREGVPVGAPLWAVMDVYGTTKAIELLDPTASRLPTPMPWDLSNKAVPEPKATPGEECAICFYHAANTRLVPCGHTYFCRYCAWRVFSDTAKCPVCRWQIEAVAPAQGPPALRVEEGS

SEQ ID NO: 749785 - protein, 290 aa, Homo sapiens
MLLGLCISGPTLPDAKAPREALRFHAEAKGAQVRLDTRGCIAHRRTTFHDGIVFSQRPVRLGERVALRVLREESGWCGGLRVGFTRLDPACVSVPSLPPFLCPDLEEQSPTWAAVLPEGCALTGDLVRFWVDRRGCLFAKVNAGCRLLLREGVPVGAPLWAVMDVYGTTKAIELLDPTASRLPTPMPWDLSNKAVPEPKGFGPKDLALPTGNLKATWHLCLREHLPTLHTRRGVCHLLLSRCQHPPCALRPHILLQILCLAGLQRYGQVPCVPLADRGGSPCAGPSCSEG

SEQ ID NO: 749786 - protein, 238 aa, Homo sapiens
GLSDFRHRSLSMAPYHIRKYQESDRKSVVGLLSGGMAEHAPATFRRLLKLPRTLILLLGGALALLLVSGSWILALVFSLSLLPALWFLAKKPWTRYVDIALRTDMSDITKSYLSECGSCFWVAESEEKVVGTVGALPVDDPTLREKRLQLFHLSVDNEHRGQGIAKALVRTVLQFARDQGYSEVVLDTSNIQLSAMGLYQSLGFKKTGQSFFHVWARLVDLHTVHFIYHLPSAQAGRL

SEQ ID NO: 749787 - protein, 66 aa, Homo sapiens
APQNTVWDCPPAGWPSAPLPVLAFCGLNGRTRMAARGGQATVGLPHSQLLAHILSSPWHEVIGQSL

SEQ ID NO: 749788 - protein, 1092 aa, Homo sapiens
IRGSGYHGAGVGTEALLTPLVGRLARLLEATPTDSCGYFRETIRRDIRQARERFSGPQLRQELARLQRRLDSVELLSPDIIMNLLLSYRDVQDYSAIIELVETLQALPTCDVAEQHNVCFHYTFALNRRNRPGDRAKALSVLLPLVQLEGSVAPDLYCMCGRIYKDMFFSSGFQDAGHREQAYHWYRKAFDVEPSLHSGINAAVLLIAAGQHFEDSKELRLIGMKLGCLLARKGCVEKMQYYWDVGFYLGAQILANDPTQVVLAAEQLYKLNAPIWYLVSVMETFLLYQHFRPTPEPPGGPPRRAHFWLHFLLQSCQPFKTACAQGDQCLVLVLEMNKVLLPAKLEVRGTDPVSTVTLSLLEPETQDIPSSWTFPVASICGVSASKRDERCCFLYALPPAQDVQLCFPSVGHCQWFCGLIQAWVTNPDSTAPAEEAEGAGEMLEFDYEYTETGERLVLGKGTYGVVYAGRDRHTRVRIAIKEIPERDSRFSQPLHEEIALHRRLRHKNIVRYLGSASQGGYLKIFMEEVPGGSLSSLLRSVWGPLKDNESTISFYTRQILQGLGYLHDNHIVHRDIKGDNVLINTFSGLLKISDFGTSKRLAGITPCTETFTGTLQYMAPEIIDQGPRGYGKAADIWSLGCTVIEMATGRPPFHELGSPQAAMFQVGMYKVHPPMPSSLSAEAQAFLLRTFEPDPRLRASAQTLLGDPFLQPGKRSRSPSSPRHAPRPSDAPSASPTPSANSTTQSQTFPCPQAPSQHPPSPPKRCLSYGGTSQLRVPEEPAAEEPASPEESSGLSLLHQESKRRAMLAAVLEQELPALAENLHQEQKQEQGARLGRNHVEELLRCLGAHIHTPNRRQLAQELRALQGRLRAQGLGPALLHRPLFAFPDAVKQILRKRQIRPHWMFVLDSLLSRAVRAALGVLGPEVEKEAVSPRSEELSNEGDSQQSPGQQSPLPVEPEQGPAPLMVQLSLLRAETDRLREILAGKEREYQALVQRALQRLNEEARTYVLAPEPPTALSTDQGLVQWLQELNVDSGTIQMLLNHSFTLHTLLTYATRDDLIYTRIRGGMVCRIWRAILAQRAGSTPVTSGP

SEQ ID NO: 749789 - protein, 1074 aa, Homo sapiens
MAGPCPRSGAERAGSCWQDPLAVALSRGRQLAAPPGRGCARSRPLSVVYVLTREPQPGLEPREGTEAEPLPLRCLREACAQVPRPRPPPQLRSLPFGTLELGDTAALDAFYNADVVVLEVSSSLVQPSLFYHLGVRESFSMTNNVLLCSQADLPDLQALREDVFQKNSDCVGSYTLIPYVVTATGRVLCGDAGLLRGLADGLVQAGVGTEALLTPLVGRLARLLEATPTDSCGYFRETIRRDIRQARERFSGPQLRQELARLQRRLDSVELLSPDIIMNLLLSYRDVQDYSAIIELVETLQALPTCDVAEQHNVCFHYTFALNRRNRPGDRAKALSVLLPLVQLEGSVAPDLYCMCGRIYKDMFFSSGFQDAGHREQAYHWYRKAFDVEPSLHSGINAAVLLIAAGQHFEDSKELRLIGMKLGCLLARKGCVEKMQYYWDVGFYLGAQILANDPTQVVLAAEQLYKLNAPIWYLVSVMETFLLYQHFRPTPEPPGGPPRRAHFWLHFLLQSCQPFKTACAQGDQCLVLVLEMNKVLLPAKLEVRGTDPVSTVTLSLLEPETQDIPSSWTFPVASICGVSASKRDERCCFLYALPPAQDVQLCFPSVGHCQWFCGLIQAWVTNPDSTAPAEEAEGAGEMLEFDYEYTETGERLVLGKGTYGVVYAGRDRHTRVRIAIKEIPERDSRFSQPLHEEIALHRRLRHKNIVRYLGSASQGGYLKIFMEEVPGGSLSSLLRSVWGPLKDNESTISFYTRQILQGLGYLHDNHIVHRDIKGDNVLINTFSGLLKISDFGTSKRLAGITPCTETFTGTLQYMAPEIIDQGPRGYGKAADIWSLGCTVIEMATGRPPFHELGSPQAAMFQVGMYKVHPPMPSSLSAEAQAFLLRTFEPDPRLRASAQTLLGDPFLQPGKRSRSPSSPRHAPRPSDAPSASPTPSANSTTQSQTFPCPQAPSQHPPSPPKRCLSYGGTSQLRVPEEPAAEEPASPEESSGLSLLHQESKRRAMLAAVLEQELPALAENLHQEQKQEQGARLGRNHVEELLRCLGAHIHTPNRRQLAQELRALQGWMNGEDKGSF

SEQ ID NO: 749790 - protein, 1321 aa, Homo sapiens
MAGPCPRSGAERAGSCWQDPLAVALSRGRQLAAPPGRGCARSRPLSVVYVLTREPQPGLEPREGTEAEPLPLRCLREACAQVPRPRPPPQLRSLPFGTLELGDTAALDAFYNADVVVLEVSSSLVQPSLFYHLGVRESFSMTNNVLLCSQADLPDLQALREDVFQKNSDCVGSYTLIPYVVTATGRVLCGDAGLLRGLADGLVQAGVGTEALLTPLVGRLARLLEATPTDSCGYFRETIRRDIRQARERFSGPQLRQELARLQRRLDSVELLSPDIIMNLLLSYRDVQDYSAIIELVETLQALPTCDVAEQHNVCFHYTFALNRRNRPGDRAKALSVLLPLVQLEGSVAPDLYCMCGRIYKDMFFSSGFQDAGHREQAYHWYRKAFDVEPSLHSGINAAVLLIAAGQHFEDSKELRLIGMKLGCLLARKGCVEKMQYYWDVGFYLGAQILANDPTQVVLAAEQLYKLNAPIWYLVSVMETFLLYQHFRPTPEPPGGPPRRAHFWLHFLLQSCQPFKTACAQGDQCLVLVLEMNKVLLPAKLEVRGTDPVSTVTLSLLEPETQDIPSSWTFPVASICGVSASKRDERCCFLYALPPAQDVQLCFPSVGHCQWFCGLIQAWVTNPDSTAPAEEAEGAGEMLEFDYEYTETGERLVLGKGTYGVVYAGRDRHTRVRIAIKEIPERDSRFSQPLHEEIALHRRLRHKNIVRYLGSASQGGYLKIFMEEVPGGSLSSLLRSVWGPLKDNESTISFYTRQILQGLGYLHDNHIVHRDIKGDNVLINTFSGLLKISDFGTSKRLAGITPCTETFTGTLQYMAPEIIDQGPRGYGKAADIWSLGCTVIEMATGRPPFHELGSPQAAMFQVGMYKVHPPMPSSLSAEAQAFLLRTFEPDPRLRASAQTLLGDPFLQPGKRSRSPSSPRHAPRPSGACGWRDGHSGGQRSCGAVRVEESPADGSVPPSDAPSASPTPSANSTTQSQTFPCPQAPSQHPPSPPKRCLSYGGTSQLRVPEEPAAEEPASPEESSGLSLLHQESKRRAMLAAVLEQELPALAENLHQEQKQEQGARLGRNHVEELLRCLGAHIHTPNRRQLAQELRALQGRLRAQGLGPALLHRPLFAFPDAVKQILRKRQIRPHWMFVLDSLLSRAVRAALGVLGPEVEKEAVSPRSEELSNEGDSQQSPGQQSPLPVEPEQGPAPLMVQLSLLRAETDRLREILAGKEREYQALVQRALQRLNEEARTYVLAPEPPTALSTDQGLVQWLQELNVDSGTIQMLLNHSFTLHTLLTYATRDDLIYTRIRGGMVCRIWRAILAQRAGSTPVTSGP

SEQ ID NO: 749791 - protein, 1266 aa, Homo sapiens
MAGPCPRSGAERAGSCWQDPLAVALSRGRQLAAPPGRGCARSRPLSVVYVLTREPQPGLEPREGTEAEPLPLRCLREACAQVPRPRPPPQLRSLPFGTLELGDTAALDAFYNADVVVLEVSSSLVQPSLFYHLGVRESFSMTNNVLLCSQADLPDLQALREDVFQKNSDCVGSYTLIPYVVTATGRVLCGDAGLLRGLADGLVQAGVGTEALLTPLVGRLARLLEATPTDSCGYFRETIRRDIRQARERFSGPQLRQELARLQRRLDSVELLSPDIIMNLLLSYRDVQDYSAIIELVETLQALPTCDVAEQHNVCFHYTFALNRRNRPGDRAKALSVLLPLVQLEGSVAPDLYCMCGRIYKDMFFSSGFQDAGHREQAYHWYRKAFDVEPSLHSGINAAVLLIAAGQHFEDSKELRLIGMKLGCLLARKGCVEKMQYYWDVGFYLGAQILANDPTQVVLAAEQLYKLNAPIWYLVSVMETFLLYQHFRPTPEPPGGPPRRAHFWLHFLLQSCQPFKTACAQGDQCLVLVLEMNKVLLPAKLEVRGTDPVSTVTLSLLEPETQDIPSSWTFPVASICGVSASKRDERCCFLYALPPAQDVQLCFPSVGHCQWFCGLIQAWVTNPDSTAPAEEAEGAGEMLEFDYEYTETGERLVLGKGTYGVVYAGRDRHTRVRIAIKEIPERDSRFSQPLHEEIALHRRLRHKNIVRYLGSASQGGYLKIFMEEVPGGSLSSLLRSVWGPLKDNESTISFYTRQILQGLGYLHDNHIVHRDIKGDNVLINTFSGLLKISDFGTSKRLAGITPCTETFTGTLQYMAPEIIDQGPRGYGKAADIWSLGCTVIEMATGRPPFHELGSPQAAMFQVGMYKVHPPMPSSLSAEAQAFLLRTFEPDPRLRASAQTLLGDPFLQPGKRSRSPSSPRHAPRPSDAPSASPTPSANSTTQSQTFPCPQAPSQHPPSPPKRCLSYGGTSQLRVPEEPAAEEPASPEESSGLSLLHQESKRRAMLAAVLEQELPALAENLHQEQKQEQGARLGRNHVEELLRCLGAHIHTPNRRQLAQELRALQGRLRAQGLGPALLHRPLFAFPDAVKQILRKRQIRPHWMFVLDSLLSRAVRAALGVLGPEVEKEAVSPRSEELSNEGDSQQSPGQQSPLPVEPEQGPAPLMVQLSLLRAETDRLREILAGKEREYQALVQRALQRLNEEARTYVLAPEPPTALSTDQGLVQWLQELNVDSGTIQMGRDGMPHLEGHLGTASRIHTSHLWTLRAE

SEQ ID NO: 749792 - protein, 528 aa, Homo sapiens
RVVDLRVSPSSGKGDNVLINTFSGLLKISDFGTSKRLAGITPCTETFTGTLQYMAPEIIDQGPRGYGKAADIWSLGCTVIEMATGRPPFHELGSPQAAMFQVGMYKVHPPMPSSLSAEAQAFLLRTFEPDPRLRASAQTLLGDPFLQPGKRSRSPSSPRHAPRPSDAPSASPTPSANSTTQSQTFPCPQAPSQHPPSPPKRCLSYGGTSQLRVPEEPAAEEPASPEESSGLSLLHQESKRRAMLAAVLEQELPALAENLHQEQKQEQGARLGRNHVEELLRCLGAHIHTPNRRQLAQELRALQGRLRAQGLGPALLHRPLFAFPDAVKQILRKRQIRPHWMFVLDSLLSRAVRAALGVLGPEVEKEAVSPRSEELSNEGDSQQSPGQQSPLPVEPEQGPAPLMVQLSLLRAETDRLREILAGKEREYQALVQRALQRLNEEARTYVLAPEPPTALSTDQGLVQWLQELNVDSGTIQMLLNHSFTLHTLLTYATRDDLIYTRIRGGMVCRIWRAILAQRAGSTPVTSGP

SEQ ID NO: 749793 - protein, 523 aa, Homo sapiens
MGIGAPVSVLGTLQYMAPEIIDQGPRGYGKAADIWSLGCTVIEMATGRPPFHELGSPQAAMFQVGMYKVHPPMPSSLSAEAQAFLLRTFEPDPRLRASAQTLLGDPFLQPGKRSRSPSSPRHAPRPSGACGWRDGHSGGQRSCGAVRVEESPADGSVPPSDAPSASPTPSANSTTQSQTFPCPQAPSQHPPSPPKRCLSYGGTSQLRVPEEPAAEEPASPEESSGLSLLHQESKRRAMLAAVLEQELPALAENLHQEQKQEQGARLGRNHVEELLRCLGAHIHTPNRRQLAQELRALQGRLRAQGLGPALLHRPLFAFPDAVKQILRKRQIRPHWMFVLDSLLSRAVRAALGVLGPEVEKEAVSPRSEELSNEGDSQQSPGQQSPLPVEPEQGPAPLMVQLSLLRAETDRLREILAGKEREYQALVQRALQRLNEEARTYVLAPEPPTALSTDQGLVQWLQELNVDSGTIQMLLNHSFTLHTLLTYATRDDLIYTRIRGGMVCRIWRAILAQRAGSTPVTSGP

SEQ ID NO: 749794 - protein, 588 aa, Homo sapiens
MAGPCPRSGAERAGSCWQDPLAVALSRGRQLAAPPGRGCARSRPLSVVYVLTREPQPGLEPREGTEAEPLPLRCLREACAQVPRPRPPPQLRSLPFGTLELGDTAALDAFYNADVVVLEVSSSLVQPSLFYHLGVRESFSMTNNVLLCSQADLPDLQALREDVFQKNSDCVGSYTLIPYVVTATGRVLCGDAGLLRGLADGLVQAGVGTEALLTPLVGRLARLLEATPTDSCGYFRETIRRDIRQARERFSGPQLRQELARLQRRLDSVELLSPDIIMNLLLSYRDVQDYSAIIELVETLQALPTCDVAEQHNVCFHYTFALNRRNRPGDRAKALSVLLPLVQLEGSVAPDLYCMCGRIYKDMFFSSGFQDAGHREQAYHWYRKAFDVEPSLHSGINAAVLLIAAGQHFEDSKELRLIGMKLGCLLARKGCVEKMQYYWDVGFYLGAQILANDPTQVVLAAEQLYKLNAPIWYLVSVMETFLLYQHFRPTPEPPGGPPRRAHFWLHFLLQSCQPFKTACAQGDQCLVLVLEMNKVLLPAKLEVRGTDPVSTVTLSLLEPETQDIPSSWTFPVASICGVSLKSDDLCPI

SEQ ID NO: 749795 - protein, 126 aa, Homo sapiens [sequence omitted]

SEQ ID NO: 749796 - protein, 359 aa, Homo sapiens
GALADNPSLPSQGARLGRNHVEELLRCLGAHIHTPNRRQLAQELRALQGRLRAQGLGPALLHRPLFAFPDAVKQILRKRQIRPHWMFVLDSLLSRAVRAALGVLGPGRRGMPRASCQRGCGACWARGTSNGAGGGQAGQGQAGAGGGVTKWTSPIPAPPGACPEPGTLPPHFGVWGSQTGVVALPEFTAWAAEVEKEAVSPRSEELSNEGDSQQSPGQQSPLPVEPEQGPAPLMVQLSLLRAETDRLREILAGKEREYQALVQRALQRLNEEARTYVLAPEPPTALSTDQGLVQWLQELNVDSGTIQMLLNHSFTLHTLLTYATRDDLIYTRIRGGMVCRIWRAILAQRAGSTPVTSGP

SEQ ID NO: 749797 - protein, 465 aa, Homo sapiens
DQKELASPVSPELRQKEVQMNFLNQLTSVFNPRTVASQPISTQTLVEGENDEQSSTDQASAIKTKNVFIAQNVASLQELGGSEKLLRVCLNLPYFLRYINRFQDAVLANSFFIMPATVADATAVRNGFHSLVIDVTMALDTLSLPVLEPLNPSRLQDVTVLSLSCLYAGVSVATCMAILHVGSAQQVRTGSTSSKEDDYESDAATIVQKCLEIYDMIGQAISSSRRAGGEHYQNFQLLGAWCLLNSLFLILNLSPTALADKGKEKDPLAALRVRDILSRTKEGVGSPKLGPGKGHQGFGVLSVILANHAIKLLTSLFQDLQVEALHKGWETDGPPAALSIMAQSTSIQRIQRLIDSVPLMNLLLTLLSTSYRKACVLQRQRKGSMSSDASASTDSNTYYEDDFSSTEEDSSQDDDSEPILGAMVLRETISSQLKRKAGTFRLLPHLLHWKALLGLKAPVSRPLVR

SEQ ID NO: 749798 - protein, 388 aa, Homo sapiens
DQKELASPVSPELRQKEVQMNFLNQLTSVFNPRTVASQPISTQTLVEGENDEQSSTDQASAIKTKNVFIAQNVASLQELGGSEKLLRVCLNLPYFLRYINRFQDAVLANSFFIMPATVADATAVRNGFHSLVIDVTMALDTLSLPVLEPLNPSRLQDVTVLSLSCLYAGVSVATCMAILHVGSAQQVRTGSTSSKEDDYESDAATIVQKCLEIYDMIGQAISSSRRAGGEHYQNFQLLGAWCLLNSLFLILNLSPTALADKGKEKDPLAALRVRDILSRTKEGVGSPKLGPGKGHQGFGVLSVILANHAIKLLTSLFQDLQVEALHKGWETDGPPAALSIMAQSTSIQRIQRLIDSVPLMNLLLTLLSTSYRKGPLVSPPIEETGGGV

SEQ ID NO: 749799 - protein, 65 aa, Homo sapiens
MFFILCLSQQHYQNFQLLGAWCLLNSLFLILNLSPTALADKGKEKDPLAALRVRDILSRTKEGVG

SEQ ID NO: 749800 - protein, 108 aa, Homo sapiens [sequence omitted]

SEQ ID NO: 749801 - protein, 582 aa, Homo sapiens
MAARSWQDELAQQAEEGSARLREMLSVGLGFLRTELGLDLGLEPKRYPGWVILVGTGALGLLLLFLLGYGWAAACAGARKKRRSPPRKREEAAAVPAAAPDDLALLKNLRSEEQKKKNRKKLSEKPKPNGRTVEVAEGEAVRTPQSVTAKQPPEIDKKNEKSKKNKKKSKSDAKAVQNSSRHDGKEVDEGAWETKISHREKRQQRKRDKVLTDSGSLDSTIPGIENTITVTTEQLTTASFPVGSKKNKGDSHLNVQVSNFKSGKGDSTLQVSSGLNENLTVNGGGWNEKSVKLSSQISAGEEKWNSVSPASAGKRKTEPSAWSQDTGDANTNGKDWGRSWSDRSIFSGIGSTAEPVSQSTTSDYQWDVSRNQPYIDDEWSGLNGLSSADPNSDWNAPAEEWGNWVDEERASLLKSQEPIPDDQKVSDDDKEKGEGALPTGKSKKKKKKKKKQGEDNSTAQDTEELEKEIREDLPVNTSKTRPKQEKAFSLKTISTSDPAEVLVKNSQPIKTLPPATSTEPSVILSKSDSDKSSSQVPPILQETDKSKSNTKQNSVPPSQTKSETSWESPKQIKKKKKARRET

SEQ ID NO: 749802 - protein, 582 aa, Homo sapiens; identical to SEQ ID NO: 749801

SEQ ID NO: 749803 - protein, 582 aa, Homo sapiens; identical to SEQ ID NO: 749801

SEQ ID NO: 749804 - protein, 493 aa, Homo sapiens
PASEEARLAGPDDLALLKNLRSEEQKKKNRKKLSEKPKPNGRTVEVAEGEAVRTPQSVTAKQPPEIDKKNEKSKKNKKKSKSDAKAVQNSSRHDGKEVDEGAWETKISHREKRQQRKRDKVLTDSGSLDSTIPGIENTITVTTEQLTTASFPVGSKKNKGDSHLNVQVSNFKSGKGDSTLQVSSGLNENLTVNGGGWNEKSVKLSSQISAGEEKWNSVSPASAGKRKTEPSAWSQDTGDANTNGKDWGRSWSDRSIFSGIGSTAEPVSQSTTSDYQWDVSRNQPYIDDEWSGLNGLSSADPNSDWNAPAEEWGNWVDEERASLLKSQEPIPDDQKVSDDDKEKGEGALPTGKSKKKKKKKKKQGEDNSTAQDTEELEKEIREDLPVNTSKTRPKQEKAFSLKTISTSDPAEVLVKNSQPIKTLPPATSTEPSVILSKSDSDKSSSQVPPILQETDKSKSNTKQNSVPPSQTKSETSWESPKQIKKKKKARRET

SEQ ID NO: 749805 - protein, 787 aa, Homo sapiens [sequence omitted]

SEQ ID NO: 749806 - protein, 787 aa, Homo sapiens [sequence omitted]

SEQ ID NO: 749807 - protein, 696 aa, Homo sapiens
MPVFSFGQIYSRGELHHFIDGFNEEKSNWMRYVNPAHSPREQNLAACQNGMNIYFYTIKPIPANQELLVWYCRDFAERLHYPYPGELTMMNLTQTQSSLKQPSTEKNELCPKNVPKREYSVKEILKLDSNPSKGKDLYRSNISPLTSEKDLDDFRRRGSPEMPFYPRVVYPIRAPLPEDFLKASLAYGIERPTYITRSPIPSSTTPSPSARSSPDQSLKSSSPHSSPGNTVSPVGPGSQEHRDSYAYLNASYGTEGLGSYPGYAPLPHLPPAFIPSYNAHYPKFLLPPYGMNCNGLSAVSSMNGINNFGLFPRLCPVYSNLLGGGSLPHPMLNPTSLPSSLPSDGARRLLQPEHPREVLVPAPHSAFSFTGAAASMKDKACSPTSGSPTAGTAATAEHVVQPKATSAAMAAPSSDEAMNLIKNKRNMTGYKTLPYPLKKQNGKIKYECNVCAKTFGQLSNLKVHLRVHSGERPFKCQTCNKGFTQLAHLQKHYLVHTGEKPHECQVCHKRFSSTSNLKTHLRLHSGEKPYQCKVCPAKFTQFVHLKLHKRLHTRERPHKCSQCHKNYIHLCSLKVHLKGNCAAAPAPGLPLEDLTRINEEIEKFDISDNADRLEDVEDDISVISVVEKEILAVVRKEKEETGLKVSLQRNMGNGLLSSGCSLYESSDLPLMKLPPSNPLPLVPVKVKQETVEPMDP

SEQ ID NO: 749808 - protein, 629 aa, Homo sapiens
MDMEDADMTLWTEAEFEEKCTYIVNDHPWDSGADGGTSVQAEASLPRNLLFKYATNSEEVIGVMSKEYIPKGTRFGPLIGEIYTNDTVPKNANRKYFWRIYSRGELHHFIDGFNEEKSNWMRYVNPAHSPREQNLAACQNGMNIYFYTIKPIPSSPHSSPGNTVSPVGPGSQEHRDSYAYLNASYGTEGLGSYPGYAPLPHLPPAFIPSYNAHYPKFLLPPYGMNCNGLSAVSSMNGINNFGLFPRLCPVYSNLLGGGSLPHPMLNPTSLPSSLPSDGARRLLQPEHPREVLVPAPHSAFSFTGAAASMKDKACSPTSGSPTAGTAATAEHVVQPKATSAAMAAPSSDEAMNLIKNKRNMTGYKTLPYPLKKQNGKIKYECNVCAKTFGQLSNLKVHLRVHSGERPFKCQTCNKGFTQLAHLQKHYLVHTGEKPHECQVCHKRFSSTSNLKTHLRLHSGEKPYQCKVCPAKFTQFVHLKLHKRLHTRERPHKCSQCHKNYIHLCSLKVHLKGNCAAAPAPGLPLEDLTRINEEIEKFDISDNADRLEDVEDDISVISVVEKEILAVVRKEKEETGLKVSLQRNMGNGLLSSGCSLYESSDLPLMKLPPSNPLPLVPVKVKQETVEPMDP

SEQ ID NO: 749809 - protein, 88 aa, Homo sapiens
RDLHYYFPAFTAGVLVVQTPGMKLQGGTQFQDTKNTQLLSNLLPPWTSAHEHSTGTQRFRQGLQECCAWSNPECQQACLSQHCYKVQG

SEQ ID NO: 749810 - protein, 500 aa, Homo sapiens
MAWAALLGLLAALLLLLLLSRRRTRRPGEPPLDLGSIPWLGYALDFGKDAASFLTRMKEKHGDIFTILVGGRYVTVLLDPHSYDAVVWEPRTRLDFHAYAIFLMERIFDVQLPHYSPSDEKARMKLTLLHRELQALTEAMYTNLHAVLLGDATEAGSGWHEMGLLDFSYSFLLRAGYLTLYGIEALPRTHESQAQDRVHSADVFHTFRQLDRLLPKLARGSLSVGDKDHMCSVKSRLWKLLSPARLARRAHRSKWLESYLLHLEEMGVSEEMQARALVLQLWATQGNMGPAAFWLLLFLLKNPEALAAVRGELESILWQAEQPVSQTTTLPQKVLDSTPVLDSVLSESLRLTAAPFITREVVVDLAMPMADGREFNLRRGDRLLLFPFLSPQRDPEIYTDPEVFKYNRFLNPDGSEKKDFYKDGKRLKNYNMPWGAGHNHCLGRSYAVNSIKQFVFLVLVHLDLELINADVEIPEFDLSRYGFGLMQPEHDVPVRYRIRP

SEQ ID NO: 749811 - protein, 500 aa, Homo sapiens; identical to SEQ ID NO: 749810

SEQ ID NO: 749812 - protein, 500 aa, Homo sapiens; identical to SEQ ID NO: 749810

SEQ ID NO: 749813 - protein, 191 aa, Homo sapiens
MQGGPGYLERPKLKLQDLGAGKGAGETIPTLPRAPDFLLRTLSSLESVITSFPLFYRPKGLRLGDSWHFLPPELYCKRVAREVGAVVGAREGGSAGPGRGAGTGHSLGALDLASLLPALQTNAWRLSEVLLRSSQPLTGPQKRRCYRDQELLRTALAGARPWARGFIMDTLSAQAAKQARVTGGGTETKAA

SEQ ID NO: 749814 - protein, 129 aa, Homo sapiens
MGDSWHFLPPELYCKRVAREVGAVVGAREGGSAGPGRGAGTGHSLGALDLASLLPALQTNAWRLSEVLLRSSQPLTGPQKRRCYRDQELLRTALAGARPWARGFIMDTLSAQAAKQARVTGGGTETKAA

SEQ ID NO: 749815 - protein, 134 aa, Homo sapiens
MHPACDFTGPTHPGPLEQDHGWIPGTGGVEVDPGKCRVKGGLRCTPCGLGSTSQKSNKDSRTHSTSSIPWPSVEPQSLRLWQGLFLRWTCSPEPAEAAWGKSVANSDRKGEDRSLSANCFSRAPILSTGSLDSS

SEQ ID NO: 749816 - protein, 102 aa, Homo sapiens
MERCRVKGGLRCTPCGLGSTSQKSNKDSRTHSTSSIPWPSVEPQSLRLWQGLFLRWTCSPEPAEAAWGKSVANSDRKGEDRSLSANCFSRAPILSTGSLDSS

SEQ ID NO: 749817 - protein, 309 aa, Homo sapiens
SVSGSEREKCRGCSGGGGGSSGSGDDGGGSAPTGSSLRAPPSSRERASASGQAPARRRQRPRPLGGTALTQGLHRHPEPNSKMGGKLSKKKKGYNVNDEKAKEKDKKAEGAATEEEGTPKESEPQAAAEPAEAKEGKEKPDQDAEGKAEEKEGEKDAAAAKEEAPKAEPEKTEGAAEAKAEPPKAPEQEQAAPGPAAGGEAPKAAEAAAAPAESAAPAAGEEPSKEEGEPKKTEAPAAPAAQETKSDGAPASDSKPGSSEAAPSSKETPAATEAPSSTPKAQGPAASAEEPKPVEAPAANSDQTVTVKE

SEQ ID NO: 749818 - protein, 309 aa, Homo sapiens; identical to SEQ ID NO: 749817

SEQ ID NO: 749819 - protein, 315 aa, Homo sapiens
VWHPTDPTSVSLLMLCCQNYPSCLPLGPGTIAEEMTSLYVTQAGLELWAQAILLPHLLKCWDYRKGSQSRPQGRILGSHAKKEFRNSKMGGKLSKKKKGYNVNDEKAKEKDKKAEGAATEEEGTPKESEPQAAAEPAEAKEGKEKPDQDAEGKAEEKEGEKDAAAAKEEAPKAEPEKTEGAAEAKAEPPKAPEQEQAAPGPAAGGEAPKAAEAAAAPAESAAPAAGEEPSKEEGEPKKTEAPAAPAAQETKSDGAPASDSKPGSSEAAPSSKETPAATEAPSSTPKAQGPAASAEEPKPVEAPAANSDQTVTVKE

SEQ ID NO: 749820 - protein, 291 aa, Homo sapiens
SVSGSEREKCRGCSGGGGGSSGSGDDGGGSAPTGSSLRAPPSSRERASASGQAPARRRQRPRPLGGTALTQGLHRHPEPNSKMGGKLSKKKKGYNVNDEKAKEKDKKAEGAATEEEGTPKESEPQAAAEPAEAKEGKEKPDQDAEGKAEEKEGEKDAAAAKEEAPKAEPEKTEGAAEAKAEPPKAPEQEQAAPGPAAGGEAPKAAEAAAAPAESAAPAAGEEPSKEEGEPKKTEAPAAPAAQETKSDGAPASDSEAPSSTPKAQGPAASAEEPKPVEAPAANSDQTVTVKE

SEQ ID NO: 749821 - protein, 297 aa, Homo sapiens
PTPPFRLASASLSFTSPRGGGGGGGSSGSGDDGGGSAPTGSSLRAPPSSRERASASGQAPARRRQRPRPLGGTALTQGLHRHPEPNSKMGGKLSKKKKGYNVNDEKAKEKDKKAEGAATEEEGTPKESEPQAAAEPAEAKEGKEKPDQDAEGKAEEKEGEKDAAAAKEEAPKAEPEKTEGAAEAKAEPPKAPEQEQAAPGPAAGGEAPKAAEAAAAPAESAAPAAGEEPSKEEGEPKKTEAPAAPAAQETKSDGAPASDSEAPSSTPKAQGPAASAEEPKPVEAPAANSDQTVTVKE

SEQ ID NO: 749822 - protein, 281 aa, Homo sapiens
SVSGSEREKCRGCSGGGGGSSGSGDDGGGSAPTGSSLRAPPSSRERASASGQAPARRRQRPRPLGGTALTQGLHRHPEPNSKMGGKLSKKKKGYNVNDEKAKEKDKKAEGAATEEEGTPKESEPQAAAEPAEAKEGKEKPDQDAEGKAEEKEGEKDAAAAKEEAPKAEPEKTAPKAAEAAAAPAESAAPAAGEEPSKEEGEPKKTEAPAAPAAQETKSDGAPASDSKPGSSEAAPSSKETPAATEAPSSTPKAQGPAASAEEPKPVEAPAANSDQTVTVKE

SEQ ID NO: 749823 - protein, 259 aa, Homo sapiens
SVSGSEREKCRGCSGGGGGSSGSGDDGGGSAPTGSSLRAPPSSRERASASGQAPARRRQRPRPLGGTALTQGLHRHPEPNSKMGGKLSKKKKGYNVNDEKAKEKDKKAEGAATEEEGTPKESEPQAAAEPAEAKEGKEKPDQDAEGKAEEKEGEKDAAAAKEEAPKAEPEKTPSKEEGEPKKTEAPAAPAAQETKSDGAPASDSKPGSSEAAPSSKETPAATEAPSSTPKAQGPAASAEEPKPVEAPAANSDQTVTVKE

SEQ ID NO: 749824 - protein, 309 aa, Homo sapiens; identical to SEQ ID NO: 749817

SEQ ID NO: 749825 - protein, 209 aa, Homo sapiens
KLAAAEPAEAKEGKEKPDQDAEGKAEEKEGEKDAAAAKGGGSSLRAPPSSRERASASGQAPARRRQRPRPLGGTALTQGLHRHPEPNSKMGGKLSKKKKGYNVNDEKAKEKDKKAEGAATEEPSKEEGEPKKTEAPAAPAAQETKSDGAPASDSKPGSSEAAPSSKETPAATEAPSSTPKAQGPAASAEEPKPVEAPAANSDQTVTVKE

SEQ ID NO: 749826 - protein, 99 aa, Homo sapiens
EFKLDCCRNSARPSKEEGEPKKTEAPAAPAAQETKSDGAPASDSKPGSSEAAPSSKETPAATEAPSSTPKAQGPAASAEEPKPVEAPAANSDQTVTVKE

SEQ ID NO: 749827 - protein, 95 aa, Homo sapiens
SSKDPVSEPSKEEGEPKKTEAPAAPAAQETKSDGAPASDSKPGSSEAAPSSKETPAATEAPSSTPKAQGPAASAEEPKPVEAPAANSDQTVTVKE

SEQ ID NO: 749828 - protein, 177 aa, Homo sapiens
SVSGSEREKCRGCSGGGGGSSGSGDDGGGSAPTGSSLRAPPSSRERASASGQAPARRRQRPRPLGGTALTQGLHRHPEPNSKMGGKLSKKKKGYNVNDEKAKEKDKKAEGAATEEEGTPKESEPQAAAEPAEAKEGKEKPDQDAEGKAEEKEGEKDAAAAKEEAPAANSDQTVTVKE

SEQ ID NO: 749829 - protein, 66 aa, Homo sapiens
HELVPLVPCPIKGGRGWENPNSIFVGKYLIYLQSTLPRSPGFPRSASESAVHRLYLKLPPHALLHR

SEQ ID NO: 749830 - protein, 309 aa, Homo sapiens; identical to SEQ ID NO: 749817

SEQ ID NO: 749831 - protein, 315 aa, Homo sapiens
SVSGSEREKCRGCSGGGGGSSGSGDDGGGSAPTGSSLRAPPSSRERASASGQAPARRRQRPRPLGGTALTQGLHRHPEPNSKMGGKLSKKKKGYNVNDEKAKEKDKKAEGAATEEEGTPKESEPQAAAEPAEAKEGKEKPDQDAEGKAEEKEGEKDAAAAKEEAPKAEPEKTEGAAEAKAEPPKAPEQEQAAPGPAAGGEAPKAAEAAAAPAESAAPAAGEEPSKEEGEPKKTEAPAAPAAQETKSDGAPASDSKPGSSEAAPSSKETPAATEAPSSTPKAQGPAASAEEPKPVEAPAANSDLPTAFPPDIPPVL

SEQ ID NO: 749832 - protein, 304 aa, Homo sapiens
SVSGSEREKCRGCSGGGGGSSGSGDDGGGSAPTGSSLRAPPSSRERASASGQAPARRRQRPRPLGGTALTQGLHRHPEPNSKMGGKLSKKKKGYNVNDEKAKEKDKKAEGAATEEEGTPKESEPHVLCLHDALPDVPMDVCNGMNALTMWLPDVCNGLSEELCGADECDCCAVLAQIGNGDVPPCIWAVMPPGEMTVMCAACAMNVPKLWPLERPPSGKWWLAPWNAMWMPMLLVAPPLVTPPWACLVWLVAGLWPLPKMACLRLWPGLAVAPLGPRKDAWLVLPLWPLLWGVECGRPPYGYMG

SEQ ID NO: 749833 - protein, 372 aa, Homo sapiens
MAKSKTKHRLCSQESSVSALLASCTLSGSNSSNSDGSFHYKDKLYRSASQALQAYIDDFDLGQIYPGASTGKINIDEDFTNMSQFCNYIYKPNNAFENLDHKKHSNFISCRRHTVNDIDSMSLTTDDLLRLPADGSFSYTYVGPSHPTSKKNKKCRGRLGSLDIEKNPHFQGPYTSMGKDNFVTPVIRSNINGKQCGDKIELLILKAKRNLEQCTEELPKSMKKDDSPCSLDKLEADRSWENIPVTFKSPVPVNSDDSPQQTSRAKSAKGVLEDFLNNDNQSCTLSGGKHHGPVEALKQMLFNLQAVQERFNQNKTTDPKEEIKQVSEDDFSKLQLKESMIPITRSLQKALHHLSRLRDLVDDTNGERSPKM

SEQ ID NO: 749834 - protein, 372 aa, Homo sapiens; identical to SEQ ID NO: 749833

SEQ ID NO: 749835 - protein, 492 aa, Homo sapiens
PSEPVVPAVMMATHEPSADLAPKKKPRKSSMPVKIEKEIIDTADEFDDEDDDPNDGGAVVNDMSHDNHCHSQEEMSPGMSVKDFSKHNRTRCISRTEIRRADSMTSEDQEPERDYENESESSEPKLGEESMEGDEHIHSEVSEKVLMNSERPDENHSEPSHQDVIKVKEEFTDPTYDMFYMSQYGLYNGGGASMAALHESFTSSLNYGSPQKFSPEGDLCSSPDPKICYVCKKSFKSSYSVKLHYRNVHLKEMHVCTVAGCNAAFPSRRSRDRHSANINLHRKLLTKELDDMGLDSSQPSLSKDLRDEFLVKIYGAQHPMGLDVREDASSPAGTEDSHLNGYGRGMAEDYMVLDLSTTSSLQSSSSIHSSRESDAGSDEGILLDDIDGASDSGESAHKAEAPALPGSLGAEVSGSLMFSSLSGSNGGIMCNICHKMYSNKGTLRVHYKTVHLREMHKCKVPGCNMMFSSVRSRNRHSQNPNLHKNIPFTSVD

SEQ ID NO: 749836 - protein, 492 aa, Homo sapiens; identical to SEQ ID NO: 749835

SEQ ID NO: 749837 - protein, 73 aa, Homo sapiens
QMKNLKNTLYEEHTESISSTESVFQILHWDIKILAKFLSVLYMSVYFSLWFLQICNCLCFRSISITSLWSIVK

SEQ ID NO: 749838 - protein, 266 aa, Homo sapiens
MDGPTRGHGLRKKRRSRSQRDRERRSRGGLGAGAAGGGGAGRTRALSLASSSGSDKEDNGKPPSSAPSRPRPPRRKRRESTSAEEDIIDGFAMTSFVTFEALEKDVALKPQERVEKRQTPLTKKKREALTNGLSFHSKKSRLSHPHHYSSDRENDRNLCQHLGKRKKMPKALRQLKPGQNSCRDSDSESASGESKGFHRSSSRERLSDSSAPSSLGTGYFRSGKMCLGEEACLKSGNDMKRDVSNTSSWASNRESFFSLVKLLKGF

SEQ ID NO: 749839 - protein, 266 aa, Homo sapiens; identical to SEQ ID NO: 749838

SEQ ID NO: 749840 - protein, 266 aa, Homo sapiens; identical to SEQ ID NO: 749838

SEQ ID NO: 749841 - protein, 83 aa, Homo sapiens
VYDYSAADEDEVSFQDGDTIVNVQQIDDGWMYGTVERTGDTGMLPANYVEATEPAAPPSVFSTFHGIASVLGVTRPFFSVSVF

SEQ ID NO: 749842 - protein, 85 aa, Homo sapiens
AARVARPRPGPYLATTRCAFSETFPEVGAPRLDHSLSSSSAARASASEGARAWVRNRQLPGAGSLKRFSKGPLPSFLSTRPEGVL

SEQ ID NO: 749843 - protein, 249 aa, Homo sapiens
MASEGRKVKVRAGAQEEASARTRNRDTPQPSCEGQPTGDFQPPWRSLHPRTFTYPRREAERHFATVSISAVELKYCHGWRPAGQRVPSKTATGQRTCAKPCQKPSTSKVILRAVADKGTCKYVSLATLKKAVSTTGYDMARNAYHFKRVLKGLVDKGSAGDRQGGLRLLHPGQEAGLQVQAQGQEATTAEVALWAAPLWTAQVTTGLQTGAQAAYQGGSKGGQVPLQLMRQARQAVRGAKTAIGSVQWE

SEQ ID NO: 749844 - protein, 365 aa, Homo sapiens
MENSRKGGGFIWIFNFCCNLRILGPFWDLSPISWQDFLSPEYSRFSLLFFFFPQHLNSQLPRLSPMTELGGWRRRGVARKLAGWGEETVCGAGVSVGRVGENARLPSSPASTRGGLRGRLREQGKGEGRSSRGSLSEDQEPGHTSAICEGQPTGDFQPPWRSLHPRTFTYPRREAERHFATVSISAVELKYCHGWRPAGQRVPSKTATGQRTCAKPCQKPSTSKVILRAVADKGTCKYVSLATLKKAVSTTGYDMARNAYHFKRVLKGLVDKGSAGDRQGGLRLLHPGQEAGLQVQAQGQEATTAEVALWAAPLWTAQVTTGLQTGAQAAYQGGSKGGQVPLQLMRQARQAVRGAKTAIGSVQWE

SEQ ID NO: 749845 - protein, 87 aa, Homo sapiens
METAVIGVVVVLFVVTVAITCVLCCFSCDSRAQDPQGGPGRSFTVATFRQEASLFTGLFAMPSQCQVPRTSGPSCDARVPRICCADG

SEQ ID NO: 749846 - protein, 114 aa, Homo sapiens
METAVIGVVVVLFVVTVAITCVLCCFSCDSRAQDPQGGPGRSFTVATFRQEASLFTGPVRHAQPVPSAQDFWTFIVTPESPGFAVLMGQTHPLLSKPSLAFPSSQGLLPVLPLQ

SEQ ID NO: 749847 - protein, 114 aa, Homo sapiens
YTQLRKTSFIRPQPHLCQELMSTWDNRLGTNCDPTRCLKHPPLTLLAGLCLPYGHCAWEGGKVAACVLPSTAPPFPFVRLMINPQKLSGWARWLTPIIPALWEAEARGSLEFRS

SEQ ID NO: 749848 - protein, 119 aa, Homo sapiens [sequence omitted]

SEQ ID NO: 749849 - protein, 189 aa, Homo sapiens
GSKDRTHPCHKRSTGRGVGVGAALRVSRPKPHSHSSLGRKGRVPGVSWWVSQELPLPGSHRTGMTDQGTAGSCHLWGQNMPSLRGLSIGVFESQTACLVLHTWLCSVQNPAHVILCDMPAAWLPGQEACPGGGAAGGGGAGTHESVQPCHRCIAQPAVLISAHLRVNQNKLHPDFHECMLTLSVHPFLC

SEQ ID NO: 749850 - protein, 66 aa, Homo sapiens
PCSPGMGLTTDSEGTASGAEAGREGHWAWGTHGEFSREIAAVNTWSPGLGVACGVQWPHALCPYDD

SEQ ID NO: 749851 - protein, 203 aa, Homo sapiens
MDRIYKNVMNKVSEMSSFQRNLFILAYNYKMEQISKGRNTPLCDSFVFRKVRSLLGGNIRLLLCGGAPLSATTQRFMNICFCCPVGQGYGLTESAGAGTISEVWDYNTGRVGAPLVCCEIKLKNWEEGGYFNTDKPHPRGEILIGGQSVTMGYYKNEAKTKADFFEDENGQRWLCTGDIGEFEPDGCLKIIEIWFEFAELPLS

SEQ ID NO: 749852 - protein, 720 aa, Homo sapiens
MNNHVSSKPSTMKLKHTINPILLYFIHFLISLYTILTYIPFYFFSESRQEKSNRIKAKPVNSKPDSAYRSVNSLDGLASVLYPGCDTLDKVFTYAKNKFKNKRLLGTREVLNEEDEVQPNGKIFKKVILGQYNWLSYEDVFVRAFNFGNGLQMLGQKPKTNIAIFCETRAEWMIAAQACFMYNFQLVTLYATLGGPAIVHALNETEVTNIITSKELLQTKLKDIVSLVPRLRHIITVDGKPPTWSEFPKGIIVHTMAAVEALGAKASMENQPHSKPLPSDIAVIMYTSGSTGLPKGVMISHSNIIAGITGMAERIPELGEEDVYIGYLPLAHVLELSAELVCLSHGCRIGYSSPQTLADQSSKIKKGSKGDTSMLKPTLMAAVPEIMDRIYKNVMNKVSEMSSFQRNLFILAYNYKMEQISKGRNTPLCDSFVFRKVRSLLGGNIRLLLCGGAPLSATTQRFMNICFCCPVGQGYGLTESAGAGTISEVWDYNTGRVGAPLVCCEIKLKNWEEGGYFNTDKPHPRGEILIGGQSVTMGYYKNEAKTKADFFEDENGQRWLCTGDIGEFEPDGCLKIIDRKKDLVKLQAGEYVSLGKVEAALKNLPLVDNICAYANSYHSYVIGFVVPNQKELTELARKKGLKGTWEELCNSCEMENEVLKVLSEAAISASLEKFEIPVKIRLSPEPWTPETGLVTDAFKLKRKELKTHYQADIERMYGRK

SEQ ID NO: 749853 - protein, 720 aa, Homo sapiens; identical to SEQ ID NO: 749852

SEQ ID NO: 749854 - protein, 720 aa, Homo sapiens; identical to SEQ ID NO: 749852

SEQ ID NO: 749855 - protein, 720 aa, Homo sapiens; identical to SEQ ID NO: 749852

SEQ ID NO: 749856 - protein, 465 aa, Homo sapiens
MAAVEALGAKASMENQPHSKPLPSDIAVIMYTSGSTGLPKGVMISHSNIIAGITGMAERIPELGEEDVYIGYLPLAHVLELSAELVCLSHGCRIGYSSPQTLADQSSKIKKGSKGDTSMLKPTLMAAVPEIMDRIYKNVMNKVSEMSSFQRNLFILAYNYKMEQISKGRNTPLCDSFVFRKVRSLLGGNIRLLLCGGAPLSATTQRFMNICFCCPVGQGYGLTESAGAGTISEVWDYNTGRVGAPLVCCEIKLKNWEEGGYFNTDKPHPRGEILIGGQSVTMGYYKNEAKTKADFFEDENGQRWLCTGDIGEFEPDGCLKIIDRKKDLVKLQAGEYVSLGKVEAALKNLPLVDNICAYANSYHSYVIGFVVPNQKELTELARKKGLKGTWEELCNSCEMENEVLKVLSEAAISASLEKFEIPVKIRLSPEPWTPETGLVTDAFKLKRKELKTHYQADIERMYGRK

SEQ ID NO: 749857 - protein, 491 aa, Homo sapiens
LTLFRPLLNETLQRRSPGFSIQIASIVIFSPCLASVFFIENQPHSKPLPSDIAVIMYTSGSTGLPKGVMISHSNIIAGITGMAERIPELGEEDVYIGYLPLAHVLELSAELVCLSHGCRIGYSSPQTLADQSSKIKKGSKGDTSMLKPTLMAAVPEIMDRIYKNVMNKVSEMSSFQRNLFILAYNYKMEQISKGRNTPLCDSFVFRKVRSLLGGNIRLLLCGGAPLSATTQRFMNICFCCPVGQGYGLTESAGAGTISEVWDYNTGRVGAPLVCCEIKLKNWEEGGYFNTDKPHPRGEILIGGQSVTMGYYKNEAKTKADFFEDENGQRWLCTGDIGEFEPDGCLKIIDRKKDLVKLQAGEYVSLGKVEAALKNLPLVDNICAYANSYHSYVIGFVVPNQKELTELARKKGLKGTWEELCNSCEMENEVLKVLSEAAISASLEKFEIPVKIRLSPEPWTPETGLVTDAFKLKRKELKTHYQADIERMYGRK

SEQ ID NO: 749858 - protein, 588 aa, Homo sapiens
MNNHVSSKPSTMKLKHTINPILLYFIHFLISLYTILTYIPFYFFSESRQEKSNRIKAKPVNSKPDSAYRSVNSLDGLASVLYPGCDTLDKVFTYAKNKFKNKRLLGTREVLNEEDEVQPNGKIFKKVILGQYNWLSYEDVFVRAFNFGNGLQMLGQKPKTNIAIFCETRAEWMIAAQACFMYNFQLVTLYATLGGPAIVHALNETEVTNIITSKELLQTKLKDIVSLVPRLRHIITVDGKPPTWSEFPKGIIVHTMAAVEALGAKASMENQPHSKPLPSDIAVIMYTSGSTGLPKGVMISHSNIIAGITGMAERIPELGEEDVYIGYLPLAHVLELSAELVCLSHGCRIGYSSPQTLADQSSKIKKGSKGDTSMLKPTLMAAVPEIMDRIYKNVMNKVSEMSSFQRNLFILAYNYKMEQISKGRNTPLCDSFVFRKVRSLLGGNIRLLLCGGAPLSATTQRFMNICFCCPVGQGYGLTESAGAGTISEVWDYNTGRVGAPLVCCEIKLKNWEEGGYFNTDKPHPRGEILIGGQSVTMGYYKNEAKTKADFFEDENGQRWLCTGDIGEFEPDGCLKIIDRKAAFEEIFT

SEQ ID NO: 749859 - protein, 258 aa, Homo sapiens [sequence omitted]

SEQ ID NO: 749860 - protein, 720 aa, Homo sapiens; identical to SEQ ID NO: 749852

SEQ ID NO: 749861 - protein, 720 aa, Homo sapiens; identical to SEQ ID NO: 749852

SEQ ID NO: 749862 - protein, 720 aa, Homo sapiens; identical to SEQ ID NO: 749852

SEQ ID NO: 749863 - protein, 692 aa, Homo sapiens
MNNHVSSKPSTMKLKHTINPILLYFIHFLISLYTILTYIPFYFFSESRQEKSNRIKAKPVNSKPDSAYRSVNSLDGLASVLYPGCDTLDKVFTYAKNKFKNKRLLGTREVLNEEDEVQPNGKIFKKVILGQYNWLSYEDVFVRAFNFGNGLQMLGQKPKTNIAIFCETRAEWMIAAQACFMYNFQLVTLYATLGGPAIVHALNETEVTNIITSKELLQTKLKDIVSLVPRLRHIITVDGKPPTWSEFPKGIIVHTMAAVEALGAKASMENQPHSKPLPSDIAVIMYTSGSTGLPKGVMISHSNIIAGITGMAERIPELGEEDVYIGYLPLAHVLELSAELVCLSHGCRIGYSSPQTLADQSSKIKKGSKGDTSMLKPTLMAAVPEIMDRIYKNVMNKVSEMSSFQRNLFILAYNYKMEQISKGRNTPLCDSFVFRKVRSLLGGNIRLLLCGGAPLSATTQRFMNICFCCPVGQGYGLTESAGAGTISEVWDYNTGRVGAPLVCCEIKLKNWEEGGYFNTDKPHPRGEILIGGQSVTMGYYKNEAKTKADFFEDENGQRWLCTGDIGEFEPDGCLKIIDRKKDLVKLQAGEYVSLGKVEAALKNLPLVDNICAYANSYHSYVIGFVVPNQKELTELARKKGLKGTWEELCNSCEMENEVLKVLSEAAISGEYSVKLILKTEMGREYLHAFNLF

SEQ ID NO: 749864 - protein, 187 aa, Homo sapiens [sequence omitted]

SEQ ID NO: 749865 - protein, 265 aa, Homo sapiens
PTVELRLQGINLGLEDDGVADESVKGLESQVLDKEEEQPLWAANENSVQMMRSEINTEVNEKAGLLPCPEPTIISAILKDDNHSLTFFPESTEQKQSDIKKPENTQPENKETISQATSEKLPMILTQRSVALGQDKVALQKLNDAATKLQACWRGFYARNYNPQAKDVRYEIRLRRMQEHIVCLTDEIRRLRKERDEERIKKFVQEEAFRFLWEPGKVSTGLATDSGPASKFLGILMFLLYQVLLCHRNIHYLPKARSPLVIKML

SEQ ID NO: 749866 - protein, 103 aa, Homo sapiens
RRLSQVAERPSATSSLLFPLLADSAKPDCLLTLVSMPQPLGGFPAVSPCPLPSPGVLRASSLAAGSWALFPCWHQGLESLFLPHLLTLVKAHHSTSAKELQAL

SEQ ID NO: 749867 - protein, 38 aa, Homo sapiens
METVPPSSPLPSSSSSSSSSVYLKFEFYLRNISWNADI

SEQ ID NO: 749868 - protein, 153 aa, Homo sapiens
MGQTKEAEKMTNHIVSEETGCLECYRLLSAIYSKQENHDKALDAIDKALQLKPKDPKVISELFFTKGNQLREQNLLDKAFESYRVAVQLNPDQAQAWMNMGGIQHIKGKYVSARAYYERALQLVPDSKLLKENLAKLDRLEKRLQEVREKDQT

SEQ ID NO: 749869 - protein, 153 aa, Homo sapiens; identical to SEQ ID NO: 749868

SEQ ID NO: 749870 - protein, 230 aa, Homo sapiens
MVNLGRLYRSLGENSMAEEWYKRALQVAHKAEILSPLGALYYNTGRYEEALQIYQEAAALQPSQRELRLALAQVLAVMGQTKEAEKMTNHIVSEETGCLECYRLLSAIYSKQENHDKALDAIDKALQLKPKDPKVISELFFTKGNQLREQNLLDKAFESYRVAVQLNPDQAQAWMNMGGIQHIKGKYVSARAYYERALQLVPDSKLLKENLAKLDRLEKRLQEVREKDQT

SEQ ID NO: 749871 - protein, 153 aa, Homo sapiens; identical to SEQ ID NO: 749868

SEQ ID NO: 749872 - protein, 109 aa, Homo sapiens
GWELVLEGPLPSPDTMARLGIEASVTSMQLCALGKPRTMLLGAQSTCIKFELSLVRHLSDGQEAPGWKPCRSKRTASKSSGRYCQVGLQKEIYKAAHAVAHACNPSTLG

SEQ ID NO: 749873 - protein, 137 aa, Homo sapiens
EPRSFKMTSLDKMDRSMPSEMESSRNDAKDDLGNLNVPDSSLPAENEATGPGLIPPPLAPISGPLFPVDTRGPFMRRGPPFPPPPPGTMFGASRGYFPPRDFPGPPHAPFAMRNIYPPRGLPPYLHPRPGFYPNPTF

SEQ ID NO: 749874 - protein, 102 aa, Homo sapiens
MCQCPQARLCRGGPWAPASRRCGGAGLGASCLAPLPVNPFSRLVWPTGLTLGCSPSDQESFVPGEDAPFVFTEDYKSGKFQNMMGLASSFLSEEAHVVDFAL

SEQ ID NO: 749875 - protein, 640 aa, Homo sapiens [sequence omitted]

SEQ ID NO: 749876 - protein, 143 aa, Homo sapiens
TVFIEPSKRVQMLLLHCSMWFIFWNFKHSFQRRMEETMKLATMEDTVEYCLFLIPDESRDSDKHKEILQKYIERIITRFAPMLVPYIWQNQPFNLKYKPGKGKALLLVWISVTFNVILTTVMCNSPRFIQCCQEEINTQKKSY

SEQ ID NO: 749877 - protein, 640 aa, Homo sapiens [sequence omitted]

SEQ ID NO: 749878 - protein, 640 aa, Homo sapiens [sequence omitted]

SEQ ID NO: 749879 - protein, 640 aa, Homo sapiens [sequence omitted]

SEQ ID NO: 749880 - protein, 386 aa, Homo sapiens
MTSVTFTKCLYAQLVQQRFVPDRRSGYRLPPPSDPQYRAHELGMKLAHGFEILCSKCSPHFSDCKKSLVTASPLWASFLESLKKNDYFKGLIEGSAQYRERLEMAENYFQLSVDWPESSLAMSPGEEILTLLQTIPFDIEDLKKEAANLPPEDDDQWLDLSPDQLDQLLQEAVGKKESESVSKEEKEQNYDLTEVSESMKAFISKVSTHKGAELPREPSEAPITFDADSFLNYFDKILGPRPNESDSDDLDDEDFECLDSDDDLDFETHEPGEEASLKGTLDNLKSYMAQMDQELAHTCISKSFTTRNQVEPVSQTTDNNSDEEDSGTGESVMAPVDVDLNLVSNILESYSSQAGLAGPASNLLQSMGVQLPDNTDHRPTSKPTKN

SEQ ID NO: 749881 - protein, 622 aa, Homo sapiens
MKLATMEDTVEYCLFLIPDESRDSDKHKEILQKYIERIITRFAPMLVPYIWQNQPFNLKYKPGKGGVPAHMFGVTKFGDNIEDEWFIVYVIKQITKEFPELVARIEDNDGEFLLIEAADFLPKWLDPENSTNRVFFCHGELCIIPAPRKSGAESWLPTTPPTIPQALNIITAHSEKILASESIRAAVNRRIRGYPEKIQASLHRAHCFLPAGIVAVLKQRPRLVAAAVQAFYLRDPIDLRACRVFKTFLPETRIMTSVTFTKCLYAQLVQQRFVPDRRSGYRLPPPSDPQYRAHELGMKLAHGFEILCSKCSPHFSDCKKSLVTASPLWASFLESLKKNDYFKGLIEGSAQYRERLEMAENYFQLSVDWPESSLAMSPGEEILTLLQTIPFDIEDLKKEAANLPPEDDDQWLDLSPDQLDQLLQEAVGKKESESVSKEEKEQNYDLTEVSESMKAFISKVSTHKGAELPREPSEAPITFDADSFLNYFDKILGPRPNESDSDDLDDEDFECLDSDDDLDFETHEPGEEASLKGTLDNLKSYMAQMDQELAHTCISNSDEEDSGTGESVMAPVDVDLNLVSNILESYSSQAGLAGPASNLLQSMGVQLPDNTDHRPTSKPTKN

SEQ ID NO: 749882 - protein, 527 aa, Homo sapiens
MVYCLCNKADHKGISRVSSKVFFCHGELCIIPAPRKSGAESWLPTTPPTIPQALNIITAHSEKILASESIRAAVNRRIRGYPEKIQASLHRAHCFLPAGIVAVLKQRPRLVAAAVQAFYLRDPIDLRACRVFKTFLPETRIMTSVTFTKCLYAQLVQQRFVPDRRSGYRLPPPSDPQYRAHELGMKLAHGFEILCSKCSPHFSDCKKSLVTASPLWASFLESLKKNDYFKGLIEGSAQYRERLEMAENYFQLSVDWPESSLAMSPGEEILTLLQTIPFDIEDLKKEAANLPPEDDDQWLDLSPDQLDQLLQEAVGKKESESVSKEEKEQNYDLTEVSESMKAFISKVSTHKGAELPREPSEAPITFDADSFLNYFDKILGPRPNESDSDDLDDEDFECLDSDDDLDFETHEPGEEASLKGTLDNLKSYMAQMDQELAHTCISKSFTTRNQVEPVSQTTDNNSDEEDSGTGESVMAPVDVDLNLVSNILESYSSQAGLAGPASNLLQSMGVQLPDNTDHRPTSKPTKN

SEQ ID NO: 749883 - protein, 670 aa, Homo sapiens
MKLATMEDTVEYCLFLIPDESRDSDKHKEILQKYIERIITRFAPMLVPYIWQNQPFNLKYKPGKGGVPAHMFGVTKFGDNIEDEWFIVYVIKQITKEFPELVARIEDNDGEFLLIEAADFLPKWLDPENSTNRVFFCHGELCIIPAPRKSGAESWLPTTPPTIPQALNIITAHSEKILASESIRAAVNRRIRGYPEKIQASLHRAHCFLPAGIVAVLKQRPRLVAAAVQAFYLRDPIDLRACRVFKTFLPETRIMTSVTFTKCLYAQLVQQRFVPDRRSGYRLPPPSDPQYRAHELGMKLAHGFEILCSKCSPHFSDCKKSLVTASPLWASFLESLKKNDYFKGLIEGSAQYRERLEMAENYFQLSVDWPESSLAMSPGEEILTLLQTIPFDIEDLKKEAANLPPEDDDQWLDLSPDQLDQLLQEAVGKKESESVSKEEKEQNYDLTEVSESMKAFISKVSTHKGAELPREPSEAPITFDADSFLNYFDKILGPRPNESDSDDLDDEDFECLDSDDDLDFETHEPGEEASLKGTLDNLKSYMAQMDQELAHTCISKSFTTRNQVEPVSQTTDNNSDEEDSGTGESVMAPVDVDLNLVSNILESYSSQAGLAGPASNLLQSMGVQLPDNTDHRPTNGVSLCCPGWSAVALSWLNASSTSRVHAILLPQPPE

SEQ ID NO: 749884 - protein, 570 aa, Homo sapiens
MFGVTKFGDNIEDEWFIVYVIKQITKEFPELVARIEDNDGEFLLIEAADFLPKWLDPENSTNRVFFCHGELCIIPAPRKSGAESWLPTTPPTIPQALNIITAHSEKILASESIRAAVNRRIRGYPEKIQASLHRAHCFLPAGIVAVLKQRPRLVAAAVQAFYLRDPIDLRACRVFKTFLPETRIMTSVTFTKCLYAQLVQQRFVPDRRSGYRLPPPSDPQYRAHELGMKLAHGFEILCSKCSPHFSDCKKSLVTASPLWASFLESLKKNDYFKGLIEGSAQYRERLEMAENYFQLSVDWPESSLAMSPGEEILTLLQTIPFDIEDLKKEAANLPPEDDDQWLDLSPDQLDQLLQEAVGKKESESVSKEEKEQNYDLTEVSESMKAFISKVSTHKGAELPREPSEAPITFDADSFLNYFDKILGPRPNESDSDDLDDEDFECLDSDDDLDFETHEPGEEASLKGTLDNLKSYMAQMDQELAHTCISKSFTTRNQVEPVSQTTDNNSDEEDSGTGESVMAPVDVDLNLVSNILESYSSQAGLAGPASNLLQSMGVQLPDNTDHRPTSKPTKN

SEQ ID NO: 749885 - protein, 360 aa, Homo sapiens
EVTMKKRSILLQVTNKPLTEAHGFEILCSKCSPHFSDCKKSLVTASPLWASFLESLKKNDYFKGLIEGSAQYRERLEMAENYFQLSVDWPESSLAMSPGEEILTLLQTIPFDIEDLKKEAANLPPEDDDQWLDLSPDQLDQLLQEAVGKKESESVSKEEKEQNYDLTEVSESMKAFISKVSTHKGAELPREPSEAPITFDADSFLNYFDKILGPRPNESDSDDLDDEDFECLDSDDDLDFETHEPGEEASLKGTLDNLKSYMAQMDQELAHTCISKSFTTRNQVEPVSQTTDNNSDEEDSGTGESVMAPVDVDLNLVSNILESYSSQAGLAGPASNLLQSMGVQLPDNTDHRPTSKPTKN

SEQ ID NO: 749886 - protein, 184 aa, Homo sapiens
AQLWSQLLGRLRWEEPSEAPITFDADSFLNYFDKILGPRPNESDSDDLDDEDFECLDSDDDLDFETHEPGEEASLKGTLDNLKSYMAQMDQELAHTCISKSFTTRNQVEPVSQTTDNNSDEEDSGTGESVMAPVDVDLNLVSNILESYSSQAGLAGPASNLLQSMGVQLPDNTDHRPTSKPTKN

SEQ ID NO: 749887 - protein, 153 aa, Homo sapiens
LGICVGPRPNESDSDDLDDEDFECLDSDDDLDFETHEPGEEASLKGTLDNLKSYMAQMDQELAHTCISKSFTTRNQVEPVSQTTDNNSDEEDSGTGESVMAPVDVDLNLVSNILESYSSQAGLAGPASNLLQSMGVQLPDNTDHRPTSKPTKN

SEQ ID NO: 749888 - protein, 83 aa, Homo sapiens
TASVARAMGRTLRGPHTQKVEPRPGYEDHPAVWRDEENEVQRDEVSCLKSVTESDQSWDVNPGLTLQSHMVDGTSEQHLNKGS

SEQ ID NO: 749889 - protein, 83 aa, Homo sapiens; identical to SEQ ID NO: 749888

SEQ ID NO: 749890 - protein, 107 aa, Homo sapiens
RPLATLGALKPEPSRARAAAAAAAAAHRSRAPSQRAGRGVGGGGPEGRGRARGRTRGLARKTGPSASREPLGDQAKWQFLPAGPQMGTSISLCSCKKLAAEPTCESL

SEQ ID NO: 749891 - protein, 107 aa, Homo sapiens; identical to SEQ ID NO: 749890

SEQ ID NO: 749892 - protein, 107 aa, Homo sapiens; identical to SEQ ID NO: 749890

SEQ ID NO: 749893 - protein, 261 aa, Homo sapiens
MSGEIAMCEPEFGNDKAREPSVGGRWRVSWYERFVQPCLVELLGSALFIFIGCLSVIENGTDTGLLQPALAHGLALGLVIATLGNISGGHFNPAVSLAAMLIGGLNLVMLLPYWVSQLLGGMLGAALAKAVSPEERFWNASGAAFVTVQEQGQVAGALVAEIILTTLLALAVCMGAINEKTKGPLAPFSIGFAVTVDILAGGPVSGGCMNPARAFGPAVVANHWNFHWIYWLGPLLAGLLVGLLIRCFIGDGKTRLILKAR

SEQ ID NO: 749894 - protein, 75 aa, Homo sapiens
  misc_feature (12)..(12): Xaa can be any naturally occurring amino acid
LIFSDITQGKKXPPLGPVSGGCMNPARAFGPAVVANHWNFHWIYWLGPLLAGLLVGLLIRCFIGDGKTRLILKAR

SEQ ID NO: 749895 - protein, 76 aa, Homo sapiens
  misc_feature (13)..(13): Xaa can be any naturally occurring amino acid
HHPPPYRDAGQDXRPEGPVSGGCMNPARAFGPAVVANHWNFHWIYWLGPLLAGLLVGLLIRCFIGDGKTRLILKAR

SEQ ID NO: 749896 - protein, 71 aa, Homo sapiens
PTSTPQRHPPSGPVSGGCMNPARAFGPAVVANHWNFHWIYWLGPLLAGLLVGLLIRCFIGDGKTRLILKAR

SEQ ID NO: 749897 - protein, 261 aa, Homo sapiens; identical to SEQ ID NO: 749893

SEQ ID NO: 749898 - protein, 192 aa, Homo sapiens [sequence omitted]

SEQ ID NO: 749899 - protein, 166 aa, Homo sapiens
MSKLGRAARGLRKPERGVSINQFCKEFNERTKDIKEGIPLPTKILVKPDRTFEIKIGQPTVSYFLKAAAGIEKGARQTGKEVAGLVTLKHVYEIARIKAQDEAFALQDVPLSSVVRSIIGSARSLGIRVVKDLSSEELAAFQKERAIFLAAQKEADLAAQEEAAKK

SEQ ID NO: 749900 - protein, 192 aa, Homo sapiens [sequence omitted]

SEQ ID NO: 749901 - protein, 192 aa, Homo sapiens [sequence omitted]

SEQ ID NO: 749902 - protein, 192 aa, Homo sapiens [sequence omitted]

SEQ ID NO: 749903 - protein, 166 aa, Homo sapiens; identical to SEQ ID NO: 749899

SEQ ID NO: 749904 - protein, 166 aa, Homo sapiens; identical to SEQ ID NO: 749899

SEQ ID NO: 749905 - protein, 181 aa, Homo sapiens
MSKLGRAARGLRKPEVGGVIRAIVRAGLAMPGPPLGPVLGQRGVSINQFCKEFNERTKDIKEGIPLPTKILVKPDRTFEIKIGQPTVSYFLKAAAGIEKGARQTGKEVAGLVTLKHVYEIARIKAQDEAFALQDVPLSSVVRSIIGSARSLGIRVVKERCSANVLRNGKISMKDPSGRSSV

SEQ ID NO: 749906 - protein, 181 aa, Homo sapiens; identical to SEQ ID NO: 749905

SEQ ID NO: 749907 - protein, 181 aa, Homo sapiens
MSKLGRAARGLRKPEVGGVIRAIVRAGLAMPGPPLGPVLGQRGVSINQFCKEFNERTKDIKEGIPLPTKILVKPDRTFEIKIGQPTVSYFLKAAAGIEKGARQTDVYEIARIKAQDEAFALQDVPLSSVVRSIIGSARSLGIRVVKDLSSEELAAFQKERAIFLAAQKEADLAAQEEAAKK

SEQ ID NO: 749908 - protein, 181 aa, Homo sapiens; identical to SEQ ID NO: 749907

SEQ ID NO: 749909 - protein, 156 aa, Homo sapiens
MSKLGRAARGLRKPEVGGVIRAIVRAGLAMPGPPLGPVLGQRGVSINQFCKEFNERTKDIKEGIPLPTKILVKPDRTFEIKIGQPTVSYFLKAAAGIEKGARQTEERGGRPGDLWALRVVKDLSSEELAAFQKERAIFLAAQKEADLAAQEEAAKK

SEQ ID NO: 749910 - protein, 121 aa, Homo sapiens
MLLTLSVLLCWVSADIRCHSCYKVPVLGCVDRQSCRLEPGQQCLTTHAYLGKMWVFSNLRCGTPEEPCQEAFNQTNRKLGLTYNTTCCNKDNCNSAGPRPTPALGLVFLTSLAGLGLWLLH

SEQ ID NO: 749911 - protein, 536 aa, Homo sapiens
MSPRVVSNSSVLASQSVGITNVRTVFSNVFNNTTAFPILRGSNCHKITAPGLGKGQLVNLLPPENLPWCGGSQGPRMLRTCYVLCSQAGPPSRGWQSLSFDGGAFHLKGTGELTRALLVLRLCAWPPLVTHGLLLQAWSRRLLGSRLSGAFLRASVYGQFVAGETAEEVKGCVQQLRTLSLRPLLAVPTEEEPDSAAKSGEAWYEGNLGAMLRCVDLSRGLLEPPSLAEASLMQLKVTALTSTRLCKELASWVRRPGASLELSPERLAEAMDSGQNLQVSCLNAEQNQHLRASLSRLHRVAQYARAQHVRLLVDAEYTSLNPALSLLVAALAVRWNSPGEGGPWVWNTYQACLKDTFERLGRDAEAAHRAGLAFGVKLVRGAYLDKERAVAQLHGMEDPTQPDYEATSQSYSRCLELMLTHVARHGPMCHLMVASHNEESVRQATKRMWELGIPLDGTVCFGQLLGMCDHVSLALGQAGYVVYKSIPYGSLEEVIPYLIRRAQENRSVLQGARREQELLSQELWRRLLPGCRRIPH

SEQ ID NO: 749912 - protein, 102 aa, Homo sapiens
MFSETEVSVPGGDWGVSPQPKPIPLSQKNTKNEKTKPTLPAGQAGYVVYKSIPYGSLEEVIPYLIRRAQENRSVLQGARREQELLSQELWRRLLPGCRRIPH

SEQ ID NO: 749913 - protein, 593 aa, Homo sapiens
MSPRVVSNSSVLASQSVGITNVRTVFSNVFNNTTAFPILRGSNCHKITAPGLGKGQLVNLLPPENLPWCGGSQGPRMLRTCYVLCSQAGPPSRGWQSLSFDGGAFHLKGTGELTRALLVLRLCAWPPLVTHGLLLQAWSRRLLGSRLSGAFLRASVYGQFVAGETAEEVKGCVQQLRTLSLRPLLAVPTEEEPDSAAKSGWVGSQGPGRLGGRRKGLCCSGPDTCWLGSEAWYEGNLGAMLRCVDLSRGLLEPPSLAEASLMQLKVTALTSTRLCVRSAKTGVRGGRGCPSGSPHHPPTTPFQKELASWVRRPGASLELSPERLAEAMDSGQNLQVSCLNAEQNQHLRASLSRLHRVAQYARAQHVRLLVDAEYTSLNPALSLLVAALAVRWNSPGEGGPWVWNTYQACLKDTFERLGRDAEAAHRAGLAFGVKLVRGAYLDKERAVAQLHGMEDPTQPDYEATSQSYSRCLELMLTHVARHGPMCHLMVASHNEESVRQATKRMWELGIPLDGTVCFGQLLGMCDHVSLALGQAGYVVYKSIPYGSLEEVIPYLIRRAQENRSVLQGARREQELLSQELWRRLLPGCRRIPH

SEQ ID NO: 749914 - protein, 565 aa, Homo sapiens
MSPRVVSNSSVLASQSVGITNVRTVFSNVFNNTTAFPILRGSNCHKITAPGLGKGQLVNLLPPENLPWCGGSQGPRMLRTCYVLCSQAGPPSRGWQSLSFDGGAFHLKGTGELTRALLVLRLCAWPPLVTHGLLLQAWSRRLLGSRLSGAFLRASVYGQFVAGETAEEVKGCVQQLRTLSLRPLLAVPTEEEPDSAAKSGWVGSQGPGRLGGRRKGLCCSGPDTCWLGSEAWYEGNLGAMLRCVDLSRGLLEPPSLAEASLMQLKVTALTSTRLCKELASWVRRPGASLELSPERLAEAMDSGQNLQVSCLNAEQNQHLRASLSRLHRVAQYARAQHVRLLVDAEYTSLNPALSLLVAALAVRWNSPGEGGPWVWNTYQACLKDTFERLGRDAEAAHRAGLAFGVKLVRGAYLDKERAVAQLHGMEDPTQPDYEATSQSYSRCLELMLTHVARHGPMCHLMVASHNEESVRQATKRMWELGIPLDGTVCFGQLLGMCDHVSLALGQAGYVVYKSIPYGSLEEVIPYLIRRAQENRSVLQGARREQELLSQELWRRLLPGCRRIPH

SEQ ID NO: 749915 - protein, 454 aa, Homo sapiens
MSPRVVSNSSVLASQSVGITNVRTVFSNVFNNTTAFPILRGSNCHKITAPGLGKGQLVNLLPPENLPWCGGSQGPRMLRTCYVLCSQAGPPSRGWQSLSFDGGAFHLKGTGELTRALLVLRLCAWPPLVTHGLLLQAWSRRLLGSRLSGAFLRASVYGQFVAGETAEEVKGCVQQLRTLSLRPLLAVPTEEEPDSAAKSGEAWYEGNLGAMLRCVDLSRGLLEPPSLAEASLMQLKVTALTSTRLCKELASWVRRPGASLELSPERLAEAMDSGQNLQVSCLNAEQNQHLRASLSRLHRVAQYARAQHVRLLVDAEYTSLNPALSLLVAALAVRWNSPGEGGPWVWNTYQACLKDTFERLGRDAEAAHRAGLAFGVKLVRGAYLDKERAVAQLHGMEDPTQPDYEATSQSYSRCLELMLTHVARHGPMCHLMVASHNEESVRQATKRAGRLCSV

SEQ ID NO: 749916 - protein, 477 aa, Homo sapiens
MSPRVVSNSSVLASQSVGITNVRTVFSNVFNNTTAFPILRGSNCHKITAPGLGKGQLVNLLPPENLPWCGGSQGPRMLRTCYVLCSQAGPPSRGWQSLSFDGGAFHLKGTGELTRALLVLRLCAWPPLVTHGLLLQAWSRRLLGSRLSGAFLRASVYGQFVAGETAEEVKGCVQQLRTLSLRPLLAVPTEEEPDSAAKSGEAWYEGNLGAMLRCVDLSRGLLEPPSLAEASLMQLKVTALTSTRLCKELASWVRRPGASLELSPERLAEAMDSGQNLQVSCLNAEQNQHLRASLSRLHRVAQYARAQHVRLLVDAEYTSLNPALSLLVAALAVRWNSPGEGGPWVWNTYQACLKDTFERLGRDAEAAHRAGLAFGVKLVRGAYLDKERAVAQLHGMEDPTQPDYEATSQSYSRCLELMLTHVARHGPMCHLMVASHNEESVRQATKRMWELGIPLDGTVCFGQLLGMCDHVSLALGM

SEQ ID NO: 749917 - protein, 496 aa, Homo sapiens
MGRGVRVLLLLSLLHCAGGSEGRKTWRRRGQQPPPPPRTEAAPAAGQPVESFPLDFTAVEGNMDSFMAQVKSLAQSLYPCSAQQLNEDLRLHLLLNTSVTCNDGSPAGYYLKESRGSRRWLLFLEGGWYCFNRENCDSRYDTMRRLMSSRDWPRTRTGTGILSSQPEENPYWWNANMVFIPYCSSDVWSGASSKSEKNEYAFMGALIIQEVVRELLGRGLSGAKVLLLAGSSAGGTGVLLNVDRVAEQLEKLGYPAIQVRGLADSGWFLDNKQYRHTDCVDTITCAPTEAIRRGIRYWNGVVPERCRRQFQEGEEWNCFFGYKVYPTLRCPVFVVQWLFDEAQLTVDNVHLTGQPVQEGLRLYIQNLGRELRHTLKDVPASFAPACLSHEIIIRSHWTDVQVKGTSLPRALHCWDRSLHDSHKASKTPLKGCPVHLVDSCPWPHCNPSCPTVRDQFTGQEMNVAQFLMHMGFDMQTVAQPQGLEPSELLGMLSNGS

SEQ ID NO: 749918 - protein, 496 aa, Homo sapiens; identical to SEQ ID NO: 749917

SEQ ID NO: 749919 - protein, 599 aa, Homo sapiens
  misc_feature (69)..(70): Xaa can be any naturally occurring amino acid
PPSPGGGGGTSNARAPGPPRPPQISPASAPAAHWRGPQPAHPDPALPSDGRARTPAAEADGTRPRAPRXXAGRAFSARPGGRERGLREQERLKAARSPQVDAAMGRGVRVLLLLSLLHCAGGSEGRKTWRRRGQQPPPPPRTEAAPAAGQPVESFPLDFTAVEGNMDSFMAQVKSLAQSLYPCSAQQLNEDLRLHLLLNTSVTCNDGSPAGYYLKESRGSRRWLLFLEGGWYCFNRENCDSRYDTMRRLMSSRDWPRTRTGTGILSSQPEENPYWWNANMVFIPYCSSDVWSGASSKSEKNEYAFMGALIIQEVVRELLGRGLSGAKVLLLAGSSAGGTGVLLNVDRVAEQLEKLGYPAIQVRGLADSGWFLDNKQYRHTDCVDTITCAPTEAIRRGIRYWNGVVPERCRRQFQEGEEWNCFFGYKVYPTLRCPVFVVQWLFDEAQLTVDNVHLTGQPVQEGLRLYIQNLGRELRHTLKDVPASFAPACLSHEIIIRSHWTDVQVKGTSLPRALHCWDRSLHDSHKASKTPLKGCPVHLVDSCPWPHCNPSCPTVRDQFTGQEMNVAQFLMHMGFDMQTVAQPQGLEPSELLGMLSNGS

SEQ ID NO: 749920 - protein, 393 aa, Homo sapiens
KSRRMSRIELEGVRLATIPGRRWYWFKRENVRLQIRGPCGASGGSRVTGRRFTRHLDPVLELSRTPLVDHIDVSFYTPTAPSDVLERVSSKSEKNEYAFMGALIIQEVVRELLGRGLSGAKVLLLAGSSAGGTGVLLNVDRVAEQLEKLGYPAIQVRGLADSGWFLDNKQYRHTDCVDTITCAPTEAIRRGIRYWNGVVPERCRRQFQEGEEWNCFFGYKVYPTLRCPVFVVQWLFDEAQLTVDNVHLTGQPVQEGLRLYIQNLGRELRHTLKDVPASFAPACLSHEIIIRSHWTDVQVKGTSLPRALHCWDRSLHDSHKASKTPLKGCPVHLVDSCPWPHCNPSCPTVRDQFTGQEMNVAQFLMHMGFDMQTVAQPQGLEPSELLGMLSNGS

SEQ ID NO: 749921 - protein, 124 aa, Homo sapiens
ACNPATPEAEAGESLEPGRQRLCHWTDVQVKGTSLPRALHCWDRSLHDSHKASKTPLKGCPVHLVDSCPWPHCNPSCPTVRDQFTGQEMNVAQFLMHMGFDMQTVAQPQGLEPSELLGMLSNGS

SEQ ID NO: 749922 - protein, 496 aa, Homo sapiens; identical to SEQ ID NO: 749917

SEQ ID NO: 749923 - protein, 403 aa, Homo sapiens
MGRGVRVLLLLSLLHCAGGSEGRKTWRRRGQQPPPPPRTEAAPAAGQPVESFPLDFTAVEGNMDSFMAQVKSLAQSLYPCSAQQLNEDLRLHLLLNTSVTCNDGSPAGYYLKESRGSRRWLLFLEGGWYCFNRENCDSRYDTMRRLMSSRDWPRTRTGTGILSSQPEENPYWWNANMVFIPYCSSDVWSGASSKSEKNEYAFMGALIIQEVVRELLGRGLSGAKVLLLAGSSAGGTGVLLNVDRVAEQLEKLGYPAIQVRGLADSGWFLDNKQYRHTDCVDTITCAPTEAIRRGIRYWNGVVPERCRRQFQEGEEWNCFFGYKVYPTLRCPVFVVQWLFDEAQLTVDNVHLTGQPVQEGLRLYIQNLGRELRHTLKDVPASFAPACLSHEIIIRRSVSLLRAA

SEQ ID NO: 749924 - protein, 222 aa, Homo sapiens
MGRGVRVLLLLSLLHCAGGSEGRKTWRRRGQQPPPPPRTEAAPAAGQPVESFPLDFTAVEGNMDSFMAQVKSLAQSLYPCSAQQLNEDLRLHLLLNTSVTCNDGSPAGYYLKESRGSRRWLLFLEGGWYCFNRENCDSRYDTMRRLMSSRDWPRTRTGTGILSSQPEENPYWWNANMVFIPYCSSDVWSGASSKSEKTLDSSVHQLRQHPPAPPIKPFYIIL

SEQ ID NO: 749925 - protein, 87 aa, Homo sapiens
LITFAVECNPVLGVTSPHICHILLVRSKSQVPCVLIRRELHEGMTRRQETTGVQVGVCSPLMGWEESTYQLPHLPLPTAKHLLTEYL

SEQ ID NO: 749926 - protein, 117 aa, Homo sapiens
FPLHSLLWPDSLVGSTLLHAHVSIVSEDQNCSPMKCSSRAFLYLGPSRMKLESSWLGLSSALPGVPGKWRTHIHCNIISWERFVSLKLSPPTFKVGNAQRYLCCTLAIFFLCEREHY

SEQ ID NO: 749927 - protein, 1270 aa, Homo sapiens
ELPGGSGVGAGSPASVNRDMEPPGGSLGPGRGTRDKKKGRSPDELPSAGGDGGKSKKFLERFTSMRIKKEKEKPNSAHRNSSASYGDDPTAQSLQDVSDEQVLVLFEQMLLDMNLNEEKQQPLREKDIIIKREMVSQYLYTSKAGMSQKESSKSAMMYIQELRSGLRDMPLLSCLESLRVSLNNNPVSWVQTFGAEGLASLLDILKRLHDEKEETAGSYDSRNKHEIIRCLKAFMNNKFGIKTMLETEEGILLLVRAMDPAVPNMMIDAAKLLSALCILPQPEDMNERVLEAMTERAEMDEVERFQPLLDGLKSGTTIALKVGCLQLINALITPAEELDFRVHIRSELMRLGLHQVLQDLREIENEDMRVQLNVFDEQGEEDSYDLKGRLDDIRMEMDDFNEVFQILLNTVKDSKAEPHFLSILQHLLLVRNDYEARPQYYKLIEECISQIVLHKNGADPDFKCRHLQIEIEGLIDQMIDKTKVEKSEAKAAELEKKLDSELTARHELQVEMKKMESDFEQKLQDLQGEKDALHSEKQQIATEKQDLEAEVSQLTGEVAKLTKELEDAKKEMASLSAAAITVPPSVPSRAPVPPAPPLPGDSGTIIPPPPAPGDSTTPPPPPPPPPPPPPLPGGTAISPPPPLSGDATIPPPPPLPEGVGIPSPSSLPGGTAIPPPPPLPGSARIPPPPPPLPGSAGIPPPPPPLPGEAGMPPPPPPLPGGPGIPPPPPFPGGPGIPPPPPGMGMPPPPPFGFGVPAAPVLPFGLTPKKLYKPEVQLRRPNWSKLVAEDLSQDCFWTKVKEDRFENNELFAKLTLTFSAQTKTSKAKKDQEGGEEKKSVQKKKVKELKVLDSKTAQNLSIFLGSFRMPYQEIKNVILEVNEAVLTESMIQNLIKQMPEPEQLKMLSELKDEYDDLAESEQFGVVMGTVPRLRPRLNAILFKLQFSEQVENIKPEIVSVTAACEELRKSESFSNLLEITLLVGNYMNAGSRNAGAFGFNISFLCKLRDTKSTDQKMTLLHFLAELCENDYPDVLKFPDELAHVEKASRVSAENLQKNLDQMKKQISDVERDVQNFPAATDEKDKFVEKMTSFVKDAQEQYNKLRMMHSNMETLYKELGEYFLFDPKKLSVEEFFMDLHNFRNMFLQAVKENQKRRETEEKMRRAKLAKEKAEKERLEKQQKREQLIDMNAEGDETGVMDSLLEALQSGAAFRRKRGPRQANRKAGCAVTSLLASELTKDDAMAAVPAKVSKNSETFPTILEEAKELVGRAS

SEQ ID NO: 749928 - protein, 1270 aa, Homo sapiens; identical to SEQ ID NO: 749927

SEQ ID NO: 749929 - protein, 1282 aa, Homo sapiens
ELPGGSGVGAGSPASVNRDMEPPGGSLGPGRGTRDKKKGRSPDELPSAGGDGGKSKKFLERFTSMRIKKEKEKPNSAHRNSSASYGDDPTAQSLQDVSDEQVLVLFEQMLLDMNLNEEKQQPLREKDIIIKREMVSQYLYTSKAGMSQKESSKSAMMYIQELRSGLRDMPLLSCLESLRVSLNNNPVSWVQTFGAEGLASLLDILKRLHDEKEETAGSYDSRNKHEIIRCLKAFMNNKFGIKTMLETEEGILLLVRAMDPAVPNMMIDAAKLLSALCILPQPEDMNERVLEAMTERAEMDEVERFQPLLDGLKSGTTIALKVGCLQLINALITPAEELDFRVHIRSELMRLGLHQVLQDLREIENEDMRVQLNVFDEQGEEDSYDLKGRLDDIRMEMDDFNEVFQILLNTVKDSKAEPHFLSILQHLLLVRNDYEARPQYYKLIEECISQIVLHKNGADPDFKCRHLQIEIEGLIDQMIDKTKVEKSEAKAAELEKKLDSELTARHELQVEMKKMESDFEQKLQDLQGEKDALHSEKQQIATEKQDLEAEVSQLTGEVAKLTKELEDAKKEMASLSAAAITVPPSVPSRAPVPPAPPLPGDSGTIIPPPPAPGDSTTPPPPPPPPPPPPPLPGGVCISSPPSLPGGTAISPPPPLSGDATIPPPPPLPEGVGIPSPSSLPGGTAIPPPPPLPGSARIPPPPPPLPGSAGIPPPPPPLPGEAGMPPPPPPLPGGPGIPPPPPFPGGPGIPPPPPGMGMPPPPPFGFGVPAAPVLPFGLTPKKLYKPEVQLRRPNWSKLVAEDLSQDCFWTKVKEDRFENNELFAKLTLTFSAQTKTSKAKKDQEGGEEKKSVQKKKVKELKVLDSKTAQNLSIFLGSFRMPYQEIKNVILEVNEAVLTESMIQNLIKQMPEPEQLKMLSELKDEYDDLAESEQFGVVMGTVPRLRPRLNAILFKLQFSEQVENIKPEIVSVTAACEELRKSESFSNLLEITLLVGNYMNAGSRNAGAFGFNISFLCKLRDTKSTDQKMTLLHFLAELCENDYPDVLKFPDELAHVEKASRVSAENLQKNLDQMKKQISDVERDVQNFPAATDEKDKFVEKMTSFVKDAQEQYNKLRMMHSNMETLYKELGEYFLFDPKKLSVEEFFMDLHNFRNMFLQAVKENQKRRETEEKMRRAKLAKEKAEKERLEKQQKREQLIDMNAEGDETGVMDSLLEALQSGAAFRRKRGPRQANRKAGCAVTSLLASELTKDDAMAAVPAKVSKNSETFPTILEEAKELVGRAS

SEQ ID NO: 749930 - protein, 990 aa, Homo sapiens
MTERAEMDEVERFQPLLDGLKSGTTIALKVGCLQLINALITPAEELDFRVHIRSELMRLGLHQVLQDLREIENEDMRVQLNVFDEQGEEDSYDLKGRLDDIRMEMDDFNEVFQILLNTVKDSKAEPHFLSILQHLLLVRNDYEARPQYYKLIEECISQIVLHKNGADPDFKCRHLQIEIEGLIDQMIDKTKVEKSEAKAAELEKKLDSELTARHELQVEMKKMESDFEQKLQDLQGEKDALHSEKQQIATEKQDLEAEVSQLTGEVAKLTKELEDAKKEMASLSAAAITVPPSVPSRAPVPPAPPLPGDSGTIIPPPPAPGDSTTPPPPPPPPPPPPPLPGGVCISSPPSLPGGTAISPPPPLSGDATIPPPPPLPEGVGIPSPSSLPGGTAIPPPPPLPGSARIPPPPPPLPGSAGIPPPPPPLPGEAGMPPPPPPLPGGPGIPPPPPFPGGPGIPPPPPGMGMPPPPPFGFGVPAAPVLPFGLTPKKLYKPEVQLRRPNWSKLVAEDLSQDCFWTKVKEDRFENNELFAKLTLTFSAQTKTSKAKKDQEGGEEKKSVQKKKVKELKVLDSKTAQNLSIFLGSFRMPYQEIKNVILEVNEAVLTESMIQNLIKQMPEPEQLKMLSELKDEYDDLAESEQFGVVMGTVPRLRPRLNAILFKLQFSEQVENIKPEIVSVTAACEELRKSESFSNLLEITLLVGNYMNAGSRNAGAFGFNISFLCKLRDTKSTDQKMTLLHFLAELCENDYPDVLKFPDELAHVEKASRVSAENLQKNLDQMKKQISDVERDVQNFPAATDEKDKFVEKMTSFVKDAQEQYNKLRMMHSNMETLYKELGEYFLFDPKKLSVEEFFMDLHNFRNMFLQAVKENQKRRETEEKMRRAKLAKEKAEKERLEKQQKREQLIDMNAEGDETGVMDSLLEALQSGAAFRRKRGPRQANRKAGCAVTSLLASELTKDDAMAAVPAKVSKNSETFPTILEEAKELVGRAS

SEQ ID NO: 749931 - protein, 544 aa, Homo sapiens
GLPGNGGGGGIPGPSGMGMPPPPPFGFGVPAAPVLPFGLTPKKLYKPEVQLRRPNWSKLVAEDLSQDCFWTKVKEDRFENNELFAKLTLTFSAQTKTSKAKKDQEGGEEKKSVQKKKVKELKVLDSKTAQNLSIFLGSFRMPYQEIKNVILEVNEAVLTESMIQNLIKQMPEPEQLKMLSELKDEYDDLAESEQFGVVMGTVPRLRPRLNAILFKLQFSEQVENIKPEIVSVTAACEELRKSESFSNLLEITLLVGNYMNAGSRNAGAFGFNISFLCKLRDTKSTDQKMTLLHFLAELCENDYPDVLKFPDELAHVEKASRVSAENLQKNLDQMKKQISDVERDVQNFPAATDEKDKFVEKMTSFVKDAQEQYNKLRMMHSNMETLYKELGEYFLFDPKKLSVEEFFMDLHNFRNMFLQAVKENQKRRETEEKMRRAKLAKEKAEKERLEKQQKREQLIDMNAEGDETGVMDSLLEALQSGAAFRRKRGPRQANRKAGCAVTSLLASELTKDDAMAAVPAKVSKNSETFPTILEEAKELVGRAS

SEQ ID NO: 749932 - protein, 1270 aa, Homo sapiens; identical to SEQ ID NO: 749927

SEQ ID NO: 749933 - protein, 404 aa, Homo sapiens
MPYQEIKNVILEVNEAVLTESMIQNLIKQMPEPEQLKMLSELKDEYDDLAESEQFGVVMGTVPRLRPRLNAILFKLQFSEQVENIKPEIVSVTAACEELRKSESFSNLLEITLLVGNYMNAGSRNAGAFGFNISFLCKLRDTKSTDQKMTLLHFLAELCENDYPDVLKFPDELAHVEKASRVSAENLQKNLDQMKKQISDVERDVQNFPAATDEKDKFVEKMTSFVKDAQEQYNKLRMMHSNMETLYKELGEYFLFDPKKLSVEEFFMDLHNFRNMFLQAVKENQKRRETEEKMRRAKLAKEKAEKERLEKQQKREQLIDMNAEGDETGVMDSLLEALQSGAAFRRKRGPRQANRKAGCAVTSLLASELTKDDAMAAVPAKVSKNSETFPTILEEAKELVGRAS

SEQ ID NO: 749934 - protein, 463 aa, Homo sapiens
SDLPLSVILLLCLSKTSKAKKDQEGGEEKKSVQKKKVKELKVLDSKTAQNLSIFLGSFRMPYQEIKNVILEVNEAVLTESMIQNLIKQMPEPEQLKMLSELKDEYDDLAESEQFGVVMGTVPRLRPRLNAILFKLQFSEQVENIKPEIVSVTAACEELRKSESFSNLLEITLLVGNYMNAGSRNAGAFGFNISFLCKLRDTKSTDQKMTLLHFLAELCENDYPDVLKFPDELAHVEKASRVSAENLQKNLDQMKKQISDVERDVQNFPAATDEKDKFVEKMTSFVKDAQEQYNKLRMMHSNMETLYKELGEYFLFDPKKLSVEEFFMDLHNFRNMFLQAVKENQKRRETEEKMRRAKLAKEKAEKERLEKQQKREQLIDMNAEGDETGVMDSLLEALQSGAAFRRKRGPRQANRKAGCAVTSLLASELTKDDAMAAVPAKVSKNSETFPTILEEAKELVGRAS

SEQ ID NO: 749935 - protein, 192 aa, Homo sapiens
SWSWSFTPWLHSFVKDAQEQYNKLRMMHSNMETLYKELGEYFLFDPKKLSVEEFFMDLHNFRNMFLQAVKENQKRRETEEKMRRAKLAKEKAEKERLEKQQKREQLIDMNAEGDETGVMDSLLEALQSGAAFRRKRGPRQANRKAGCAVTSLLASELTKDDAMAAVPAKVSKNSETFPTILEEAKELVGRAS

SEQ ID NO: 749936 - protein, 111 aa, Homo sapiens
LGWKRKREWSDESEEEPEKELAPEPEETWVEGDETGVMDSLLEALQSGAAFRRKRGPRQANRKAGCAVTSLLASELTKDDAMAAVPAKVSKNSETFPTILEEAKELVGRAS

SEQ ID NO: 749937 - protein, 78 aa, Homo sapiens
ASTRWELSYCRPAGGANSLVIGGQEKANRKAGCAVTSLLASELTKDDAMAAVPAKVSKNSETFPTILEEAKELVGRAS

SEQ ID NO: 749938 - protein, 1034 aa, Homo sapiens
ELPGGSGVGAGSPASVNRDMEPPGGSLGPGRGTRDKKKGRSPDELPSAGGDGGKSKKFLERFTSMRIKKEKEKPNSAHRNSSASYGDDPTAQSLQDVSDEQVLVLFEQMLLDMNLNEEKQQPLREKDIIIKREMVSQYLYTSKAGMSQKESSKSAMMYIQELRSGLRDMPLLSCLESLRVSLNNNPVSWVQTFGAEGLASLLDILKRLHDEKEETAGSYDSRNKHEIIRCLKAFMNNKFGIKTMLETEEGILLLVRAMDPAVPNMMIDAAKLLSALCILPQPEDMNERVLEAMTERAEMDEVERFQPLLDGLKSGTTIALKVGCLQLINALITPAEELDFRVHIRSELMRLGLHQVLQDLREIENEDMRVQLNVFDEQGEEDSYDLKGRLDDIRMEMDDFNEVFQILLNTVKDSKAEPHFLSILQHLLLVRNDYEARPQYYKLIEECISQIVLHKNGADPDFKCRHLQIEIEGLIDQMIDKTKVEKSEAKAAELEKKLDSELTARHELQVEMKKMESDFEQKLQDLQGEKDALHSEKQQIATEKQDLEAEVSQLTGEVAKLTKELEDAKKEMASLSAAAITVPPSVPSRAPVPPAPPLPGDSGTIIPPPPAPGDSTTPPPPPPPPPPPPPLPGGVCISSPPSLPGGTAISPPPPLSGDATIPPPPPLPEGVGIPSPSSLPGGTAIPPPPPLPGSARIPPPPPPLPGSAGIPPPPPPLPGEAGMPPPPPPLPGGPGIPPPPPFPGGPGIPPPPPGMGMPPPPPFGFGVPAAPVLPFGLTPKKLYKPEVQLRRPNWSKLVAEDLSQDCFWTKVKEDRFENNELFAKLTLTFSAQTKTSKAKKDQEGGEEKKSVQKKKVKELKVLDSKTAQNLSIFLGSFRMPYQEIKNVILEVNEAVLTESMIQNLIKQMPEPEQLKMLSELKDEYDDLAESEQFGVVMGTVPRLRPRLNAILFKLQFSEQVENIKPEIVSVTAACEELRKSESFSNLLEITLLVGNYMNAGSRNAGAFGFNISFLCKLRDPSPQSRRSTQDPLER

SEQ ID NO: 749939 - protein, 759 aa, Homo sapiens
ELPGGSGVGAGSPASVNRDMEPPGGSLGPGRGTRDKKKGRSPDELPSAGGDGGKSKKFLERFTSMRIKKEKEKPNSAHRNSSASYGDDPTAQSLQDVSDEQVLVLFEQMLLDMNLNEEKQQPLREKDIIIKREMVSQYLYTSKAGMSQKESSKSAMMYIQELRSGLRDMPLLSCLESLRVSLNNNPVSWVQTFGAEGLASLLDILKRLHDEKEETAGSYDSRNKHEIIRCLKAFMNNKFGIKTMLETEEGILLLVRAMDPAVPNMMIDAAKLLSALCILPQPEDMNERVLEAMTERAEMDEVERFQPLLDGLKSGTTIALKVGCLQLINALITPAEELDFRVHIRSELMRLGLHQVLQDLREIENEDMRVQLNVFDEQGEEDSYDLKGRLDDIRMEMDDFNEVFQILLNTVKDSKAEPHFLSILQHLLLVRNDYEARPQYYKLIEECISQIVLHKNGADPDFKCRHLQIEIEGLIDQMIDKTKVEKSEAKAAELEKKLDSELTARHELQVEMKKMESDFEQKLQDLQGEKDALHSEKQQIATEKQDLEAEVSQLTGEVAKLTKELEDAKKEMASLSAAAITVPPSVPSRAPVPPAPPLPGDSGTIIPPPPAPGDSTTPPPPPPPPPPPPPLPGGVCISSPPSLPGGTAISPPPPLSGDATIPPPPPLPEGVGIPSPSSLPGGTAIPPPPPLPGSARIPPPPPPLPGSAGIPPPPPPLPGEAGMPPPPPPLPGGPGIPPPPPPCSLTSGALTLSFLIYFC

SEQ ID NO: 749940 - protein, 403 aa, Homo sapiens
ELPGGSGVGAGSPASVNRDMEPPGGSLGPGRETRDKKKGRSPDELPSAGGDGGKSKKFLERFTSMRIKKEKEKPNSAHRNSSASYGDDPTAQSLQDVSDEQVLVLFEQMLLDMNLNEEKQQPLREKDIIIKREMVSQYLYTSKAGMSQKESSKSAMMYIQELRSGLRDMPLLSCLESLRVSLNNNPVSWVQTFGAEGLASLLDILKRLHDEKEETAGSYDSRNKHEIIRCLKAFMNNKFGIKTMLETEEGILLLVRAMDPAVPNMMIDAAKLLSALCILPQPEDMNERVLEAMTERAEMDEVERFQPLLDGLKSGTTIALKVGCLQLINALITPAEELDFRVHIRSELMRLGLHQVLQDLREIENEDMRVQLNVFDEQGEEDSYDLKGRLDDIRMEMEYPFAD

SEQ ID NO: 749941 - protein, 319 aa, Homo sapiens
ELPGGSGVGAGSPASVNRDMEPPGGSLGPGRETRDKKKGRSPDELPSAGGDGGKSKKFLERFTSMRIKKEKEKPNSAHRNSSASYGDDPTAQSLQDVSDEQVLVLFEQMLLDMNLNEEKQQPLREKDIIIKREMVSQYLYTSKAGMSQKESSKSAMMYIQELRSGLRDMPLLSCLESLRVSLNNNPVSWVQTFGAEGLASLLDILKRLHDEKEETAGSYDSRNKHEIIRCLKAFMNNKFGIKTMLETEEGILLLVRAMDPAVPNMMIDAAKLLSALCILPQPEDMYVTGIIFLLHFQFYHFLLVQRTIELVGCPLGHKY

SEQ ID NO: 749942 - protein, 3266 aa, Homo sapiens
HSGPPPATALRHWFAGAFLLEVATAAGLSAGLTRLGSQVGGAMRRSKADVERYIASVQGSTPSPRQKSMKGFYFAKLYYEAKEYDLAKKYICTYINVQERDPKAHRFLGLLYELEENTDKAVECYRRSVELNPTQKDLVLKIAELLCKNDVTDGRAKYWLERAAKLFPGSPAIYKLKEQLLDCEGEDGWNKLFDLIQSELYVRPDDVHVNIRLVEVYRSTKRLKDAVAHCHEAERNIALRSSLEWNSCVVQTLKEYLESLQCLESDKSDWRATNTDLLLAYANLMLLTLSTRDVQESRELLQSFDSALQSVKSLGGNDELSATFLEMKGHFYMHAGSLLLKMGQHSSNVQWRALSELAALCYLIAFQVPRPKIKLIKGEAGQNLLEMMACDRLSQSGHMLLNLSRGKQDFLKEIVETFANKSGQSALYDALFSSQSPKDTSFLGSDDIGNIDVREPELEDLTRYDVGAIRAHNGSLQHLTWLGLQWNSLPALPGIRKWLKQLFHHLPHETSRLETNAPESICILDLEVFLLGVVYTSHLQLKEKCNSHHSSYQPLCLPLPVCKQLCTERQKSWWDAVCTLIHRKAVPGNVAKLRLLVQHEINTLRAQEKHGLQPALLVHWAECLQKTGSGLNSFYDQREYIGRSVHYWKKVLPLLKIIKKKNSIPEPIDPLFKHFHSVDIQASEIVEYEEDAHITFAILDAVNGNIEDAVTAFESIKSVVSYWNLALIFHRKAEDIENDALSPEEQEECKNYLRKTRDYLIKIIDDSDSNLSVVKKLPVPLESVKEMLNSVMQELEDYSEGGPLYKNGSLRNADSEIKHSTPSPTRYSLSPSKSYKYSPKTPPRWAEDQNSLLKMICQQVEAIKKEMQELKLNSSNSASPHRWPTENYGPDSVPDGYQGSQTFHGAPLTVATTGPSVYYSQSPAYNSQYLLRPAANVTPTKGPVYGMNRLPPQQHIYAYPQQMHTPPVQSSSACMFSQEMYGPPALRFESPATGILSPRGDDYFNYNVQQTSTNPPLPEPGYFTKPPIAAHASRSAESKTIEFGKTNFVQPMPGEGLRPSLPTQAHTTQPTPFKFNSNFKSNDGDFTFSSPQVVTQPPPAAYSNSESLLGLLTSDKPLQGDGYSGAKPIPGGQTIGPRNTFNFGSKNVSGISFTENMGSSQQKNSGFRRSDDMFTFHGPGKSVFGTPTLETANKNHETDGGSAHGDDDDDGPHFEPVVPLPDKIEVKTGEEDEEEFFCNRAKLFRFDVESKEWKERGIGNVKILRHKTSGKIRLLMRREQVLKICANHYISPDMKLTPNAGSDRSFVWHALDYADELPKPEQLAIRFKTPEEAALFKCKFEEAQSILKAPGTNVAMASNQAVRIVKEPTSHDNKDICKSDAGNLNFEFQVAKKEGSWWHCNSCSLKNASTAKKCVSCQNLNPSNKELVGPPLAETVFTPKTSPENVQDRFALVTPKKEGHWDCSICLVRNEPTVSRCIACQNTKSANKSGSSFVHQASFKFGQGDLPKPINSDFRSVFSTKEGQWDCSACLVQNEGSSTKCAACQNPRKQSLPATSIPTPASFKFGTSETSKTLKSGFEDMFAKKEGQWDCSSCLVRNEANATRCVACQNPDKPSPSTSVPAPASFKFGTSETSKAPKSGFEGMFTKKEGQWDCSVCLVRNEASATKCIACQNPGKQNQTTSAVSTPASSETSKAPKSGFEGMFTKKEGQWDCSVCLVRNEASATKCIACQNPGKQNQTTSAVSTPASSETSKAPKSGFEGMFTKKEGQWDCSVCLVRNEASATKCIACQCPSKQNQTTAISTPASSEISKAPKSGFEGMFIRKGQWDCSVCCVQNESSSLKCVACDASKPTHKPIAEAPSAFTLGSEMKLHDSSGSQVGTGFKSNFSEKASKFGNTEQGFKFGHVDQENSPSFMFQGSSNTEFKSTKEGFSIPVSADGFKFGISEPGNQEKKSEKPLENGTGFQAQDISGQKNGRGVIFGQTSSTFTFADLAKSTSGEGFQFGKKDPNFKGFSGAGEKLFSSQYGKMANKANTSGDFEKDDDAYKTEDSDDIHFEPVVQMPEKVELVTGEEDEKVLYSQRVKLFRFDAEVSQWKERGLGNLKILKNEVNGKLRMLMRREQVLKVCANHWITTTMNLKPLSGSDRAWMWLASDFSDGDAKLEQLAAKFKTPELAEEFKQKFEECQRLLLDIPLQTPHKLVDTGRAAKLIQRAEEMKSGLKDFKTFLTNDQTKVTEEENKGSGTGAAGASDTTIKPNPENTGPTLEWDNYDLREDALDDSVSSSSVHASPLASSPVRKNLFRFGESTTGFNFSFKSALSPSKSPAKLNQSGTSVGTDEESDVTQEEERDGQYFEPVVPLPDLVEVSSGEENEQVVFSHRAKLYRYDKDVGQWKERGIGDIKILQNYDNKQVRIVMRRDQVLKLCANHRITPDMTLQNMKGTERVWLWTACDFADGERKVEHLAVRFKLQDVADSFKKIFDEAKTAQEKDSLITPHVSRSSTPRESPCGKIAVAVLEETTRERTDVIQGDDVADATSEVEVSSTSETTPKAVVSPPKFVFGSESVKSIFSSEKSKPFAFGNSSATGSLFGFSFNAPLKSNNSETSSVAQSGSESKVEPKKCELSKNSDIEQSSDSKVKNLFASFPTEESSINYTFKTPEKAKEKKKPEDSPSDDDVLIVYELTPTAEQKALATKLKLPPTFFCYKNRPDYVSEEEEDDEDFETAVKKLNGKLYLDGSEKCRPLEENTADNEKECIIVWEKKPTVEEKAKADTLKLPPTFFCGVCSDTDEDNGNGEDFQSELQKVQEAQKSQTEEITSTTDSVYTGGTEVMVPSFCKSEEPDSITKSISSPSVSSETMDKPVDLSTRKEIDTDSTSQGESKIVSFGFGSSTGLSFADLASSNSGDFAFGSKDKNFQWANTGAAVFGTQSVGTQSAGKVGEDEDGSDEEVVHNEDIHFEPIVSLPEVEVKSGEEDEEILFKERAKLYRWDRDVSQWKERGVGDIKILWHTMKNYYRILMRRDQVFKVCANHVITKTMELKPLNVSNNALVWTASDYADGEAKVEQLAVRFKTKEVADCFKKTFEECQQNLMKLQKGHVSLAAELSKETNPVVFFDVCADGEPLGRITMELFSNIVPRTAENFRALCTGEKGFGFKNSIFHRVIPDFVCQGGDITKHDGTGGQSIYGDKFEDENFDVKHTGPGLLSMANQGQNTNNSQFVITLKKAEHLDFKHVVFGFVKDGMDTVKKIESFGSPKGSVCRRITITECGQI

SEQ ID NO: 749943 - protein, 3266 aa, Homo sapiens; identical to SEQ ID NO: 749942

SEQ ID NO: 749944 - protein, 234 aa, Homo sapiens [sequence omitted]

SEQ ID NO: 749945 - protein, 160 aa, Homo sapiens
  misc_feature (47)..(47): Xaa can be any naturally occurring amino acid
RCSSSQQQQSGVDAYAETTFFLYANGDVGQLTAIQQIAFSNRKERKXGVSSSWSGKQTMKPTETVVGLVPNSARDGDKFEDENFDVKHTGPGLLSMANQGQNTNNSQFVITLKKAEHLDFKHVVFGFVKDGMDTVKKIESFGSPKGSVCRRITITECGQI

SEQ ID NO: 749946 - protein, 139 aa, Homo sapiens
QSNSRNQSLSLQCICTGEKGFGFKNSIFHRVIPDFVCQGGDITKHDGTGGQSIYGDKFEDENFDVKHTGPGLLSMANQGQNTNNSQFVITLKKAEHLDFKHVVFGFVKDGMDTVKKIESFGSPKGSVCRRITITECGQI

SEQ ID NO: 749947 - protein, 2982 aa, Homo sapiens
MLLTLSTRDVQESRELLQSFDSALQSVKSLGGNDELSATFLEMKGHFYMHAGSLLLKMGQHSSNVQWRALSELAALCYLIAFQVPRPKIKLIKGEAGQNLLEMMACDRLSQSGHMLLNLSRGKQDFLKEIVETFANKSGQSALYDALFSSQSPKDTSFLGSDDIGNIDVREPELEDLTRYDVGAIRAHNGSLQHLTWLGLQWNSLPALPGIRKWLKQLFHHLPHETSRLETNAPESICILDLEVFLLGVVYTSHLQLKEKCNSHHSSYQPLCLPLPVCKQLCTERQKSWWDAVCTLIHRKAVPGNVAKLRLLVQHEINTLRAQEKHGLQPALLVHWAECLQKTGSGLNSFYDQREYIGRSVHYWKKVLPLLKIIKKKNSIPEPIDPLFKHFHSVDIQASEIVEYEEDAHITFAILDAVNGNIEDAVTAFESIKSVVSYWNLALIFHRKAEDIENDALSPEEQEECKNYLRKTRDYLIKIIDDSDSNLSVVKKLPVPLESVKEMLNSVMQELEDYSEGGPLYKNGSLRNADSEIKHSTPSPTRYSLSPSKSYKYSPKTPPRWAEDQNSLLKMICQQVEAIKKEMQELKLNSSNSASPHRWPTENYGPDSVPDGYQGSQTFHGAPLTVATTGPSVYYSQSPAYNSQYLLRPAANVTPTKGPVYGMNRLPPQQHIYAYPQQMHTPPVQSSSACMFSQEMYGPPALRFESPATGILSPRGDDYFNYNVQQTSTNPPLPEPGYFTKPPIAAHASRSAESKTIEFGKTNFVQPMPGEGLRPSLPTQAHTTQPTPFKFNSNFKSNDGDFTFSSPQVVTQPPPAAYSNSESLLGLLTSDKPLQGDGYSGAKPIPGGQTIGPRNTFNFGSKNVSGISFTENMGSSQQKNSGFRRSDDMFTFHGPGKSVFGTPTLETANKNHETDGGSAHGDDDDDGPHFEPVVPLPDKIEVKTGEEDEEEFFCNRAKLFRFDVESKEWKERGIGNVKILRHKTSGKIRLLMRREQVLKICANHYISPDMKLTPNAGSDRSFVWHALDYADELPKPEQLAIRFKTPEEAALFKCKFEEAQSILKAPGTNVAMASNQAVRIVKEPTSHDNKDICKSDAGNLNFEFQVAKKEGSWWHCNSCSLKNASTAKKCVSCQNLNPSNKELVGPPLAETVFTPKTSPENVQDRFALVTPKKEGHWDCSICLVRNEPTVSRCIACQNTKSANKSGSSFVHQASFKFGQGDLPKPINSDFRSVFSTKEGQWDCSACLVQNEGSSTKCAACQNPRKQSLPATSIPTPASFKFGTSETSKTLKSGFEDMFAKKEGQWDCSSCLVRNEANATRCVACQNPDKPSPSTSVPAPASFKFGTSETSKAPKSGFEGMFTKKEGQWDCSVCLVRNEASATKCIACQNPGKQNQTTSAVSTPASSETSKAPKSGFEGMFTKKEGQWDCSVCLVRNEASATKCIACQNPGKQNQTTSAVSTPASSETSKAPKSGFEGMFTKKEGQWDCSVCLVRNEASATKCIACQCPSKQNQTTAISTPASSEISKAPKSGFEGMFIRKGQWDCSVCCVQNESSSLKCVACDASKPTHKPIAEAPSAFTLGSEMKLHDSSGSQVGTGFKSNFSEKASKFGNTEQGFKFGHVDQENSPSFMFQGSSNTEFKSTKEGFSIPVSADGFKFGISEPGNQEKKSEKPLENGTGFQAQDISGQKNGRGVIFGQTSSTFTFADLAKSTSGEGFQFGKKDPNFKGFSGAGEKLFSSQYGKMANKANTSGDFEKDDDAYKTEDSDDIHFEPVVQMPEKVELVTGEEDEKVLYSQRVKLFRFDAEVSQWKERGLGNLKILKNEVNGKLRMLMRREQVLKVCANHWITTTMNLKPLSGSDRAWMWLASDFSDGDAKLEQLAAKFKTPELAEEFKQKFEECQRLLLDIPLQTPHKLVDTGRAAKLIQRAEEMKSGLKDFKTFLTNDQTKVTEEENKGSGTGAAGASDTTIKPNPENTGPTLEWDNYDLREDALDDSVSSSSVHASPLASSPVRKNLFRFGESTTGFNFSFKSALSPSKSPAKLNQSGTSVGTDEESDVTQEEERDGQYFEPVVPLPDLVEVSSGEENEQVVFSHRAKLYRYDKDVGQWKERGIGDIKILQNYDNKQVRIVMRRDQVLKLCANHRITPDMTLQNMKGTERVWLWTACDFADGERKVEHLAVRFKLQDVADSFKKIFDEAKTAQEKDSLITPHVSRSSTPRESPCGKIAVAVLEETTRERTDVIQGDDVADATSEVEVSSTSETTPKAVVSPPKFVFGSESVKSIFSSEKSKPFAFGNSSATGSLFGFSFNAPLKSNNSETSSVAQSGSESKVEPKKCELSKNSDIEQSSDSKVKNLFASFPTEESSINYTFKTPEKAKEKKKPEDSPSDDDVLIVYELTPTAEQKALATKLKLPPTFFCYKNRPDYVSEEEEDDEDFETAVKKLNGKLYLDGSEKCRPLEENTADNEKECIIVWEKKPTVEEKAKADTLKLPPTFFCGVCSDTDEDNGNGEDFQSELQKVQEAQKSQTEEITSTTDSVYTGGTEVMVPSFCKSEEPDSITKSISSPSVSSETMDKPVDLSTRKEIDTDSTSQGESKIVSFGFGSSTGLSFADLASSNSGDFAFGSKDKNFQWANTGAAVFGTQSVGTQSAGKVGEDEDGSDEEVVHNEDIHFEPIVSLPEVEVKSGEEDEEILFKERAKLYRWDRDVSQWKERGVGDIKILWHTMKNYYRILMRRDQVFKVCANHVITKTMELKPLNVSNNALVWTASDYADGEAKVEQLAVRFKTKEVADCFKKTFEECQQNLMKLQKGHVSLAAELSKETNPVVFFDVCADGEPLGRITMELFSNIVPRTAENFRALCTGEKGFGFKNSIFHRVIPDFVCQGGDITKHDGTGGQSIYGDKFEDENFDVKHTGPGLLSMANQGQNTNNSQFVITLKKAEHLDFKHVVFGFVKDGMDTVKKIESFGSPKGSVCRRITITECGQI

SEQ ID NO: 749948 - protein, 3266 aa, Homo sapiens; identical to SEQ ID NO: 749942

SEQ ID NO: 749949 - protein, 3248 aa, Homo sapiens
HSGPPPATALRHWFAGAFLLEVATAAGLSAGLTRLGSQVGGAMRRSKADVERYIASVQGSTPSPRQKSMKGFYFAKLYYEAKEYDLAKKYICTYINVQERDPKAHRFLGLLYELEENTDKAVECYRRSVELNPTQKDLVLKIAELLCKNDVTDGRAKYWLERAAKLFPGSPAIYKLKEQLLDCEGEDGWNKLFDLIQSELYVRPDDVHVNIRLVEVYRSTKRLKDAVAHCHEAERNIALRSSLEWNSCVVQTLKEYLESLQCLESDKSDWRATNTDLLLAYANLMLLTLSTRDVQESRELLQSFDSALQSVKSLGGNDELSATFLEMKGHFYMHAGSLLLKMGQHSSNVQWRALSELAALCYLIAFQVPRPKIKLIKGEAGQNLLEMMACDRLSQSGHMLLNLSRGKQDFLKEIVETFANKSGQSALYDALFSSQSPKDTSFLGSDDIGNIDVREPELEDLTRYDVGAIRAHNGSLQHLTWLGLQWNSLPALPGIRKWLKQLFHHLPHETSRLETNAPESICILDLEVFLLGVVYTSHLQLKEKCNSHHSSYQPLCLPLPVCKQLCTERQKSWWDAVCTLIHRKAVPGNVAKLRLLVQHEINTLRAQEKHGLQPALLVHWAECLQKTGSGLNSFYDQREYIGRSVHYWKKVLPLLKIIKKKNSIPEPIDPLFKHFHSVDIQASEIVEYEEDAHITFAILDAVNGNIEDAVTAFESIKSVVSYWNLALIFHRKAEDIENDALSPEEQEECKNYLRKTRDYLIKIIDDSDSNLSVVKKLPVPLESVKEMLNSVMQELEDYSEGGPLYKNGSLRNADSEIKHSTPSPTRYSLSPSKSYKYSPKTPPRWAEDQNSLLKMICQQVEAIKKEMQELKLNSSNSASPHRWPTENYGPDSVPDGYQGSQTFHGAPLTVATTGPSVYYSQSPAYNSQYLLRPAANVTPTKGPVYGMNRLPPQQHIYAYPQQMHTPPVQSSSACMFSQEMYGPPALRFESPATGILSPRGDDYFNYNVQQTSTNPPLPEPGYFTKPPIAAHASRSAESKTIEFGKTNFVQPMPGEGLRPSLPTQAHTTQPTPFKFNSNFKSNDGDFTFSSPQVVTQPPPAAYSNSESLLGLLTSDKPLQGDGYSGAKPIPGGQTIGPRNTFNFGSKNVSGISFTENMGSSQQKNSGFRRSDDMFTFHGPGKSVFGTPTLETANKNHETDGGSAHGDDDDDGPHFEPVVPLPDKIEVKTGEEDEEEFFCNRAKLFRFDVESKEWKERGIGNVKILRHKTSGKIRLLMRREQVLKICANHYISPDMKLTPNAGSDRSFVWHALDYADELPKPEQLAIRFKTPEEAALFKCKFEEAQSILKAPGTNVAMASNQAVRIVKEPTSHDNKDICKSDAGNLNFEFQVAKKEGSWWHCNSCSLKNASTAKKCVSCQNLNPSNKELVGPPLAETVFTPKTSPENVQDRFALVTPKKEGHWDCSICLVRNEPTVSRCIACQNTKSANKSGSSFVHQASFKFGQGDLPKPINSDFRSVFSTKEGQWDCSACLVQNEGSSTKCAACQNPRKQSLPATSIPTPASFKFGTSETSKTLKSGFEDMFAKKEGQWDCSSCLVRNEANATRCVACQNPDKPSPSTSVPAPASFKFGTSETSKAPKSGFEGMFTKKEGQWDCSVCLVRNEASATKCIACQNPGKQNQTTSAVSTPASSETSKAPKSGFEGMFTKKEGQWDCSVCLVRNEASATKCIACQNPGKQNQTTSAVSTPASSETSKAPKSGFEGMFTKKEGQWDCSVCLVRNEASATKCIACQCPSKQNQTTAISTPASSEISKAPKSGFEGMFIRKGQWDCSVCCVQNESSSLKCVACDASKPTHKPIAEAPSAFTLGSEMKLHDSSGSQVGTGFKSNFSEKASKFGNTEQGFKFGHVDQENSPSFMFQGSSNTEFKSTKEGFSIPVSADGFKFGISEPGNQEKKSEKPLENGTGFQAQDISGQKNGRGVIFGQTSSTFTFADLAKSTSGEGFQFGKKDPNFKGFSGAGEKLFSSQYGKMANKANTSGDFEKDDDAYKTEDSDDIHFEPVVQMPEKVELVTGEEDEKVLYSQRVKLFRFDAEVSQWKERGLGNLKILKNEVNGKLRMLMRREQVLKVCANHWITTTMNLKPLSGSDRAWMWLASDFSDGDAKLEQLAAKFLLLDIPLQTPHKLVDTGRAAKLIQRAEEMKSGLKDFKTFLTNDQTKVTEEENKGSGTGAAGASDTTIKPNPENTGPTLEWDNYDLREDALDDSVSSSSVHASPLASSPVRKNLFRFGESTTGFNFSFKSALSPSKSPAKLNQSGTSVGTDEESDVTQEEERDGQYFEPVVPLPDLVEVSSGEENEQVVFSHRAKLYRYDKDVGQWKERGIGDIKILQNYDNKQVRIVMRRDQVLKLCANHRITPDMTLQNMKGTERVWLWTACDFADGERKVEHLAVRFKLQDVADSFKKIFDEAKTAQEKDSLITPHVSRSSTPRESPCGKIAVAVLEETTRERTDVIQGDDVADATSEVEVSSTSETTPKAVVSPPKFVFGSESVKSIFSSEKSKPFAFGNSSATGSLFGFSFNAPLKSNNSETSSVAQSGSESKVEPKKCELSKNSDIEQSSDSKVKNLFASFPTEESSINYTFKTPEKAKEKKKPEDSPSDDDVLIVYELTPTAEQKALATKLKLPPTFFCYKNRPDYVSEEEEDDEDFETAVKKLNGKLYLDGSEKCRPLEENTADNEKECIIVWEKKPTVEEKAKADTLKLPPTFFCGVCSDTDEDNGNGEDFQSELQKVQEAQKSQTEEITSTTDSVYTGGTEVMVPSFCKSEEPDSITKSISSPSVSSETMDKPVDLSTRKEIDTDSTSQGESKIVSFGFGSSTGLSFADLASSNSGDFAFGSKDKNFQWANTGAAVFGTQSVGTQSAGKVGEDEDGSDEEVVHNEDIHFEPIVSLPEVEVKSGEEDEEILFKERAKLYRWDRDVSQWKERGVGDIKILWHTMKNYYRILMRRDQVFKVCANHVITKTMELKPLNVSNNALVWTASDYADGEAKVEQLAVRFKTKEVADCFKKTFEECQQNLMKLQKGHVSLAAELSKETNPVVFFDVCADGEPLGRITMELFSNIVPRTAENFRALCTGEKGFGFKNSIFHRVIPDFVCQGGDITKHDGTGGQSIYGDKFEDENFDVKHTGPGLLSMANQGQNTNNSQFVITLKKAEHLDFKHVVFGFVKDGMDTVKKIESFGSPKGSVCRRITITECGQI

SEQ ID NO: 749950 - protein, 2205 aa, Homo sapiens
ETESYSVARAGVQWRDLGSLQAPPPGFMPFSSLSLPSSWDYSNSESLLGLLTSDKPLQGDGYSGAKPIPGGQTIGPRNTFNFGSKNVSGISFTENMGSSQQKNSGFRRSDDMFTFHGPGKSVFGTPTLETANKNHETDGGSAHGDDDDDGPHFEPVVPLPDKIEVKTGEEDEEEFFCNRAKLFRFDVESKEWKERGIGNVKILRHKTSGKIRLLMRREQVLKICANHYISPDMKLTPNAGSDRSFVWHALDYADELPKPEQLAIRFKTPEEAALFKCKFEEAQSILKAPGTNVAMASNQAVRIVKEPTSHDNKDICKSDAGNLNFEFQVAKKEGSWWHCNSCSLKNASTAKKCVSCQNLNPSNKELVGPPLAETVFTPKTSPENVQDRFALVTPKKEGHWDCSICLVRNEPTVSRCIACQNTKSANKSGSSFVHQASFKFGQGDLPKPINSDFRSVFSTKEGQWDCSACLVQNEGSSTKCAACQNPRKQSLPATSIPTPASFKFGTSETSKTLKSGFEDMFAKKEGQWDCSSCLVRNEANATRCVACQNPDKPSPSTSVPAPASFKFGTSETSKAPKSGFEGMFTKKEGQWDCSVCLVRNEASATKCIACQNPGKQNQTTSAVSTPASSETSKAPKSGFEGMFTKKEGQWDCSVCLVRNEASATKCIACQNPGKQNQTTSAVSTPASSETSKAPKSGFEGMFTKKEGQWDCSVCLVRNEASATKCIACQCPSKQNQTTAISTPASSEISKAPKSGFEGMFIRKGQWDCSVCCVQNESSSLKCVACDASKPTHKPIAEAPSAFTLGSEMKLHDSSGSQVGTGFKSNFSEKASKFGNTEQGFKFGHVDQENSPSFMFQGSSNTEFKSTKEGFSIPVSADGFKFGISEPGNQEKKSEKPLENGTGFQAQDISGQKNGRGVIFGQTSSTFTFADLAKSTSGEGFQFGKKDPNFKGFSGAGEKLFSSQYGKMANKANTSGDFEKDDDAYKTEDSDDIHFEPVVQMPEKVELVTGEEDEKVLYSQRVKLFRFDAEVSQWKERGLGNLKILKNEVNGKLRMLMRREQVLKVCANHWITTTMNLKPLSGSDRAWMWLASDFSDGDAKLEQLAAKFKTPELAEEFKQKFEECQRLLLDIPLQTPHKLVDTGRAAKLIQRAEEMKSGLKDFKTFLTNDQTKVTEEENKGSGTGAAGASDTTIKPNPENTGPTLEWDNYDLREDALDDSVSSSSVHASPLASSPVRKNLFRFGESTTGFNFSFKSALSPSKSPAKLNQSGTSVGTDEESDVTQEEERDGQYFEPVVPLPDLVEVSSGEENEQVVFSHRAKLYRYDKDVGQWKERGIGDIKILQNYDNKQVRIVMRRDQVLKLCANHRITPDMTLQNMKGTERVWLWTACDFADGERKVEHLAVRFKLQDVADSFKKIFDEAKTAQEKDSLITPHVSRSSTPRESPCGKIAVAVLEETTRERTDVIQGDDVADATSEVEVSSTSETTPKAVVSPPKFVFGSESVKSIFSSEKSKPFAFGNSSATGSLFGFSFNAPLKSNNSETSSVAQSGSESKVEPKKCELSKNSDIEQSSDSKVKNLFASFPTEESSINYTFKTPEKAKEKKKPEDSPSDDDVLIVYELTPTAEQKALATKLKLPPTFFCYKNRPDYVSEEEEDDEDFETAVKKLNGKLYLDGSEKCRPLEENTADNEKECIIVWEKKPTVEEKAKADTLKLPPTFFCGVCSDTDEDNGNGEDFQSELQKVQEAQKSQTEEITSTTDSVYTGGTEVMVPSFCKSEEPDSITKSISSPSVSSETMDKPVDLSTRKEIDTDSTSQGESKIVSFGFGSSTGLSFADLASSNSGDFAFGSKDKNFQWANTGAAVFGTQSVGTQSAGKVGEDEDGSDEEVVHNEDIHFEPIVSLPEVEVKSGEEDEEILFKERAKLYRWDRDVSQWKERGVGDIKILWHTMKNYYRILMRRDQVFKVCANHVITKTMELKPLNVSNNALVWTASDYADGEAKVEQLAVRFKTKEVADCFKKTFEECQQNLMKLQKGHVSLAAELSKETNPVVFFDVCADGEPLGRITMELFSNIVPRTAENFRALCTGEKGFGFKNSIFHRVIPDFVCQGGDITKHDGTGGQSIYGDKFEDENFDVKHTGPGLLSMANQGQNTNNSQFVITLKKAEHLDFKHVVFGFVKDGMDTVKKIESFGSPKGSVCRRITITECGQI

SEQ ID NO: 749951 - protein, 3248 aa, Homo sapiens
HSGPPPATALRHWFAGAFLLEVATAAGLSAGLTRLGSQVGGAMRRSKADVERYIASVQGSTPSPRQKSMKGFYFAKLYYEAKEYDLAKKYICTYINVQERDPKAHRFLGLLYELEENTDKAVECYRRSVELNPTQKDLVLKIAELLCKNDVTDGRAKYWLERAAKLFPGSPAIYKLKEQLLDCEGEDGWNKLFDLIQSELYVRPDDVHVNIRLVEVYRSTKRLKDAVAHCHEAERNIALRSSLEWNSCVVQTLKEYLESLQCLESDKSDWRATNTDLLLAYANLMLLTLSTRDVQESRELLQSFDSALQSVKSLGGNDELSATFLEMKGHFYMHAGSLLLKMGQHSSNVQWRALSELAALCYLIAFQVPRPKIKLIKGEAGQNLLEMMACDRLSQSGHMLLNLSRGKQDFLKEIVETFANKSGQSALYDALFSSQSPKDTSFLGSDDIGNIDVREPELEDLTRYDVGAIRAHNGSLQHLTWLGLQWNSLPALPGIRKWLKQLFHHLPHETSRLETNAPESICILDLEVFLLGVVYTSHLQLKEKCNSHHSSYQPLCLPLPVCKQLCTERQKSWWDAVCTLIHRKAVPGNVAKLRLLVQHEINTLRAQEKHGLQPALLVHWAECLQKTGSGLNSFYDQREYIGRSVHYWKKVLPLLKIIKKKNSIPEPIDPLFKHFHSVDIQASEIVEYEEDAHITFAILDAVNGNIEDAVTAFESIKSVVSYWNLALIFHRKAEDIENDALSPEEQEECKNYLRKTRDYLIKIIDDSDSNLSVVKKLPVPLESVKEMLNSVMQELEDYSEGGPLYKNGSLRNADSEIKHSTPSPTRYSLSPSKSYKYSPKTPPRWAEDQNSLLKMICQQVEAIKKEMQELKLNSSNSASPHRWPTENYGPDSVPDGYQGSQTFHGAPLTVATTGPSVYYSQSPAYNSQYLLRPAANVTPTKGPVYGMNRLPPQQHIYAYPQQMHTPPVQSSSACMFSQEMYGPPALRFESPATGILSPRGDDYFNYNVQQTSTNPPLPEPGYFTKPPIAAHASRSAESKTIEFGKTNFVQPMPGEGLRPSLPTQAHTTQPTPFKFNSNFKSNDGDFTFSSPQVVTQPPPAAYSNSESLLGLLTSDKPLQGDGYSGAKPIPGGQTIGPRNTFNFGSKNVSGISFTENMGSSQQKNSGFRRSDDMFTFHGPGKSVFGTPTLETANKNHETDGGSAHGDDDDDGPHFEPVVPLPDKIEVKTGEEDEEEFFCNRAKLFRFDVESKEWKERGIGNVKILRHKTSGKIRLLMRREQVLKICANHYISPDMKLTPNAGSDRSFVWHALDYADELPKPEQLAIRFKTPEEAALFKCKFEEAQSILKAPGTNVAMASNQAVRIVKEPTSHDNKDICKSDAGNLNFEFQVAKKEGSWWHCNSCSLKNASTAKKCVSCQNLNPSNKELVGPPLAETVFTPKTSPENVQDRFALVTPKKEGHWDCSICLVRNEPTVSRCIACQNTKSANKSGSSFVHQASFKFGQGDLPKPINSDFRSVFSTKEGQWDCSACLVQNEGSSTKCAACQNPRKQSLPATSIPTPASFKFGTSETSKTLKSGFEDMFAKKEGQWDCSSCLVRNEANATRCVACQNPDKPSPSTSVPAPASFKFGTSETSKAPKSGFEGMFTKKEGQWDCSVCLVRNEASATKCIACQNPGKQNQTTSAVSTPASSETSKAPKSGFEGMFTKKEGQWDCSVCLVRNEASATKCIACQNPGKQNQTTSAVSTPASSETSKAPKSGFEGMFTKKEGQWDCSVCLVRNEASATKCIACQCPSKQNQTTAISTPASSEISKAPKSGFEGMFIRKGQWDCSVCCVQNESSSLKCVACDASKPTHKPIAEAPSAFTLGSEMKLHDSSGSQVGTGFKSNFSEKASKFGNTEQGFKFGHVDQENSPSFMFQGSSNTEFKSTKEGFSIPVSADGFKFGISEPGNQEKKSEKPLENGTGFQAQDISGQKNGRGVIFGQTSSTFTFADLAKSTSGEGFQFGKKDPNFKGFSGAGEKLFSSQYGKMANKANTSGDFEKDDDAYKTEDSDDIHFEPVVQMPEKVELVTGEEDEKVLYSQRVKLFRFDAEVSQWKERGLGNLKILKNEVNGKLRMLMRREQVLKVCANHWITTTMNLKPLSGSDRAWMWLASDFSDGDAKLEQLAAKFKTPELAEEFKQKFEECQRLLLDIPLQTPHKLVDTGRAAKLIQRAEEMKSGLKDFKTFLTNDQTKVTEEENKGSGTGAAGASDTTIKPNPENTGPTLEWDNYDLREDALDDSVSSSSVHASPLASSPVRKNLFRFGESTTGFNFSFKSALSPSKSPAKLNQSGTSVGTDEESDVTQEEERDGQYFEPVVPLPDLVEVSSGEENEQVVFSHRAKLYRYDKDVGQWKERGIGDIKILQNYDNKQVRIVMRRDQVLKLCANHRITPDMTLQNMKGTERVWLWTACDFADGERKVEHLAVRFKLQDVADSFKKIFDEAKTAQEKDSLITPHVSRSSTPRESPCGKIAVAVLEETTRERTDVIQGDDVADATSEVEVSSTSETTPKAVVSPPKFVFGSESVKSIFSSEKSKPFAFGNSSATGSLFGFSFNAPLKSNNSETSSVAQSGSESKVEPKKCELSKNSDIEQSSDSKVKNLFASFPTEESSINYTFKTPEKAKEKKKPEDSPSDDDVLIVYELTPTAEQKALATKLKLPPTFFCYKNRPDYVSEEEEDDEDFETAVKKLNGKLYLDGSEKCRPLEENTADNEKECIIVWEKKPTVEEKAKADTLKLPPTFFCGVCSDTDEDNGNGEDFQSELQKVQEAQKSQTEEITSTTDSVYTGGTEVMVPSFCKSEEPDSITKSISSPSVSSETMDKPVDLSTRKEIDTDSTSQGESKIVSFGFGSSTGLSFADLASSNSGDFAFGSKVGTQSAGKVGEDEDGSDEEVVHNEDIHFEPIVSLPEVEVKSGEEDEEILFKERAKLYRWDRDVSQWKERGVGDIKILWHTMKNYYRILMRRDQVFKVCANHVITKTMELKPLNVSNNALVWTASDYADGEAKVEQLAVRFKTKEVADCFKKTFEECQQNLMKLQKGHVSLAAELSKETNPVVFFDVCADGEPLGRITMELFSNIVPRTAENFRALCTGEKGFGFKNSIFHRVIPDFVCQGGDITKHDGTGGQSIYGDKFEDENFDVKHTGPGLLSMANQGQNTNNSQFVITLKKAEHLDFKHVVFGFVKDGMDTVKKIESFGSPKGSVCRRITITECGQI

SEQ ID NO: 749952 - protein, 3248 aa, Homo sapiens
HSGPPPATALRHWFAGAFLLEVATAAGLSAGLTRLGSQVGGAMRRSKADVERYIASVQGSTPSPRQKSMKGFYFAKLYYEAKEYDLAKKYICTYINVQERDPKAHRFLGLLYELEENTDKAVECYRRSVELNPTQKDLVLKIAELLCKNDVTDGRAKYWLERAAKLFPGSPAIYKLKEQLLDCEGEDGWNKLFDLIQSELYVRPDDVHVNIRLVEVYRSTKRLKDAVAHCHEAERNIALRSSLEWNSCVVQTLKEYLESLQCLESDKSDWRATNTDLLLAYANLMLLTLSTRDVQESRELLQSFDSALQSVKSLGGNDELSATFLEMKGHFYMHAGSLLLKMGQHSSNVQWRALSELAALCYLIAFQVPRPKIKLIKGEAGQNLLEMMACDRLSQSGHMLLNLSRGKQDFLKEIVETFANKSGQSALYDALFSSQSPKDTSFLGSDDIGNIDVREPELEDLTRYDVGAIRAHNGSLQHLTWLGLQWNSLPALPGIRKWLKQLFHHLPHETSRLETNAPESICILDLEVFLLGVVYTSHLQLKEKCNSHHSSYQPLCLPLPVCKQLCTERQKSWWDAVCTLIHRKAVPGNVAKLRLLVQHEINTLRAQEKHGLQPALLVHWAECLQKTGSGLNSFYDQREYIGRSVHYWKKVLPLLKIIKKKNSIPEPIDPLFKHFHSVDIQASEIVEYEEDAHITFAILDAVNGNIEDAVTAFESIKSVVSYWNLALIFHRKAEDIENDALSPEEQEECKNYLRKTRDYLIKIIDDSDSNLSVVKKLPVPLESVKEMLNSVMQELEDYSEGGPLYKNGSLRNADSEIKHSTPSPTRYSLSPSKSYKYSPKTPPRWAEDQNSLLKMICQQVEAIKKEMQELKLNSSNSASPHRWPTENYGPDSVPDGYQGSQTFHGAPLTVATTGPSVYYSQSPAYNSQYLLRPAANVTPTKGPVYGMNRLPPQQHIYAYPQQMHTPPVQSSSACMFSQEMYGPPALRFESPATGILSPRGDDYFNYNVQQTSTNPPLPEPGYFTKPPIAAHASRSAESKTIEFGKTNFVQPMPGEGLRPSLPTQAHTTQPTPFKFNSNFKSNDGDFTFSSPQVVTQPPPAAYSNSESLLGLLTSDKPLQGDGYSGAKPIPGGQTIGPRNTFNFGSKNVSGISFTENMGSSQQKNSGFRRSDDMFTFHGPGKSVFGTPTLETANKNHETDGGSAHGDDDDDGPHFEPVVPLPDKIEVKTGEEDEEEFFCNRAKLFRFDVESKEWKERGIGNVKILRHKTSGKIRLLMRREQVLKICANHYISPDMKLTPNAGSDRSFVWHALDYADELPKPEQLAIRFKTPEEAALFKCKFEEAQSILKAPGTNVAMASNQAVRIVKEPTSHDNKDICKSDAGNLNFEFQVAKKEGSWWHCNSCSLKNASTAKKCVSCQNLNPSNKELVGPPLAETVFTPKTSPENVQDRFALVTPKKEGHWDCSICLVRNEPTVSRCIACQNTKSANKSGSSFVHQASFKFGQGDLPKPINSDFRSVFSTKEGQWDCSACLVQNEGSSTKCAACQNPRKQSLPATSIPTPASFKFGTSETSKTLKSGFEDMFAKKEGQWDCSSCLVRNEANATRCVACQNPDKPSPSTSVPAPASFKFGTSETSKAPKSGFEGMFTKKEGQWDCSVCLVRNEASATKCIACQNPGKQNQTTSAVSTPASSETSKAPKSGFEGMFTKKEGQWDCSVCLVRNEASATKCIACQNPGKQNQTTSAVSTPASSETSKAPKSGFEGMFTKKEGQWDCSVCLVRNEASATKCIACQCPSKQNQTTAISTPASSEISKAPKSGFEGMFIRKGQWDCSVCCVQNESSSLKCVACDASKPTHKPIAEAPSAFTLGSEMKLHDSSGSQVGTGFKSNFSEKASKFGNTEQGFKFGHVDQENSPSFMFQGSSNTEFKSTKEGFSIPVSADGFKFGISEPGNQEKKSEKPLENGTGFQAQDISGQKNGRGVIFGQTSSTFTFADLAKSTSGEGFQFGKKDPNFKGFSGAGEKLFSSQYGKMANKANTSGDFEKDDDAYKTEDSDDIHFEPVVQMPEKVELVTGEEDEKVLYSQRVKLFRFDAEVSQWKERGLGNLKILKNEVNGKLRMLMRREQVLKVCANHWITTTMNLKPLSGSDRAWMWLASDFSDGDAKLEQLAAKFKTPELAEEFKQKFEECQRLLLDIPLQTPHKLVDTGRAAKLIQRAEEMKSGLKDFKTFLTNDQTKVTEEENKGSGTGAAGASDTTIKPNPENTGPTLEWDNYDLREDALDDSVSSSSVHASPLASSPVRKNLFRFGESTTGFNFSFKSALSPSKSPAKLNQSGTSVGTDEESDVTQEEERDGQYFEPVVPLPDLVEVSSGEENEQVVFSHRAKLYRYDKDVGQWKERGIGDIKILQNYDNKQVRIVMRRDQVLKLCANHRITPDMTLQNMKGTERVWLWTACDFADGERKVEHLAVRFKLQDVADSFKKIFDEAKTAQEKDSLITPHVSRSSTPRESPCGKIAVAVLEETTRERTDVIQGDDVADATSEVEVSSTSETTPKAVVSPPKFVFGSESVKSIFSSEKSKPFAFGNSSATGSLFGFSFNAPLKSNNSETSSVAQSGSESKVEPKKCELSKNSDIEQSSDSKVKNLFASFPTEESSINYTFKTPEKAKEKKKPEDSPSDDDVLIVYELTPTAEQKALATKLKLPPTFFCYKNRPDYVSEEEEDDEDFETAVKKLNGKLYLDGSEKCRPLEENTADNEKECIIVWEKKPTVEEKAKADTLKLPPTFFCGVCSDTDEDNGNGEDFQSELQKVQEAQKSQTEEITSTTDSVYTGGTEVMVPSFCKSEEPDSITKSISSPSVSSETMDKPVDLSTRKEIDTDSTSQGESKIVSFGFGSSTGLSFADLASSNSGDFAFGSKDKNFQWANTGAAVFGTQSVGTQSAGKVGEDEDGSDEEVVHNEDIHFEPIVSLPEVEVKSGEEDEEILFKERAKLYRWDRDVSQWKERGVGDIKILWHTMKNYYRILMRRDQVFKVCANHVITKTMELKPLNVSNNALVWTASDYADGEAKVEQLAVRFKTKEVADCFKSLAAELSKETNPVVFFDVCADGEPLGRITMELFSNIVPRTAENFRALCTGEKGFGFKNSIFHRVIPDFVCQGGDITKHDGTGGQSIYGDKFEDENFDVKHTGPGLLSMANQGQNTNNSQFVITLKKAEHLDFKHVVFGFVKDGMDTVKKIESFGSPKGSVCRRITITECGQI

SEQ ID NO: 749953 - protein, 3068 aa, Homo sapiens
HSGPPPATALRHWFAGAFLLEVATAAGLSAGLTRLGSQVGGAMRRSKADVERYIASVQGSTPSPRQKSMKGFYFAKLYYEAKEYDLAKKYICTYINVQERDPKAHRFLGLLYELEENTDKAVECYRRSVELNPTQKDLVLKIAELLCKNDVTDGRAKYWLERAAKLFPGSPAIYKLKEQLLDCEGEDGWNKLFDLIQSELYVRPDDVHVNIRLVEVYRSTKRLKDAVAHCHEAERNIALRSSLEWNSCVVQTLKEYLESLQCLESDKSDWRATNTDLLLAYANLMLLTLSTRDVQESRELLQSFDSALQSVKSLGGNDELSATFLEMKGHFYMHAGSLLLKMGQHSSNVQWRALSELAALCYLIAFQVPRPKIKLIKGEAGQNLLEMMACDRLSQSGHMLLNLSRGKQDFLKEIVETFANKSGQSALYDALFSSQSPKDTSFLGSDDIGNIDVREPELEDLTRYDVGAIRAHNGSLQHLTWLGLQWNSLPALPGIRKWLKQLFHHLPHETSRLETNAPESICILDLEVFLLGVVYTSHLQLKEKCNSHHSSYQPLCLPLPVCKQLCTERQKSWWDAVCTLIHRKAVPGNVAKLRLLVQHEINTLRAQEKHGLQPALLVHWAECLQKTGSGLNSFYDQREYIGRSVHYWKKVLPLLKIIKKKNSIPEPIDPLFKHFHSVDIQASEIVEYEEDAHITFAILDAVNGNIEDAVTAFESIKSVVSYWNLALIFHRKAEDIENDALSPEEQEECKNYLRKTRDYLIKIIDDSDSNLSVVKKLPVPLESVKEMLNSVMQELEDYSEGGPLYKNGSLRNADSEIKHSTPSPTRYSLSPSKSYKYSPKTPPRWAEDQNSLLKMICQQVEAIKKEMQELKLNSSNSASPHRWPTENYGPDSVPDGYQGSQTFHGAPLTVATTGPSVYYSQSPAYNSQYLLRPAANVTPTKGPVYGMNRLPPQQHIYAYPQQMHTPPVQSSSACMFSQEMYGPPALRFESPATGILSPRGDDYFNYNVQQTSTNPPLPEPGYFTKPPIAAHASRSAESKTIEFGKTNFVQPMPGEGLRPSLPTQAHTTQPTPFKFNSNFKSNDGDFTFSSPQVVTQPPPAAYSNSESLLGLLTSDKPLQGDGYSGAKPIPGGQTIGPRNTFNFGSKNVSGISFTENMGSSQQKNSGFRRSDDMFTFHGPGKSVFGTPTLETANKNHETDGGSAHGDDDDDGPHFEPVVPLPDKIEVKTGEEDEEEFFCNRAKLFRFDVESKEWKERGIGNVKILRHKTSGKIRLLMRREQVLKICANHYISPDMKLTPNAGSDRSFVWHALDYADELPKPEQLAIRFKTPEEAALFKCKFEEAQSILKAPGTNVAMASNQAVRIVKEPTSHDNKDICKSDAGNLNFEFQVAKKEGSWWHCNSCSLKNASTAKKCVSCQNLNPSNKELVGPPLAETVFTPKTSPENVQDRFALVTPKKEGHWDCSICLVRNEPTVSRCIACQNTKSANKSGSSFVHQASFKFGQGDLPKPINSDFRSVFSTKEGQWDCSACLVQNEGSSTKCAACQNPRKQSLPATSIPTPASFKFGTSETSKTLKSGFEDMFAKKEGQWDCSSCLVRNEANATRCVACQNPDKPSPSTSVPAPASFKFGTSETSKAPKSGFEGMFTKKEGQWDCSVCLVRNEASATKCIACQNPGKQNQTTSAVSTPASSETSKAPKSGFEGMFTKKEGQWDCSVCLVRNEASATKCIACQNPGKQNQTTSAVSTPASSETSKAPKSGFEGMFTKKEGQWDCSVCLVRNEASATKCIACQCPSKQNQTTAISTPASSEISKAPKSGFEGMFIRKGQWDCSVCCVQNESSSLKCVACDASKPTHKPIAEAPSAFTLGSEMKLHDSSGSQVGTGFKSNFSEKASKFGNTEQGFKFGHVDQENSPSFMFQGSSNTEFKSTKEGFSIPVSADGFKFGISEPGNQEKKSEKPLENGTGFQAQDISGQKNGRGVIFGQTSSTFTFADLAKSTSGEGFQFGKKDPNFKGFSGAGEKLFSSQYGKMANKANTSGDFEKDDDAYKTEDSDDIHFEPVVQMPEKVELVTGEEDEKVLYSQRVKLFRFDAEVSQWKERGLGNLKILKNEVNGKLRMLMRREQVLKVCANHWITTTMNLKPLSGSDRAWMWLASDFSDGDAKLEQLAAKFKTPELAEEFKQKFEECQRLLLDIPLQTPHKLVDTGRAAKLIQRAEEMKSGLKDFKTFLTNDQTKVTEEENKGSGTGAAGASDTTIKPNPENTGPTLEWDNYDLREDALDDSVSSSSVHASPLASSPVRKNLFRFGESTTGFNFSFKSALSPSKSPAKLNQSGTSVGTDEESDVTQEEERDGQYFEPVVPLPDLVEVSSGEENEQVVFSHRAKLYRYDKDVGQWKERGIGDIKILQNYDNKQVRIVMRRDQVLKLCANHRITPDMTLQNMKGTERVWLWTACDFADGERKVEHLAVRFKLQDVADSFKKIFDEAKTAQEKDSLITPHVSRSSTPRESPCGKIAVAVLEETTRERTDVIQGDDVADATSEVEVSSTSETTPKAVVSPPKFVFGSESVKSIFSSEKSKPFAFGNSSATGSLFGFSFNAPLKSNNSETSSVAQSGSESKVEPKKCELSKNSDIEQSSDSKVKNLFASFPTEESSINYTFKTPEKAKEKKKPEDSPSDDDVLIVYELTPTAEQKALATKLKLPPTFFCYKNRPDYVSEEEEDDEDFETAVKKLNGKLYLDGSEKCRPLEENTADNEKECIIVWEKKPTVEEKAKADTLKLPPTFFCGVCSDTDEDNGNGEDFQSELQKVQEAQKSQTEEITSTTDSVYTGGTEVMVPSFCKSEEPDSITKSISSPSVSSETMDKPVDLSTRKEIDTDSTSQGESKIVSFGFGSSTGLSFADLASSNSGDFAFGSKDKNFQWANTGAAVFGTQSVGTQSAGKVGEDEDGSDEEVVHNEDIHFEPIVSLPEVEVKSGEEDEEILFKERAKLYRWDRDVSQWKERGVGDIKILWHTMKNYYRILMRRDQVFKVCANHVITKTMELKPLNVSNNALVWTASDYADGEAKVEQLAVRFRI

SEQ ID NO: 749954 - protein, 3266 aa, Homo sapiens; identical to SEQ ID NO: 749942

SEQ ID NO: 749955 - protein, 3051 aa, Homo sapiens
HSGPPPATALRHWFAGAFLLEVATAAGLSAGLTRLGSQVGGAMRRSKADVERYIASVQGSTPSPRQKSMKGFYFAKLYYEAKEYDLAKKYICTYINVQERDPKAHRFLGLLYELEENTDKAVECYRRSVELNPTQKDLVLKIAELLCKNDVTDGRAKYWLERAAKLFPGSPAIYKLKEQLLDCEGEDGWNKLFDLIQSELYVRPDDVHVNIRLVEVYRSTKRLKDAVAHCHEAERNIALRSSLEWNSCVVQTLKEYLESLQCLESDKSDWRATNTDLLLAYANLMLLTLSTRDVQESRELLQSFDSALQSVKSLGGNDELSATFLEMKGHFYMHAGSLLLKMGQHSSNVQWRALSELAALCYLIAFQVPRPKIKLIKGEAGQNLLEMMACDRLSQSGHMLLNLSRGKQDFLKEIVETFANKSGQSALYDALFSSQSPKDTSFLGSDDIGNIDVREPELEDLTRYDVGAIRAHNGSLQHLTWLGLQWNSLPALPGIRKWLKQLFHHLPHETSRLETNAPESICILDLEVFLLGVVYTSHLQLKEKCNSHHSSYQPLCLPLPVCKQLCTERQKSWWDAVCTLIHRKAVPGNVAKLRLLVQHEINTLRAQEKHGLQPALLVHWAECLQKTGSGLNSFYDQREYIGRSVHYWKKVLPLLKIIKKKNSIPEPIDPLFKHFHSVDIQASEIVEYEEDAHITFAILDAVNGNIEDAVTAFESIKSVVSYWNLALIFHRKAEDIENDALSPEEQEECKNYLRKTRDYLIKIIDDSDSNLSVVKKLPVPLESVKEMLNSVMQELEDYSEGGPLYKNGSLRNADSEIKHSTPSPTRYSLSPSKSYKYSPKTPPRWAEDQNSLLKMICQQVEAIKKEMQELKLNSSNSASPHRWPTENYGPDSVPDGYQGSQTFHGAPLTVATTGPSVYYSQSPAYNSQYLLRPAANVTPTKGPVYGMNRLPPQQHIYAYPQQMHTPPVQSSSACMFSQEMYGPPALRFESPATGILSPRGDDYFNYNVQQTSTNPPLPEPGYFTKPPIAAHASRSAESKTIEFGKTNFVQPMPGEGLRPSLPTQAHTTQPTPFKFNSNFKSNDGDFTFSSPQVVTQPPPAAYSNSESLLGLLTSDKPLQGDGYSGAKPIPGGQTIGPRNTFNFGSKNVSGISFTENMGSSQQKNSGFRRSDDMFTFHGPGKSVFGTPTLETANKNHETDGGSAHGDDDDDGPHFEPVVPLPDKIEVKTGEEDEEEFFCNRAKLFRFDVESKEWKERGIGNVKILRHKTSGKIRLLMRREQVLKICANHYISPDMKLTPNAGSDRSFVWHALDYADELPKPEQLAIRFKTPEEAALFKCKFEEAQSILKAPGTNVAMASNQAVRIVKEPTSHDNKDICKSDAGNLNFEFQVAKKEGSWWHCNSCSLKNASTAKKCVSCQNLNPSNKELVGPPLAETVFTPKTSPENVQDRFALVTPKKEGHWDCSICLVRNEPTVSRCIACQNTKSANKSGSSFVHQASFKFGQGDLPKPINSDFRSVFSTKEGQWDCSACLVQNEGSSTKCAACQNPRKQSLPATSIPTPASFKFGTSETSKTLKSGFEDMFAKKEGQWDCSSCLVRNEANATRCVACQNPDKPSPSTSVPAPASFKFGTSETSKAPKSGFEGMFTKKEGQWDCSVCLVRNEASATKCIACQNPGKQNQTTSAVSTPASSETSKAPKSGFEGMFTKKEGQWDCSVCLVRNEASATKCIACQNPGKQNQTTSAVSTPASSETSKAPKSGFEGMFTKKEGQWDCSVCLVRNEASATKCIACQCPSKQNQTTAISTPASSEISKAPKSGFEGMFIRKGQWDCSVCCVQNESSSLKCVACDASKPTHKPIAEAPSAFTLGSEMKLHDSSGSQVGTGFKSNFSEKASKFGNTEQGFKFGHVDQENSPSFMFQGSSNTEFKSTKEGFSIPVSADGFKFGISEPGNQEKKSEKPLENGTGFQAQDISGQKNGRGVIFGQTSSTFTFADLAKSTSGEGFQFGKKDPNFKGFSGAGEKLFSSQYGKMANKANTSGDFEKDDDAYKTEDSDDIHFEPVVQMPEKVELVTGEEDEKVLYSQRVKLFRFDAEVSQWKERGLGNLKILKNEVNGKLRMLMRREQVLKVCANHWITTTMNLKPLSGSDRAWMWLASDFSDGDAKLEQLAAKFKTPELAEEFKQKFEECQRLLLDIPLQTPHKLVDTGRAAKLIQRAEEMKSGLKDFKTFLTNDQTKVTEEENKGSGTGAAGASDTTIKPNPENTGPTLEWDNYDLREDALDDSVSSSSVHASPLASSPVRKNLFRFGESTTGFNFSFKSALSPSKSPAKLNQSGTSVGTDEESDVTQEEERDGQYFEPVVPLPDLVEVSSGEENEQVVFSHRAKLYRYDKDVGQWKERGIGDIKILQNYDNKQVRIVMRRDQVLKLCANHRITPDMTLQNMKGTERVWLWTACDFADGERKVEHLAVRFKLQDVADSFKKIFDEAKTAQEKDSLITPHVSRSSTPRESPCGKIAVAVLEETTRERTDVIQGDDVADATSEVEVSSTSETTPKAVVSPPKFVFGSESVKSIFSSEKSKPFAFGNSSATGSLFGFSFNAPLKSNNSETSSVAQSGSESKVEPKKCELSKNSDIEQSSDSKVKNLFASFPTEESSINYTFKTPEKAKEKKKPEDSPSDDDVLIVYELTPTAEQKALATKLKLPPTFFCYKNRPDYVSEEEEDDEDFETAVKKLNGKLYLDGSEKCRPLEENTADNEKECIIVWEKKPTVEEKAKADTLKLPPTFFCGVCSDTDEDNGNGEDFQSELQKVQEAQKSQTEEITSTTDSVYTGGTEVMVPSFCKSEEPDSITKSISSPSVSSETMDKPVDLSTRKEIDKNLMKLQKGHVSLAAELSKETNPVVFFDVCADGEPLGRITMELFSNIVPRTAENFRALCTGEKGFGFKNSIFHRVIPDFVCQGGDITKHDGTGGQSIYGDKFEDENFDVKHTGPGLLSMANQGQNTNNSQFVITLKKAEHLDFKHVVFGFVKDGMDTVKKIESFGSPKGSVCRRITITECGQI

SEQ ID NO: 749956 - protein, 3266 aa, Homo sapiens; identical to SEQ ID NO: 749942

SEQ ID NO: 749957 - protein, 599 aa, Homo sapiens
NDGPQLRKYSYVLLDSNDGPQRFRNLKLPPTFFCYKNRPDYVSEEEEDDEDFETAVKKLNGKLYLDGSEKCRPLEENTADNEKECIIVWEKKPTVEEKAKADTLKLPPTFFCGVCSDTDEDNGNGEDFQSELQKVQEAQKSQTEEITSTTDSVYTGGTEVMVPSFCKSEEPDSITKSISSPSVSSETMDKPVDLSTRKEIDTDSTSQGESKIVSFGFGSSTGLSFADLASSNSGDFAFGSKDKNFQWANTGAAVFGTQSVGTQSAGKVGEDEDGSDEEVVHNEDIHFEPIVSLPEVEVKSGEEDEEILFKERAKLYRWDRDVSQWKERGVGDIKILWHTMKNYYRILMRRDQVFKVCANHVITKTMELKPLNVSNNALVWTASDYADGEAKVEQLAVRFKTKEVADCFKKTFEECQQNLMKLQKGHVSLAAELSKETNPVVFFDVCADGEPLGRITMELFSNIVPRTAENFRALCTGEKGFGFKNSIFHRVIPDFVCQGGDITKHDGTGGQSIYGDKFEDENFDVKHTGPGLLSMANQGQNTNNSQFVITLKKAEHLDFKHVVFGFVKDGMDTVKKIESFGSPKGSVCRRITITECGQI

SEQ ID NO: 749958 - protein, 3013 aa, Homo sapiens
HSGPPPATALRHWFAGAFLLEVATAAGLSAGLTRLGSQVGGAMRRSKADVERYIASVQGSTPSPRQKSMKGFYFAKLYYEAKEYDLAKKYICTYINVQERDPKAHRFLGLLYELEENTDKAVECYRRSVELNPTQKDLVLKIAELLCKNDVTDGRAKYWLERAAKLFPGSPAIYKLKEQLLDCEGEDGWNKLFDLIQSELYVRPDDVHVNIRLVEVYRSTKRLKDAVAHCHEAERNIALRSSLEWNSCVVQTLKEYLESLQCLESDKSDWRATNTDLLLAYANLMLLTLSTRDVQESRELLQSFDSALQSVKSLGGNDELSATFLEMKGHFYMHAGSLLLKMGQHSSNVQWRALSELAALCYLIAFQVPRPKIKLIKGEAGQNLLEMMACDRLSQSGHMLLNLSRGKQDFLKEIVETFANKSGQSALYDALFSSQSPKDTSFLGSDDIGNIDVREPELEDLTRYDVGAIRAHNGSLQHLTWLGLQWNSLPALPGIRKWLKQLFHHLPHETSRLETNAPESICILDLEVFLLGVVYTSHLQLKEKCNSHHSSYQPLCLPLPVCKQLCTERQKSWWDAVCTLIHRKAVPGNVAKLRLLVQHEINTLRAQEKHGLQPALLVHWAECLQKTGSGLNSFYDQREYIGRSVHYWKKVLPLLKIIKKKNSIPEPIDPLFKHFHSVDIQASEIVEYEEDAHITFAILDAVNGNIEDAVTAFESIKSVVSYWNLALIFHRKAEDIENDALSPEEQEECKNYLRKTRDYLIKIIDDSDSNLSVVKKLPVPLESVKEMLNSVMQELEDYSEGGPLYKNGSLRNADSEIKHSTPSPTRYSLSPSKSYKYSPKTPPRWAEDQNSLLKMICQQVEAIKKEMQELKLNSSNSASPHRWPTENYGPDSVPDGYQGSQTFHGAPLTVATTGPSVYYSQSPAYNSQYLLRPAANVTPTKGPVYGMNRLPPQQHIYAYPQQMHTPPVQSSSACMFSQEMYGPPALRFESPATGILSPRGDDYFNYNVQQTSTNPPLPEPGYFTKPPIAAHASRSAESKTIEFGKTNFVQPMPGEGLRPSLPTQAHTTQPTPFKFNSNFKSNDGDFTFSSPQVVTQPPPAAYSNSESLLGLLTSDKPLQGDGYSGAKPIPGGQTIGPRNTFNFGSKNVSGISFTENMGSSQQKNSGFRRSDDMFTFHGPGKSVFGTPTLETANKNHETDGGSAHGDDDDDGPHFEPVVPLPDKIEVKTGEEDEEEFFCNRAKLFRFDVESKEWKERGIGNVKILRHKTSGKIRLLMRREQVLKICANHYISPDMKLTPNAGSDRSFVWHALDYADELPKPEQLAIRFKTPEEAALFKCKFEEAQSILKAPGTNVAMASNQAVRIVKEPTSHDNKDICKSDAGNLNFEFQVAKKEGSWWHCNSCSLKNASTAKKCVSCQNLNPSNKELVGPPLAETVFTPKTSPENVQDRFALVTPKKEGHWDCSICLVRNEPTVSRCIACQNTKSANKSGSSFVHQASFKFGQGDLPKPINSDFRSVFSTKEGQWDCSACLVQNEGSSTKCAACQNPRKQSLPATSIPTPASFKFGTSETSKTLKSGFEDMFAKKEGQWDCSSCLVRNEANATRCVACQNPDKPSPSTSVPAPASFKFGTSETSKAPKSGFEGMFTKKEGQWDCSVCLVRNEASATKCIACQNPGKQNQTTSAVSTPASSETSKAPKSGFEGMFTKKEGQWDCSVCLVRNEASATKCIACQNPGKQNQTTSAVSTPASSETSKAPKSGFEGMFTKKEGQWDCSVCLVRNEASATKCIACQCPSKQNQTTAISTPASSEISKAPKSGFEGMFIRKGQWDCSVCCVQNESSSLKCVACDASKPTHKPIAEAPSAFTLGSEMKLHDSSGSQVGTGFKSNFSEKASKFGNTEQGFKFGHVDQENSPSFMFQGSSNTEFKSTKEGFSIPVSADGFKFGISEPGNQEKKSEKPLENGTGFQAQDISGQKNGRGVIFGQTSSTFTFADLAKSTSGEGFQFGKKDPNFKGFSGAGEKLFSSQYGKMANKANTSGDFEKDDDAYKTEDSDDIHFEPVVQMPEKVELVTGEEDEKVLYSQRVKLFRFDAEVSQWKERGLGNLKILKNEVNGKLRMLMRREQVLKVCANHWITTTMNLKPLSGSDRAWMWLASDFSDGDAKLEQLAAKFKTPELAEEFKQKFEECQRLLLDIPLQTPHKLVDTGRAAKLIQRAEEMKSGLKDFKTFLTNDQTKVTEEENKGSGTGAAGASDTTIKPNPENTGPTLEWDNYDLREDALDDSVSSSSVHASPLASSPVRKNLFRFGESTTGFNFSFKSALSPSKSPAKLNQSGTSVGTDEESDVTQEEERDGQYFEPVVPLPDLVEVSSGEENEQVVFSHRAKLYRYDKDVGQWKERGIGDIKILQNYDNKQVRIVMRRDQVLKLCANHRITPDMTLQNMKGTERVWLWTACDFADGERKVEHLAVRFKLQDVADSFKKIFDEAKTAQEKDSLITPHVSRSSTPRESPCGKIAVAVLEETTRERTDVIQGDDVADATSEVEVSSTSETTPKAVVSPPKFVFGSESVKSIFSSEKSKPFAFGNSSATGSLFGFSFNAPLKSNNSETSSVAQSGSESKVEPKKCELSKNSDIEQSSDSKVKNLFASFPTEESSINYTFKTPEKAKEKKKPEDSPSDDDVLIVYELTPTAEQKALATKLKLPPTFFCYKNRPDYVSEEEEDDEDFETAVKKLNGKLYLDGSEKCRPLEENTADNEKECIIVWEKKPTVEEKAKADTLKLPPTFFCGVCSDTDEDNGNGEDFQSELQKVQEAQKSQTEEITSTTDSVYTGGTEVMVPSFCKSEEPDSITKSISSPSVSSETMDKPVDLSTRKEIDTDSTSQGESKIVSFGFGSSTGLSFADLASSNSGDFAFGSKDKNFQWANTGAAVFGTQSVGTQSAGKVGEDEDGSDEEVVHNEDIHFEPIVSLPEVEVKSGEEDEEILFKERAKLYRWDRGGKIWGGFSPQKRGFFPPQNEELLPD

SEQ ID NO: 749959 - protein, 2928 aa, Homo sapiens
HSGPPPATALRHWFAGAFLLEVATAAGLSAGLTRLGSQVGGAMRRSKADVERYIASVQGSTPSPRQKSMKGFYFAKLYYEAKEYDLAKKYICTYINVQERDPKAHRFLGLLYELEENTDKAVECYRRSVELNPTQKDLVLKIAELLCKNDVTDGRAKYWLERAAKLFPGSPAIYKLKEQLLDCEGEDGWNKLFDLIQSELYVRPDDVHVNIRLVEVYRSTKRLKDAVAHCHEAERNIALRSSLEWNSCVVQTLKEYLESLQCLESDKSDWRATNTDLLLAYANLMLLTLSTRDVQESRELLQSFDSALQSVKSLGGNDELSATFLEMKGHFYMHAGSLLLKMGQHSSNVQWRALSELAALCYLIAFQVPRPKIKLIKGEAGQNLLEMMACDRLSQSGHMLLNLSRGKQDFLKEIVETFANKSGQSALYDALFSSQSPKDTSFLGSDDIGNIDVREPELEDLTRYDVGAIRAHNGSLQHLTWLGLQWNSLPALPGIRKWLKQLFHHLPHETSRLETNAPESICILDLEVFLLGVVYTSHLQLKEKCNSHHSSYQPLCLPLPVCKQLCTERQKSWWDAVCTLIHRKAVPGNVAKLRLLVQHEINTLRAQEKHGLQPALLVHWAECLQKTGSGLNSFYDQREYIGRSVHYWKKVLPLLKIIKKKNSIPEPIDPLFKHFHSVDIQASEIVEYEEDAHITFAILDAVNGNIEDAVTAFESIKSVVSYWNLALIFHRKAEDIENDALSPEEQEECKNYLRKTRDYLIKIIDDSDSNLSVVKKLPVPLESVKEMLNSVMQELEDYSEGGPLYKNGSLRNADSEIKHSTPSPTRYSLSPSKSYKYSPKTPPRWAEDQNSLLKMICQQVEAIKKEMQELKLNSSNSASPHRWPTENYGPDSVPDGYQGSQTFHGAPLTVATTGPSVYYSQSPAYNSQYLLRPAANVTPTKGPVYGMNRLPPQQHIYAYPQQMHTPPVQSSSACMFSQEMYGPPALRFESPATGILSPRGDDYFNYNVQQTSTNPPLPEPGYFTKPPIAAHASRSAESKTIEFGKTNFVQPMPGEGLRPSLPTQAHTTQPTPFKFNSNFKSNDGDFTFSSPQVVTQPPPAAYSNSESLLGLLTSDKPLQGDGYSGAKPIPGGQTIGPRNTFNFGSKNVSGISFTENMGSSQQKNSGFRRSDDMFTFHGPGKSVFGTPTLETANKNHETDGGSAHGDDDDDGPHFEPVVPLPDKIEVKTGEEDEEEFFCNRAKLFRFDVESKEWKERGIGNVKILRHKTSGKIRLLMRREQVLKICANHYISPDMKLTPNAGSDRSFVWHALDYADELPKPEQLAIRFKTPEEAALFKCKFEEAQSILKAPGTNVAMASNQAVRIVKEPTSHDNKDICKSDAGNLNFEFQVAKKEGSWWHCNSCSLKNASTAKKCVSCQNLNPSNKELVGPPLAETVFTPKTSPENVQDRFALVTPKKEGHWDCSICLVRNEPTVSRCIACQNTKSANKSGSSFVHQASFKFGQGDLPKPINSDFRSVFSTKEGQWDCSACLVQNEGSSTKCAACQNPRKQSLPATSIPTPASFKFGTSETSKTLKSGFEDMFAKKEGQWDCSSCLVRNEANATRCVACQNPDKPSPSTSVPAPASFKFGTSETSKAPKSGFEGMFTKKEGQWDCSVCLVRNEASATKCIACQNPGKQNQTTSAVSTPASSETSKAPKSGFEGMFTKKEGQWDCSVCLVRNEASATKCIACQNPGKQNQTTSAVSTPASSETSKAPKSGFEGMFTKKEGQWDCSVCLVRNEASATKCIACQCPSKQNQTTAISTPASSEISKAPKSGFEGMFIRKGQWDCSVCCVQNESSSLKCVACDASKPTHKPIAEAPSAFTLGSEMKLHDSSGSQVGTGFKSNFSEKASKFGNTEQGFKFGHVDQENSPSFMFQGSSNTEFKSTKEGFSIPVSADGFKFGISEPGNQEKKSEKPLENGTGFQAQDISGQKNGRGVIFGQTSSTFTFADLAKSTSGEGFQFGKKDPNFKGFSGAGEKLFSSQYGKMANKANTSGDFEKDDDAYKTEDSDDIHFEPVVQMPEKVELVTGEEDEKVLYSQRVKLFRFDAEVSQWKERGLGNLKILKNEVNGKLRMLMRREQVLKVCANHWITTTMNLKPLSGSDRAWMWLASDFSDGDAKLEQLAAKFKTPELAEEFKQKFEECQRLLLDIPLQTPHKLVDTGRAAKLIQRAEEMKSGLKDFKTFLTNDQTKVTEEENKGSGTGAAGASDTTIKPNPENTGPTLEWDNYDLREDALDDSVSSSSVHASPLASSPVRKNLFRFGESTTGFNFSFKSALSPSKSPAKLNQSGTSVGTDEESDVTQEEERDGQYFEPVVPLPDLVEVSSGEENEQVVFSHRAKLYRYDKDVGQWKERGIGDIKILQNYDNKQVRIVMRRDQVLKLCANHRITPDMTLQNMKGTERVWLWTACDFADGERKVEHLAVRFKLQDVADSFKKIFDEAKTAQEKDSLITPHVSRSSTPRESPCGKIAVAVLEETTRERTDVIQGDDVADATSEVEVSSTSETTPKAVVSPPKFVFGSESVKSIFSSEKSKPFAFGNSSATGSLFGFSFNAPLKSNNSETSSVAQSGSESKVEPKKCELSKNSDIEQSSDSKVKNLFASFPTEESSINYTFKTPEKAKEKKKPEDSPSDDDVLIVYELTPTAEQKALATKLKLPPTFFCYKNRPDYVSEEEEDDEDFETAVKKLNGKLYLDGSEKCRPLEENTADNEKECIIVWEKKPTVEEKAKADTLKLPPTFFCGVCSDTDEDNGNGEDFQSELQKVQEAQKSQTEEITSTTDSVYTGGTEVMVPSFCKSEEPDSITKSISSPSVSSETMDKPVDLSTRKEIDTDSTSQGESKIVSFGFGSSTGLSFADLASSNSGDFAFGSKGCHSVAQAGVQWHEHSSLLP

SEQ ID NO: 749960 - protein, 2820 aa, Homo sapiens
HSGPPPATALRHWFAGAFLLEVATAAGLSAGLTRLGSQVGGAMRRSKADVERYIASVQGSTPSPRQKSMKGFYFAKLYYEAKEYDLAKKYICTYINVQERDPKAHRFLGLLYELEENTDKAVECYRRSVELNPTQKDLVLKIAELLCKNDVTDGRAKYWLERAAKLFPGSPAIYKLKEQLLDCEGEDGWNKLFDLIQSELYVRPDDVHVNIRLVEVYRSTKRLKDAVAHCHEAERNIALRSSLEWNSCVVQTLKEYLESLQCLESDKSDWRATNTDLLLAYANLMLLTLSTRDVQESRELLQSFDSALQSVKSLGGNDELSATFLEMKGHFYMHAGSLLLKMGQHSSNVQWRALSELAALCYLIAFQVPRPKIKLIKGEAGQNLLEMMACDRLSQSGHMLLNLSRGKQDFLKEIVETFANKSGQSALYDALFSSQSPKDTSFLGSDDIGNIDVREPELEDLTRYDVGAIRAHNGSLQHLTWLGLQWNSLPALPGIRKWLKQLFHHLPHETSRLETNAPESICILDLEVFLLGVVYTSHLQLKEKCNSHHSSYQPLCLPLPVCKQLCTERQKSWWDAVCTLIHRKAVPGNVAKLRLLVQHEINTLRAQEKHGLQPALLVHWAECLQKTGSGLNSFYDQREYIGRSVHYWKKVLPLLKIIKKKNSIPEPIDPLFKHFHSVDIQASEIVEYEEDAHITFAILDAVNGNIEDAVTAFESIKSVVSYWNLALIFHRKAEDIENDALSPEEQEECKNYLRKTRDYLIKIIDDSDSNLSVVKKLPVPLESVKEMLNSVMQELEDYSEGGPLYKNGSLRNADSEIKHSTPSPTRYSLSPSKSYKYSPKTPPRWAEDQNSLLKMICQQVEAIKKEMQELKLNSSNSASPHRWPTENYGPDSVPDGYQGSQTFHGAPLTVATTGPSVYYSQSPAYNSQYLLRPAANVTPTKGPVYGMNRLPPQQHIYAYPQQMHTPPVQSSSACMFSQEMYGPPALRFESPATGILSPRGDDYFNYNVQQTSTNPPLPEPGYFTKPPIAAHASRSAESKTIEFGKTNFVQPMPGEGLRPSLPTQAHTTQPTPFKFNSNFKSNDGDFTFSSPQVVTQPPPAAYSNSESLLGLLTSDKPLQGDGYSGAKPIPGGQTIGPRNTFNFGSKNVSGISFTENMGSSQQKNSGFRRSDDMFTFHGPGKSVFGTPTLETANKNHETDGGSAHGDDDDDGPHFEPVVPLPDKIEVKTGEEDEEEFFCNRAKLFRFDVESKEWKERGIGNVKILRHKTSGKIRLLMRREQVLKICANHYISPDMKLTPNAGSDRSFVWHALDYADELPKPEQLAIRFKTPEEAALFKCKFEEAQSILKAPGTNVAMASNQAVRIVKEPTSHDNKDICKSDAGNLNFEFQVAKKEGSWWHCNSCSLKNASTAKKCVSCQNLNPSNKELVGPPLAETVFTPKTSPENVQDRFALVTPKKEGHWDCSICLVRNEPTVSRCIACQNTKSANKSGSSFVHQASFKFGQGDLPKPINSDFRSVFSTKEGQWDCSACLVQNEGSSTKCAACQNPRKQSLPATSIPTPASFKFGTSETSKTLKSGFEDMFAKKEGQWDCSSCLVRNEANATRCVACQNPDKPSPSTSVPAPASFKFGTSETSKAPKSGFEGMFTKKEGQWDCSVCLVRNEASATKCIACQNPGKQNQTTSAVSTPASSETSKAPKSGFEGMFTKKEGQWDCSVCLVRNEASATKCIACQNPGKQNQTTSAVSTPASSETSKAPKSGFEGMFTKKEGQWDCSVCLVRNEASATKCIACQCPSKQNQTTAISTPASSEISKAPKSGFEGMFIRKGQWDCSVCCVQNESSSLKCVACDASKPTHKPIAEAPSAFTLGSEMKLHDSSGSQVGTGFKSNFSEKASKFGNTEQGFKFGHVDQENSPSFMFQGSSNTEFKSTKEGFSIPVSADGFKFGISEPGNQEKKSEKPLENGTGFQAQDISGQKNGRGVIFGQTSSTFTFADLAKSTSGEGFQFGKKDPNFKGFSGAGEKLFSSQYGKMANKANTSGDFEKDDDAYKTEDSDDIHFEPVVQMPEKVELVTGEEDEKVLYSQRVKLFRFDAEVSQWKERGLGNLKILKNEVNGKLRMLMRREQVLKVCANHWITTTMNLKPLSGSDRAWMWLASDFSDGDAKLEQLAAKFKTPELAEEFKQKFEECQRLLLDIPLQTPHKLVDTGRAAKLIQRAEEMKSGLKDFKTFLTNDQTKVTEEENKGSGTGAAGASDTTIKPNPENTGPTLEWDNYDLREDALDDSVSSSSVHASPLASSPVRKNLFRFGESTTGFNFSFKSALSPSKSPAKLNQSGTSVGTDEESDVTQEEERDGQYFEPVVPLPDLVEVSSGEENEQVVFSHRAKLYRYDKDVGQWKERGIGDIKILQNYDNKQVRIVMRRDQVLKLCANHRITPDMTLQNMKGTERVWLWTACDFADGERKVEHLAVRFKLQDVADSFKKIFDEAKTAQEKDSLITPHVSRSSTPRESPCGKIAVAVLEETTRERTDVIQGDDVADATSEVEVSSTSETTPKAVVSPPKFVFGSESVKSIFSSEKSKPFAFGNSSATGSLFGFSFNAPLKSNNSETSSVAQSGSESKVEPKKCELSKNSDIEQSSDSKVKNLFASFPTEESSINYTFKTPEKAKEKKKPEDSPSDDDVLIVYELTPTAEQKALATKLKLPPTFFCYKNRPDYVSEEEEDDEDFETAVKKLNGKLYLDGSEKCRPLEENTADNEKECIIVWEKKPTVEEKAKADTLKLPPTFFCGVCSDTDEDNGNGEDFQSELQKVQEAQKSQTEGKQLFMYSF

SEQ ID NO: 749961 - protein, 2431 aa, Homo sapiens
HSGPPPATALRHWFAGAFLLEVATAAGLSAGLTRLGSQVGGAMRRSKADVERYIASVQGSTPSPRQKSMKGFYFAKLYYEAKEYDLAKKYICTYINVQERDPKAHRFLGLLYELEENTDKAVECYRRSVELNPTQKDLVLKIAELLCKNDVTDGRAKYWLERAAKLFPGSPAIYKLKEQLLDCEGEDGWNKLFDLIQSELYVRPDDVHVNIRLVEVYRSTKRLKDAVAHCHEAERNIALRSSLEWNSCVVQTLKEYLESLQCLESDKSDWRATNTDLLLAYANLMLLTLSTRDVQESRELLQSFDSALQSVKSLGGNDELSATFLEMKGHFYMHAGSLLLKMGQHSSNVQWRALSELAALCYLIAFQVPRPKIKLIKGEAGQNLLEMMACDRLSQSGHMLLNLSRGKQDFLKEIVETFANKSGQSALYDALFSSQSPKDTSFLGSDDIGNIDVREPELEDLTRYDVGAIRAHNGSLQHLTWLGLQWNSLPALPGIRKWLKQLFHHLPHETSRLETNAPESICILDLEVFLLGVVYTSHLQLKEKCNSHHSSYQPLCLPLPVCKQLCTERQKSWWDAVCTLIHRKAVPGNVAKLRLLVQHEINTLRAQEKHGLQPALLVHWAECLQKTGSGLNSFYDQREYIGRSVHYWKKVLPLLKIIKKKNSIPEPIDPLFKHFHSVDIQASEIVEYEEDAHITFAILDAVNGNIEDAVTAFESIKSVVSYWNLALIFHRKAEDIENDALSPEEQEECKNYLRKTRDYLIKIIDDSDSNLSVVKKLPVPLESVKEMLNSVMQELEDYSEGGPLYKNGSLRNADSEIKHSTPSPTRYSLSPSKSYKYSPKTPPRWAEDQNSLLKMICQQVEAIKKEMQELKLNSSNSASPHRWPTENYGPDSVPDGYQGSQTFHGAPLTVATTGPSVYYSQSPAYNSQYLLRPAANVTPTKGPVYGMNRLPPQQHIYAYPQQMHTPPVQSSSACMFSQEMYGPPALRFESPATGILSPRGDDYFNYNVQQTSTNPPLPEPGYFTKPPIAAHASRSAESKTIEFGKTNFVQPMPGEGLRPSLPTQAHTTQPTPFKFNSNFKSNDGDFTFSSPQVVTQPPPAAYSNSESLLGLLTSDKPLQGDGYSGAKPIPGGQTIGPRNTFNFGSKNVSGISFTENMGSSQQKNSGFRRSDDMFTFHGPGKSVFGTPTLETANKNHETDGGSAHGDDDDDGPHFEPVVPLPDKIEVKTGEEDEEEFFCNRAKLFRFDVESKEWKERGIGNVKILRHKTSGKIRLLMRREQVLKICANHYISPDMKLTPNAGSDRSFVWHALDYADELPKPEQLAIRFKTPEEAALFKCKFEEAQSILKAPGTNVAMASNQAVRIVKEPTSHDNKDICKSDAGNLNFEFQVAKKEGSWWHCNSCSLKNASTAKKCVSCQNLNPSNKELVGPPLAETVFTPKTSPENVQDRFALVTPKKEGHWDCSICLVRNEPTVSRCIACQNTKSANKSGSSFVHQASFKFGQGDLPKPINSDFRSVFSTKEGQWDCSACLVQNEGSSTKCAACQNPRKQSLPATSIPTPASFKFGTSETSKTLKSGFEDMFAKKEGQWDCSSCLVRNEANATRCVACQNPDKPSPSTSVPAPASFKFGTSETSKAPKSGFEGMFTKKEGQWDCSVCLVRNEASATKCIACQNPGKQNQTTSAVSTPASSETSKAPKSGFEGMFTKKEGQWDCSVCLVRNEASATKCIACQNPGKQNQTTSAVSTPASSETSKAPKSGFEGMFTKKEGQWDCSVCLVRNEASATKCIACQCPSKQNQTTAISTPASSEISKAPKSGFEGMFIRKGQWDCSVCCVQNESSSLKCVACDASKPTHKPIAEAPSAFTLGSEMKLHDSSGSQVGTGFKSNFSEKASKFGNTEQGFKFGHVDQENSPSFMFQGSSNTEFKSTKEGFSIPVSADGFKFGISEPGNQEKKSEKPLENGTGFQAQDISGQKNGRGVIFGQTSSTFTFADLAKSTSGEGFQFGKKDPNFKGFSGAGEKLFSSQYGKMANKANTSGDFEKDDDAYKTEDSDDIHFEPVVQMPEKVELVTGEEDEKVLYSQRVKLFRFDAEVSQWKERGLGNLKILKNEVNGKLRMLMRREQVLKVCANHWITTTMNLKPLSGSDRAWMWLASDFSDGDAKLEQLAAKFKTPELAEEFKQKFEECQRLLLDIPLQTPHKLVDTGRAAKLIQRAEEMKSGLKDFKTFLTNDQTKVTEEENKGSGTGAAGASDTTIKPNPENTGPTLEWDNYDLREDALDDSVSSSSVHASPLASSPVRKNLFRFGESTTGFNFSFKSALSPSKSPAKLNQSGTSVGTDEESDVTQEEERDGQYFEPVVPLPDLVEVSSGEENEQVVFSHRAKLYRYDKDVGQWKERGIGDIKILQNYDNKQVRIVMRKGTVDAAANLVVVGGR

SEQ ID NO: 749962 - protein, 586 aa, Homo sapiens
HSGPPPATALRHWFAGAFLLEVATAAGLSAGLTRLGSQVGGAMRRSKADVERYIASVQGSTPSPRQKSMKGFYFAKLYYEAKEYDLAKKYICTYINVQERDPKAHRFLGLLYELEENTDKAVECYRRSVELNPTQKDLVLKIAELLCKNDVTDGRAKYWLERAAKLFPGSPAIYKLKEQLLDCEGEDGWNKLFDLIQSELYVRPDDVHVNIRLVEVYRSTKRLKDAVAHCHEAERNIALRSSLEWNSCVVQTLKEYLESLQCLESDKSDWRATNTDLLLAYANLMLLTLSTRDVQESRELLQSFDSALQSVKSLGGNDELSATFLEMKGHFYMHAGSLLLKMGQHSSNVQWRALSELAALCYLIAFQVPRPKIKLIKGEAGQNLLEMMACDRLSQSGHMLLNLSRGKQDFLKEIVETFANKSGQSALYDALFSSQSPKDTSFLGSDDIGNIDVREPELEDLTRYDVGAIRAHNGSLQHLTWLGLQWNSLPALPGIRKWLKQLFHHLPHETSRLETNAPESICILDLEVFLLGVVYTSHLQLKEKCNSHHSSYQPLCLPLPVCKQLCTERQKSWWDAVCTLIHRKAV

SEQ ID NO: 749963 - protein, 393 aa, Homo sapiens
HSGPPPATALRHWFAGAFLLEVATAAGLSAGLTRLGSQVGGAMRRSKADVERYIASVQGSTPSPRQKSMKGFYFAKLYYEAKEYDLAKKYICTYINVQERDPKAHRFLGLLYELEENTDKAVECYRRSVELNPTQKDLVLKIAELLCKNDVTDGRAKYWLERAAKLFPGSPAIYKLKEQLLDCEGEDGWNKLFDLIQSELYVRPDDVHVNIRLVEVYRSTKRLKDAVAHCHEAERNIALRSSLEWNSCVVQTLKEYLESLQCLESDKSDWRATNTDLLLAYANLMLLTLSTRDVQESRELLQSFDSALQSVKSLGGNDELSATFLEMKGHFYMHAGSLLLKMGQHSSNVQWRALSELAALCYLIAFQVSLPLVGAIDISLSLDVFEMKVCSGM

SEQ ID NO: 749964 - protein, 151 aa, Homo sapiens
IQIHQTPSLPGASARGRQIFPSWCPDPNQFSPFWGLETSLGNIAASRLQLSSYECQSLKTWNLEVHAECLDKTMSQRHRSRPGHTVQSWSTNTTPGLHDLAMPPLLPLLLLPPHYVLHSSQAKPQAIPGSCIALTLPMKFPLMGRLFHLTQ

SEQ ID NO: 749965 - protein, 88 aa, Homo sapiens
NITDHSIVVRSSGRIHMLWQGVKNANWLAKAIHSKAARKWMRPFDGTHSTFTFISTDANLPLLQAVGLFQLIANKAGICINFNENFKY

SEQ ID NO: 749966 - protein, 157 aa, Homo sapiens
RHFRLQPPGRSFGLWCGEVVVSSARVREGPGAPLGTGLEAETGPEDQADVRIRPLDATAEPEQTRRARLGGYSQEVLVASAAAVRPQREARGCRECSVFSRSLQGVTGPVPFYLSEHHAELLTVDSTAFSMWYFFFSVNVHLFFASNMRFCYFSNVP

SEQ ID NO: 749967 - protein, 157 aa, Homo sapiens; identical to SEQ ID NO: 749966

SEQ ID NO: 749968 - protein, 157 aa, Homo sapiens; identical to SEQ ID NO: 749966

SEQ ID NO: 749969 - protein, 106 aa, Homo sapiens
  misc_feature (5)..(5): Xaa can be any naturally occurring amino acid
  misc_feature (9)..(9): Xaa can be any naturally occurring amino acid
GTRRXPAAXNVSFSQTPVDIWALGCMIIEMATGNPYLPSSSDLDLLHKIVLKVGFMPELKAKLLQEAKVNSLIKPKESSKENELRKDERKTVYTNTLLSSSVLGKK

SEQ ID NO: 749970 - protein, 455 aa, Homo sapiens
MEMYETLGKVGEGSYGTVMKCKHKNTGQIVAIKIFYERPEQSVNKIAMREIKFLKQFHHENLVNLIEVFRQKKKIHLVFEFIDHTVLDELQHYCHGLESKRLRKYLFQILRAIDYLHSNNIIHRDIKPENILVSQSGITKLCDFGFARTLAAPGDIYTDYVATRWYRAPELVLKDTSYGKPVDIWALGCMIIEMATGNPYLPSSSDLDLLHKIVLKVGNLSPHLQNIFSKSPIFAGVVLPQVQHPKNARKKYPKLNGLLADIVHACLQIDPADRISSSDLLHHEYFTRDGFIEKFMPELKAKLLQEAKVNSLIKPKESSKENELRKDERKTVYTNTLLSSSVLGKEIEKEKKPKEIKVRVIKVKGGRGDISEPKKKEYEGGLGQQDANENVHPMSPDTKLVTIEPPNPINPSTNCNGLKENPHCGGSVTMPPINLTNSNLMAANLSSNLFHPSVR

SEQ ID NO: 749971 - protein, 592 aa, Homo sapiens
MEMYETLGKVGEGSYGTVMKCKHKNTGQIVAIKIFYERPEQSVNKIAMREIKFLKQFHHENLVNLIEVFRQKKKIHLVFEFIDHTVLDELQHYCHGLESKRLRKYLFQILRAIDYLHSNNIIHRDIKPENILVSQSGITKLCDFGFARTLAAPGDIYTDYVATRWYRAPELVLKDTSYGKPVDIWALGCMIIEMATGNPYLPSSSDLDLLHKIVLKVGNLSPHLQNIFSKSPIFAGVVLPQVQHPKNARKKYPKLNGLLADIVHACLQIDPADRISSSDLLHHEYFTRDGFIEKFMPELKAKLLQEAKVNSLIKPKESSKENELRKDERKTVYTNTLLSSSVLGKEIEKEKKPKEIKVRVIKVKGGRGDISEPKKKEYEGGLGQQDANENVHPMSPDTKLVTIEPPNPINPSTNCNGLKENPHCGGSVTMPPINLTNSNLMAANLSSNLFHPSVRLTERAKKRRTSSQSIGQVMPNSRQEDPGPIQSQMEKGIFNERTGHSDQMANENKRKLNFSRSDRKEFHFPELPVTIQSKDTKGMEVKQIKMLKRESKKTESSKIPTLLNVDQNQEKQEGGDGHCEGKNLKRNRFFFW

SEQ ID NO: 749972 - protein, 219 aa, Homo sapiens
MEMYETLGKVGEGSYGTVMKCKHKNTGQIVAIKIFYERPEQSVNKIAMREIKFLKQFHHENLVNLIEVFRQKKKIHLVFEFIDHTVLDELQHYCHGLESKRLRKYLFQILRAIDYLHSNNIIHRDIKPENILVSQSGITKLCDFGFARTLAAPGDIYTDYVATRWYRAPELVLKDTSYGKPVDIWALGCMIIEMATGNPYLPSSSDLDLLHKIVLKVGK

SEQ ID NO: 749973 - protein, 455 aa, Homo sapiens; identical to SEQ ID NO: 749970

SEQ ID NO: 749974 - protein, 532 aa, Homo sapiens
MEMYETLGKVGEGSYGTVMKCKHKNTGQIVAIKIFYERPEQSVNKIAMREIKFLKQFHHENLVNLIEVFRQKKKIHLVFEFIDHTVLDELQHYCHGLESKRLRKYLFQILRAIDYLHSNKPVDIWALGCMIIEMATGNPYLPSSSDLDLLHKIVLKVGNLSPHLQNIFSKSPIFAGVVLPQVQHPKNARKKYPKLNGLLADIVHACLQIDPADRISSSDLLHHEYFTRDGFIEKFMPELKAKLLQEAKVNSLIKPKESSKENELRKDERKTVYTNTLLSSSVLGKEIEKEKKPKEIKVRVIKVKGGRGDISEPKKKEYEGGLGQQDANENVHPMSPDTKLVTIEPPNPINPSTNCNGLKENPHCGGSVTMPPINLTNSNLMAANLSSNLFHPSVRLTERAKKRRTSSQSIGQVMPNSRQEDPGPIQSQMEKGIFNERTGHSDQMANENKRKLNFSRSDRKEFHFPELPVTIQSKDTKGMEVKQIKMLKRESKKTESSKIPTLLNVDQNQEKQEGGDGHCEGKNLKRNRFFFW

SEQ ID NO: 749975 - protein, 374 aa, Homo sapiens
MEMYETLGKVGEGSYGTVMKCKHKNTGQIVAIKIFYERPEQSVNKIAMREIKFLKQFHHENLVNLIEVFRQKKKIHLVFEFIDHTVLDELQHYCHGLESKRLRKYLFQILRAIDYLHSNNIIHRDIKPENILVSQSGITKLCDFGFARTLAAPGDIYTDYVATRWYRAPELVLKDTSYGKPVDIWALGCMIIEMATGNPYLPSSSDLDLLHKIVLKVGNLSPHLQNIFSKSPIFAGVVLPQVQHPKNARKKYPKLNGLLADIVHEIEKEKKPKEIKVRVIKVKGGRGDISEPKKKEYEGGLGQQDANENVHPMSPDTKLVTIEPPNPINPSTNCNGLKENPHCGGSVTMPPINLTNSNLMAANLSSNLFHPSVR

SEQ ID NO: 749976 - protein, 181 aa, Homo sapiens
MIIEMATGNPYLPSSSDLDLLHKIVLKVGNLSPHLQNIFSKSPIFAGVVLPQVQHPKNARKKYPKLNGLLADIVHSQMEKGIFNERTGHSDQMANENKRKLNFSRSDRKEFHFPELPVTIQSKDTKGMEVKQIKMLKRESKKTESSKIPTLLNVDQNQEKQEGGDGHCEGKNLKRNRFFFW

SEQ ID NO: 749977 - protein, 333 aa, Homo sapiens
MEMYETLGKVGEGSYGTVMKCKHKNTGQIVAIKIFYERPEQSVNKIAMREIKFLKQFHHENLVNLIEVFRQKKKIHLVFEFIDHTVLDELQHYCHGLESKRLRKYLFQILRAIDYLHSNNIIHRDIKPENILVSQSGITKLCDFGFARTLAAPGDIYTDYVATRWYRAPELVLKDTSYGKPVDIWALGCMIIEMATGNPYLPSSSDLDLLHKIVLKVGNLSPHLQNIFSKSPIFAGVVLPQVQHPKNARKKYPKLNGLLADIVHACLQIDPADRISSSDLLHHEYFTRDGFIEKLTERAKKRRTSSQSIGQVMPNSRQEDPGPIQEPNGEGYI

SEQ ID NO: 749978 - protein, 511 aa, Homo sapiens
MVDSTEYEVASQPEVETSPLGDGASPGPEQVKLKKEISLLNGVCLIVGNMIGSGIFVSPKGVLIYSASFGLSLVIWAVGGLFSVFGALCYAELGTTIKKSGASYAYILEAFGGFLAFIRLWTSLLIIEPTSQAIIAITFANYMVQPLFPSCFAPYAASRLLAAACICLLTFINCAYVKWGTLVQDIFTYAKVLALIAVIVAGIVRLGQGASTHFENSFEGSSFAVGDIALALYSALFSYSGWDTLNYVTEEIKNPERNLPLSIGISMPIVTIIYILTNVAYYTVLDMRDILASDAVAVTFADQIFGIFNWIIPLSVALSCFGGLNASIVAASRLFFVGSREGHLPDAICMIHVERFTPVPSLLFNGIMALIYLCVEDIFQLINYYSFSYWFFVGLSIVGQLYLRWKEPDRPRPLKLSVFFPIVFCLCTIFLVAVPLYSDTINSLIGIAIALSGLPFYFLIIRVPEHKRPLYLRRIVGSATRYLQVLCMSVAAEMDLEDGGEMPKQRDPKSN

SEQ ID NO: 749979 - protein, 511 aa, Homo sapiens; identical to SEQ ID NO: 749978

SEQ ID NO: 749980 - protein, 511 aa, Homo sapiens; identical to SEQ ID NO: 749978

SEQ ID NO: 749981 - protein, 511 aa, Homo sapiens; identical to SEQ ID NO: 749978

SEQ ID NO: 749982 - protein, 511 aa, Homo sapiens; identical to SEQ ID NO: 749978

SEQ ID NO: 749983 - protein, 511 aa, Homo sapiens; identical to SEQ ID NO: 749978

SEQ ID NO: 749984 - protein, 461 aa, Homo sapiens
MVDSTEYEVASQPEVETSPLGDGASPGPEQVKLKKEISLLNGVCLIVGNMIGSGIFVSPKGVLIYSASFGLSLVIWAVGGLFSVFGALCYAELGTTIKKSGASYAYILEAFGGFLAFIRLWTSLLIIEPTSQAIIAITFANYMVQPLFPSCFAPYAASRLLAAACICLLTFINCAYVKWGTLVQDIFTYAKVLALIAVIVAGIVRLGQGASTHFENSFEGSSFAVGDIALALYSALFSYSGWDTLNYVTEEIKNPERNLPLSIGISMPIVTIIYILTNVAYYTVLDMRDILASDAVAVTFADQIFGIFNWIIPLSVALSCFGGLNASIVAASRLFFVGSREGHLPDAICMIHVERFTPVPSLLFNLSVFFPIVFCLCTIFLVAVPLYSDTINSLIGIAIALSGLPFYFLIIRVPEHKRPLYLRRIVGSATRYLQVLCMSVAAEMDLEDGGEMPKQRDPKSN

SEQ ID NO: 749985 - protein, 511 aa, Homo sapiens; identical to SEQ ID NO: 749978

SEQ ID NO: 749986 - protein, 511 aa, Homo sapiens
MVDSTEYEVASQPEVETSPLGDGASPGPEQVKLKKEISLLNGVCLIVGNMIGSGIFVSPKGVLIYSASFGLSLVIWAVGGLFSVFGALCYAELGTTIKKSGASYAYILEAFGGFLAFIRLWTSLLIIEPTSQAIIAITFANYMVQPLFPSCFAPYAASRLLAAACICLLTFINCAYVKWGTLVQDIFTYAKVLALIAVIVAGIVRLGQGASTHFENSFEGSSFAVGDIALALYSALFSYSGWDTLNYVTEEIKNPERNLPLSIGISMPIVTIIYILTNVAYYTVLDMRDILASDAVAVTFADQIFGIFNWIIPLSVALSCFGGLNASIVAASRLFFVGSREGHLPDAICMIHVERFTPVPSLLFNGIMALIYLCVEDIFQLINYYSFSYWFFVGLSIVGQLYLRWKEPDRPRPLKLSVFFPIVFCLCTIFLVAVPLYSDTINSLIGIAIALSGLPFYFLIIRVPEHKRPLYLRRIVGKPCILKSAQLLQSLVFAFFCKSSLQRHLCLSPFL

SEQ ID NO: 749987 - protein, 242 aa, Homo sapiens
MVDSTEYEVASQPEVETSPLGDGASPGPEQVKLKKEISLLNGVCLIVGNMIGSGIFVSPKGVLIYSASFGLSLVIWAVGGLFSVFGALCYAELGTTIKKSGASYAYILEAFGGFLAFIRLWTSLLIIEPTSQAIIAITFANYMVQPLFPSCFAPYAASRLLAAACICLLTFINCAYVKWGTLVQDIFTYAKVLALIAVIVAGIVRLGQGASTHSGYSSMCSSFAVGVTVMTRWSAPVRGSRR

SEQ ID NO: 749988 - protein, 104 aa, Homo sapiens
SSGRKGEQVFEKWPKARLKFRLFITPVASINLWWLEQVREVNCPLKRTKCTMRFRDTHEDKPQRAKLCQHVATFEPYIINRVAIEQIYLRQLSFIACFSGRHNY

SEQ ID NO: 749989 - protein, 93 aa, Homo sapiens
IPRATRMAVLVLRLTVVLGLLVLFLTCYADDKPDKPDDKPDDSGKDPKPDFPKFLSLLGTEIIENAVEFILRSMSRSTGFMEFDDNEGKHSSK

SEQ ID NO: 749990 - protein, 78 aa, Homo sapiens
IPRATRMAVLVLRLTVVLGLLVLFLTCYADDKPDKPDDKPDDSGKDPKPDFPKFLSLLGTEIIENAVEFILRSMSRST

SEQ ID NO: 749991 - protein, 377 aa, Homo sapiens
FHIHQRVHTGEKPYKCDVCGKGFSHNSPLICHRRVHTGEKPYKCEACGKGFTRNTDLHIHFRVHTGEKPYKCKECGKGFSQASNLQVHQNVHTGEKRFKCETCGKGFSQSSKLQTHQRVHTGEKPYRCDVCGKDFSYSSNLKLHQVIHTGEKPYKCEECGKGFSWRSNLHAHQRVHSGEKPYKCEQCDKSFSQAIDFRVHQRVHTGEKPYKCGVCGKGFSQSSGLQSHQRVHTGEKPYKCDVCGKGFRYSSQFIYHQRGHTGEKPYKCEECGKGFGRSLNLRHHQRVHTGEKPHICEECGKAFSLPSNLRVHLGVHTREKLFKCEECGKGFSQSARLEAHQRVHTGEKPYKCDICDKDFRHRSRLTYHQKVHTGKKL

SEQ ID NO: 749992 - protein, 334 aa, Homo sapiens
CPECGKGFSQASNLQVHQNVHTGEKPYQCPECGKGFSQASNLQVHQNVHTGEKRFKCETCGKGFSQSSKLQTHQRVHTGEKPYRCDVCGKDFSYSSNLKLHQVIHTGEKPYKCEECGKGFSWRSNLHAHQRVHSGEKPYKCEQCDKSFSQAIDFRVHQRVHTGEKPYKCGVCGKGFSQSSGLQSHQRVHTGEKPYKCDVCGKGFRYSSQFIYHQRGHTGEKPYKCEECGKGFGRSLNLRHHQRVHTGEKPHICEECGKAFSLPSNLRVHLGVHTREKLFKCEECGKGFSQSARLEAHQRVHTGEKPYKCDICDKDFRHRSRLTYHQKVHTGKKL

SEQ ID NO: 749993 - protein, 249 aa, Homo sapiens
CPECGKTFNQQLTLNICRLHTGEKPYKCEECGKGFSWRSNLHAHQRVHSGEKPYKCEQCDKSFSQAIDFRVHQRVHTGEKPYKCGVCGKGFSQSSGLQSHQRVHTGEKPYKCDVCGKGFRYSSQFIYHQRGHTGEKPYKCEECGKGFGRSLNLRHHQRVHTGEKPHICEECGKAFSLPSNLRVHLGVHTREKLFKCEECGKGFSQSARLEAHQRVHTGEKPYKCDICDKDFRHRSRLTYHQKVHTGKKL

SEQ ID NO: 749994 - protein, 114 aa, Homo sapiens
MEVDLSPSPIRKSEIAAGPARISMISPPQDGRMGSVSSRGPEHPGLTTSQRSVGKPLRIPPLQIPYKGPPLTPTPQLPGRAGRGDSPSFGGSQARLPPRPPISISSLLQRQCLV

SEQ ID NO: 749995 - protein, 101 aa, Homo sapiens
PNPRNSRMLKNKTKKLERQRLLPGPRASRPDNESEERGKASQDSTSANSLQGTPTNANTTVTRESRKRGLSKLRGLPGQAAPPAAHQHLQPAAEAVFSVKF

SEQ ID NO: 749996 - protein, 271 aa, Homo sapiens
RRAARLRALRGEAGPNLAWASRGPGLAAAVARLAWPTGCSVIAASSRPTGRRASASPTAGTCTATPASAKTDADIQAFFMSIDSLCKKYSRETSQILEFQEKHRKRLLAFYREKISRLEESLRKSVLQIEQLQSMRSSQQTAFSTIKSSVSTKPHGCLLPPHSSAPDRLESMEVDLSPSPIRKSEIAAGPARISMISPPQDGRMGSVSSRGPEHPGLTTSQRSVGKPLRIPPLQIPYKGPPLTPTPQLPGRAGRGDSPSFGGSQARLPPAP

SEQ ID NO: 749997 - protein, 258 aa, Homo sapiens
QSCPPSGPARGGWSQPCVGFAWARPRRCGRPPGMANWVFCNRCFQPPHRTSCFSLTNCGHVYCDACLGKGKKNECLICKAPCRTVLLSKHTDADIQAFFMSIDSLCKKYSRETSQILEFQEKHRKRLLAFYREKISRLEESLRKSVLQIEQLQSMRSSQQTAFSTIKSSVSTKPHGCLLPPHSSAPDRLESMEVDLSPSPIRKSEIAAGPARISMISPPQDGRMGLTLSKPPVPGECVISRGSPCFCIDVCPHWLLLL

SEQ ID NO: 749998 - protein, 249 aa, Homo sapiens
QSCPPSGPARGGWSQPCVGFAWARPRRCGRPPGMANWVFCNRCFQPPHRTSCFSLTNCGHVYCDACLGKGKKNECLICKAPCRTVLLSKHTDADIQAFFMSIDSLCKKYSRETSQYLRLSRGCCRLKLCPATSSKEVPRGSTHGSQAAARDPQEHWVSTTRAPRPGCRRSQSQPEAHGNTIQDAPHPLTLLHPSRTLIHTKSPWGRKLLEFIKHVCYHRHQSHRPCAPGWFCQVLQRPGAVSGEKTQQT

SEQ ID NO: 749999 - protein, 34 aa, Homo sapiens
MKDDCRCRGKSSFIYQKLSSEQKCCGKTEGKKGD

SEQ ID NO: 750000 - protein, 232 aa, Homo sapiens
RRAARLRALRGEAGPNLAWASRGPGLAAAVARLAWPTGCSVIAASSRPTGRRASASPTAGTCTATPASAKTDADIQAFFMSIDSLCKKYSRETSQILEFQEKHRKRLLAFYREKISRLEESLRKSVLQIEQLQSMRSSQQTAFSTIKSSVSTKPHGCLLPPHSSAPDRLESMEVDLSPSPIRKSEIAAGPARISMISPPQDGRMGSVSSRGPEHPGLTTSQRSVGKPLSVKF

SEQ ID NO: 750001 - protein, 118 aa, Homo sapiens
QIYRMQSLSPVCSGLENEQFKSPGNRVSRLSHLRHHYSKKWHRFRFNPKFYSFLSAQEPSHKIGTSLSSLTGSGKRNRIRSSLPWRQNSWKGYSENMRKLRKTHDIPCPDLPWSYKIE

SEQ ID NO: 750002 - protein, 126 aa, Homo sapiens
TSGGFGEDSACPSETEQDIRLSTSLLSSADWPTVAEESEHAPGPAFPGGNEQLPPKPAPEAGVAIAACVEMEQLYDPLDSDMPAMDTAGLFKESHEDMKKSDEEEEKQKMEDSLWAGVEACQKVDT

SEQ ID NO: 750003 - protein, 210 aa, Homo sapiens
AGTARDFGPEPASWGAASGRGGRDRPSRPGSPAVRVCAGPGAWSAAAGPVDGPGGGGGMRLLFLAVLRPHTGNAVTAQRVRAHLEAAGHVCVLKDAFDFESRSEIANLILAENCEAALALHLYRGGRLLQGHRIPFGVIFGGTDVNEDANQAEKNTVMGRVLEEASRMLRVRSMSRVKELQQHQTPLLTGIPFFNALRLTKVLIICTYFF

SEQ ID NO: 750004 - protein, 272 aa, Homo sapiens
AGTARDFGPEPASWGAASGRGGRDRPSRPGSPAVRVCAGPGAWSAAAGPVDGPGGGGGMRLLFLAVLRPHTGNAVTAQRVRAHLEAAGHVCVLKDAFDFESRSEIANLILAENCEAALALHLYRGGRLLQGHRIPFGVIFGGTDVNEDANQAEKNTVMGRVLEEARFAVAFTESMKEMAQAQWPHAKGKVYVQSQGIATTPNAAFNWNTFLQRSEINQSADNLHIFLLICGLRQVKDPLYLVDAFSAWHQEEPNVHLVIVGPEVDPVFTREV

SEQ ID NO: 750005 - protein, 386 aa, Homo sapiens
MCERAARLCRAGAHRLLREPPQQGRALGGLLRWVGARMGEPRESLAPAAPADPGPASPRGGTAVILDIFRRADKNDDGKLSLEEFQLFFADGVLNEKELEDLFHTIDSDNTNHVDTKELCDYFVDHMGDYEDVLASLETLNHSVLKAMGYTKKVYEGGSNVDQFVTRFLLKETANQIQSLLSSVESAVEAIEEQTSQLRQNHIKPSHSAAQTWCGSPTPASAPNHKLMAMEQGKTLPSATEDAKEEGLEAQISRLAELIGRLESKALWFDLQQRLSDEDGTNMHLQLVRQEMAVCPEQLSEFLDSLRQYLRGTTGVRNCFHITAVRLSDGFTFVIYEFWETEEAWKRHLQSPLCKAFRHVKVDTLSQPEALSRILVPAAWCTVGRD

SEQ ID NO: 750006 - protein, 404 aa, Homo sapiens
MAVGLRVCVSVAGSRLVVLAAASTWVRGGPLSATSLISSPWIPARGGGEGRGAQLPRTLSCSWEKRRIPVSGQRLQEALASPWPRADSASLFCRFSAVRTKMMMGSCPWRNSSSSLQMASLMRKNWRISFTRLTLTTPNYFVDHMGDYEDVLASLETLNHSVLKAMGYTKKVYEGGSNVDQFVTRFLLKETANQIQSLLSSVESAVEAIEEQTSQLRQNHIKPSHSAAQTWCGSPTPASAPNHKLMAMEQGKTLPSATEDAKEEGLEAQISRLAELIGRLESKALWFDLQQRLSDEDGTNMHLQLVRQEMAVCPEQLSEFLDSLRQYLRGTTGVRNCFHITAVRLSDGFTFVIYEFWETEEAWKRHLQSPLCKAFRHVKVDTLSQPEALSRILVPAAWCTVGRD

SEQ ID NO: 750007 - protein, 144 aa, Homo sapiens
LIAELESYWYWSRKSCRKETGSSGGGTAVCELSVFSFSECREVLLPLLTDQLSGQLDDNSNKPDHEASSQLLSNILEVLDRKDVGATAVHIQLIMERLLRRINRTVIGMNRQSPHIVSISLLDPTAAAVSLSPLPIGRPSGPVA

SEQ ID NO: 750008 - protein, 134 aa, Homo sapiens [sequence omitted]

SEQ ID NO: 750009 - protein, 80 aa, Homo sapiens
RGPLMQENPMGRGYICPLQYLASLGIQSLVQQRAFAGKTANKLMDALKDSDLLHWKHSLSELIDISIAQKTAIWRLYGRR

SEQ ID NO: 750010 - protein, 562 aa, Homo sapiens
MRVKEKWQKEELDVSVREEEVSCSGPLSQKQAEFFLSQQASLLKNDETKALTPASLQKELNNLLKFNPDFAEAHYLSYLNNLRVQDVFSSTHSLLHYFDRLILTGAESKSNGEEGYGRSLRYAALNLAALHCRFGHYQQAELALQEAIRIAQESNDHVCLQHCLSWLYVLGQKRSDSYVLLEHSVKKAVHFGLPRAFAGKTANKLMDALKDSDLLHWKHSLSELIDISIAQKTAIWRLYGRSTMALQQAQMLLSMNSLEAVNAGVQQNNTESFAVALCHLAELHAEQGCFAAASEVLKHLKERFPPNSQHAQLWMLCDQKIQFDRAMNDGKYHLADSLVTGITALNSIEGVYRKAVVLQAQNQMSEAHKLLQKLLVHCQKLKNTEMVISVLLSVAELYWRSSSPTIALPMLLQALALSKEYRLQYLASETVLNLAFAQLILGIPEQALSLLHMAIEPILADGAILDKGRAMFLVAKCQVASAASYDQPKKAEALEAAIENLNEAKNYFAKVDCKERIRDVVYFQARLYHTLGKTQERNRCAMLFRQLHQELPSHGVPLINHL

SEQ ID NO: 750011 - protein, 575 aa, Homo sapiens
MRVKEKWQKEELDVSVREEEVSCSGPLSQKQAEFFLSQQASLLKNDETKALTPASLQKELNNLLKFNPDFAEAHYLSYLNNLRVQDVFSSTHSLLHYFDRLILTGAESKSNGEEGYGRSLRYAALNLAALHCRFGHYQQAELALQEAIRIAQESNDHVCLQHCLSWLYVLGQKRSDSYVLLEHSVKKAVHFGLPYLASLGIQSLVQQRAFAGKTANKLMDALKDSDLLHWKHSLSELIDISIAQKTAIWRLYGRSTMALQQAQMLLSMNSLEAVNAGVQQNNTESFAVALCHLAELHAEQGCFAAASEVLKHLKERFPPNSQHAQLWMLCDQKIQFDRAMNDGKYHLADSLVTGITALNSIEGVYRKAVVLQAQNQMSEAHKLLQKLLVHCQKLKNTEMVISVLLSVAELYWRSSSPTIALPMLLQALALSKEYRLQYLASETVLNLAFAQLILGIPEQALSLLHMAIEPILADGAILDKGRAMFLVAKCQVASAASYDQPKKAEALEAAIENLNEAKNYFAKVDCKERIRDVVYFQARLYHTLGKTQERNRCAMLFRQLHQELPSHGVPLINHL

SEQ ID NO: 750012 - protein, 575 aa, Homo sapiens; identical to SEQ ID NO: 750011

SEQ ID NO: 750013 - protein, 562 aa, Homo sapiens; identical to SEQ ID NO: 750010

SEQ ID NO: 750014 - protein, 621 aa, Homo sapiens
MRVKEKWQKEELDVSVREEEVSCSGPLSQKQAEFFLSQQASLLKNDETKALTPASLQKELNNLLKFNPDFAEAHYLSYLNNLRVQDVFSSTHSLLHYFDRLILTGAESKSNGEEGYGRSLRYAALNLAALHCRFGHYQQAELALQEAIRIAQESNDHVCLQHCLSWLYVLGQKRSDSYVLLEHSVKKAVHFGLPYLASLGIQSLVQQRAFAGKTANKLMDALKDSDLLHWKHSLSELIDISIAQKTAIWRLYGRSTMALQQAQMLLSMNSLEAVNAGVQQNNTESFAVALCHLAELHAEQNKRLRSWELNPVSNTCKCQRQVSNRNLVDSKEEQWEWDIILMTYSSGCFAAASEVLKHLKERFPPNSQHAQLWMLCDQKIQFDRAMNDGKYHLADSLVTGITALNSIEGVYRKAVVLQAQNQMSEAHKLLQKLLVHCQKLKNTEMVISVLLSVAELYWRSSSPTIALPMLLQALALSKEYRLQYLASETVLNLAFAQLILGIPEQALSLLHMAIEPILADGAILDKGRAMFLVAKCQVASAASYDQPKKAEALEAAIENLNEAKNYFAKVDCKERIRDVVYFQARLYHTLGKTQERNRCAMLFRQLHQELPSHGVPLINHL

SEQ ID NO: 750015 - protein, 549 aa, Homo sapiens
MRVKEKWQKEELDVSVREEEVSCSGPLSQKQAEFFLSQQASLLKNDETKALTPASLQKELNNLLKFNPDFAEAHYLSYLNNLRVQDVFSSTHSLLHYFDRLILTGAESKSNGEEGYGRSLRYAALNLAALHCRFGHYQQAELALQEAIRIAQESNDHVCLQHCLSWLYVLGQKRSDSYVLLEHSVKKAVHFGLPRAFAGKTANKLMDALKDSDLLHWKHSLSELIDISITMALQQAQMLLSMNSLEAVNAGVQQNNTESFAVALCHLAELHAEQGCFAAASEVLKHLKERFPPNSQHAQLWMLCDQKIQFDRAMNDGKYHLADSLVTGITALNSIEGVYRKAVVLQAQNQMSEAHKLLQKLLVHCQKLKNTEMVISVLLSVAELYWRSSSPTIALPMLLQALALSKEYRLQYLASETVLNLAFAQLILGIPEQALSLLHMAIEPILADGAILDKGRAMFLVAKCQVASAASYDQPKKAEALEAAIENLNEAKNYFAKVDCKERIRDVVYFQARLYHTLGKTQERNRCAMLFRQLHQELPSHGVPLINHL

SEQ ID NO: 750016 - protein, 600 aa, Homo sapiens
MRVKEKWQKEELDVSVREEEVSCSGPLSQKQAEFFLSQQASLLKNDETKALTPASLQKELNNLLKFNPDFAEAHYLSYLNNLRVQDVFSSTHSLLHYFDRLILTGAESKSNGEEGYGRSLRYAALNLAALHCRFGHYQQAELALQEAIRIAQESNDHVCLQHCLSWLYVLGQKRSDSYVLLEHSVKKAVHFGLPYLASLGIQSLVQQRAFAGKTANKLMDALKDSDLLHWKHSLSELIDISIAQKTAIWRLYGRSTMALQQAQMLLSMNSLEAVNAGVQQNNTESFAVALCHLAELHAEQGCFAAASEVLKHLKERFPPNSQHAQLWMLCDQKIQFDRAMNDGKYHLADSLVTGITALNSIEGVYRKAVVLQAQNQMSEAHKLLQKLLVHCQKLKNTEMVIRKGSLVHLTEMWWWIFSSCVFLFTVIVLLSVAELYWRSSSPTIALPMLLQALALSKEYRLQYLASETVLNLAFAQLILGIPEQALSLLHMAIEPILADGAILDKGRAMFLVAKCQVASAASYDQPKKAEALEAAIENLNEAKNYFAKVDCKERIRDVVYFQARLYHTLGKTQERNRCAMLFRQLHQELPSHGVPLINHL

SEQ ID NO: 750017 - protein, 584 aa, Homo sapiens
MRVKEKWQKEELDVSVREEEVSCSGPLSQKQAEFFLSQQASLLKNDETKALTPASLQKELNNLLKFNPDFAEAHYLSYLNNLRVQDVFSSTHSLLHYFDRLILTGAESKSNGEEGYGRSLRYAALNLAALHCRFGHYQQAELALQEAIRIAQESNDHVCLQHCLSWLYVLGQKRSDSYVLLEHSVKKAVHFGLPYLASLGIQSLVQQRAFAGKTANKLMDALKDSDLLHWKHSLSELIDISIAQKTAIWRLYGRSTMALQQAQMLLSMNSLEAVNAGVQQNNTESFAVALCHLAELHAEQGCFAAASEVLKHLKERFPPNSQHAQLWMLCDQKIQFDRAMNDGKYHLADSLVTGITALNSIEGVYRKAVVLQAQNQMSEAHKLLQVRGLLYISRRCGGGSSHPVFSSLRSVVLLSVAELYWRSSSPTIALPMLLQALALSKEYRLQYLASETVLNLAFAQLILGIPEQALSLLHMAIEPILADGAILDKGRAMFLVAKCQVASAASYDQPKKAEALEAAIENLNEAKNYFAKVDCKERIRDVVYFQARLYHTLGKTQERNRCAMLFRQLHQELPSHGVPLINHL

SEQ ID NO: 750018 - protein, 759 aa, Homo sapiens
MASVHESLYFNPMMTNGVVHANVFGIKDWVTPYKIAVLVLLNEMSRTGEGAVSLMERRRLNQLLLPLLQGPDITLSKLYKLIEESCPQLANSVQIRIKLMAEGELKDMEQFFDDLSDSFSGTEPEVHKTSVVGLFLRHMILAYSKLSFSQVFKLYTALQQYFQNGEKKTVEDADMELTSRDEGDPTPCAPQQATSACYLQPEEEVSCSGPLSQKQAEFFLSQQASLLKNDETKALTPASLQKELNNLLKFNPDFAEAHYLSYLNNLRVQDVFSSTHSLLHYFDRLILTGAESKSNGEEGYGRSLRYAALNLAALHCRFGHYQQAELALQEAIRIAQESNDHVCLQHCLSWLYVLGQKRSDSYVLLEHSVKKAVHFGLPYLASLGIQSLVQQRAFAGKTANKLMDALKDSDLLHWKHSLSELIDISIAQKTAIWRLYGRSTMALQQAQMLLSMNSLEAVNAGVQQNNTESFAVALCHLAELHAEQGCFAAASEVLKHLKERFPPNSQHAQLWMLCDQKIQFDRAMNDGKYHLADSLVTGITALNSIEGVYRKAVVLQAQNQMSEAHKLLQKLLVHCQKLKNTEMVISVLLSVAELYWRSSSPTIALPMLLQALALSKEYRLQYLASETVLNLAFAQLILGIPEQALSLLHMAIEPILADGAILDKGRAMFLVAKCQVASAASYDQPKKAEALEAAIENLNEAKNYFAKVDCKERIRDVVYFQARLYHTLGKTQERNRCAMLFRQLHQELPSHGVPLINHL

SEQ ID NO: 750019 - protein, 556 aa, Homo sapiens
MRVKEKWQKEELDVSVREEEVSCSGPLSQKQAEFFLSQQASLLKNDETKALTPASLQKELNNLLKFNPDFAEAHYLSYLNNLRVQDVFSSTHSLLHYFDRLILTGAESKSNGEEGYGRSLRYAALNLAALHCRFGHYQQAELALQEAIRIAQESNDHVCLQHCLSWLYVLGQKRSDSYVLLEHSVKKAVHFGLPYLASLGIQSLVQQRAFAGKTANKLMDALKDSDLLHWKHSLSELIDISIAQKTAIWRLYGRSTMALQQAQMLLSMNSLEAVNAGVQQNNTESFAVALCHLAELHAEQGCFAAASEVLKHLKERFPPNSQHAQLWMLCDQKIQFDRAMNDGKYHLADSLVTGITALNSIEGVYRKAVVLQAQNQMSEAHKLLQKLLVHCQKLKNTEMVISVLLSVAELYWRSSSPTIALPMLLQALALSKEYRLQYLASETVLNLAFAQLILGIPEQALSLLHMAIEPILADGAILDKGRAMFLVAKCQVASAASYDQPKKAEALEAAIENLNEAKNYFAKVDCKERIRDVVYFQARLYHTLGKTQERNRTLVT

SEQ ID NO: 750020 - protein, 575 aa, Homo sapiens; identical to SEQ ID NO: 750011

SEQ ID NO: 750021 - protein, 575 aa, Homo sapiens; identical to SEQ ID NO: 750011

SEQ ID NO: 750022 - protein, 575 aa, Homo sapiens; identical to SEQ ID NO: 750011

SEQ ID NO: 750023 - protein, 420 aa, Homo sapiens
MRVKEKWQKEELDVSVREEEVSCSGPLSQKQAEFFLSQQASLLKNDETKALTPASLQKELNNLLKFNPDFAEAHYLSYLNNLRVQDVFSSTHSLLHYFDRLILTGAESKSNGEEGYGRSLRYAALNLAALHCRFGHYQQAELALQEAIRIAQESNDHVCLQHCLSWLYVLGQKRSDSYVLLEHSVKKAVHFGLPYLASLGIQSLVQQRAFAGKTANKLMDALKDSDLLHWKHSLSELIDISIAQKTAIWRLYGRSTMALQQAQMLLSMNSLEAVNAGVQQNNTESFAVALCHLAELHAEQGCFAAASEVLKHLKERFPPNSQHAQLWMLCDQKIQFDRAMNDGKYHLADSLVTGITALNSIEGVYRKAVVLQAQNQMSEAHKLLQKLLVHCQKLKNTEMVIRLWPSPRSTGYSTWPLKQC

SEQ ID NO: 750024 - protein, 301 aa, Homo sapiens
MRVKEKWQKEELDVSVREEEVSCSGPLSQKQAEFFLSQQASLLKNDETKALTPASLQKELNNLLKFNPDFAEAHYLSYLNNLRVQDVFSSTHSLLHYFDRLILTGAESKSNGEEGYGRSLRYAALNLAALHCRFGHYQQAELALQEAIRIAQESNDHVCLQHCLSWLYVLGQKRSDSYVLLEHSVKKAVHFGLPYLASLGIQSLVQQRAFAGKTANKLMDALKDSDLLHWKHSLSELIDISIAQKTAIWRLYGRSTMALQQAQMLLSMNSLEAVNAGVQQNNTESFAVALCHLAELHAEQN

SEQ ID NO: 750025 - protein, 255 aa, Homo sapiens
MRVKEKWQKEELDVSVREEEVSCSGPLSQKQAEFFLSQQASLLKNDETKALTPASLQKELNNLLKFNPDFAEAHYLSYLNNLRVQDVFSSTHSLLHYFDRLILTGAESKSNGEEGYGRSLRYAALNLAALHCRFGHYQQAELALQEAIRIAQESNDHVCLQHCLSWLYVLGQKRSDSYVLLEHSVKKAVHFGLPYLASLGIQSLVQQRAFAGKTANKLMDALKDSDLLHWKHSLSELIDISIAQKTAIWRLYGRR

SEQ ID NO: 750026 - protein, 346 aa, Homo sapiens
MRVKEKWQKEELDVSVREEEVSCSGPLSQKQAEFFLSQQASLLKNDETKALTPASLQKELNNLLKFNPDFAEAHYLSYLNNLRVQDVFSSTHSLLHYFDRLILTGAESKSNGEEGYGRSLRYAALNLAALHCRFGHYQQAELALQEAIRIAQESNDHVCLQHCLSWLYVLGQKRSDSYVLLEHSVKKAVHFGLPRAFAGKTANKLMDALKDSDLLHWKHSLSELIDISIAQKTAIWRLYGRSTMALQQAQMLLSMNSLEAVNAGVQQNNTESFAVALCHLAELHAEQGCFAAASEVLKHLKERFPPNSQHAHFGPLWSQKTFCPTFFDRQIYLVVSTVFRNNHFFI

SEQ ID NO: 750027 - protein, 327 aa, Homo sapiens
MRVKEKWQKEELDVSVREEEVSCSGPLSQKQAEFFLSQQASLLKNDETKALTPASLQKELNNLLKFNPDFAEAHYLSYLNNLRVQDVFSSTHSLLHYFDRLILTGAESKSNGEEGYGRSLRYAALNLAALHCRFGHYQQAELALQEAIRIAQESNDHVCLQHCLSWLYVLGQKRSDSYVLLEHSVKKAVHFGLPRAFAGKTANKLMDALKDSDLLHWKHSLSELIDISIAQKTAIWRLYGRSTMALQQAQMLLSMNSLEAVNAGVQQNNTESFAVALCHLAELHAEQGCFAAASEVLKHLKERFPPNSQHAPLLGAIGAQNTSCQNQ

SEQ ID NO: 750028 - protein, 192 aa, Homo sapiens
MASVHESLYFNPMMTNGVVHANVFGIKDWVTPYKIAVLVLLNEMSRTGEGAVSLMERRRLNQLLLPLLQGPDITLSKLYKLIEESCPQLANSVQIRIKLMAEGELKDMEQFFDDLSDSFSGTEPEVHKTSVVGLFLRHMILAYSKLSFSQVFKLYTALQQYFQNGEKKTVEDADMELTSRDEGERKMAKRRT

SEQ ID NO: 750029 - protein, 192 aa, Homo sapiens; identical to SEQ ID NO: 750028

SEQ ID NO: 750030 - protein, 192 aa, Homo sapiens; identical to SEQ ID NO: 750028

SEQ ID NO: 750031 - protein, 192 aa, Homo sapiens; identical to SEQ ID NO: 750028

SEQ ID NO: 750032 - protein, 132 aa, Homo sapiens [sequence omitted]

SEQ ID NO: 750033 - protein, 137 aa, Homo sapiens
MASVHESLYFNPMMTNGVVHANVFGIKDWVTPYKIAVLVLLNEMSRTGEGAVSLMERRRLNQLLLPLLQGPDITLSKLYKLIEESCPQLANSVQIRIKLMAEGELKDMEQFFDDLSDSFSGTEPEVHKTSVVGMKLF

SEQ ID NO: 750034 - protein, 575 aa, Homo sapiens; identical to SEQ ID NO: 750011

SEQ ID NO: 750035 - protein, 575 aa, Homo sapiens; identical to SEQ ID NO: 750011

SEQ ID NO: 750036 - protein, 312 aa, Homo sapiens
MLLSMNSLEAVNAGVQQNNTESFAVALCHLAELHAEQGCFAAASEVLKHLKERFPPNSQHAQLWMLCDQKIQFDRAMNDGKYHLADSLVTGITALNSIEGVYRKAVVLQAQNQMSEAHKLLQKLLVHCQKLKNTEMVISVLLSVAELYWRSSSPTIALPMLLQALALSKEYRLQYLASETVLNLAFAQLILGIPEQALSLLHMAIEPILADGAILDKGRAMFLVAKCQVASAASYDQPKKAEALEAAIENLNEAKNYFAKVDCKERIRDVVYFQARLYHTLGKTQERNRCAMLFRQLHQELPSHGVPLINHL

SEQ ID NO: 750037 - protein, 357 aa, Homo sapiens
MDALKDSDLLHWKHSLSELIDISIAQKTAIWRLYGRSTMALQQAQMLLSMNSLEAVNAGVQQNNTESFAVALCHLAELHAEQGCFAAASEVLKHLKERFPPNSQHAQLWMLCDQKIQFDRAMNDGKYHLADSLVTGITALNSIEGVYRKAVVLQAQNQMSEAHKLLQKLLVHCQKLKNTEMVISVLLSVAELYWRSSSPTIALPMLLQALALSKEYRLQYLASETVLNLAFAQLILGIPEQALSLLHMAIEPILADGAILDKGRAMFLVAKCQVASAASYDQPKKAEALEAAIENLNEAKNYFAKVDCKERIRDVVYFQARLYHTLGKTQERNRCAMLFRQLHQELPSHGVPLINHL

SEQ ID NO: 750038 - protein, 424 aa, Homo sapiens
MRVKEKWQKEELDVSVREEEVSCSGPLSQKQAEFFLSQQASLLKNDETKALTPASLQKELNNLLKFNPDFAEAHYLSYLNNLRVQDVFSSTHSLLHYFDRLILTGAESKSNGEEGYGRSLRYAALNLAALHCRFGHYQQAELALQEAIRIAQESNDHVCLQHCLSWLYVLGQKRSDSYVLLEHSVKKAVHFGLPYLASLGIQSLVQQRAFAGKTANKLMDALKDSDLLHWKHSLSELIDISIAQKTAIWRLYGRSTMALQQAQMLLSMNSLEAVNAGVQQNNTESFAVALCHLAELHAEQGCFAAASEVLKHLKERFPPNSQHAQLWMLCDQKIQFDRAMNDGKYHLADSLVTGITALNSIEGVYRKAVVLQAQNQMSEAHKLLQCPTVRGRAVLAIFLPYHRAAHAPAGSGPLQGVPVTVLGL

SEQ ID NO: 750039 - protein, 1309 aa, Homo sapiens
RRPALSSCWQSPATETTVLMSQTEADLALRPPPPLGTAGQPRLGPPPRRARRFSGKAEPRPRSSRLSRRSSVDLGLLSSWSLPASPAPDPPDPPDSAGPGPARSPPPSSKEPPEGTWTEGAPVKAAEDSARPELPDSAVGPGSREPLRVPEAVALERRREQEEKEDMETQAVATSPDGRYLKFDIEIGRGSFKTVYRGLDTDTTVEVAWCELQTRKLSRAERQRFSEEVEMLKGLQHPNIVRFYDSWKSVLRGQVCIVLVTELMTSGTLKTYLRRFREMKPRVLQRWSRQILRGLHFLHSRVPPILHRDLKCDNVFITGPTGSVKIGDLGLATLKRASFAKSVIGTPEFMAPEMYEEKYDEAVDVYAFGMCMLEMATSEYPYSECQNAAQIYRKVTSGRKPNSFHKVKIPEVKEIIEGCIRTDKNERFTIQDLLAHAFFREERGVHVELAEEDDGEKPGLKLWLRMEDARRGGRPRDNQAIEFLFQLGRDAAEEVAQEMVALGLVCEADYQPVARAVRERVAAIQRKREKLRKARELEALPPEPGPPPATVPMAPGPPSVFPPEPEEPEADQHQPFLFRHASYSSTTSDCETDGYLSSSGFLDASDPALQPPGGVPSSLAESHLCLPSAFALSIPRSGPGSDFSPGDSYASDAASGLSDVGEGMGQMRRPPGRNLRRRPRSRLRVTSVSDQNDRVVECQLQTHNSKMVTFRFDLDGDSPEEIAAAMVYNEFILPSERDGFLRRIREIIQRVETLLKRDTGPMEAAEDTLSPQEEPAPLPALPVPLPDPSNEELQSSTSLEHRSWTAFSTSSSSPGTPLSPGNPFSPGTPISPGPIFPITSPPCHPSPSPFSPISSQVSSNPSPHPTSSPLPFSSSTPEFPVPLSQCPWSSLPTTSPPTFSPTCSQVTLSSPFFPPCPSTSSFPSTTAAPLLSLASAFSLAVMTVAQSLLSPSPGLLSQSPPAPPSPLPSLPLPPPVAPGGQESPSPHTAEVESEASPPPARPLPGEARLAPISEEGKPQLVGRFQVTSSKEPAEPLPLQPTSPTLSGSPKPSTPQLTSESSDTEDSAGGGPETREALAESDRAAEGLGAGVEEEGDDGKEPQVGGSPQPLSHPSPVWMNYSYSSLCLSSEESESSGEDEEFWAELQSLRQKHLSEVETLQTLQKKEIEDLYSRLGKQPPPGIVAPAAMLSSRQRRLSKGSFPTSRRNSLQRSEPPGPGIMRRNSLSGSSTGSQEQRASKGVTFAGDVGRMVRAGPREGEPREWYLAAASPSSHLGGFFITFSFPSSEFRTEAMYLPHTRAHHGACVLRI

SEQ ID NO: 750040 - protein, 1250 aa, Homo sapiens
RRPALSSCWQSPATETTVLMSQTEADLALRPPPPLGTAGQPRLGPPPRRARRFSGKAEPRPRSSRLSRRSSVDLGLLSSWSLPASPAPDPPDPPDSAGPGPARSPPPSSKEPPEGTWTEGAPVKAAEDSARPELPDSAVGPGSREPLRVPEAVALERRREQEEKEDMETQAVATSPDGRYLKFDIEIGRGSFKTVYRGLDTDTTVEVAWCELQTRKLSRAERQRFSEEVEMLKGLQHPNIVRFYDSWKSVLRGQVCIVLVTELMTSGTLKTYLRRFREMKPRVLQRWSRQILRGLHFLHSRVPPILHRDLKCDNVFITGPTGSVKIGDLGLATLKRASFAKSVIGTPEFMAPEMYEEKYDEAVDVYAFGMCMLEMATSEYPYSECQNAAQIYRKVTSGRKPNSFHKVKIPEVKEIIEGCIRTDKNERFTIQDLLAHAFFREERGVHVELAEEDDGEKPGLKLWLRMEDARRGGRPRDNQAIEFLFQLGRDAAEEVAQEMVALGLVCEADYQPVARAVRERVAAIQRKREKLRKARELEALPPEPGPPPATVPMAPGPPSVFPPEPEEPEADQHQPFLFRHASYSSTTSDCETDGYLSSSGFLDASDPALQPPGGVPSSLAESHLCLPSAFALSIPRSGPGSDFSPGDSYASDAASGLSDVGEGMGQMRRPPGRNLRRRPRSRLRVTSVSDQNDRVVECQLQTHNSKMVTFRFDLDGDSPEEIAAAMVYNEFILPSERDGFLRRIREIIQRVETLLKRDTGPMEAAEDTLSPQEEPAPLPALPVPLPDPSNEELQSSTSLEHRSWTAFSTSSSSPGTPLSPGNPFSPGTPISPGPIFPITSPPCHPSPSPFSPISSQVSSNPSPHPTSSPLPFSSSTPEFPVPLSQCPWSSLPTTSPPTFSPTCSQVTLSSPFFPPCPSTSSFPSTTAAPLLSLASAFSLAVMTVAQSLLSPSPGLLSQSPPAPPSPLPSLPLPPPVAPGGQESPSPHTAEVESEASPPPARPLPGEARLAPISEEGKPQLVGRFQVTSSKEPAEPLPLQPTSPTLSGSPKPSTPQLTSESSDTEDSAGGGPETREALAESDRAAEGLGAGVEEEGDDGKEPQVGGSPQPLSHPSPVWMNYSYSSLCLSSEESESSGEDEEFWAELQSLRQKHLSEVETLQTLQKKEIEDLYSRLGKQPPPGIVAPAAMLSSRQRRLSKGSFPTSRRNSLQRSEPPGPGIMRRNSLSGSSTGSQEQRASKGVTFAGDVGRM

SEQ ID NO: 750041 - protein, 745 aa, Homo sapiens
RRPALSSCWQSPATETTVLMSQTEADLALRPPPPLGTAGQPRLGPPPRRARRFSGKAEPRPRSSRLSRRSSVDLGLLSSWSLPASPAPDPPDPPDSAGPGPARSPPPSSKEPPEGTWTEGAPVKAAEDSARPELPDSAVGPGSREPLRVPEAVALERRREQEEKEDMETQAVATSPDGRYLKFDIEIGRGSFKTVYRGLDTDTTVEVAWCELQTRKLSRAERQRFSEEVEMLKGLQHPNIVRFYDSWKSVLRGQVCIVLVTELMTSGTLKTYLRRFREMKPRVLQRWSRQILRGLHFLHSRVPPILHRDLKCDNVFITGPTGSVKIGDLGLATLKRASFAKSVIGTPEFMAPEMYEEKYDEAVDVYAFGMCMLEMATSEYPYSECQNAAQIYRKVTSGRKPNSFHKVKIPEVKEIIEGCIRTDKNERFTIQDLLAHAFFREERGVHVELAEEDDGEKPGLKLWLRMEDARRGGRPRDNQAIEFLFQLGRDAAEEVAQEMVALGLVCEADYQPVARAVRERVAAIQRKREKLRKARELEALPPEPGPPPATVPMAPGPPSVFPPEPEEPEADQHQPFLFRHASYSSTTSDCETDGYLSSSGFLDASDPALQPPGGVPSSLAESHLCLPSAFALSIPRSGPGSDFSPGDSYASDAASGLSDVGEGMGQMRRPPGRNLRRRPRSRLRVTSVSDQNDRVVECQLQTHNSKMVTFRFDLDGDSPEEIAAAMVRGREMRTECLDLEQESPS

SEQ ID NO: 750042 - protein, 1250 aa, Homo sapiens; identical to SEQ ID NO: 750040

SEQ ID NO: 750043 - protein, 1244 aa, Homo sapiens
RRPALSSCWQSPATETTVLMSQTEADLALRPPPPLGTAGQPRLGPPPRRARRFSGKAEPRPRSSRLSRRSSVDLGLLSSWSLPASPAPDPPDPPDSAGPGPARSPPPSSKEPPEGTWTEGAPVKAAEDSARPELPDSAVGPGSREPLRVPEAVALERRREQEEKEDMETQAVATSPDGRYLKFDIEIGRGSFKTVYRGLDTDTTVEVAWCELQTRKLSRAERQRFSEEVEMLKGLQHPNIVRFYDSWKSVLRGQVCIVLVTELMTSGTLKTYLRRFREMKPRVLQRWSRQILRGLHFLHSRVPPILHRDLKCDNVFITGPTGSVKIGDLGLATLKRASFAKSVIGTPEFMAPEMYEEKYDEAVDVYAFGMCMLEMATSEYPYSECQNAAQIYRKVTSGRKPNSFHKVKIPEVKEIIEGCIRTDKNERFTIQDLLAHAFFREERGVHVELAEEDDGEKPGLKLWLRMEDARRGGRPRDNQAIEFLFQLGRDAAEEVAQEMVALGLVCEADYQPVARAVRERVAAIQRKREKLRKARELEALPPEPGPPPATVPMAPGPPSVFPPEPEEPEADQHQPFLFRHASYSSTTSDCETDGYLSSSGFLDASDPALQPPGGVPSSLAESHLCLPSAFALSIPRSGPGSDFSPGDSYASDAASGLSDVGEGMGQMRRPPGRNLRRRPRSRLRVTSVSDQNDRVVECQLQTHNSKMVTFRFDLDGDSPEEIAAAMVYNEFILPSERDGFLRRIREIIQRVETLLKRDTGPMEAAEDTLSPQEEPAPLPALPVPLPDPSNEELQSSTSLEHRSWTAFSTSSSSPGTPLSPGNPFSPGTPISPGPIFPITSPPCHPSPSPFSPISSQVSSNPSPHPTSSPLPFSSSTPEFPVPLSQCPWSSLPTTSPPTFSPTCSQVTLSSPFFPPCPSTSSFPSTTAAPLLSLASAFSLAVMTVAQSLLSPSPGLLSQSPPAPPSPLPSLPLPPPVAPGGQESPSPHTAEVESEASPPPARPLPGEARLAPISEEGKPQLVGRFQVTSSKEPAEPLPLQPTSPTLSGSPKPSTPQLTSESSDTEDSAGGGPETREALAESDRAAEGLGAGVEEEGDDGKEPQVGGSPQPLSHPSPVWMNYSYSSLCLSSEESESSGEDEEFWAELQSLRQKHLSEVETLQTLQKKEIEDLYSRLGKQPPPGIVAPAAMLSSRQRRLSKGSFPTSRRNSLQRSEPPGPVNSEQKPCISPTPGPTMELVFSESDAF

SEQ ID NO: 750044 - protein, 99 aa, Homo sapiens
TPQLTSESSDTEDSAGGGPETREALAESDRAAEGLGAGVEEEGDDGKEPQVGGSPQPLSHPSPVWMNYSYSSLCLSSEESESSGEDEEFWAELQSLRQK

SEQ ID NO: 750045 - protein, 232 aa, Homo sapiens
GPGGRPTRLLSPSSSSPPFTAENRKKTMDKIIRGKLALPPYLTPDARDLVKKFLKRNPSQRIGGGPGDAADVQRHPFFRHMNWDDLLAWRVDPPFRPCLQSEEDVSQFDTRFTRQTPVDSPDDTALSESANQAFLGFTYVAPSVLDSIKEGFSFQPKLRSPRRLNSSPRVPVSPLKFSPFEGFRPSPSLPEPTELPLPPLLPPPPPSTTAPLPIRPPSGTKKSKRGRGRPGR

SEQ ID NO: 750046 - protein, 482 aa, Homo sapiens
MAAVFDLDLETEEGSEGEGEPELSPADACPLAELRAAGLEPVGHYEEVELTETSVNVGPERIGPHCFELLRVLGKGGYGKVFQVRKVQGTNLGKIYAMKVLRKAKIVRNAKDTAHTRAERNILESVKHPFIVELAYAFQTGGKLYLILECLSGGELFTHLEREGIFLEDTACFYLAEITLALGHLHSQGIIYRDLKPENIMLSSQGHIKLTDFGLCKESIHEGAVTHTFCGTIEYMAPEILVRSGHNRAVDWWSLGALMYDMLTGSPPFTAENRKKTMDKIIRGKLALPPYLTPDARDLVKKFLKRNPSQRIGGGPGDAADVQRHPFFRHMNWDDLLAWRVDPPFRPCLQSEEDVSQFDTRFTRQTPVDSPDDTALSESANQAFLGFTYVAPSVLDSIKEGFSFQPKLRSPRRLNSSPRVPVSPLKFSPFEGFRPSPSLPEPTELPLPPLLPPPPPSTTAPLPIRPPSGTKKSKRGRGRPGR

SEQ ID NO: 750047 - protein, 390 aa, Homo sapiens
MAAVFDLDLETEEGSEGEGEPELSPADACPLAELRAAGLEPVGHYEEVELTETSVNVGPERIGPHCFELLRVLGKGGYGKVFQVRKVQGTNLGKIYAMKVLRKAKIVRNAKDTAHTRAERNILESVKHPFIVELAYAFQTGGKLYLILECLSGGELFTHLEREGIFLEDTACFYLAEITLALGHLHSQGIIYRDLKPENIMLSSQGHIKLTDFGLCKESIHEGAVTHTFCGTIEYMAPEILVRSGHNRAVDWWSLGALMYDMLTGSPPFTAENRKKTMDKIIRGKLALPPYLTPDARDLVKKFLKRNPSQRIGGGPGDAADVQRHPFFRHMNWDDLLAWRVDPPFRPCLQSEEDVSQFDTRFTRQTPVDSPDDTALSESANQAFLVSAGA

SEQ ID NO: 750048 - protein, 497 aa, Homo sapiens
LVGLGVNLAECQSVRGQVRADGPAGPAPPWRPCLIWIWRRRKAARARASQSSAPRPVGHYEEVELTETSVNVGPERIGPHCFELLRVLGKGGYGKVFQVRKVQGTNLGKIYAMKVLRKAKIVRNAKDTAHTRAERNILESVKHPFIVELAYAFQTGGKLYLILECLSGGELFTHLEREGIFLEDTACFYLAEITLALGHLHSQGIIYRDLKPENIMLSSQGHIKLTDFGLCKESIHEGAVTHTFCGTIEYMAPEILVRSGHNRAVDWWSLGALMYDMLTGSPPFTAENRKKTMDKIIRGKLALPPYLTPDARDLVKKFLKRNPSQRIGGGPGDAADVQRHPFFRHMNWDDLLAWRVDPPFRPCLQSEEDVSQFDTRFTRQTPVDSPDDTALSESANQAFLGFTYVAPSVLDSIKEGFSFQPKLRSPRRLNSSPRVPVSPLKFSPFEGFRPSPSLPEPTELPLPPLLPPPPPSTTAPLPIRPPSGTKKSKRGRGRPGR

SEQ ID NO: 750049 - protein, 282 aa, Homo sapiens
MLSSQGHIKLTDFGLCKESIHEGAVTHTFCGTIEYMAPEILVRSGHNRAVDWWSLGALMYDMLTGSPPFTAENRKKTMDKIIRGKLALPPYLTPDARDLVKKFLKRNPSQRIGGGPGDAADVQRHPFFRHMNWDDLLAWRVDPPFRPCLQSEEDVSQFDTRFTRQTPVDSPDDTALSESANQAFLGFTYVAPSVLDSIKEGFSFQPKLRSPRRLNSSPRVPVSPLKFSPFEGFRPSPSLPEPTELPLPPLLPPPPPSTTAPLPIRPPSGTKKSKRGRGRPGR

SEQ ID NO: 750050 - protein, 282 aa, Homo sapiens; identical to SEQ ID NO: 750049

SEQ ID NO: 750051 - protein, 205 aa, Homo sapiens [sequence omitted]

SEQ ID NO: 750052 - protein, 184 aa, Homo sapiens
MDKIIRGKLALPPYLTPDARDLVKKRHPFFRHMNWDDLLAWRVDPPFRPCLQSEEDVSQFDTRFTRQTPVDSPDDTALSESANQAFLGFTYVAPSVLDSIKEGFSFQPKLRSPRRLNSSPRVPVSPLKFSPFEGFRPSPSLPEPTELPLPPLLPPPPPSTTAPLPIRPPSGTKKSKRGRGRPGR

SEQ ID NO: 750053 - protein, 168 aa, Homo sapiens
LVGLGVNLAECQSVRGQVRADGPAGPAPPWRPCLIWIWRRRKAARARASQSSAPRPVGHYEEVELTETSVNVGPERIGPHCFELLRVLGKGGYGKVFQVRKVQGTNLGKIYAMKVLRKAKIVRNAKDTAHTRAERNILESVKHPFIVELAYAFQTGGKLYLILECLSD

SEQ ID NO: 750054 - protein, 47 aa, Homo sapiens
MAAVFDLDLETEEGSEGEGEPELSPAVSALPWRDWILEPILSPSRGR

SEQ ID NO: 750055 - protein, 482 aa, Homo sapiens; identical to SEQ ID NO: 750046

SEQ ID NO: 750056 - protein, 482 aa, Homo sapiens; identical to SEQ ID NO: 750046

SEQ ID NO: 750057 - protein, 282 aa, Homo sapiens; identical to SEQ ID NO: 750049

SEQ ID NO: 750058 - protein, 282 aa, Homo sapiens; identical to SEQ ID NO: 750049

SEQ ID NO: 750059 - protein, 277 aa, Homo sapiens
RLWKTGRLWKTGRLWKTARLWKTGRLWKTGRLWKTGEAVEDGRAVDWWSLGALMYDMLTGSPPFTAENRKKTMDKIIRGKLALPPYLTPDARDLVKKFLKRNPSQRIGGGPGDAADVQRHPFFRHMNWDDLLAWRVDPPFRPCLQSEEDVSQFDTRFTRQTPVDSPDDTALSESANQAFLGFTYVAPSVLDSIKEGFSFQPKLRSPRRLNSSPRVPVSPLKFSPFEGFRPSPSLPEPTELPLPPLLPPPPPSTTAPLPIRPPSGTKKSKRGRGRPGR

SEQ ID NO: 750060 - protein, 153 aa, Homo sapiens
MAAVFDLDLETEEGSEGEGEPELSPADACPLAELRAAGLEPVGHYEEVELTETSVNVGPERIGPHCFELLRVLGKGGYGKVFQVRKVQGTNLGKIYAMKVLRKAKIVRNAKDTAHTRAERNILESVKHPFIVELAYAFQTGGKLYLILECLSD

SEQ ID NO: 750061 - protein, 182 aa, Homo sapiens
MAAVFDLDLETEEGSEGEGEPELSPADACPLAELRAAGLEPVGHYEEVELTETSVNVGPERIGPHCFELLRVLGKGGYGKVFQVRKVQGTNLGKIYAMKVLRKAKIVRNAKDTAHTRAERNILESVKHPFIVELAYAFQTGGKLYLILECLSGMSAGPGRGAGGRGGAASQQRKLWGEALER

SEQ ID NO: 750062 - protein, 122 aa, Homo sapiens
ALGALATSVGQCWLRLLCLSWGPQFLHPLWPGCLDGSLWSPRPVCLGRWERLPSLTECWEPLAGPRRLLFCLGFPCSPLKFSPFEGFRPSPSLPEPTELPLPPLLPPPPPSTTAPLPIRPPS

SEQ ID NO: 750063 - protein, 242 aa, Homo sapiens
GGVCAHSIEGGELFERIVDEDYHLTEVDTMVFVRQICDGILFMHKMRVLHLDLKPENILCVNTTGHLVKIIDFGLARRYNPNEKLKVNFGTPEFLSPEVVNYDQISDKTDMWSMGVITYMLLSGLSPFLGDDDTETLNNVLSGNWYFDEETFEAVSDEAKDFVSNLIVKDQRARMNAAQCLAHPWLNNLAEKAKRCNRRLKSQILLKKYLMKRRWKKNFIAVSAANRFKKISSSGALMALGV

SEQ ID NO: 750064 - protein, 596 aa, Homo sapiens
MATENGAVELGIQNPSTDKAPKGPTGERPLAAGKDPGPPDPKKAPDPPTLKKDAKAPASEKGDGTLAQPSTSSQGPKGEGDRGGGPAEGSAGPPAALPQQTATPETSVKKPKAEQGASGSQDPGKPRVGKKAAEGQAAARRGSPAFLHSPSCPAIISSSEKLLAKKPPSEASELTFEGVPMTHSPTDPRPAKAEEGKNILAESQKEVGEKTPGQAGQAKMQGDTSRGIEFQAVPSEKSEVGQALCLTAREEDCFQILDDCPPPPAPFPHRMVELRTGNVSSEFSMNSKEALGGGKFGAVCTCMEKATGLKLAAKVIKKQTPKDKEMVLLEIEVMNQLNHRNLIQLYAAIETPHEIVLFMEYIEGGELFERIVDEDYHLTEVDTMVFVRQICDGILFMHKMRVLHLDLKPENILCVNTTGHLVKIIDFGLARRYNPNEKLKVNFGTPEFLSPEVVNYDQISDKTDMWSMGVITYMLLSGLSPFLGDDDTETLNNVLSGNWYFDEETFEAVSDEAKDFVSNLIVKDQRARMNAAQCLAHPWLNNLAEKAKRCNRRLKSQILLKKYLMKRRWKKNFIAVSAANRFKKISSSGALMALGV

SEQ ID NO: 750065 - protein, 596 aa, Homo sapiens; identical to SEQ ID NO: 750064

SEQ ID NO: 750066 - protein, 202 aa, Homo sapiens
MEAALLGLCNWSTLGVCAALKLPQISAVLAARSARGLSLPSLLLELAGFLVFLRYQCYYGYPPLTYLEYPILIAQDVILLLCIFHFNGNVKQATPYIAVLVSSWFILALQKWIIDLAMNLCTFISAASKFAQLQCLWKTRDSGTVSALTWSLSSYTCATRIITTLMTTNDFTILLRFVIMLALNIWVTVTVLRYRKTAIKAE

SEQ ID NO: 750067 - protein, 180 aa, Homo sapiens [sequence omitted]

SEQ ID NO: 750068 - protein, 180 aa, Homo sapiens
MEAALLGLCNWSTLGVCAALKLPQISAVLAARSARGLSLPSLLLELAGFLVFLRYQCYYGYPPLTYLEYPILIAQDVILLLCIFHFNGNVKQATPYIAVLVSSWFILALQKWIIDLAMNLCTFISAASKFAQLQCLWKTRDSGTVSALTWSLSSYTCASKNRTHMVGRPLVAPSVYVVGC

SEQ ID NO: 750069 - protein, 102 aa, Homo sapiens
MEAALLGLCNWSTLGVCAALKLPQISAVLAARSARGLSLPSLLLELAGFLVFLRYQCYYGYPPLTYLEYPILIAQDVILLLCIFHFNGNVKQATPYIAVYPF

SEQ ID NO: 750070 - protein, 115 aa, Homo sapiens
MEAALLGLCNWSTLGVCAALKLPQISAVLAARSARGLSLPSLLLELAGFLVFLRYQCYYGYPPLTYLEYPILIAQEGFSCLSFLSSWDYRHTPPCLANFCIFSRDEFSPCWPGWF

SEQ ID NO: 750071 - protein, 169 aa, Homo sapiens
MEAALLGLCNWSTLGVCAALKLPQISAVLAARSARGLSLPSLLLELAGFLVFLRYQCYYGYPPLTYLEYPILIAQDVILLLCIFHFNGNVKQATPYIAVLVSSWFILALQKWIIDLAMNLCTFISAASKFAQLQCLWKTRDSGTVSALTWSLSSYTCARSRSLSQAGVQ

SEQ ID NO: 750072 - protein, 188 aa, Homo sapiens
MEAALLGLCNWSTLGVCAALKLPQISAVLAARSARGLSLPSLLLELAGFLVFLRYQCYYGYPPLTYLEYPILIAQDVILLLCIFHFNGNVKQATPYIAVLVSSWFILALQKWIIDLAMNLCTFISAASKFAQLQCLWKTRDSGTVSALTWSLSSYTCAILLRFVIMLALNIWVTVTVLRYRKTAIKAE

SEQ ID NO: 750073 - protein, 120 aa, Homo sapiens
MEAALLGLCNWSTLGVCAALKLPQISAVLAARSARGLSLPSLLLELAGFLVFLRYQCYYGYPPLTYLEYPILIAQDVILLLCIFHFNGNVKQATPYIAVLVSSWFILALQKWIIDLAMQE

SEQ ID NO: 750074 - protein, 125 aa, Homo sapiens
MEAALLGLCNWSTLGVCAALKLPQISAVLAARSARGLSLPSLLLELAGFLVFLRYQCYYGYPPLTYLEYPILIAQDVILLLCIFHFNGNVKQATPYIAVIYVLSSARPVSLHSSSVCGRRETQEL

SEQ ID NO: 750075 - protein, 102 aa, Homo sapiens; identical to SEQ ID NO: 750069

SEQ ID NO: 750076 - protein, 107 aa, Homo sapiens
MPVIPRCWNYRCEPPHLASFAFLTNRLVTFSHFICKQNLCTFISAASKFAQLQCLWKTRDSGTVSALTWSLSSYTCAILLRFVIMLALNIWVTVTVLRYRKTAIKAE

SEQ ID NO: 750077 - protein, 180 aa, Homo sapiens [sequence omitted]

SEQ ID NO: 750078 - protein, 202 aa, Homo sapiens; identical to SEQ ID NO: 750066

SEQ ID NO: 750079 - protein, 202 aa, Homo sapiens; identical to SEQ ID NO: 750066

SEQ ID NO: 750080 - protein, 169 aa, Homo sapiens; identical to SEQ ID NO: 750071

SEQ ID NO: 750081 - protein, 74 aa, Homo sapiens
RPRRRSFLKYLGQLSTLCSSIVLGLRDSVKRRVTAGHGGSLTPVIPALWEAEAGGSLGQEIETILANVVKPRLY

SEQ ID NO: 750082 - protein, 211 aa, Homo sapiens
SFARLPGGRGSRRGQELLSSSPLPAALSWPRQRPRALRVCQALGLRGHWVGGGPRRPEGPGRLSGLLSTLERRPRVSVSWICGSVSAGGLLLAHNLEAPGSTAPSGPATQGLVRFLLTHRFWERGASRQEDAEFLMTGPVSVHSLVPGERGGTPTPSWRSLQRCSSGPIRDLGCLCVLWSREFATWSHFVTQAGMHWHEHVSLQPQPPRLK

SEQ ID NO: 750083 - protein, 211 aa, Homo sapiens; identical to SEQ ID NO: 750082

SEQ ID NO: 750084 - protein, 119 aa, Homo sapiens
PKMLPISDFVTLNLILLNAVLPRLGQSTLLNSIPLSVYLLLTSHPRSVDSGLQGSTKTSVFECLHSPAKSLIRFYRSAMPLALMPFFLHHTLTPWTSGPLPNWVTLATLDLEDSQPVTW

SEQ ID NO: 750085 - protein, 44 aa, Homo sapiens
GPPWAREPSGGWWGSVLLSSCHGKKYPSEFLFGPIQLLALPWTD

SEQ ID NO: 750086 - protein, 102 aa, Homo sapiens
LPPGPALPNSLGRPGAHTLLRPRRSEERGWRGDPGPRGRDLAVAREAPLARASVLSPRAEGLRAADRYGMLEDIWGPQMLLLLETQLKFSWSFHCLVQCHRP

SEQ ID NO: 750087 - protein, 102 aa, Homo sapiens; identical to SEQ ID NO: 750086

SEQ ID NO: 750088 - protein, 658 aa, Homo sapiens
MKLYCLSGHPTLPCNVLKFKSTTIMLDCGLDMTSTLNFLPLPLVQSPRLSNLPGWSLKDGNAFLDKELKECSGHVFVDSVPEFCLPETELIDLSTVDVILISNYHCMMALPYITEHTGFTGTVYATEPTVQIGRLLMEELVNFIERVPKAQSASLWKNKDIQRLLPSPLKDAVEVSTWRRCYTMQEVNSALSKIQLVGYSQKIELFGAVQVTPLSSGYALGSSNWIIQSHYEKVSYVSGSSLLTTHPQPMDQASLKNSDVLVLTGLTQIPTANPDGMVGEFCSNLALTVRNGGNVLVPCYPSGVIYDLLECLYQYIDSAGLSSVPLYFISPVANSSLEFSQIFAEWLCHNKQSKVYLPEPPFPHAELIQTNKLKHYPSIHGDFSNDFRQPCVVFTGHPSLRFGDVVHFMELWGKSSLNTVIFTEPDFSYLEALAPYQPLAMKCIYCPIDTRLNFIQVSKLLKEVQPLHVVCPEQYTQPPPAQSHRMDLMIDCQPPAMSYRRAEVLALPFKRRYEKIEIMPELADSLVPMEIKPGISLATVSAVLHTKDNKHLLQPPPRPAQPTSGKKRKRVSDDVPDCKVLKPLLSGSIPVEQFVQTLEKHGFSDIKVEDTAKGHIVLLQEAETLIQIEEDSTHIICDNDEMLRVRLRDLVLKFLQKF

SEQ ID NO: 750089 - protein, 260 aa, Homo sapiens
GWYEPGVKNELFGAVQVTPLSSGYALGSSNWIIQSHYEKVSYVSGSSLLTTHPQPMDQASLKNSDVLVLTGLTQIPTANPDGMVGEFCSNLALTVRNGGNVLVPCYPSGVIYDLLECLYQYIDSAGLSSVPLYFISPVANSSLEFSQIFAEWLCHNKQSKVYLPEPPFPHAELIQTNKLKHYPSIHGDFSNDFRQPCVVFTGHPSLRFGDVVHFMELWGKSSLNTVIFTEPTSPTWEPGSYRRWPEMVYALEPVNLQGRR

SEQ ID NO: 750090 - protein, 658 aa, Homo sapiens; identical to SEQ ID NO: 750088

SEQ ID NO: 750091 - protein, 409 aa, Homo sapiens
MDQASLKNSDVLVLTGLTQIPTANPDGMVGEFCSNLALTVRNGGNVLVPCYPSGVIYDLLECLYQYIDSAGLSSVPLYFISPVANSSLEFSQIFAEWLCHNKQSKVYLPEPPFPHAELIQTNKLKHYPSIHGDFSNDFRQPCVVFTGHPSLRFGDVVHFMELWGKSSLNTVIFTEPDFSYLEALAPYQPLAMKCIYCPIDTRLNFIQVSKLLKEVQPLHVVCPEQYTQPPPAQSHRMDLMIDCQPPAMSYRRAEVLALPFKRRYEKIEIMPELADSLVPMEIKPGISLATVSAVLHTKDNKHLLQPPPRPAQPTSGKKRKRVSDDVPDCKVLKPLLSGSIPVEQFVQTLEKHGFSDIKVEDTAKGHIVLLQEAETLIQIEEDSTHIICDNDEMLRVRLRDLVLKFLQKF

SEQ ID NO: 750092 - protein, 573 aa, Homo sapiens
YLPPHLANFCIFSRDRVFPCWSGWSRTPDLKLPGRLGASQSAGIIGVSHRAWPRFLFYVLSQHCVLFLLKTFGNVVTLFVSFNSCIRAPRKQVMTFLPTLISYTLSMLLCEIVVAQNIELFGAVQVTPLSSGYALGSSNWIIQSHYEKVSYVSGSSLLTTHPQPMDQASLKNSDVLVLTGLTQIPTANPDGMVGEFCSNLALTVRNGGNVLVPCYPSGVIYDLLECLYQYIDSAGLSSVPLYFISPVANSSLEFSQIFAEWLCHNKQSKVYLPEPPFPHAELIQTNKLKHYPSIHGDFSNDFRQPCVVFTGHPSLRFGDVVHFMELWGKSSLNTVIFTEPDFSYLEALAPYQPLAMKCIYCPIDTRLNFIQVSKLLKEVQPLHVVCPEQYTQPPPAQSHRMDLMIDCQPPAMSYRRAEVLALPFKRRYEKIEIMPELADSLVPMEIKPGISLATVSAVLHTKDNKHLLQPPPRPAQPTSGKKRKRVSDDVPDCKVLKPLLSGSIPVEQFVQTLEKHGFSDIKVEDTAKGHIVLLQEAETLIQIEEDSTHIICDNDEMLRVRLRDLVLKFLQKF

SEQ ID NO: 750093 - protein, 475 aa, Homo sapiens [sequence omitted]

SEQ ID NO: 750094 - protein, 218 aa, Homo sapiens [sequence omitted]

SEQ ID NO: 750095 - protein, 693 aa, Homo sapiens
MKLYCLSGHPTLPCNVLKFKSTTIMLDCGLDMTSTLNFLPLPLVQSPRLSNLPGWSLKDGNAFLDKELKECSGHVFVDSVPEFCLPETELIDLSTVDVILISNYHCMMALPYITEHTGFTGTVYATEPTVQIGRLLMEELVNFIERVPKAQSASLWKNKDIQRLLPSPLKDAVEVSTWRRCYTMQEVNSALSKIQLVGYSQKIELFGAVQVTPLSSGYALGSSNWIIQSHYEKVSYVSGSSLLTTHPQPMDQASLKNSDVLVLTGLTQIPTANPDGMVGEFCSNLALTVRNGGNVLVPCYPSGVIYDLLECLYQYIDSAGLSSVPLYFISPVANSSLEFSQIFAEWLCHNKQSKVYLPEPPFPHAELIQTNKLKHYPSIHGDFSNDFRQPCVVFTGHPSLRFGDVVHFMELWGKSSLNTVIFTEPDFSYLEALAPYQPLAMKCIYCPIDTRLNFIQVSKLLKEVQPLHVVCPEQYTQPPPAQSHRMDLMIDCQPPAMSYRRAEVLALPFKRRYEKIEIMPELADSLVPMEIKPGISLATVSAVLHTKDNKHLLQPPPRPAQPTSGKKRKRVSDDVPDCKVLKPLLSGSIPVEQFVQTLEKVSWFRWCRENSTRGSLSLAHYGPLAAGSGCCCLSLSPHCPVASVWSKVLLGDPGERKQSEECPILPPSTRSPEGLSRLKKKLLPHTHVTSGAG

SEQ ID NO: 750096 - protein, 355 aa, Homo sapiens
MKLYCLSGHPTLPCNVLKFKSTTIMLDCGLDMTSTLNFLPLPLVQSPRLSNLPGWSLKDGNAFLDKELKECSGHVFVDSVPEFCLPETELIDLSTVDVILISNYHCMMALPYITEHTGFTGTVYATEPTVQIGRLLMEELVNFIERVPKAQSASLWKNKDIQRLLPSPLKDAVEVSTWRRCYTMQEVNSALSKIQLVGYSQKIELFGAVQVTPLSSGYALGSSNWIIQSHYEKVSYVSGSSLLTTHPQPMDQASLKNSDVLVLTGLTQIPTANPDGMVGEFCSNLALTVRNGGNVLVPCYPSGVIYDLLECLYQYIDSAGLSSVPLYFISPVANSSLEFSQIFAEWYVRGFFFCV

SEQ ID NO: 750097 - protein, 102 aa, Homo sapiens [sequence omitted]

SEQ ID NO: 750098 - protein, 243 aa, Homo sapiens
MKLYCLSGHPTLPCNVLKFKSTTIMLDCGLDMTSTLNFLPLPLVQSPRLSNLPGWSLKDGNAFLDKELKECSGHVFVDSVPEFCLPETELIDLSTVDVILISNYHCMMALPYITEHTGFTGTVYATEPTVQIGRLLMEELVNFIERVPKAQSASLWKNKDIQRLLPSPLKDAVEVSTWRRCYTMQEVNSALSKIQLVGYSQKILGSSTWSSRLILGKGLWSWTSLVTHTPRPCPAFLNKVVLL

SEQ ID NO: 750099 - protein, 637 aa, Homo sapiens
MKLYCLSGHPTLPCNVLKFKSTTIMLDCGLDMTSTLNFLPLPLVQSPRLSNLPGWSLKDGNAFLDKTELIDLSTVDVILISNYHCMMALPYITEHTGFTGTVYATEPTVQIGRLLMEELVNFIERVPKAQSASLWKNKDIQRLLPSPLKDAVEVSTWRRCYTMQEVNSALSKIQLVGYSQKIELFGAVQVTPLSSGYALGSSNWIIQSHYEKVSYVSGSSLLTTHPQPMDQASLKNSDVLVLTGLTQIPTANPDGMVGEFCSNLALTVRNGGNVLVPCYPSGVIYDLLECLYQYIDSAGLSSVPLYFISPVANSSLEFSQIFAEWLCHNKQSKVYLPEPPFPHAELIQTNKLKHYPSIHGDFSNDFRQPCVVFTGHPSLRFGDVVHFMELWGKSSLNTVIFTEPDFSYLEALAPYQPLAMKCIYCPIDTRLNFIQVSKLLKEVQPLHVVCPEQYTQPPPAQSHRMDLMIDCQPPAMSYRRAEVLALPFKRRYEKIEIMPELADSLVPMEIKPGISLATVSAVLHTKDNKHLLQPPPRPAQPTSGKKRKRVSDDVPDCKVLKPLLSGSIPVEQFVQTLEKHGFSDIKVEDTAKGHIVLLQEAETLIQIEEDSTHIICDNDEMLRVRLRDLVLKFLQKF

SEQ ID NO: 750100 - protein, 464 aa, Homo sapiens
GWYEPGVKNELFGAVQVTPLSSGYALGSSNWIIQSHYEKVSYVSGSSLLTTHPQPMDQASLKNSDVLVLTGLTQIPTANPDGMVGEFCSNLALTVRNGGNVLVPCYPSGVIYDLLECLYQYIDSAGLSSVPLYFISPVANSSLEFSQIFAEWLCHNKQSKVYLPEPPFPHAELIQTNKLKHYPSIHGDFSNDFRQPCVVFTGHPSLRFGDVVHFMELWGKSSLNTVIFTEPDFSYLEALAPYQPLAMKCIYCPIDTRLNFIQVSKLLKEVQPLHVVCPEQYTQPPPAQSHRMDLMIDCQPPAMSYRRAEVLALPFKRRYEKIEIMPELADSLVPMEIKPGISLATVSAVLHTKDNKHLLQPPPRPAQPTSGKKRKRVSDDVPDCKVLKPLLSGSIPVEQFVQTLEKHGFSDIKVEDTAKGHIVLLQEAETLIQIEEDSTHIICDNDEMLRVRLRDLVLKFLQKF

SEQ ID NO: 750101 - protein, 658 aa, Homo sapiens; identical to SEQ ID NO: 750088

SEQ ID NO: 750102 - protein, 202 aa, Homo sapiens
MKVHLGLEVPLHVVCPEQYTQPPPAQSHRMDLMIDCQPPAMSYRRAEVLALPFKRRYEKIEIMPELADSLVPMEIKPGISLATVSAVLHTKDNKHLLQPPPRPAQPTSGKKRKRVSDDVPDCKVLKPLLSGSIPVEQFVQTLEKHGFSDIKVEDTAKGHIVLLQEAETLIQIEEDSTHIICDNDEMLRVRLRDLVLKFLQKF

SEQ ID NO: 750103 - protein, 425 aa, Homo sapiens
MKLYCLSGHPTLPCNVLKFKSTTIMLDCGLDMTSTLNFLPLPLVQSPRLSNLPGWSLKDGNAFLDKELKECSGHVFVDSVPEFCLPETELIDLSTVDVILISNYHCMMALPYITEHTGFTGTVYATEPTVQIGRLLMEELVNFIERVPKAQSASLWKNKDIQRLLPSPLKDAVEVSTWRRCYTMQEVNSALSKIQLVGYSQKIELFGAVQVTPLSSGYALGSSNWIIQSHYEKVSYVSGSSLLTTHPQPMDQASLKNSDVLVLTGLTQIPTANPDGMVGEFCSNLALTVRNGGNVLVPCYPSGVIYDLLECLYQYIDSAGLSSVPLYFISPVANSSLEFSQIFAEWLCHNKQSKVYLPEPPFPHAELIQTNKLKHYPSIHGDFSNDFRQPCVVFTGHPSLRFGDVVHFMELWGKSSLNTVIFTGK

SEQ ID NO: 750104 - protein, 110 aa, Homo sapiens [sequence omitted]

SEQ ID NO: 750105 - protein, 95 aa, Homo sapiens
CVFRVQGPAGTEHSSLPGLVWFQGFQRLKAAHAALEEEYLKACREQHPAQPLAGSKGTPGRFDPRRYLLGWKAWKDRWDGPLGSLSLQEGGTLSL

SEQ ID NO: 750106 - protein, 164 aa, Homo sapiens
EAGLSLEGHGNTSPMALGHGQARGWVASGEQASGDKLSEHSEVNPSVELSPARSWSSGTVSLDHPSDSLDSTWEGETDGPQPTALAETLPEGPSHHLLSPDGRTGGSVARATPMEFQDSSAPPAQSPQHATDRWRRETTRFFCPQPKEHIMVPFSTSRMVPSFS

SEQ ID NO: 750107 - protein, 1293 aa, Homo sapiens
EAGLSLEGHGNTSPMALGHGQARGWVASGEQASGDKLSEHSEVNPSVELSPARSWSSGTVSLDHPSDSLDSTWEGETDGPQPTALAETLPEGPSHHLLSPDGRTGGSVARATPMEFQDSSAPPAQSPQHATDRWRRETTRFFCPQPKEHIWKQTKTSPKPLPSRFIGSISPLNPQPRPTRQGRPLPRQGATLAGRSSSNAPKYGRGQLNYPLPDFSKVGPRVRFPKDESYRPPKSRSHNRKPQAPARPLIFKSPAEIVQEVLLSSGEAALAKDTPPAHPITRVPQEFQTPEQATELVHQLQEDYHRLLTKYAEAENTIDQLRLGAKVNLFSDPPQPNHSIHTGMVPQGTKVLSFTIPQPRSAEWWPGPAEDPQASAASGWPSARGDLSPSSLTSMPTLGWLPENRDISEDQSSAEQTQALASQASQFLAKVESFERLIQAGRLMPQDQVKGFQRLKAAHAALEEEYLKACREQHPAQPLAGSKGTPGRFDPRRELEAEIYRLGSCLEELKEHIDQTQQEPEPPGSDSALDSTPALPCLHQPTHLPAPSGQAPMPAIKTSCPEPATTTAAASTGPCPLHVNVEVSSGNSEVEDRPQDPLARLRHKELQMEQVYHGLMERYLSVKSLPEAMRMEEEEEGEEEEEEEGGGDSLEVDGVAATPGKAEATRVLPRQCPVQAEKSHGAPLEEATEKMVSMKPPGFQASLARDGHMSGLGKAEAAPPGPGVPPHPPGTKSAASHQSSMTSLEGSGISERLPQKPLHRGGGPHLEETWMASPETDSGFVGSETSRVSPLTQTPEHRLSHISTAGTLAQPFAASVPRDGASYPKARGSLIPRRATEPSTPRSQAQRYLSSPSGPLRQRAPNFSLERTLAAEMAVPGSEFEGHKRISEQPLPNKTISPPPAPAPAAAPLPCGPTETIPSFLLTRAGRDQAICELQEEVSRLRLRLEDSLHQPLQGSPTRPASAFDRPARTRGRPADSPATWGSHYGSKSTERLPGEPRGEEQIVPPGRQRARSSSVPREVLRLSLSSESELPSLPLFSEKSKTTKDSPQAARDGKRGVGSAGWPDRVTFRGQYTGHEYHVLSPKAVPKGNGTVSCPHCRPIRTQDAGGAVTGDPLGPPPADTLQCPLCGQVGSPPEADGPGSATSGAEKATTRRKAPSTPSPKQRSKQAGSSPRPPPGLWYLATAPPAPAPPAFAYISSVPIMPYPPAAVYYAPAGPTSAQPAAKWPPTASPPPARRHRHSIQLDLGDLEELNKALSRAVQAAESVRSTTRQMRSSLSADLRQAHSLRGSCLF

SEQ ID NO: 750108 - protein, 1293 aa, Homo sapiens; identical to SEQ ID NO: 750107

SEQ ID NO: 750109 - protein, 384 aa, Homo sapiens [sequence omitted]

SEQ ID NO: 750110 - protein, 121 aa, Homo sapiens
MCNEPTHFSPQVLCACRTYLSPTSCQVAAHSLSPTSPETPALHPARPGRPRGAQQGPEPGRAGCRERPLYHQADEKLAVSRPAPGSQPAGLLPLLTSLGAQRQMGGWVGRWPARPGVGWSC

SEQ ID NO: 750111 - protein, 343 aa, Homo sapiens
EAGLSLEGHGNTSPMALGHGQARGWVASGEQASGDKLSEHSEVNPSVELSPARSWSSGTVSLDHPSDSLDSTWEGETDGPQPTALAETLPEGPSHHLLSPDGRTGGSVARATPMEFQDSSAPPAQSPQHATDRWRRETTRFFCPQPKEHIWKQTKTSPKPLPSRFIGSISPLNPQPRPTRQGRPLPRQGATLAGRSSSNAPKYGRGQLNYPLPDFSKVGPRVRFPKDESYRPPKSRSHNRKPQAPARPLIFKSPAEIVQEVLLSSGEAALAKDTPPAHPITRVPQEFQTPEQATELVHQLQEDYHRLLTKYAEAENTIDQLRLGAKVNLFSEPPPHWVPKTRI

SEQ ID NO: 750112 - protein, 98 aa, Homo sapiens
GLACGGAQMLPPECLTLCDPCVSLPPRSPSTAGTLAQPFAASVPRDGASYPKARGSLIPRRATEPSTPRSQAQRYLSSPSGPLRQRAPNFSLERTLAA

SEQ ID NO: 750113 - protein, 121 aa, Homo sapiens; identical to SEQ ID NO: 750110

SEQ ID NO: 750114 - protein, 200 aa, Homo sapiens
EAGLSLEGHGNTSPMALGHGQARGWVASGEQASGDKLSEHSEVNPSVELSPARSWSSGTVSLDHPSDSLDSTWEGETDGPQPTALAETLPEGPSHHLLSPDGRTGGSVARATPMEFQDSSAPPAQSPQHATDRWRRETTRFFCPQPKEHIWGTVCGHEARPPPAPLPRGSSIPLHFWNVCASMMFVYLRHLKIYFRYEGK

SEQ ID NO: 750115 - protein, 616 aa, Homo sapiens
MVFSSHAREATEKMVSMKPPGFQASLARDGHMSGLGKAEAAPPGPGVPPHPPGTKSAASHQSSMTSLEGSGISERLPQKPLHRGGGPHLEETWMASPETDSGFVGSETSRVSPLTQTPEHRLSHISTAGTLAQPFAASVPRDGASYPKARGSLIPRRATEPSTPRSQAQRYLSSPSGPLRQRAPNFSLERTLAAEMAVPGSEFEGHKRISEQPLPNKTISPPPAPAPAAAPLPCGPTETIPSFLLTRAGRDQAICELQEEVSRLRLRLEDSLHQPLQGSPTRPASAFDRPARTRGRPADSPATWGSHYGSKSTERLPGEPRGEEQIVPPGRQRARSSSVPREVLRLSLSSESELPSLPLFSEKSKTTKDSPQAARDGKRGVGSAGWPDRVTFRGQYTGHEYHVLSPKAVPKGNGTVSCPHCRPIRTQDAGGAVTGDPLGPPPADTLQCPLCGQVGSPPEADGPGSATSGAEKATTRRKAPSTPSPKQRSKQAGSSPRPPPGLWYLATAPPAPAPPAFAYISSVPIMPYPPAAVYYAPAGPTSAQPAAKWPPTASPPPARRHRHSIQLDLGDLEELNKALSRAVQAAESVRSTTRQMRSSLSADLRQAHSLRGSCLF

SEQ ID NO: 750116 - protein, 135 aa, Homo sapiens
GRPRGARRAPARPPPRPPPGLWYLATAPPAPAPPAFAYISSVPIMPYPPAAVYYAPAGPTSAQPAAKWPPTASPPPARRHRHSIQLDLGDLEELNKALSRAVQAAESVRSTTRQMRSSLSADLRQAHSLRGSCLF

SEQ ID NO: 750117 - protein, 1084 aa, Homo sapiens
EAGLSLEGHGNTSPMALGHGQARGWVASGEQASGDKLSEHSEVNPSVELSPARSWSSGTVSLDHPSDSLDSTWEGETDGPQPTALAETLPEGPSHHLLSPDGRTGGSVARATPMEFQDSSAPPAQSPQHATDRWRRETTRFFCPQPKEHIWKQTKTSPKPLPSRFIGSISPLNPQPRPTRQGRPLPRQGATLAGRSSSNAPKYGRGQLNYPLPDFSKVGPRVRFPKDESYRPPKSRSHNRKPQAPARPLIFKSPAEIVQEVLLSSGEAALAKDTPPAHPITRVPQEFQTPEQATELVHQLQEDYHRLLTKYAEAENTIDQLRLGAKVNLFSDPPQPNHSIHTGMVPQGTKVLSFTIPQPRSAEWWPGPAEDPQASAASGWPSARGDLSPSSLTSMPTLGWLPENRDISEDQSSAEQTQALASQASQFLAKVESFERLIQAGRLMPQDQVKGFQRLKAAHAALEEEYLKACREQHPAQPLAGSKGTPGRFDPRRELEAEIYRLGSCLEELKEHIDQTQQEPEPPGSDSALDSTPALPCLHQPTHLPAPSGQAPMPAIKTSCPEPATTTAAASTGPCPLHVNVEVSSGNSEVEDRPQDPLARLRHKELQMEQVYHGLMERYLSVKSLPEAMRMEEEEEGEEEEEEEGGGDSLEVDGVAATPGKAEATRVLPRQCPVQAEKSHGAPLEEATEKMVSMKPPGFQASLARDGHMSGLGKAEAAPPGPGVPPHPPGTKSAASHQSSMTSLEGSGISERLPQKPLHRGGGPHLEETWMASPETDSGFVGSETSRVSPLTQTPEHRLSHISTAGTLAQPFAASVPRDGASYPKARGSLIPRRATEPSTPRSQAQRYLSSPSGPLRQRAPNFSLERTLAAEMAVPGSEFEGHKRISEQPLPNKTISPPPAPAPAAAPLPCGPTETIPSFLLTRAGRDQAICELQEEVSRLRLRLEDSLHQPLQGSPTRPASAFDRPARTRGRPADSPATWGSHYGSKSTERLPGEPRGEEQIVPPGRQRARSSSVPREVLRLSLSSESELPSLPLFSEKSKTTKDSPQAARDGKRGVGSAGWPDRVTFRGQYTGRSGGRAGMG

SEQ ID NO: 750118 - protein, 124 aa, Homo sapiens
EDYGTDCDNMRVTAFLDIPGQDNLPPLTRLEKYAFSENTFNRQIIARGLLDIFRDFGNNEEDFLTVMEIVVRLSEDAEPTVRTELMEQIPPIAIFLQENRSNFPVVLSEYLIPIVVRYLTDPNN

SEQ ID NO: 750119 - protein, 193 aa, Homo sapiens
GGQPPAAGSRGVGADLETGMGGLRLLAVALTCCWWPQGSQGKTLRGSFSSTAAQDAQGQRIGHFEFHGDHALLCVRINNIAVAVGKEAKLYLFQAQEWLKLQQSSHGYSCSEKLSKAQLTMTMNQTEHNLTVSQIPSPQTWHVFYADKYTCQDDKENSQVEDIPFEMVLLNPDAEGNPFDHFSAGESVTPKME

SEQ ID NO: 750120 - protein, 459 aa, Homo sapiens
GGQPPAAGSRGVGADLETGMGGLRLLAVALTCCWWPQGSQGKTLRGSFSSTAAQDAQGQRIGHFEFHGDHALLCVRINNIAVAVGKEAKLYLFQAQEWLKLQQSSHGYSCSEKLSKAQLTMTMNQTEHNLTVSQIPSPQTWHVFYADKYTCQDDKENSQVEDIPFEMVLLNPDAEGNPFDHFSAGESGLHEFFFLLVLVYFVIACIYAQSLWQAIKKGGPMHMILKVLTTALLLQAGSALANYIHFSSYSKDGIGVPFMGSLAEFFDIASQIQMLYLLLSLCMGWTIVRMKKSQSRPLQWDSTPASTGIAVFIVMTQSVLLLWEQFEDISHHSYHSHHNLAGILLIVLRICLALSLGCGLYQIITVERSTLKREFYITFAKGCILWFLCHPVLACISVIFSDYQRDKVITIGVILCQSVSMVILYRLFLSHSLYWEVSSLSSVTLPLTISSGHKSRPHF

SEQ ID NO: 750121 - protein, 288 aa, Homo sapiens
GGQPPAAGSRGVGADLETGMGGLRLLAVALTCCWWPQGSQGKTLRGSFSSTAAQDAQGQRIGHFEFHGDHALLCVRINNIAVAVGKEAKLYLFQAQEWLKLQQSSHGYSCSEKLSKAQLTMTMNQTEHNLTVSQIPSPQTWHVFYADKYTCQDDKENSQVEDIPFEMVLLNPDAEGNPFDHFSAGESGLHEFFFLLVLVYFVIACIYAQSLWQAIKKGGPMHMILKVLTTALLLQAGSALANYIHFSSYSKDGIGVPFMGSLAECEYLSEHFLKSFYTRYLLFFYFLS

SEQ ID NO: 750122 - protein, 699 aa, Homo sapiens
MNLLPKSSREFGSVDYWEKFFQQRGKKAFEWYGTYLELCGVLHKYIKPREKVLVIGCGNSELSEQLYDVGYRDIVNIDISEVVIKQMKECNATRRPQMSFLKMDMTQMEFPDASFQVVLDKGTLDAVLTDEEEKTLQQVDRMLAEVGRVLQVGGRYLCISLAQAHILKKAVGHFSREGWMVRVHQVANSQDQVLEAEPQFSLPVFAFIMTKFRPVPGSALQIFELCAQEQRKPVRLESAERLAEAVQERQQYAWLCSQLRRKARLGSVSLDLCDGDTGEPRYTLHVVDSPTVKPSRDNHFAIFIIPQGRETEWLFGMDEGRKQLAASAGFRRLITVALHRGQQYESMDHIQAELSARVMELAPAGMPTQQQVPFLSVGGDIGVRTVQHQDCSPLSGDYVIEDVQGDDKRYFRRLIFLSNRNVVQSEARLLKDVSHKAQKKRKKDRKKQRPADAEDLPAAPGQSIDKSYLCCEHHKAMIAGLALLRNPELLLEIPLALLVVGLGGGSLPLFVHDHFPKSCIDAVEIDPSMLEVATQWFGFSQSDRMKVHIADGLDYIASLAGGGEARPCYDVIMFDVDSKDPTLGMSCPPPAFVEQSFLQKVKSILTPEGVFILNLVCRDLGLKDSVLAGLKAVFPLLYVRRIEGEVNEILFCQLHPEQKLATPELLETAQALERTLRKPGRGWDDTYVLSDMLKTVKIV

SEQ ID NO: 750123 - protein, 613 aa, Homo sapiens
MKECNATRRPQMSFLKMDMTQMEFPDASFQVVLDKGTLDAVLTDEEEKTLQQVDRMLAEVGRVLQVGGRYLCISLAQAHILKKAVGHFSREGWMVRVHQVANSQDQVLEAEPQFSLPVFAFIMTKFRPVPGSALQIFELCAQEQRKPVRLESAERLAEAVQERQQYAWLCSQLRRKARLGSVSLDLCDGDTGEPRYTLHVVDSPTVKPSRDNHFAIFIIPQGRETEWLFGMDEGRKQLAASAGFRRLITVALHRGQQYESMDHIQAELSARVMELAPAGMPTQQQVPFLSVGGDIGVRTVQHQDCSPLSGDYVIEDVQGDDKRYFRRLIFLSNRNVVQSEARLLKDVSHKAQKKRKKDRKKQRPADAEDLPAAPGQSIDKSYLCCEHHKAMIAGLALLRNPELLLEIPLALLVVGLGGGSLPLFVHDHFPKSCIDAVEIDPSMLEVATQWFGFSQSDRMKVHIADGLDYIASLAGGGEARPCYDVIMFDVDSKDPTLGMSCPPPAFVEQSFLQKVKSILTPEGVFILNLVCRDLGLKDSVLAGLKAVFPLLYVRRIEGEVNEILFCQLHPEQKLATPELLETAQALERTLRKPGRGWDDTYVLSDMLKTVKIV

SEQ ID NO: 750124 - protein, 698 aa, Homo sapiens
MRAFVVSREFGSVDYWEKFFQQRGKKAFEWYGTYLELCGVLHKYIKPREKVLVIGCGNSELSEQLYDVGYRDIVNIDISEVVIKQMKECNATRRPQMSFLKMDMTQMEFPDASFQVVLDKGTLDAVLTDEEEKTLQQVDRMLAEVGRVLQVGGRYLCISLAQAHILKKAVGHFSREGWMVRVHQVANSQDQVLEAEPQFSLPVFAFIMTKFRPVPGSALQIFELCAQEQRKPVRLESAERLAEAVQERQQYAWLCSQLRRKARLGSVSLDLCDGDTGEPRYTLHVVDSPTVKPSRDNHFAIFIIPQGRETEWLFGMDEGRKQLAASAGFRRLITVALHRGQQYESMDHIQAELSARVMELAPAGMPTQQQVPFLSVGGDIGVRTVQHQDCSPLSGDYVIEDVQGDDKRYFRRLIFLSNRNVVQSEARLLKDVSHKAQKKRKKDRKKQRPADAEDLPAAPGQSIDKSYLCCEHHKAMIAGLALLRNPELLLEIPLALLVVGLGGGSLPLFVHDHFPKSCIDAVEIDPSMLEVATQWFGFSQSDRMKVHIADGLDYIASLAGGGEARPCYDVIMFDVDSKDPTLGMSCPPPAFVEQSFLQKVKSILTPEGVFILNLVCRDLGLKDSVLAGLKAVFPLLYVRRIEGEVNEILFCQLHPEQKLATPELLETAQALERTLRKPGRGWDDTYVLSDMLKTVKIV

SEQ ID NO: 750125 - protein, 699 aa, Homo sapiens; identical to SEQ ID NO: 750122

SEQ ID NO: 750126 - protein, 223 aa, Homo sapiens [sequence omitted]

SEQ ID NO: 750127 - protein, 655 aa, Homo sapiens
MNLLPKSSREFGSVDYWEKFFQQRGKKAFEWYGTYLELCGVLHKYIKPREKVLVIGCGNSELSEQLYDVGYRDIVNIDISEVVIKQMKECNATRRPQMSFLKMDMTQMEFPDASFQVVLDKGTLDAVLTDEEEKTLQQVDRMLAEVGRVLQVGGRYLCISLAQAHILKKAVGHFSREGWMVRVHQVANSQDQVLEAEPQFSLPVFAFIMTKFRPVPGSALQIFELCAQEQRKPVRLESAERLAEAVQERQQYAWLCSQLRRKARLGSVSLDLCDGDTGEPRYTLHVVDSPTVKPSRDNHFAIFIIPQGRETEWLFGMDEGRKQLAASAGFRRLITVALHRGQQYESMDHIQAELSARVMELAPAGMPTQQQVPFLSVGGDIGVRTVQHQDCSPLSGDYVIEDVQGDDKRYFRRLIFLSNRNVVQSEARLLKDVSHKAQKKRKKDRKKQRPADAEDLPAAPGQSIDKSYLCCEHHKAMIAGLALLRNPELLLEIPLALLVVGLGGGSLPLFVHDHFPKSCIDAVEIDPSMLEVATQWFGFSQSDRMKVHIADGLDYIASLAGGGEARPCYDVIMFDVDSKDPTLGMSCPPPAFVEQSFLQKVKSILTPEGVFILNLVCRDLGLKDSVLAGLKAVFPLLYVRRIEGEVNEIPFKTLL

SEQ ID NO: 750128 - protein, 658 aa, Homo sapiens
MNLLPKSSREFGSVDYWEKFFQQRGKKAFEWYGTYLELCGVLHKYIKPREKVLVIGCGNSELSEQLYDVGYRDIVNIDISEVVIKQMKECNATRRPQMSFLKMDMTQMEFPDASFQVVLDKGTLDAVLTDEEEKTLQQVDRMLAEVGRVLQVGGRYLCISLAQAHILKKAVGHFSREGWMVRVHQVANSQDQVLEAEPQFSLPVFAFIMTKFRPVPGSALQIFELCAQEQRKPVRLESAERLAEAVQERQQYAWLCSQLRRKARLGSVSLDLCDGDTGEPRYTLHVVDSPTVKPSRDNHFAIFIIPQGRETEWLFGMDEGRKQLAASAGFRRLITVALHRGQQYESMDHIQAELSARVMELAPAGMPTQQQVPFLSVGGDIGVRTVQHQDCSPLSGDYVIEDVQGDDKRYFRRLIFLSNRNVVQSEARLLKDVSHKAQKKRKKDRKKQRPADAEDLPAAPGQSIDKSYLCCEHHKAMIAGLALLRNPELLLEIPLALLVVGLGGGSLPLFVHDHFPKSCIDAVEIDPSMLEVATQWFGFSQSDRMKVHIADGLDYIASLAGGGEARPCYDVIMFDVDSKDPTLGMSCPPPAFVEQSFLQKVKSILTPEGSPDPPPPAGSPWLQKNSVFCKTLQSYYCSLLRLDHVPIIQEISFKSVYQ

SEQ ID NO: 750129 - protein, 517 aa, Homo sapiens
MNLLPKSSREFGSVDYWEKFFQQRGKKAFEWYGTYLELCGVLHKYIKPREKVLVIGCGNSELSEQLYDVGYRDIVNIDISEVVIKQMKECNATRRPQMSFLKMDMTQMEFPDASFQVVLDKGTLDAVLTDEEEKTLQQVDRMLAEVGRVLQVGGRYLCISLAQAHILKKAVGHFSREGWMVRVHQVANSQDQVLEAEPQFSLPVFAFIMTKFRPVPGSALQIFELCAQEQRKPVRLESAERLAEAVQERQQYAWLCSQLRRKARLGSVSLDLCDGDTGEPRYTLHVVDSPTVKPSRDNHFAIFIIPQGRETEWLFGMDEGRKQLAASAGFRRLITVALHRGQQYESMDHIQAELSARVMELAPAGMPTQQQVPFLSVGGDIGVRTVQHQDCSPLSGDYVIEDVQGDDKRYFRRLIFLSNRNVVQSEARLLKDVSHKAQKKRKKDRKKQRPADAEDLPAAPGQSIDKSYLCCEHHKAMIAGLALLRNPELLLGERDATAFHRREHKDYRPKQLVSLAL

SEQ ID NO: 750130 - protein, 45 aa, Homo sapiens
MLFSICLSMLCILCKLITTVCFSPPVSLGQELVFSSKPILVFHMS

SEQ ID NO: 750131 - protein, 545 aa, Homo sapiens
MNLLPKSSREFGSVDYWEKFFQQRGKKAFEWYGTYLELCGVLHKYIKPREKVLVIGCGNSELSEQLYDVGYRDIVNIDISEVVIKQMKECNATRRPQMSFLKMDMTQMEFPDASFQVVLDKGTLDAVLTDEEEKTLQQVDRMLAEVGRVLQPQGRETEWLFGMDEGRKQLAASAGFRRLITVALHRGQQYESMDHIQAELSARVMELAPAGMPTQQQVPFLSVGGDIGVRTVQHQDCSPLSGDYVIEDVQGDDKRYFRRLIFLSNRNVVQSEARLLKDVSHKAQKKRKKDRKKQRPADAEDLPAAPGQSIDKSYLCCEHHKAMIAGLALLRNPELLLEIPLALLVVGLGGGSLPLFVHDHFPKSCIDAVEIDPSMLEVATQWFGFSQSDRMKVHIADGLDYIASLAGGGEARPCYDVIMFDVDSKDPTLGMSCPPPAFVEQSFLQKVKSILTPEGVFILNLVCRDLGLKDSVLAGLKAVFPLLYVRRIEGEVNEILFCQLHPEQKLATPELLETAQALERTLRKPGRGWDDTYVLSDMLKTVKIV

SEQ ID NO: 750132 - protein, 699 aa, Homo sapiens; identical to SEQ ID NO: 750122

SEQ ID NO: 750133 - protein, 644 aa, Homo sapiens
MNLLPKSSREFGSVDYWEKFFQQRGKKAFEWYGTYLELCGVLHKYIKPREKVLVIGCGNSELSEQLYDVGYRDIVNIDISEVVIKQMKECNATRRPQMSFLKMDMTQMEFPDASFQVVLDKGTLDAVLTDEEEKTLQQVDRMLAEVGRVLQVGGRYLCISLAQAHILKKAVGHFSREGWMVRVHQVANSQDQVLEAEPQFSLPVFAFIMTKFRPVPGSALQIFELCAQEQRKPVRLESAERLAEAVQERQQYAWLCSQLRRKARLGSVSLDLCDGDTGEPRYTLHVVDSPTVKPSRDNHFAIFIIPQGRETEWLFGMDEGRKQLAASAGFRRLITVALHRGQQYESMDHIQAELSARVMELAPAGMPTQQQVPFLSVGGDIGVRTVQHQDCSPLSGDYVIEDVQGDDKRYFRRLIFLSNRNVVQSEARLLKDVSHKEIPLALLVVGLGGGSLPLFVHDHFPKSCIDAVEIDPSMLEVATQWFGFSQSDRMKVHIADGLDYIASLAGGGEARPCYDVIMFDVDSKDPTLGMSCPPPAFVEQSFLQKVKSILTPEGVFILNLVCRDLGLKDSVLAGLKAVFPLLYVRRIEGEVNEILFCQLHPEQKLATPELLETAQALERTLRKPGRGWDDTYVLSDMLKTVKIV

SEQ ID NO: 750134 - protein, 682 aa, Homo sapiens
MNLLPKSSREFGSVDYWEKFFQQRGKKAFEWYGTYLELCGVLHKYIKPREKVLVIGCGNSELSEQLYDVGYRDIVNIDISEVVIKQMKECNATRRPQMSFLKMDMTQMEFPDASFQVVLDKGTLDAVLTDEEEKTLQQVDRMLAEVGRVLQVGGRYLCISLAQAHILKKAVGHFSREGWMVRVHQVANSQDQVLEAEPQFSLPVFAFIMTKFRPVPGSALQIFELCAQEQRKPVRLESAERLAEAVQERQQYAWLCSQLRRKARLGSVSLDLCDGDTGEPRYTLHVVDSPTVKPSRDNHFAIFIIPQGRETEWLFGMDEGRKQLAASAGFRRLITVALHRGQQYESMDHIQAELSARVMELAPAGMPTQQQVPFLSVGGDIGVRTVQHQDCSPLSGDYVIEDVQGDDKRYFRRLIFLSNRNVVQSEARLLKDVSHKAQKKRKKDRKKQRPADAEDLPAAPGQSIDKSYLCCEHHKAMIAGLALLRNPELLLEIPLALLVVGLGGGSLPLFVHDHFPKSCIDAVEIDPSMLEVATQWFGFSQSDRMKVHIADGLDYIASLAGGGEARPCYDVIMFDVDSKDPTLGMSCPPPAFVEQSFLQKVKSILTPEGVFILNLVCRDLGLKDSVLAGLKAVFPLLYVRRIEGEVNEILFCQLHPEQKLPALGEKNLKQALERTLRQPGTR

SEQ ID NO: 750135 - protein, 623 aa, Homo sapiens [sequence omitted]

SEQ ID NO: 750136 - protein, 103 aa, Homo sapiens
SYRTLYPSRLLNVCLFSTLFEIVLLIKDSVLAGLKAVFPLLYVRRIEGEVNEILFCQLHPEQKLATPELLETAQALERTLRKPGRGWDDTYVLSDMLKTVKIV

SEQ ID NO: 750137 - protein, 113 aa, Homo sapiens
MAYPDLQPHTRTRWQLWPTYSFAFAWFLPSLPHTTNTFIDLPGAQHLAAASAWGLFDSSLYERFEASFLGLCICSPDPVTCSSSCRCPSPFWFVQGAAALHSCSSVWYHRIWF

SEQ ID NO: 750138 - protein, 211 aa, Homo sapiens
MISRMEKMTMMMKILIMFALGMNYWSCSGFPVYDYDPSSLRDALSASVVKVNSQSLSPYLFRAFRSSLKRVEVLDENNLVMNLEFSIRETTCRKDSGEDPATCAFQRDYYVSTAVCRSTVKVSAQQVQGVHARCSWSSSTSESYSSEEMIFGDMLGSHKWRNNYLFGLISDESISEQFYDRSLGIMRRVLPPGNRRYPNHRHRARINTDFE

SEQ ID NO: 750139 - protein, 85 aa, Homo sapiens
DFQNGEDDDDDEDIDYVCSWNELLVLLRFPSVRLRSILLKGCPQCLCGKSEFPVTESVSVSGIQKLIKKIDKWDLIKLKSFCTAK

SEQ ID NO: 750140 - protein, 211 aa, Homo sapiens; identical to SEQ ID NO: 750138

SEQ ID NO: 750141 - protein, 586 aa, Homo sapiens
MTCFGGSPGHRRRKLEPSDFLLFTFQRLELGRKPEHTGTLACGVTSLPAVFPGQVRRTLFITGLPRDARKETVESHFRDAYPTCEVVDVQLCYNVAKLIYLCKEKKKTEKSLTYYTNLQVKTGQRTLINPKPCGQFCCCEVLGCEWEDAISYYTRMKDRLLERITEEERHVQDQPLGMAFVTFQEKSMATYILKDFNACKCQSLQCKGEPQPSSHSRELYTSKWTVTFAADPEDICWKNLSIQGLRWWLQWLGINFTLFLGLFFLTTPSIILSTMDKFNVTKPIHALNNPIISQFFPTLLLWSFSALLPSIVYYSTLLESHWTKSGENQIMMTKVYIFLIFMVLILPSLGLTSLDFFFRWLFDKTSSEASIRLECVFLPDQGAFFVNYVIASAFIGNGMELLRLPGLILYTFRMIMAKTAADRRNVKQNQAFQYEFGAMYAWMLCVFTVIVAYSITCPIIAPFGLIYILLKHMVDRHNLYFVYLPAKLEKGIHFAAVNQALAAPILCLFWLYFFSFLRLGMKAPATLFTFLVLLLTILVCLAHTCFGCFKHLSPLNYKTEEPASDKGSEAEAHMPPPFTITWQASL

SEQ ID NO: 750142 - protein, 607 aa, Homo sapiens
MTCFGGSPGHRRRKLEPSDFLLFTFQRLELGRKPEHTGTLACGVTSLPAVFPGQVRRTLFITGLPRDARKETVESHFRDAYPTCEVVDVQLCYNVAKLIYLCKEKKKTEKSLTYYTNLQVKTGQRTLINPKPCGQFCCCEVLGCEWEDAISYYTRMKDRLLERITEEERHVQDQPLGMAFVTFQEKSMATYILKDFNACKCQSLQCKGEPQPSSHSRELYTSKWTVTFAADPEDICWKNLSIQGLRWWLQWLGINFTLFLGLFFLTTPSIILSTMDKFNVTKPIHALNNPIISQFFPTLLLWSFSALLPSIVYYSTLLESHWTKSGENQIMMTKVYIFLIFMVLILPSLGLTSLDFFFRWLFDKTSSEASIRLECVFLPDQGAFFVNYVIASAFIGNGMELLRLPGLILYTFRMIMAKTAADRRNVKQNQAFQYEFGAMYAWMLCVFTVIVAYSITCPIIAPFGLIYILLKHMVDRHNLYFVYLPAKLEKGIHFAAVNQALAAPILCLFWLYFFSFLRLGMKAPATLFTFLVLLLTILVCLAHTCFGCFKHLSPLNYKTEEPASDKGSEAEAHMPPPFTPYVPRILNGLASERTALSPQQQQQQTYG

SEQ ID NO: 750143 - protein, 445 aa, Homo sapiens
MTCFGGSPGHRRRKLEPSDFLLFTFQRLELGRKPEHTGTLACGVTSLPAVFPGQVRRTLFITGLPRDARKETVESHFRDAYPTCEVVDVQLCYNVAKLIYLCKEKKKTEKSLTYYTNLQVKTGQRTLINPKPCGQFCCCEVLGCEWEDAISYYTRMKDRLLERITEEERHVQDQPLGMAFVTFQEKSMATYILKDFNACKCQSLQCKGEPQPSSHSRELYTSKWTVTFAADPEDICWKNLSIQGLRWWLQWLGINFTLFLGLFFLTTPSIILSTMDKFNVTKPIHALNNPIISQFFPTLLLWSFSALLPSIVYYSTLLESHWTKSGENQIMMTKVYIFLIFMVLILPSLGLTSLDFFFRWLFDKTSSEASIRLECVFLPDQGAFFVNYVIASAFIGNGMELLRLPGLILYTFRMIMAKTAADRRNVKQNQPSSTSLDHSLAAISR

SEQ ID NO: 750144 - protein, 324 aa, Homo sapiens
MTCFGGSPGHRRRKLEPSDFLLFTFQRLELGRKPEHTGTLACGVTSLPAVFPGQVRRTLFITGLPRDARKETVESHFRDAYPTCEVVDVQLCYNVAKLIYLCKEKKKTEKSLTYYTNLQVKTGQRTLINPKPCGQFCCCEVLGCEWEDAISYYTRMKDRLLERITEEERHVQDQPLGMAFVTFQEKSMATYILKDFNACKCQSLQCKGEPQPSSHSRELYTSKWTVTFAADPEDICWKNLSIQGLRWWLQWLGINFTLFLGLFFLTTPSIILSTMDKFNVTKPIHALNNPIISQFFPTLLLWSFSALLPSIVYYSTLLESHWTK

SEQ ID NO: 750145 - protein, 312 aa, Homo sapiens
MDKFNVTKPIHALNNPIISQFFPTLLLWSFSALLPSIVYYSTLLESHWTKSGENQIMMTKVYIFLIFMVLILPSLGLTSLDFFFRWLFDKTSSEASIRLECVFLPDQGAFFVNYVIASAFIGNGMELLRLPGLILYTFRMIMAKTAADRRNVKQNQAFQYEFGAMYAWMLCVFTVIVAYSITCPIIAPFGLIYILLKHMVDRHNLYFVYLPAKLEKGIHFAAVNQALAAPILCLFWLYFFSFLRLGMKAPATLFTFLVLLLTILVCLAHTCFGCFKHLSPLNYKTEEPASDKGSEAEAHMPPPFTITWQASL

SEQ ID NO: 750146 - protein, 237 aa, Homo sapiens
MTCFGGSPGHRRRKLEPSDFLLFTFQRLELGRKPEHTGTLACGVTSLPAVFPGQVRRTLFITGLPRDARKETVESHFRDAYPTCEVVDVQLCYNVAKLIYLCKEKKKTEKSLTYYTNLQVKTGQRTLINPKPCGQFCCCEVLGCEWEDAISYYTRMKDRLLERITEEERHVQDQPLGMAFVTFQEKSMATYILKDFNACKCQSLQCKGEPQPSSHSRELYTSKWTVTFAADPEDICW

SEQ ID NO: 750147 - protein, 58 aa, Homo sapiens
AWGHVIPMGCVLWQEDAISYYTRMKDRLLERITEEERHVQDQPLGMAFVTFQEKSMAT

SEQ ID NO: 750148 - protein, 613 aa, Homo sapiens
MAEGTAEAPLENGGGGDSGAGALERGVAPIKRQYLTTKEQFHQFLEAKGQEKTCRETEVGDPAGNELAEPEAKRIRLEDGQTADGQTEEAAEPGEQLQTQKRARGQNKGRPHVKPTNYDKNRLCPSLIQESAAKCFFGDRCRFLHDVGRYLETKPADLGPRCVLFETFGRCPYGVTCRFAGAHLGPEGQNLVQEELAARGTQPPSIRNGLDKALQQQLRKREVRFERAEQALRRFSQGPTPAAAVPEGTAAEGAPRQENCGAQQVPAGPGTSNPPSSPVRTCGPLTDEDVVRLRPCEKKRLDIRGKLYLAPLTTCGNLPFRRICKRFGADVTCGEMAVCTNLLQGQMSEWALLKRHQCEDIFGVQLEGAFPDTMTKCAELLSRTVEVDFVDINVGCPIDLVYKKGGGCALMNRSTKFQQIVRGMNQVLDVPLTVKIRTGVQERVNLAHRLLPELRDWGVALVTLHGRSREQRYTKLADWQYIEECVQAASPMPLFGNGDILSFEDANRAMQTGVTGIMIARGALLKPWLFTEIKEQRHWDISSSERLDICGTSPTTAWSTGARTRRAWRRPGAFCSSGCPSCAGTCPWGCWSGSHRGSTSGRPTTWAATTWRR

SEQ ID NO: 750149 - protein, 604 aa, Homo sapiens
MRGRESLRCGGDRSDLDESAPLASYLTTKEQFHQFLEAKGQEKTCRETEVGDPAGNELAEPEAKRIRLEDGQTADGQTEEAAEPGEQLQTQKRARGQNKGRPHVKPTNYDKNRLCPSLIQESAAKCFFGDRCRFLHDVGRYLETKPADLGPRCVLFETFGRCPYGVTCRFAGAHLGPEGQNLVQEELAARGTQPPSIRNGLDKALQQQLRKREVRFERAEQALRRFSQGPTPAAAVPEGTAAEGAPRQENCGAQQVPAGPGTSNPPSSPVRTCGPLTDEDVVRLRPCEKKRLDIRGKLYLAPLTTCGNLPFRRICKRFGADVTCGEMAVCTNLLQGQMSEWALLKRHQCEDIFGVQLEGAFPDTMTKCAELLSRTVEVDFVDINVGCPIDLVYKKGGGCALMNRSTKFQQIVRGMNQVLDVPLTVKIRTGVQERVNLAHRLLPELRDWGVALVTLHGRSREQRYTKLADWQYIEECVQAASPMPLFGNGDILSFEDANRAMQTGVTGIMIARGALLKPWLFTEIKEQRHWDISSSERLDICGTSPTTAWSTGARTRRAWRRPGAFCSSGCPSCAGTCPWGCWSGSHRGSTSGRPTTWAATTWRR

SEQ ID NO: 750150 - protein, 559 aa, Homo sapiens
RLVRGRWLIGRGLAEPEAKRIRLEDGQTADGQTEEAAEPGEQLQTQKRARGQNKGRPHVKPTNYDKNRLCPSLIQESAAKCFFGDRCRFLHDVGRYLETKPADLGPRCVLFETFGRCPYGVTCRFAGAHLGPEGQNLVQEELAARGTQPPSIRNGLDKALQQQLRKREVRFERAEQALRRFSQGPTPAAAVPEGTAAEGAPRQENCGAQQVPAGPGTSNPPSSPVRTCGPLTDEDVVRLRPCEKKRLDIRGKLYLAPLTTCGNLPFRRICKRFGADVTCGEMAVCTNLLQGQMSEWALLKRHQCEDIFGVQLEGAFPDTMTKCAELLSRTVEVDFVDINVGCPIDLVYKKGGGCALMNRSTKFQQIVRGMNQVLDVPLTVKIRTGVQERVNLAHRLLPELRDWGVALVTLHGRSREQRYTKLADWQYIEECVQAASPMPLFGNGDILSFEDANRAMQTGVTGIMIARGALLKPWLFTEIKEQRHWDISSSERLDICGTSPTTAWSTGARTRRAWRRPGAFCSSGCPSCAGTCPWGCWSGSHRGSTSGRPTTWAATTWRR

SEQ ID NO: 750151 - protein, 184 aa, Homo sapiens
RLCLSLSLSAWLSWSLPLCISLSASYPAWRLLPQLHGRSREQRYTKLADWQYIEECVQAASPMPLFGNGDILSFEDANRAMQTGVTGIMIARGALLKPWLFTEIKEQRHWDISSSERLDICGTSPTTAWSTGARTRRAWRRPGAFCSSGCPSCAGTCPWGCWSGSHRGSTSGRPTTWAATTWRR

SEQ ID NO: 750152 - protein, 160 aa, Homo sapiens
FRIPIATTRAAALGHLVVRAPGHLRDFTNYGLEHWGSDTQGVEKTRRFLLEWLSFLCRYVPVGLLERLPQRINERPPYYLGRDYLETLMASQKAADWIRIRCLGGLELGSCSRGPGVTEGTLQVLGLTSLFHLLSHSEMLLGPVPPSFAFLPKHKANAYK

SEQ ID NO: 750153 - protein, 222 aa, Homo sapiens
MAEGTAEAPLENGGGGDSGAGALERGVAPIKRQYLTTKEQFHQFLEAKGQEKTCRETEVGDPAGNELAEPEAKRIRLEDGQTADGQTEEAAEPGEQLQIGHAGRGEDPALSARVAVLPVPVRARGAAGAAPTEDQRAAALLPGPRLPGDADGQPEGSRLDPHQVPGWAGVGELQSGARGHGGYFAGPGPDLAFHLLSHSEMLLGPVPPSFAFLPKHKANAYK

SEQ ID NO: 750154 - protein, 685 aa, Homo sapiens
MAEGTAEAPLENGGGGDSGAGALERGVAPIKRQYLTTKEQFHQFLEAKGQEKTCRETEVGDPAGNELAEPEAKRIRLEDGQTADGQTEEAAEPGEQLQTQKRARGQNKGRPHVKPTNYDKNRLCPSLIQESAAKCFFGDRCRFLHDVGRYLETKPADLGPRCVLFETFGRCPYGVTCRFAGAHLGPEGQNLVQEELAARGTQPPSIRNGLDKALQQQLRKREVRFERAEQALRRFSQGPTPAAAVPEGTAAEGAPRQENCGAQQVPAGPGTSNPPSSPVRTCGPLTDEDVVRLRPCEKKRLDIRGKLYLAPLTTCGNLPFRRICKRFGADVTCGEMAVCTNLLQGQMSEWALLKRHQCEDIFGVQLEGAFPDTMTKCAELLSRTVEVDFVDINVGCPIDLVYKKGGGCALMNRSTKFQQIVRGMNQVLDVPLTVKIRTGVQERVNLAHRLLPELRDWGVALVTLHGRSREQRYTKLADWQYIEECVQAASPMPLFGNGDILSFEDANRAMQTGVTGIMIARGALLKPWLFTEIKEQRHWDISSSERLDICGTSPTTAWSTGARTRRAWRRPGAFCSSGCPSCAGTSRGAAGAAPTEDQRAAALLPGPRLPGDADGQPEGSRLDPHQVPGWAGVGELQSGARGHGGYFAGPGPDLAFHLLSHSEMLLGPVPPSFAFLPKHKANAYK

SEQ ID NO: 750155 - protein, 310 aa, Homo sapiens
MRGRESLRCGGDRSDLDESAPLASYLTTKEQFHQFLEAKGQEKTCRETEVGDPAGNELAEPEAKRIRLEDGQTADGQTEEAAEPGEQLQTQKRARGQNKGRPHVKPTNYDKNRLCPSLIQESAAKCFFGDRCRFLHDVGRYLETKWRPAQAVALHGDQGAAALGHLVVRAPGHLRDFTNYGLEHWGSDTQGVEKTRRFLLEWLSFLCRYVPVGLLERLPQRINERPPYYLGRDYLETLMASQKAADWIRIRCLGGLELGSCSRGPGVTEGTLQVLGLTSLFHLLSHSEMLLGPVPPSFAFLPKHKANAYK

SEQ ID NO: 750156 - protein, 313 aa, Homo sapiens
MRGRESLRCGGDRSDLDESAPLASYLTTKEQFHQFLEAKGQEKTCRETEVGDPAGNELAEPEAKRIRLEDGQTADGQTEEAAEPGEQLQTQKRARGQNKGRPHVKPTNYDKNRLCPSLIQESAAKCFFGDRCRFLHDVGRYLETKPADLGPRCVLFETFGRCPYGVTCRFAGAHLGPEGLHQLRPGALGLGHAGRGEDPALSARVAVLPVPVRARGAAGAAPTEDQRAAALLPGPRLPGDADGQPEGSRLDPHQVPGWAGVGELQSGARGHGGYFAGPGPDLAFHLLSHSEMLLGPVPPSFAFLPKHKANAYK

SEQ ID NO: 750157 - protein, 90 aa, Homo sapiens
MGAEEKAGARRRGGGVTSHLPKGLSPTPPTPPSRCHLHTGEPWGQVGGGRLDSPVLSFSRGHVYLAQSQETGFSRLGTVAHAYNLRTLGG

SEQ ID NO: 750158 - protein, 605 aa, Homo sapiens
MAGLYSLGVSVFSDQGGRKYMEDVTQIVVEPEPTAEEKPSPRRSLSQPLPPRPSPAALPGGEVSGKGPAVAAREARDPLPDAGASPAPSRCCRRRSSVAFFAVCDGHGGREAAQFAREHLWGFIKKQKGFTSSEPAKVCAAIRKGFLACHLAMWKKLAEWPKTMTGLPSTSGTTASVVIIRGMKMYVAHVGDSGVVLGIQDDPKDDFVRAVEVTQDHKPELPKERERIEGLGGSVMNKSGVNRVVWKRPRLTHNGPVRRSTVIDQIPFLAVARALGDLWSYDFFSGEFVVSPEPDTSVHTLDPQKHKYIILGSDGLWNMIPPQDAISMCQDQEEKKYLMGEHGQSCAKMLVNRALGRWRQRMLRADNTSAIVICISPEVDNQGNFTNEDELYLNLTDSPSYNSQETCVMTPSPCSTPPVKSLEEDPWPRVNSKDHIPALVRSNAFSENFLEVSAEIARENVQGVVIPSKDPEPLEENCAKALTLRIHDSLNNSLPIGLVPTNSTNTVMDQKNLKMSTPGQMKAQEIERTPPTNFKRTLEESNSGPLMKKHRRNGLSRSSGAQPASLPTTSQRKNSVKLTMRRRLRGQKKIGNPLLHQHRKTVCVC

SEQ ID NO: 750159 - protein, 385 aa, Homo sapiens
SPYCILRIEGLGGSVMNKSGVNRVVWKRPRLTHNGPVRRSTVIDQIPFLAVARALGDLWSYDFFSGEFVVSPEPDTSVHTLDPQKHKYIILGSDGLWNMIPPQDAISMCQDQEEKKYLMGEHGQSCAKMLVNRALGRWRQRMLRADNTSAIVICISPEVDNQGNFTNEDELYLNLTDSPSYNSQETCVMTPSPCSTPPVKSLEEDPWPRVNSKDHIPALVRSNAFSENFLEVSAEIARENVQGVVIPSKDPEPLEENCAKALTLRIHDSLNNSLPIGLVPTNSTNTVMDQKNLKMSTPGQMKAQEIERTPPTNFKRTLEESNSGPLMKKHRRNGLSRSSGAQPASLPTTSQRKNSVKLTMRRRLRGQKKIGNPLLHQHRKTVCVC

SEQ ID NO: 750160 - protein, 113 aa, Homo sapiens
SYLFYLLIFQSLEEDPWPRVNSKDHIPALVRSNAFSENFLEVSAEIARENVQGVVIPSKDPEPLEENCAKALTLRIHDSLNNSLPIGLVPTNSTNTVMDQKNLKMSTPGQMKA

SEQ ID NO: 750161 - protein, 605 aa, Homo sapiens; identical to SEQ ID NO: 750158

SEQ ID NO: 750162 - protein, 504 aa, Homo sapiens
MAGLYSLGVSVFSDQGGRKYMEDVTQIVVEPEPTAEEKPSPRRSLSQPLPPRPSPAALPGGEVSGKGPAVAAREARDPLPDAGASPAPSRCCRRRSSVAFFAVCDGHGGREAAQFAREHLWGFIKKQKGFTSSEPAKVCAAIRKGFLACHLAMWKKLAEWPKTMTGLPSTSGTTASVVIIRGMKMYVAHVGDSGVVLGIQDDPKDDFVRAVEVTQDHKPELPKERERIEGLGGSVMNKSGVNRVVWKRPRLTHNGPVRRSTVIDQIPFLAVARALGDLWSYDFFSGEFVVSPEPDTSVHTLDPQKHKYIILGSDGLWNMIPPQDAISMCQDQEEKKYLMGEHGQSCAKMLVNRALGRWRQRMLRADNTSAIVICISPEVDNQGNFTNEDELYLNLTDSPSYNSQETCVMTPSPCSTPPVKSLEEDPWPRVNSKDHIPALVRSNAFSENFLEVSAEIARENVQGVVIPSKDPEPLEENWKSFTSSTQENCLCLLKCIWEMRFFQT

SEQ ID NO: 750163 - protein, 198 aa, Homo sapiens
MSPYPYVLDQQLMSLEEDPWPRVNSKDHIPALVRSNAFSENFLEVSAEIARENVQGVVIPSKDPEPLEENCAKALTLRIHDSLNNSLPIGLVPTNSTNTVMDQKNLKMSTPGQMKAQEIERTPPTNFKRTLEESNSGPLMKKHRRNGLSRSSGAQPASLPTTSQRKNSVKLTMRRRLRGQKKIGNPLLHQHRKTVCVC

SEQ ID NO: 750164 - protein, 482 aa, Homo sapiens
MAGLYSLGVSVFSDQGGRKYMEDVTQIVVEPEPTAEEKPSPRRSLSQPLPPRPSPAALPGGEVSGKGPAVAAREARDPLPDAGASPAPSRCCRRRSSVAFFAVCDGHGGREAAQFAREHLWGFIKKQKGFTSSEPAKVCAAIRKGFLACHLAMWKKLAEWPKTMTGLPSTSGTTASVVIIRGMKMYVAHVGDSGVVLGIQDDPKDDFVRAVEVTQDHKPELPKERERIEGLGGSVMNKSGVNRVVWKRPRLTHNGPVRRSTVIDQIPFLAVARALGDLWSYDFFSGEFVVSPEPDTSVHTLDPQKHKYIILGSDGLWNMIPPQDAISMCQDQEEKKYLMGEHGQSCAKMLVNRALGRWRQRMLRADNTSAIVICISPEVDNQGNFTNEDELYLNLTDSPSYNSQETCVMTPSPCSTPPVKSLEEDPWPRVNSKDHIPALVRSNAFSENFLEVSAEIARENVQGVVIPSKDPEPLNIALDRTG

SEQ ID NO: 750165 - protein, 197 aa, Homo sapiens
MVEELNSGKVMYAFCRVKDPNSGLPKFVLINWTGEGVNDVRKGACASHVSTMASFLKGAHVTINARAEEDVEPECIMEKVAKASGANYSFHKESGRFQDVGPQAPVGSVYQKTNAVSEIKRVGKDSFWAKAEKEEENRRLEEKRRAEEAQRQLEQERRERELREAARREQRYQEQGGEASPQRDVGAAARSGFKEPK

SEQ ID NO: 750166 - protein, 258 aa, Homo sapiens
KGAGGARGRGGRVLSRNGPALQEAYVRVVTEKSPTDWALFTYEGNSNDIRVAGTGEGGLEEMVEELNSGKVMYAFCRVKDPNSGLPKFVLINWTGEGVNDVRKGACASHVSTMASFLKGAHVTINARAEEDVEPECIMEKVAKASGANYSFHKESGRFQDVGPQAPVGSVYQKTNAVSEIKRVGKDSFWAKAEKEEENRRLEEKRRAEEAQRQLEQERRERELREAARREQRYQEQGGEASPQRDVGAAARSGFKEPK

SEQ ID NO: 750167 - protein, 310 aa, Homo sapiens
MLDQLAGQLARTRGCGWPLPFPLPAVGRGFRMSEARLVGCQRGGPAGPGSYSSGAETAGRAMAANLSRNGPALQEAYVRVVTEKSPTDWALFTYEGNSNDIRVAGTGEGGLEEMVEELNSGKVMYAFCRVKDPNSGLPKFVLINWTGEGVNDVRKGACASHVSTMASFLKGAHVTINARAEEDVEPECIMEKVAKASGANYSFHKESGRFQDVGPQAPVGSVYQKTNAVSEIKRVGKDSFWAKAEKEEENRRLEEKRRAEEAQRQLEQERRERELREAARREQRYQEQGGEASPQRDVGAAARSGFKEPK

SEQ ID NO: 750168 - protein, 197 aa, Homo sapiens; identical to SEQ ID NO: 750165

SEQ ID NO: 750169 - protein, 310 aa, Homo sapiens; identical to SEQ ID NO: 750167

SEQ ID NO: 750170 - protein, 310 aa, Homo sapiens; identical to SEQ ID NO: 750167

SEQ ID NO: 750171 - protein, 309 aa, Homo sapiens
MWSLSASWRRWPRLQVPTTAFTRRVAASRTWDPRPQWALCTRRPMPCLRLKGLVKTASGPKQRRRRRTVGWRKSGGPRRHSGSWSRSAGSVSCVRLHAGSSAIRSRVARPAPRGTWEQQQEVVSRNRNEQESAVHPREIFKQKERAMSTTSISSPQPGKLRSPFLQKQLTQPETHFGREPAAAISRPRADLPAEEPAPSTPPCLVQAEEEAVYEEPPEQETFYEQPPLVQQQGAGSEHIDHHIQGQGLSGQGLCARALYDYQAADDTEISFDPENLITGIEVIDEGWWRGYGPDGHFGMFPANYVELIE

SEQ ID NO: 750172 - protein, 310 aa, Homo sapiens; identical to SEQ ID NO: 750167

SEQ ID NO: 750173 - protein, 310 aa, Homo sapiens; identical to SEQ ID NO: 750167

SEQ ID NO: 750174 - protein, 163 aa, Homo sapiens [sequence omitted]

SEQ ID NO: 750175 - protein, 251 aa, Homo sapiens
GSHLVASVDTALLWKSGGPRRHSGSWSRSAGSVSCVRLHAGSSAIRSRVARPAPRGTWEQQQEVVSRNRNEQESAVHPREIFKQKERAMSTTSISSPQPGKLRSPFLQKQLTQPETHFGREPAAAISRPRADLPAEEPAPSTPPCLVQAEEEAVYEEPPEQETFYEQPPLVQQQGAGSEHIDHHIQGQGLSGQGLCARALYDYQAADDTEISFDPENLITGIEVIDEGWWRGYGPDGHFGMFPANYVELIE

SEQ ID NO: 750176 - protein, 278 aa, Homo sapiens
DRVGFLSDLRLKGLVKTASGPKQRRRRRTVGWRKSGGPRRHSGSWSRSAGSVSCVRLHAGSSAIRSRVARPAPRGTWEQQQEVVSRNRNEQGSTCASLQESAVHPREIFKQKERAMSTTSISSPQPGKLRSPFLQKQLTQPETHFGREPAAAISRPRADLPAEEPAPSTPPCLVQAEEEAVYEEPPEQETFYEQPPLVQQQGAGSEHIDHHIQGQGLSGQGLCARALYDYQAADDTEISFDPENLITGIEVIDEGWWRGYGPDGHFGMFPANYVELIE

SEQ ID NO: 750177 - protein, 310 aa, Homo sapiens; identical to SEQ ID NO: 750167

SEQ ID NO: 750178 - protein, 374 aa, Homo sapiens
MTLGNSERRELFLAEFVTKVRVDHGGLAAGNLSCWSLLCAPHSISLSLCLGYGKWGCRWPSSHPGYSKTADTTCSSTRLTRCLQAPVCASTDSDFRKSNTEWPWPVVFPYFLSQLIRVSEEQICFWTTKKKNKTKNLLQATHIMQYEDTNRHREERQHGPQKRNPGTKHEQRKPEGQNKQQHTQIERNRNNKTRNTQPLDIHPVATNMDFPGESIHAVLSSLEHRHTEECNKDKTRQDEDHESNQEAQNKPSTDSDNTREHKNTTQRHKHKQCNETTTSYHLCSRGKGRGETEKEERQSRREKRCGGGRRERESWQWIYERRSDEDRERKRESYRQHGEERKRSEKEEGESREEGVRGEEREDRAGGGGGERVR

SEQ ID NO: 750179 - protein, 374 aa, Homo sapiens; identical to SEQ ID NO: 750178

SEQ ID NO: 750180 - protein, 374 aa, Homo sapiens
MTLGNSERRELFLAEFVTKVRVDHGGLAAGNLSCWSLLCAPHSISLSLCLGYGKWGCRWPSSHPGYSKTADTTCSSTRLTRCLQAPVCASTDSDFRKSNTEWPWPVVFPYFLSQLIRVSEEQICFWTTKKKNKTKNLLQATHIMQYEDTNRHREERQHGPQKRNPGTKHEQRKPEGQNKQQHTQIERNRNNKTRNTQPLDIHPVATNMDFPGESIHAVLSSLEHRHTEECNKDKTRQDEDHESNQEAQNKARTDSDNTREHKNTTQRHKHKQCNETTTSYHLCSRGKGRGETEKEERQSRREKRCGGGRRERESWQWIYERRSDEDRERKRESYRQHGEERKRSEKEEGESREEGVRGEEREDRAGGGGGERVR

SEQ ID NO: 750181 - protein, 139 aa, Homo sapiens
MVEELNSGKVMYAFCRVKDPNSGLPKFVLINWTGEGVNDVRKGACASHVSTMASFLKGAHVTINARAEEDVEPECIMEKVAKASGANYSFHKESGRFQDVGPQAPVGSVYQKTNAVSEIKRVGKDSFWAKAEMVTLRLG

SEQ ID NO: 750182 - protein, 109 aa, Homo sapiens
MVEELNSGKVMYAFCRVKDPNSGLPKFVLINWTGEGVNDVRKGACASHVSTMASFLKGAHVTINARAEEDVEPECIMEKVAKASGANYSFHKESGRFQDVGPQAPVCLN

SEQ ID NO: 750183 - protein, 167 aa, Homo sapiens
MLDQLAGQLARTRGCGWPLPFPLPAVGRGFRMSEARLVGCQRGGPAGPGSYSSGAETAGRAMAANLSRNGPALQEAYVRVVTEKSPTDWWAARRARVGPGLPQGALFTYEGNSNDIRVAGTGEGGLEEMVEELNSGKVMYAFCRVKDPNSGLPKFVLINWVCGACFI

SEQ ID NO: 750184 - protein, 72 aa, Homo sapiens
CLQAPVCASTDSDFRKSNTEWPWPVVFPYFLSQLIRVSEEQICFWTTKFPVWSTQARSSHLSCCSLNAPMWE

SEQ ID NO: 750185 - protein, 310 aa, Homo sapiens; identical to SEQ ID NO: 750167

SEQ ID NO: 750186 - protein, 310 aa, Homo sapiens; identical to SEQ ID NO: 750167

SEQ ID NO: 750187 - protein, 325 aa, Homo sapiens
MLDQLAGQLARTRGCGWPLPFPLPAVGRGFRMSEARLVGCQRGGPAGPGSYSSGAETAGRAMAANLSRNGPALQEAYVRVVTEKSPTDWWAARRARVGPGLPQGALFTYEGNSNDIRVAGTGEGGLEEMVEELNSGKVMYAFCRVKDPNSGLPKFVLINWTGEGVNDVRKGACASHVSTMASFLKGAHVTINARAEEDVEPECIMEKVAKASGANYSFHKESGRFQDVGPQAPVGSVYQKTNAVSEIKRVGKDSFWAKAEKEEENRRLEEKRRAEEAQRQLEQERRERELREAARREQRYQEQGGEASPQRDVGAAARSGFKEPK

SEQ ID NO: 750188 - protein, 197 aa, Homo sapiens; identical to SEQ ID NO: 750165

SEQ ID NO: 750189 - protein, 309 aa, Homo sapiens; identical to SEQ ID NO: 750171

SEQ ID NO: 750190 - protein, 309 aa, Homo sapiens; identical to SEQ ID NO: 750171

SEQ ID NO: 750191 - protein, 310 aa, Homo sapiens; identical to SEQ ID NO: 750167

SEQ ID NO: 750192 - protein, 265 aa, Homo sapiens
MPCLRLKGLVKTASGPKQRRRRRTVGWRKSGGPRRHSGSWSRSAGSVSCVRLHAGSSAIRSRVARPAPRGTWEQQQEVVSRNRNEQESAVHPREIFKQKERAMSTTSISSPQPGKLRSPFLQKQLTQPETHFGREPAAAISRPRADLPAEEPAPSTPPCLVQAEEEAVYEEPPEQETFYEQPPLVQQQGAGSEHIDHHIQGQGLSGQGLCARALYDYQAADDTEISFDPENLITGIEVIDEGWWRGYGPDGHFGMFPANYVELIE

SEQ ID NO: 750193 - protein, 284 aa, Homo sapiens
TKDPEDAAQDVDQASGSVTKTMPVEIKGWKDSFWAKQRRRRRTVGWRKSGGPRRHSGSWSRSAGSVSCVRLHAGSSAIRSRVARPAPRGTWEQQQEVVSRNRNEQESAVHPREIFKQKERAMSTTSISSPQPGKLRSPFLQKQLTQPETHFGREPAAAISRPRADLPAEEPAPSTPPCLVQAEEEAVYEEPPEQETFYEQPPLVQQQGAGSEHIDHHIQGQGLSGQGLCARALYDYQAADDTEISFDPENLITGIEVIDEGWWRGYGPDGHFGMFPANYVELIE

SEQ ID NO: 750194 - protein, 305 aa, Homo sapiens
MLDQLAGQLARTRGCGWPLPFPLPAVGRGFRMSEARLVGCQRGGPAGPGSYSSGAETAGRAMAANLSRNGPALQEAYVRVVTEKSPTDWALFTYEGNSNDIRVAGTGEGGLEEMVEELNSGKVMYAFCRVKDPNSGLPKFVLINWTGEGVNDVRKGACASHVSTMASFLKGAHVTINARAEEDVEPECIMEKVAKASGANYSFHKESGRFQDVGPQAPVGSVYQKTNAVSEIKRVGKDSFWAKAEKEEENRRLEEKRRAEEAQRQLEQERRERELREAARREQRYQEQGGEASPQRGTVNVENCF

SEQ ID NO: 750195 - protein, 269 aa, Homo sapiens
MLDQLAGQLARTRGCGWPLPFPLPAVGRGFRMSEARLVGCQRGGPAGPGSYSSGAETAGRAMAANLSRNGPALQEAYVRVVTEKSPTDWALFTYEGNSNDIRVAGTGEGGLEEMVEELNSGKVMYAFCRVKDPNSGLPKFVLINWTGEGVNDVRKGACASHVSTMASFLKGAHVTINARAEEDVEPECIMEKVAKASGANYSFHKESGRFQDVGPQAPVGSVYQKTNAVSEIKRVGKDSFWAKAEVSAAPGHAGHVGVFCLLWLIFPHK

SEQ ID NO: 750196 - protein, 222 aa, Homo sapiens
MLDQLAGQLARTRGCGWPLPFPLPAVGRGFRMSEARLVGCQRGGPAGPGSYSSGAETAGRAMAANLSRNGPALQEAYVRVVTEKSPTDWALFTYEGNSNDIRVAGTGEGGLEEMVEELNSGKVMYAFCRVKDPNSGLPKFVLINWTGEGVNDVRKGACASHVSTMASFLKGAHVTINARAEEDVEPECIMEKVAKASGANYSFHKESGRFQDVGPQAPVCLN

SEQ ID NO: 750197 - protein, 147 aa, Homo sapiens
MLDQLAGQLARTRGCGWPLPFPLPAVGRGFRMSEARLVGCQRGGPAGPGSYSSGAETAGRAMAANLSRNGPALQEAYVRVVTEKSPTDWWAARRARVGPGLPQGWVCLGRAGDSGGAGREAERCPGRWPGAYLSAPPHRSRSAVSPS

SEQ ID NO: 750198 - protein, 72 aa, Homo sapiens
PLVPVGWPSTWVQVSNECCPLQGSVYQKTNAVSEIKRVGKDSFWAKAEVSAAPGHAGHVGVFCLLWLIFPHK

SEQ ID NO: 750199 - protein, 131 aa, Homo sapiens
MKIFLPVLLAALLGVERASSLMCFSCLNQKSNLYCLKPTICSDQDNYCVTVSASAGIGNLVTFGHSLSKTCSPACPIPEGVNVGVASMGISCCQSFLCNFSAADGGLRASVTLLGAGLLLSLLPALLRFGP

SEQ ID NO: 750200 - protein, 131 aa, Homo sapiens; identical to SEQ ID NO: 750199

SEQ ID NO: 750201 - protein, 131 aa, Homo sapiens; identical to SEQ ID NO: 750199

SEQ ID NO: 750202 - protein, 131 aa, Homo sapiens; identical to SEQ ID NO: 750199

SEQ ID NO: 750203 - protein, 131 aa, Homo sapiens; identical to SEQ ID NO: 750199

SEQ ID NO: 750204 - protein, 131 aa, Homo sapiens; identical to SEQ ID NO: 750199

SEQ ID NO: 750205 - protein, 131 aa, Homo sapiens; identical to SEQ ID NO: 750199

SEQ ID NO: 750206 - protein, 131 aa, Homo sapiens; identical to SEQ ID NO: 750199

SEQ ID NO: 750207 - protein, 140 aa, Homo sapiens
MVRGWVVIGRGIFLPVLLAALLGVERASSLMCFSCLNQKSNLYCLKPTICSDQDNYCVTVSASAGIGNLVTFGHSLSKTCSPACPIPEGVNVGVASMGISCCQSFLCNFSAADGGLRASVTLLGAGLLLSLLPALLRFGP

SEQ ID NO: 750208 - protein, 77 aa, Homo sapiens
RGRAAAWEAPGQPRSRAREVRGARPGCWYLRPPGEQDRLLWFVTSRQDGHPLQNEDLLASAAGCPSGCGARRAICTA

SEQ ID NO: 750209 - protein, 131 aa, Homo sapiens; identical to SEQ ID NO: 750199

SEQ ID NO: 750210 - protein, 131 aa, Homo sapiens; identical to SEQ ID NO: 750199

SEQ ID NO: 750211 - protein, 131 aa, Homo sapiens; identical to SEQ ID NO: 750199

SEQ ID NO: 750212 - protein, 131 aa, Homo sapiens; identical to SEQ ID NO: 750199

SEQ ID NO: 750213 - protein, 131 aa, Homo sapiens; identical to SEQ ID NO: 750199

SEQ ID NO: 750214 - protein, 146 aa, Homo sapiens
RGRAAAWEAPGQPRSRAREVRGARPGCWYLRPPGEQDRLLWFVTSRQDGHPLQNEDLLASAAGCPSGCGASQLLPELSVQFQCGRWRAAGKRHPAGCRAAAEPAAGPAAVWPLTAQTLSPDPPAQEGKPSPFWIPQCMGAPDSSRA

SEQ ID NO: 750215 - protein, 106 aa, Homo sapiens
RGRAAAWEAPGQPRSRAREVRGARPGCWYLRPPGEQDRLLWFVTSRQDGHPLQNEDLLASAAGCPSGCGASQLADVLLLLEPEEQSVLPEADHLLRPGQLLRDCVC

SEQ ID NO: 750216 - protein, 132 aa, Homo sapiens
MRVGGHFVGSCPRSGVDDVTFLGGLRKGRGFPGVLRSNIRTKSHGHADRVPRETVSVGMCAWLCTWVCSARESTWRLLGAMFGEGGVPAAWRASVPVAPCPGTAACTSRAWQRCPRSGRIFLQDIKKPDCDD

SEQ ID NO: 750217 - protein, 131 aa, Homo sapiens; identical to SEQ ID NO: 750199

SEQ ID NO: 750218 - protein, 131 aa, Homo sapiens; identical to SEQ ID NO: 750199

SEQ ID NO: 750219 - protein, 131 aa, Homo sapiens; identical to SEQ ID NO: 750199

SEQ ID NO: 750220 - protein, 124 aa, Homo sapiens
LSRDDWSEHWPGSLKIVSSYIDHHFLYGDFGQSCSVYGPYVPNVGVIEGNWNLVTFGHSLSKTCSPACPIPEGVNVGVASMGISCCQSFLCNFSAADGGLRASVTLLGAGLLLSLLPALLRFGP

SEQ ID NO: 750221 - protein, 178 aa, Homo sapiens
MKIFLPVLLAALLGVERASSLMCFSCLNQKSNLYCLKPTICSDQDNYCVTVSASAGIGNLVTFGHSLSKTCSPACPIPEGVNVGVASMGISCCQSFLCNFSAADGGLRASVTLLAIPQLRKESPALSGSHSVWEPLTPHVPDLCPWSQVRAHPACTSDLPQPLPLPRSGASCPHFWGG

SEQ ID NO: 750222 - protein, 131 aa, Homo sapiens; identical to SEQ ID NO: 750199

SEQ ID NO: 750223 - protein, 131 aa, Homo sapiens; identical to SEQ ID NO: 750199

SEQ ID NO: 750224 - protein, 156 aa, Homo sapiens
MRVGGHFVGSCPRSGVDDVTFLGGLRKGRGFPGVLRSNIRTKSHGHADRVPRETVSVGMCAWLCTWVCSARESTWRLLGAMFGEGGVPAAWRASVPVAPCPGTAACTSRAWQRCPRSGIWTPPVLPASLPVQKSQQETNLNGLLVDKTASTCTFAH

SEQ ID NO: 750225 - protein, 69 aa, Homo sapiens
VALLEGQTVDHSGAGERKLHPKAMAGNLDLTAGKQKRGGRWAMMEFLTNALFLLKLTCASISGISSTSQ

SEQ ID NO: 750226 - protein, 276 aa, Homo sapiens
GSSAWRAPASASAPAPASPAAPRPRATKPPAKPAQLRVPGRGAMPCRREEEEEAGEEAEGEEEEDDSFLLLQQSVTLGSSGEVDRLVAQIGETLQLDAAQDSPASPCAPPGVPLRAPGPLAAAVPADKARPPAVPLLLPPASAETVGPAPSGALRCALGDRGRVRGRAAPYCVAEVAAGPSALPGPCRRGWLRDAVTSRRLQQRRWTQAGARAGDDDPHRLLQQLVLSGNLIKEAVRRLQRAVAAVAATGPASAPGPGGGRSGPDRIALQPSGSLL

SEQ ID NO: 750227 - protein, 276 aa, Homo sapiens; identical to SEQ ID NO: 750226

SEQ ID NO: 750228 - protein, 276 aa, Homo sapiens; identical to SEQ ID NO: 750226

SEQ ID NO: 750229 - protein, 276 aa, Homo sapiens; identical to SEQ ID NO: 750226

SEQ ID NO: 750230 - protein, 276 aa, Homo sapiens; identical to SEQ ID NO: 750226

SEQ ID NO: 750231 - protein, 149 aa, Homo sapiens
MCWTTVSHSMSHCLRGGSASFSHHFNQLHLNVVLIGMWPPLKSSTLVFLSDHSLTNALCALTSRRPLVLRHLHFLHLMNCLFRVLSELHALNHFATLPVCHPSCQEGSPVSAIPSSLIETPLLIPISSPFYSMGGVFQTGLLSPGPLLM

SEQ ID NO: 750232 - protein, 470 aa, Homo sapiens
SLRAPAEIAAQPMAGSPSRAAGRRLQLPLLCLFLQGATAVLFAVFVRYNHKTDAALWHRSNHSNADNEFYFRYPSFQDVHAMVFVGFGFLMVFLQRYGFSSVGFTFLLAAFALQWSTLVQGFLHSFHGGHIHVGVESMINADFCAGAVLISFGAVLGKTGPTQLLLMALLEVVLFGINEFVLLHLLGVRDAGGSMTIHTFGAYFGLVLSRVLYRPQLEKSKHRQGSVYHSDLFAMIGTIFLWIFWPSFNAALTALGAGQHRTALNTYYSLAASTLGTFALSALVGEDGRLDMVHIQNAALAGGVVVGTSSEMMLTPFGALAAGFLAGTVSTLGYKFFTPILESKFKVQDTCGVHNLHGMPGVLGALLGVLVAGLATHEAYGDGLESVFPLIAEGQRSATSQAMHQLFGLFVTLMFASVGGGLGGLLLKLPFLDSPPDSQHYEDQVHWQVPGEHEDKAQRPLRVEEADTQA

SEQ ID NO: 750233 - protein, 457 aa, Homo sapiens
SLRAPAEIAAQPMAGSPSRAAGRRLQLPLLCLFLQGATAVLFAVFVRYNHKTDAALWHRSNHSNADNEFYFRYPSFQDVHAMVFVGFGFLMVFLQRYGFSSVGFTFLLAAFALQWSTLVQGFLHSFHGGHIHVGVESMINADFCAGAVLISFGAVLGKTGPTQLLLMALLEVVLFGINEFVLLHLLGVRDAGGSMTIHTFGAYFGLVLSRVLYRPQLEKSKHRQGSVYHSDLFAMIGTIFLWIFWPSFNAALTALGAGQHRTALNTYYSLAASTLGTFALSALVGEDGRLDMVHIQNAALAGGVVVGTSSEMMLTPFGALAAGFLAGTVSTLGYKFFTPILESKFKVQDTCGVHNLHGMPGVLGALLGVLVAGLATHEAYGDGLESVFPLIAEGQRSATSQAMHQLFGLFVTLMFASVGGGLGDSQHYEDQVHWQVPGEHEDKAQRPLRVEEADTQA

SEQ ID NO: 750234 - protein, 140 aa, Homo sapiens
SLRAPAEIAAQPMAGSPSRAAGRRLQLPLLCLFLQGATAVLFAVFVRYNHKTDAALWHRSNHSNADNEFYFRYPKESHSVAQAGVQRRNLGSLQPSPPRFKRFTPLSLPRSWDYRHPPKHLDKFCIFSRDEVSPCWPGWS

SEQ ID NO: 750235 - protein, 291 aa, Homo sapiens
RVPRPQFRRKMAGSPELVVLDPPWDKELAAGTESQALVSATPREDFRVRCTSKRAVTEMLQLCGRFVQKLGDALPEEIREPALRDAQWTFESAVQENISINGQAWQEASDNCFMDSDIKVLEDQFDEIIVDIATKRKQYPRKILECVIKTIKAKQEILKQYHPVVHPLDLKYDPDPAPHMENLKCRGETVAKEISEAMKSLPALIEQGEGFSQVLRMQPVIHLQRIHQEVFSSCHRKPDAKPENFITQIETTPTETASRKTSDVVLKRKQTKDCPQRKWYPLRPKKINLDT

SEQ ID NO: 750236 - protein, 188 aa, Homo sapiens
RVPRPQFRRKMAGSPELVVLDPPWDKELAAGTESQALVSATPREDFRVRCTSKRAVTEMLQLCGRFVQKLGDALPEEIREPALRDAQWTFESAVQENISINGQAWQEASDNCFMDSDIKVLEDQFDEIIVDIATKRKQYPRKILECVIKTIKAKQEILKQYHPVVHPLDLKYDPDPGAKPGGLALGAV

SEQ ID NO: 750237 - protein, 232 aa, Homo sapiens
RVPRPQFRRKMAGSPELVVLDPPWDKELAAGTESQALVSATPREDFRVRCTSKRAVTEMLQLCGRFVQKLGDALPEEIREPALRDAQWTFESAVQENISINGQAWQEASDNCFMDSDIKVLEDQFDEIIVDIATKRKQYPRKILECVIKTIKAKQEILKQYHPVVHPLDLKYDPDPVLNGNAFNFSPFNMMLAVDLSYMVFITSSPAPDMEFLVIPRGNSLFGYSPCPVSLA

SEQ ID NO: 750238 - protein, 291 aa, Homo sapiens; identical to SEQ ID NO: 750235

SEQ ID NO: 750239 - protein, 291 aa, Homo sapiens; identical to SEQ ID NO: 750235

SEQ ID NO: 750240 - protein, 223 aa, Homo sapiens
RVPRPQFRRKMAGSPELVVLDPPWDKELAAGTESQALVSATPREDFRVRCTSKRAVTEMLQLCGRFVQKLGDALPEEIREPALRDAQWTFESAVQENISINGQAWQEASDNCFMDSDIKVLEDQFDEIIVDIATKRKQYPRKILECVIKTIKAKQEILKQYHPVVHPLDLKYDPDPVLNGNAFNFSPFNMMLAVDLSYMVFITSSPSYGKFEMQRGNSSKGDQ

SEQ ID NO: 750241 - protein, 211 aa, Homo sapiens
LTTVNLLQTFESAVQENISINGQAWQEASDNCFMDSDIKVLEDQFDEIIVDIATKRKQYPRKILECVIKTIKAKQEILKQYHPVVHPLDLKYDPDPAPHMENLKCRGETVAKEISEAMKSLPALIEQGEGFSQVLRMQPVIHLQRIHQEVFSSCHRKPDAKPENFITQIETTPTETASRKTSDVVLKRKQTKDCPQRKWYPLRPKKINLDT

SEQ ID NO: 750242 - protein, 242 aa, Homo sapiens
MGQGARGWHREPGLGLRHSPRRLSGALHLEAGCDRNATTVRPLRAKARGRSAGGDSGARSARCAVDSDIKVLEDQFDEIIVDIATKRKQYPRKILECVIKTIKAKQEILKQYHPVVHPLDLKYDPDPAPHMENLKCRGETVAKEISEAMKSLPALIEQGEGFSQVLRMQPVIHLQRIHQEVFSSCHRKPDAKPENFITQIETTPTETASRKTSDVVLKRKQTKDCPQRKWYPLRPKKINLDT

SEQ ID NO: 750243 - protein, 142 aa, Homo sapiens
RVPRPQFRRKMAGSPELVVLDPPWDKELAAGTESQALVSATPREDFRVRCTSKRAVTEMLQLCGRFVQKLGDALPEEIREPALRDAQWVRDQLASSLLIILLPNTQDLRIQKDPTPGLGRINGAPGYCRTSSRNARGERNRC

SEQ ID NO: 750244 - protein, 291 aa, Homo sapiens; identical to SEQ ID NO: 750235

SEQ ID NO: 750245 - protein, 160 aa, Homo sapiens
RVPRPQFRRKMAGSPELVVLDPPWDKELAAGTESQALVSATPREDFRVRCTSKRAVTEMLQLCGRFVQKLGDALPEEIREPALRDAQWTFESAVQENISINGQAWQEASDNCFMDSDIKVLEDQFDEIIVDIATKRKQYPRKILECVIKTIKAKQEILVR

SEQ ID NO: 750246 - protein, 291 aa, Homo sapiens; identical to SEQ ID NO: 750235

SEQ ID NO: 750247 - protein, 142 aa, Homo sapiens; identical to SEQ ID NO: 750243

SEQ ID NO: 750248 - protein, 182 aa, Homo sapiens
RVPRPQFRRKMAGSPELVVLDPPWDKELAAGTESQALVSATPREDFRVRCTSKRAVTEMLQLCGRFVQKLGDALPEEIREPALRDAQWTFESAVQENISINGQAWQEASDNCFMDSDIKVLEDQFDEIIVDIATKRKQYPRKILECVIKTIKAKQEILKQYHPVVHPLDLKYDPDPVLACIN

SEQ ID NO: 750249 - protein, 250 aa, Homo sapiens
RVPRPQFRRKMAGSPELVVLDPPWDKELAAGTESQALVSATPREDFRVRCTSKRAVTEMLQLCGRFVQKLGDALPEEIREPALRDAQWTFESAVQENISINGQAWQEASDNCFMDSDIKVLEDQFDEIIVDIATKRKQYPRKILECVIKTIKAKQEILSLPALIEQGEGFSQVLRMQPVIHLQRIHQEVFSSCHRKPDAKPENFITQIETTPTETASRKTSDVVLKRKQTKDCPQRKWYPLRPKKINLDT

SEQ ID NO: 750250 - protein, 723 aa, Homo sapiens
ARDDTKQSLLSLDLQKLAGGKKSNMKIAVLFCFFLLIIFQTDFGKNEEIPRKQRRKIYHRRLRKSSTSHKHRSNRQLGIQQTTVFTPVARLPIVNFDYSMEEKFESFSSFPGVESSYNVLPGKKGHCLVKGITMYNKAVWSPEPCTTCLCSDGRVLCDETMCHPQRCPQTVIPEGECCPVCSATVSYSLLSGIALNDRNEFSGDSSEQREPTNLLHKQLPPPQVGMDRIVRKEALQSEEDEEVKEEDTEQKRETPESRNQGQLYSEGDSRGGDRKQRPGEERRLAHQQQRQGREEEEDEEEEGEEGEEDEEDEEDPVRGDMFRMPSRSPLPAPPRGTLRLPSGCSLSYRTISCINAMLTQIPPLTAPQITSLELTGNSIASIPDEAFNGLPNLERLDLSKNNITSSGIGPKAFKLLKKLMRLNMDGNNLIQIPSQLPSTLEELKVNENNLQAIDEESLSDLNQLVTLELEGNNLSEANVNPLAFKPLKSLAYLRLGKNKFRIIPQGLPGSIEELYLENNQIEEITEICFNHTRKINVIVLRYNKIEENRIAPLAWINQENLESIDLSYNKLYHVPSYLPKSLLHLVLLGNQIERIPGYVFGHMEPGLEYLYLSFNKLADDGMDRVSFYGAYHSLRELFLDHNDLKSIPPGIQEMKALHFLRLNNNKIRNILPEEICNAEEDDDSNLEHLHLENNYIKIREIPSYTFSCIRSYSSIVLKPQNIK

SEQ ID NO: 750251 - protein, 569 aa, Homo sapiens
MEEKFESFSSFPGVESSYNVLPGKKGHCLVKGITMYNKAVWSPEPCTTCLCSDGRVLCDETMCHPQRCPQTVIPEGECCPVCSATVSYSLLSGIALNDRNEFSGDSSEQREPTNLLHKQLPPPQVGMDRIVRKEALQSEEDEEVKEEDTEQKRETPESRNQGQLYSEGDSRGGDRKQRPGEERRLAHQQQRQGREEEEDEEEEGEEGEEDEEDEEDPVRGDMFRMPSRSPLPAPPRGTLRLPSGCSLSYRTISCINAMLTQIPPLTAPQITSLELTGNSIASIPDEAFNGLPNLERLDLSKNNITSSGIGPKAFKLLKKLMRLNMDGNNLIQIPSQLPSTLEELKVNENNLQAIDEESLSDLNQLVTLELEGNNLSEANVNPLAFKPLKSLAYLRLGKNKFRIIPQGLPGSIEELYLENNQIEEITEICFNHTRKINVIVLRYNKIEENRIAPLAWINQENLESIDLSYNKLYHVPSYLPKSLLHLVLLGNQIERIPGYVFGHMEPGLEYLYLSFNKLADDGMDRVSFYGAYHSLRELFLDHNDLKSIPPGIQEMKALHFLRLNNNKIR

SEQ ID NO: 750252 - protein, 624 aa, Homo sapiens
MEEKFESFSSFPGVESSYNVLPGKKGHCLVKGITMYNKAVWSPEPCTTCLCSDGRVLCDETMCHPQRCPQTVIPEGECCPVCSATVSYSLLSGIALNDRNEFSGDSSEQREPTNLLHKQLPPPQVGMDRIVRKEALQSEEDEEVKEEDTEQKRETPESRNQGQLYSEGDSRGGDRKQRPGEERRLAHQQQRQGREEEEDEEEEGEEGEEDEEDEEDPVRGDMFRMPSRSPLPAPPRGTLRLPSGCSLSYRTISCINAMLTQIPPLTAPQITSLELTGNSIASIPDEAFNGLPNLERLDLSKNNITSSGIGPKAFKLLKKLMRLNMDGNNLIQIPSQLPSTLEELKVNENNLQAIDEESLSDLNQLVTLELEGNNLSEANVNPLAFKPLKSLAYLRLGKNKFRIIPQGLPGSIEELYLENNQIEEITEICFNHTRKINVIVLRYNKIEENRIAPLAWINQENLESIDLSYNKLYHVPSYLPKSLLHLVLLGNQIERIPGYVFGHMEPGLEYLYLSFNKLADDGMDRVSFYGAYHSLRELFLDHNDLKSIPPGIQEMKALHFLRLNNNKIRNILPEEICNAEEDDDSNLEHLHLENNYIKIREIPSYTFSCIRSYSSIVLKPQNIK

SEQ ID NO: 750253 - protein, 416 aa, Homo sapiens [sequence omitted]

SEQ ID NO: 750254 - protein, 416 aa, Homo sapiens [sequence omitted]

SEQ ID NO: 750255 - protein, 416 aa, Homo sapiens [sequence omitted]

SEQ ID NO: 750256 - protein, 392 aa, Homo sapiens [sequence omitted]

SEQ ID NO: 750257 - protein, 392 aa, Homo sapiens
MPRQLSAAAALFASLAVILHDGSQMRAKAFPETRDYSQPTAAATVQDIKKPVQQPAKQAPHQTLAARFMDGHITFQTAATVKIPTTTPATTKNTATTSPITYTLVTTQATPNNSHTAPPVTEVTVGPSLAPYSLPPTITPPAHTTGTSSSTVSHTTGNTTQPSNQTTLPATLSIALHKSTTGQKPVQPTHHPCTSAIVSQDWNLSGSKRKQTLYKSRDGDQLIVQDKESVFSPRRYFNIDPNATQASGNCGTRKSNLLLNFQGGFVNLTFTKDEESYYISEVGAYLTVSDPETVYQGIKHAVVMFQTAVGHSFKCVSEQSLQLSAHLQVKTTDVQLQAFDFEDDHFGNVDECSSDYTIVLPVIGAIVVGLCLMGMGVYKIRLRCQSSGYQRI

SEQ ID NO: 750258 - protein, 416 aa, Homo sapiens [sequence omitted]

SEQ ID NO: 750259 - protein, 416 aa, Homo sapiens [sequence omitted]

SEQ ID NO: 750260 - protein, 113 aa, Homo sapiens
ALPTAFRSYFEIFNGPGEVDAQSLKNILLLMGFSVTLAQVEDALMSADVNGDGRVDFKDFLAVMTDTRRFFCSVEQNALSDMAPHNPHTLLFEILSLLVEMLALPEAVLEEIT

SEQ ID NO: 750261 - protein, 65 aa, Homo sapiens
LWGAGTDCGHGLGPCTLPPPASAMRPCVSACGGVLVCGLLCEHQSDSIHCLCHLCLCKCNYLCIR

SEQ ID NO: 750262 - protein, 309 aa, Homo sapiens
MASELGARDDGGCTELAKPLYLQYLERALRLDHFLRQTSAIFNRNISSDDSEDGLDDSNPLLPQSGDPLIQVKEEPPNSLLGETSGAGSSGMLNTYSLNGVLQSESKCDKGNLYNFSKLKKSRKWLKSILLSDESSEADSQSEDDDEEELNLSREELHNMLRLHKYKKLHQNKYSKDKELQQYQYYSAGLLSTYDPFYEQQRHLLGPKKKKFKEEKKLKAKLKKVKKKRRRDEELSSEESPRRHHHQTKVFAKFSHDAPPPGTKKKHLSIEQLNARRRKVWLSIVKKELPKAISRKLHARNLFSPYPRT

SEQ ID NO: 750263 - protein, 73 aa, Homo sapiens
MGCSQGGGPDKQDSFTRPWPASSLTGVTWGRMKRAGGARQGGLSRGFLPRGAVPWACQVPRASTLEKRFQSEA

SEQ ID NO: 750264 - protein, 354 aa, Homo sapiens
MYREWVVVNVFMMLYVQLVQGSSNEHGPVKRSSQSTLERSEQQIRAASSLEELLRITHSEDWKLWRCRLRLKSFTSMDSRSASHRSTRFAATFYDIETLKVIDEEWQRTQCSPRETCVEVASELGKSTNTFFKPPCVNVFRCGGCCNEESLICMNTSTSYISKQLFEISVPLTSVPELVPVKVANHTGCKCLPTAPRHPYSIIRRSIQIPEEDRCSHSKKLCPIDMLWDSNKCKCVLQEENPLAGTEDHSHLQEPALCGPHMMFDEDRCECVCKTPCPKDLIQHPKNCSCFECKESLETCCQKHKLFHPDTCSCEDRCPFHTRPCASGKTACAKHCRFPKEKRAAQGPHSRKNP

SEQ ID NO: 750265 - protein, 144 aa, Homo sapiens
KEMGESKLLTDDIKDTINLVIQMPHYNYLTNTFLFLLDHSHLQEPALCGPHMMFDEDRCECVCKTPCPKDLIQHPKNCSCFECKESLETCCQKHKLFHPDTCSCEDRCPFHTRPCASGKTACAKHCRFPKEKRAAQGPHSRKNP

SEQ ID NO: 750266 - protein, 159 aa, Homo sapiens
SWYGRDFRMKIHPDPKEDRCSHSKKLCPIDMLWDSNKCKCVLQEENPLAGTEDHSHLQEPALCGPHMMFDEDRCECVCKTPCPKDLIQHPKNCSCFECKESLETCCQKHKLFHPDTCSCEDRCPFHTRPCASGKTACAKHCRFPKEKRAAQGPHSRKNP

SEQ ID NO: 750267 - protein, 354 aa, Homo sapiens; identical to SEQ ID NO: 750264

SEQ ID NO: 750268 - protein, 1203 aa, Homo sapiens
MEQAPNMAEPRGPVDHGVQIRFITEPVSGAEMGTLRRGGRRPAKDARASTYGVAVRVQGIAGQPFVVLNSGEKGGDSFGVQIKGANDQGASGALSSDLELPENPYSQVKGFPAPSQSSTSDEEPGAYWNGKLLRSHSQASLAGPGPVDPSNRSNSMLELAPKVASPGSTIDTAPLSSVDSLINKFDSQLGGQARGRTGRRTRMLPPEQRKRSKSLDSRLPRDTFEERERQSTNHWTSSTKYDNHVGTSKQPAQSQNLSPLSGFSRSRQTQDWVLQSFEEPRRSAQDPTMLQFKSTPDLLRDQQEAAPPGSVDHMKATIYGILREGSSESETSVRRKVSLVLEKMQPLVMVSSGSTKAVAGQGELTRKVEELQRKLDEEVKKRQKLEPSQVGLERQLEEKTEECSRLQELLERRKGEAQQSNKELQNMKRLLDQGEDLRHGLETQVMELQNKLKHVQGPEPAKEVLLKDLLETRELLEEVLEGKQRVEEQLRLRERELTALKGALKEEVASRDQEVEHVRQQYQRDTEQLRRSMQDATQDHAVLEAERQKMSALVRGLQRELEETSEETGHWQSMFQKNKEDLRATKQELLQLRMEKEEMEEELGEKIEVLQRELEQARASAGDTRQVEVLKKELLRTQEELKELQAERQSQEVAGRHRDRELEKQLAVLRVEADRGRELEEQNLQLQKTLQQLRQDCEEASKAKMVAEAEATVLGQRRAAVETTLRETQEENDEFRRRILGLEQQLKETRGLVDGGEAVEARLRDKLQRLEAEKQQLEEALNASQEEEGSLAAAKRALEARLEEAQRGLARLGQEQQTLNRALEEEGKQREVLRRGKAELEEQKRLLDRTVDRLNKELEKIGEDSKQALQQLQAQLEDYKEKARREVADAQRQAKDWASEAEKTSGGLSRLQDEIQRLRQALQASQAERDTARLDKELLAQRLQGLEQEAENKKRSQDDRARQLKGLEEKVSRLETELDEEKNTVELLTDRVNRGRDQVDQLRTELMQERSARQDLECDKISLERQNKDLKTRLASSEGFQKPSASLSQLESQNQLLQERLQAEEREKTVLQSTNRKLERKVKELSIQIEDERQHVNDQKDQLSLRVKALKRQVDEAEEEIERLDGLRKKAQREVEEQHEVNEQLQARIKSLEKDSWRKASRSAAESALKNEGLSSDEEFDSVYDPSSIASLLTESNLQTSSC

SEQ ID NO: 750269 - protein, 141 aa, Homo sapiens
YVDFCSGVILRVHTEPTYHEGHHLCILREGSSESETSVRRKVSLVLEKMQPLVMVSSGSTKAVAGQGELTRKVEELQRKLDEEVKKRQKLEPSQVGLERQLEEKTEECSRLQELLERRKGEAQQSNKDDAEQKVDAGQKVD

SEQ ID NO: 750270 - protein, 654 aa, Homo sapiens [sequence omitted]

SEQ ID NO: 750271 - protein, 1181 aa, Homo sapiens
MEQAPNMAEPRGPVDHGVQIRFITEPVSGAEMGTLRRGGRRPAKDARASTYGVAVRVQGIAGQPFVVLNSGEKGGDSFGVQIKGANDQGASGALSSDLELPENPYSQVKGFPAPSQSSTSDEEPGAYWNGKLLRSHSQASLAGPGPVDPSNRSNSMLELAPKVASPGSTIDTAPLSSVDSLINKFDSQLGGQARGRTGRRTRMLPPEQRKRSKSLDSRLPRDTFEERERQSTNHWTSSTKYDNHVGTSKQPAQSQNLSPLSGFSRSRQTQDWVLQSFEEPRRSAQDPTMLQFKSTPDLLRDQQEAAPPGSVDHMKATIYGILREGSSESETSVRRKVSLVLEKMQPLVMVSSGSTKAVAGQGELTRKVEELQRKLDEEVKKRQKLEPSQVGLERQLEEKTEECSRLQELLERRKGEAQQSNKELQNMKRLLDQGEDLRHGLETQVMELQNKLKHVQGPEPAKEVLLKDLLETRELLEEVLEGKQRVEEQLRLRERELTALKGALKEEVASRDQEVEHVRQQYQRDTEQLRRSMQDATQDHAVLEAERQKMSALVRGLQRELEETSEETGHWQSMFQKNKEDLRATKQELLQLRMEKEEMEEELGEKIEVLQRELEQARASAGDTRQVEVLKKELLRTQEELKELQAERQSQEVAGRHRDRELEKQLAVLRVEADRGRELEEQNLQLQKTLQQLRQDCEEASKAKMVAEAEATVLGQRRAAVETTLRETQEENDEFRRRILGLEQQLKETRGLVDGGEAVEARLRDKLQRLEAEKQQLEEALNASQEEEGSLAAAKRALEARLEEAQRGLARLGQEQQTLNRALEEEGKQREVLRRGKAELEEQKRLLDRTVDRLNKELEKIGEDSKQALQQLQAQLEDYKEKARREVADAQRQAKDWASEAEKTSGGLSRLQDEIQRLRQALQASQAERDTARLDKELLAQRLQGLEQEAENKKRSQDDRARQLKGLEEKVSRLETELDEEKNTVELLTDRVNRGRDQVDQLRTELMQERSARQDLECDKISLERQNKDLKTRLASSEGFQKPSASLSQLESQNQLLQERLQAEEREKTVLQSTNRKLERKVKELSIQIEDERQHVNDQKDQLSLRVKALKRQVDEAEEEIERLDGLRKKAQREVEEQHEVNEQLQARIKSLEKDSWYGLPFCPCSIGTLEQGGNGLSCAG

SEQ ID NO: 750272 - protein, 1203 aa, Homo sapiens; identical to SEQ ID NO: 750268

SEQ ID NO: 750273 - protein, 1109 aa, Homo sapiens
MEQAPNMAEPRGPVDHGVQIRFITEPVSGAEMGTLRRGGRRPAKDARASTYGVAVRVQGIAGQPFVVLNSGEKGGDSFGVQIKGANDQGASGALSSDLELPENPYSQVKGFPAPSQSSTSDEEPGAYWNGKLLRSHSQASLAGPGPVDPSNRSNSMLELAPKVASPGSTIDTAPLSSVDSLINKFDSQLGGQARGRTGRRTRMLPPEQRKRSKSLDSRLPRDTFEERERQSTNHWTSSTKYDNHVGTSKQPAQSQNLSPLSGFSRSRQTQDWVLQSFEEPRRSAQDPTMLQFKSTPDLLRDQQEAAPPGSVDHMKATIYGILREGSSESETSVRRKVSLVLEKMQPLVMVSSGSTKAVAGQGELTRKVEELQRKLDEEVKKRQKLEPSQVGLERQLEEKTEECSRLQELLERRKGEAQQSNKELQNMKRLLDQGEDLRHGLETQVMELQNKLKHVQGPEPAKEVLLKDLLETRELLEEVLEGKQRVEEQLRLRERELTALKGALKEEVASRDQEVEHVRQQYQRDTEQLRRSMQDATQDHAVLEAERQKMSALVRGLQRELEETSEETGHWQSMFQKNKEDLRATKQELLQLRMEKEEMEEELGEKIEVLQRELEQARASAGDTRQVEVLKKELLRTQEELKELQAERQSQEVAGRHRDRELEKQLAVLRVEADRGRELEEQNLQLQKTLQQLRQDCEEASKAKMVAEAEATVLGQRRAAVETTLRETQEENDEFRRRILGLEQQLKETRGLVDGGEAVEARLRDKLQRLEAEKQQLEEALNASQEEEGSLAAAKRALEARLEEAQRGLARLGQEQQTLNRALEEEGKQREVLRRGKAELEEQKRLLDRTVDRLNKELEKIGEDSKQALQQLQAQLEDYKEKARREVADAQRQAKDWASEAEKTSGGLSRLQDEIQRLRQALQASQAERDTARLDKELLAQRLQGLEQEAENKKRSQDDRARQLKGLEEKVSRLETELDEEKNTVELLTDRVNRGRDQVDQLRTELMQERSARQDLECDKISLERQNKDLKTRLASSEGFQKPSASLSQLESQNQLLQERLQAEEREKTVLQSTNRKLERKVKELSIQIEDERQHVNDQKDQVRTWHPG

SEQ ID NO: 750274 - protein, 366 aa, Homo sapiens
MEQAPNMAEPRGPVDHGVQIRFITEPVSGAEMGTLRRGGRRPAKDARASTYGVAVRVQGIAGQPFVVLNSGEKGGDSFGVQIKGANDQGASGALSSDLELPENPYSQVKGFPAPSQSSTSDEEPGAYWNGKLLRSHSQASLAGPGPVDPSNRSNSMLELAPKVASPGSTIDTAPLSSVDSLINKFDSQLGGQARGRTGRRTRMLPPEQRKRSKSLDSRLPRDTFEERERQSTNHWTSSTKYDNHVGTSKQPAQSQNLSPLSGFSRSRQTQDWVLQSFEEPRRSAQDPTMLQFKSTPDLLRDQQEAAPPGSVDHMKATIYGILREGSSESETSVRRKVSLVLEKMQPLVMVAFIWSTLPGGAASCWS

SEQ ID NO: 750275 - protein, 173 aa, Homo sapiens
PHSGILVWLWVPHHIPVSFQELLRTQEELKELQAERQSQEVAGRHRDRELEKQLAVLRVEADRGRELEEQNLQLQKTLQQLRQDCEEASKAKMVAEAEATVLGQRRAAVETTLRETQEENDEFRRRILGLEQQLKETRGLVDGGEAVEARLRDKLQRLEVSGSALPALSAQPW

SEQ ID NO: 750276 - protein, 197 aa, Homo sapiens [sequence omitted]

SEQ ID NO: 750277 - protein, 105 aa, Homo sapiens
MPAQLSLRVKALKRQVDEAEEEIERLDGLRKKAQREVEEQHEVNEQLQARIKSLEKDSWRKASRSAAESALKNEGLSSDEEFDSVYDPSSIASLLTESNLQTSSC

SEQ ID NO: 750278 - protein, 1203 aa, Homo sapiens; identical to SEQ ID NO: 750268

SEQ ID NO: 750279 - protein, 618 aa, Homo sapiens
MEQAPNMAEPRGPVDHGVQIRFITEPVSGAEMGTLRRGGRRPAKDARASTYGVAVRVQGIAGQPFVVLNSGEKGGDSFGVQIKGANDQGASGALSSDLELPENPYSQVKGFPAPSQSSTSDEEPGAYWNGKLLRSHSQASLAGPGPVDPSNRSNSMLELAPKVASPGSTIDTAPLSSVDSLINKFDSQLGGQARGRTGRRTRMLPPEQRKRSKSLDSRLPRDTFEERERQSTNHWTSSTKYDNHVGTSKQPAQSQNLSPLSGFSRSRQTQDWVLQSFEEPRRSAQDPTMLQFKSTPDLLRDQQEAAPPGSVDHMKATIYGILREGSSESETSVRRKVSLVLEKMQPLVMVSSGSTKAVAGQGELTRKVEELQRKLDEEVKKRQKLEPSQVGLERQLEEKTEECSRLQELLERRKGEAQQSNKELQNMKRLLDQGEDLRHGLETQVMELQNKLKHVQGPEPAKEVLLKDLLETRELLEEVLEGKQRVEEQLRLRERELTALKGALKEEVASRDQEVEHVRQQYQRDTEQLRRSMQDATQDHAVLEAERQKMSALVRGLQRELEETSEETGHWQSMFQKNKEDLRATKQELLQLRMEKCAWVRTSHFCTQAHFCTQAHFC

SEQ ID NO: 750280 - protein, 107 aa, Homo sapiens
RKSPGVEIKSLRELDSGLEVHKIAEGFSESKKRSSEDENENKIEFRKKGGFEGGGFLGRKKVPYLASSPSTSDGGTDSPGTASPSPTKTTPSPRHKKSDSSGQEYSL

SEQ ID NO: 750281 - protein, 147 aa, Homo sapiens
QPPPAPTVEQPPSRSSPPAQLHVSPHRTHASDGEQRRALNAGSLRDSVCTPGPTEICTESCNSVVKKERAMLFHGWSMAFCLDDSEKRNLTTPSPPQCLTQTVYHHTGDSIFIDTIPQMGKLRQQVLWNSATQSLPDPGVLATSRAL

SEQ ID NO: 750282 - protein, 1042 aa, Homo sapiens
DGASSQPEDASGRCAQRFSTLFSELAVRMVFSVRQCGHVGRTEEVLLTFKIFLVIICLHVVLVTSLEEDTDNSSLSPPPAKLSVVSFAPSSNEVETTSLNDVTLSLLPSNETEKTKITIVKTFNASGVKPQRNICNLSSICNDSAFFRGEIMFQYDKESTVPQNQHITNGTLTGVLSLSELKRSELNKTLQTLSETYFIMCATAEAQSTLNCTFTIKLNNTMNACAAIAALERVKIRPMEHCCCSVRIPCPSSPEELGKLQCDLQDPIVCLADHPRGPPFSSSQSIPVVPRATVLSQVPKATSFAEPPDYSPVTHNVPSPIGEIQPLSPQPSAPIASSPAIDMPPQSETISSPMPQTHVSGTPPPVKASFSSPTVSAPANVNTTSAPPVQTDIVNTSSISDLENQVLQMEKALSLGSLEPNLAGEMINQVSRLLHSPPDMLAPLAQRLLKVVDDIGLQLNFSNTTISLTSPSLALAVIRVNASSFNTTTFVAQDPANLQVSLETQAPENSIGTITLPSSLMNNLPAHDMELASRVQFNFFETPALFQDPSLENLSLISYVISSSVANLTVRNLTRNVTVTLKHINPSQDELTVRCVFWDLGRNGGRGGWSDNGCSVKDRRLNETICTCSHLTSFGVLLDLSRTSVLPAQMMALTFITYIGCGLSSIFLSVTLVTYIAFEKIRRDYPSKILIQLCAALLLLNLVFLLDSWIALYKMQGLCISVAVFLHYFLLVSFTWMGLEAFHMYLALVKVFNTYIRKYILKFCIVGWGVPAVVVTIILTISPDNYGLGSYGKFPNGSPDDFCWINNNAVFYITVVGYFCVIFLLNVSMFIVVLVQLCRIKKKKQLGAQRKTSIQDLRSIAGLTFLLGITWGFAFFAWGPVNVTFMYLFAIFNTLQGFFIFIFYCVAKENVRKQWRRYLCCGKLRLAENSDWSKTATNGLKKQTVNQGVSSSSNSLQSSSNSTNSTTLLVNNDCSVHASGNGNASTERNGVSFSVQNGDVCLHDFTGKQHMFNEKEDSCNGKGRMALRRTSKRGSLHFIEQM

SEQ ID NO: 750283 - protein, 1042 aa, Homo sapiens; identical to SEQ ID NO: 750282

SEQ ID NO: 750284 - protein, 210 aa, Homo sapiens
PLFFFGKTQQNSRHDTIRARTPSLDIKRPILVRNPMNVKNVENPSAGSLTLLLIRELIQETNCTHVISVGNLLFIALGLLDTRGHILERNPMNVLNVGNLSDRAHISLVNSHSQLLQREVKYLGIQLTRDVKELFKENYKSLLNEIKENTTNERTIPCLWIGRINIVKMAILPKVIYRFNAIPIKLPMTFFTELEKTLKFMWNQKRARIA

SEQ ID NO: 750285 - protein, 439 aa, Homo sapiens
MDAKSLTAWSRTLVTFKDVFVDFTREEWKLLDTAQQIVYRNVMLENYKNLVSLGYQLTKPDVILRLEKGEEPWLVEREIHQETHPDSETAFEIKSSVSSRSIFKDKQSCDIKMEGMARNDLWYLSLEEVWKCRDQLDKYQENPERHLRHQLIHTGEKPYECKECGKSFSRSSHLIGHQKTHTGEEPYECKECGKSFSWFSHLVTHQRTHTGDKLYTCNQCGKSFVHSSRLIRHQRTHTGEKPYECPECGKSFRQSTHLILHQRTHVRVRPYECNECGKSYSQRSHLVVHHRIHTGLKPFECKDCGKCFSRSSHLYSHQRTHTGEKPYECHDCGKSFSQSSALIVHQRIHTGEKPYECCQCGKAFIRKNDLIKHQRIHVGEETYKCNQCGIIFSQNSPFIVHQIAHTGEQFLTCNQCGTALVNTSNLIGYQTNHIRENAY

SEQ ID NO: 750286 - protein, 573 aa, Homo sapiens
MDAKSLTAWSRTLVTFKDVFVDFTREEWKLLDTAQQIVYRNVMLENYKNLVSLGYQLTKPDVILRLEKGEEPWLVEREIHQETHPDSETAFEIKSSVSSRSIFKDKQSCDIKMEGMARNDLWYLSLEEVWKCRDQLDKYQENPERHLRQVAFTQKKVLTQERVSESGKYGGNCLLPAQLVLREYFHKRDSHTKSLKHDLVLNGHQDSCASNSNECGQTFCQNIHLIQFARTHTGDKSYKCPDNDNSLTHGSSLGISKGIHREKPYECKECGKFFSWRSNLTRHQLIHTGEKPYECKECGKSFSRSSHLIGHQKTHTGEEPYECKECGKSFSWFSHLVTHQRTHTGDKLYTCNQCGKSFVHSSRLIRHQRTHTGEKPYECPECGKSFRQSTHLILHQRTHVRVRPYECNECGKSYSQRSHLVVHHRIHTGLKPFECKDCGKCFSRSSHLYSHQRTHTGEKPYECHDCGKSFSQSSALIVHQRIHTGEKPYECCQCGKAFIRKNDLIKHQRIHVGEETYKCNQCGIIFSQNSPFIVHQIAHTGEQFLTCNQCGTALVNTSNLIGYQTNHIRENAY

SEQ ID NO: 750287 - protein, 399 aa, Homo sapiens
MDAKSLTAWSRTLVTFKDVFVDFTREEWKLLDTAQQIVYRNVMLENYKNLVSLGYQLTKPDVILRLEKGEEPWLVEREIHQETHPDSETAFEIKSSVSSRSIFKDKQSCDIKMEGMARNDLWYLSLEEVWKCRDQLDKYQENPERHLRQVAFTQKKVLTQERVSESGKYGGNCLLPAQLVLREYFHKRDSHTKSLKHDLVLNGHQDSCASNSNECGQTFCQNIHLIQFARTHTGDKSYKCPDNDNSLTHGSSLGISKGIHREKPYECKECGKFFSWRSNLTGISLFILEKNPMSVKNVESLSAGVLTSLDIKRPILVRNPMNVKNVENPSAGSLTLLLIRELIQETNCTHVISVGNLLFIALGLLDTRGHILERNPMNVLNVGNLSDRAHISFCIREPM

SEQ ID NO: 750288 - protein, 151 aa, Homo sapiens [sequence omitted]

SEQ ID NO: 750289 - protein, 841 aa, Homo sapiens
MAGGQAAAALPTWKMAARRSLSARGRGILQAAAGRLLPLLLLSCCCGAGGCAAVGENEETVIIGLRLEDTNDVSFMEGGALRVSERTRVKLRVYGQNINNETWSRIAFTEHERRRHSPGERGLGGPAPPEPDSGPQRCGIRTSDIIILPHIILNRRTSGIIEIEIKPLRKMEKSKSYYLCTSLSTPALGAGGSGSTGGAVGGKGGSGVAGLPPPPWAETTWIYHDGEDTKMIVGEEKKFLLPFWLQVIFISLLLCLSGMFSGLNLGLMALDPMELRIVQNCGTEKEKNYAKRIEPVRRQGNYLLCSLLLGNVLVNTTLTILLDDIAGSGLVAVVVSTIGIVIFGEIVPQAICSRHGLAVGANTIFLTKFFMMMTFPASYPVSKLLDCVLGQEIGTVYNREKLLEMLRVTDPYNDLVKEELNIIQGALELRTKTVEDVMTPLRDCFMITGEAILDFNTMSEIMESGYTRIPVFEGERSNIVDLLFVKDLAFVDPDDCTPLKTITKFYNHPLHFVFNDTKLDAMLEEFKKGKSHLAIVQRVNNEGEGDPFYEVLGIVTLEDVIEEIIKSEILDETDLYTDNRTKKKVAHRERKQDFSAFKQTDSEMKVKISPQLLLAMHRFLATEVEAFSPSQMSEKILLRLLKHPNVIQELKYDEKNKKAPEYYLYQRNKPVDYFVLILQGKVEVEAGKEGMKFEASAFSYYGVMALTASPGENKSPPRPCGLNHSDSLSRSDRIDAVTPTLGSSNNQLNSSLLQVYIPDYSVRALSDLQFVKISRQQYQNALMASRMDKTPQSSDSENTKIELTLTELHDGLPDETANLLNEQNCVTHSKANHSLHNEGAI

SEQ ID NO: 750290 - protein, 863 aa, Homo sapiens
MAGGQAAAALPTWKMAARRSLSARGRGILQAAAGRLLPLLLLSCCCGAGGCAAVGENEETVIIGLRLEDTNDVSFMEGGALRVSERTRVKLRVYGQNINNETWSRIAFTEHERRRHSPGERGLGGPAPPEPDSGPQRCGIRTSDIIILPHIILNRRTSGIIEIEIKPLRKMEKSKSYYLCTSLSTPALGAGGSGSTGGAVGGKGGSGVAGLPPPPWAETTWIYHDGEDTKMIVGEEKKFLLPFWLQVIFISLLLCLSGMFSGLNLGLMALDPMELRIVQNCGTEKEKNYAKRIEPVRRQGNYLLCSLLLGNVLVNTTLTILLDDIAGSGLVAVVVSTIGIVIFGEIVPQAICSRHGLAVGANTIFLTKFFMMMTFPASYPVSKLLDCVLGQEIGTVYNREKLLEMLRVTDPYNDLVKEELNIIQGALELRTKTVEDVMTPLRDCFMITGEAILDFNTMSEIMESGYTRIPVFEGERSNIVDLLFVKDLAFVDPDDCTPLKTITKFYNHPLHFVFNDTKLDAMLEEFKKGKSHLAIVQRVNNEGEGDPFYEVLGIVTLEDVIEEIIKSEILDETDLYTDNRTKKKVAHRERKQDFSAFKQTDSEMKVKISPQLLLAMHRFLATEVEAFSPSQMSEKILLRLLKHPNVIQELKYDEKNKKAPEYYLYQRNKPVDYFVLILQGKVEVEAGKEGMKFEASAFSYYGVMALTASPVPLSLSRTFVVSRTELLAAGSPGENKSPPRPCGLNHSDSLSRSDRIDAVTPTLGSSNNQLNSSLLQVYIPDYSVRALSDLQFVKISRQQYQNALMASRMDKTPQSSDSENTKIELTLTELHDGLPDETANLLNEQNCVTHSKANHSLHNEGAI

SEQ ID NO: 750291 - protein, 536 aa, Homo sapiens
MAGGQAAAALPTWKMAARRSLSARGRGILQAAAGRLLPLLLLSCCCGAGGCAAVGENEETVIIGLRLEDTNDVSFMEGGALRVSERTRVKLRVYGQNINNETWSRIAFTEHERRRHSPGERGLGGPAPPEPDSGPQRCGIRTSDIIILPHIILNRRTSGIIEIEIKPLRKMEKSKSYYLCTSLSTPALGAGGSGSTGGAVGGKGGSGVAGLPPPPWAETTWIYHDGEDTKMIVGEEKKFLLPFWLQVIFISLLLCLSGMFSGLNLGLMALDPMELRIVQNCGTEKEKNYAKRIEPVRRQGNYLLCSLLLGNVLVNTTLTILLDDIAGSGLVAVVVSTIGIVIFGEIVPQAICSRHGLAVGANTIFLTKFFMMMTFPASYPVSKLLDCVLGQEIGTVYNREKLLEMLRVTDPYNDLVKEELNIIQGALELRTKTVEDVMTPLRDCFMITGEAILDFNTMSEIMESGYTRIPVFEGERSNIVDLLFVKDLAFVDPDDCTPLKTITKFYNHPLHFVFNDTKLDAMLEEFKKGGKFWSLS

SEQ ID NO: 750292 - protein, 590 aa, Homo sapiens
MIGCGACEPKVKMAGGQAAAALPTWKMAARRSLSARGRGILQAAAGRLLPLLLLSCCCGAGGCAAVGENEETVIIGLRLEDTNDVSFMEGGALRVSERTRVKLRVYGQNINNETWSRIAFTEHERRRHSPGERGLGGPAPPEPDSGPQRCGIRTSDIIILPHIILNRRTSGIIEIEIKPLRKMEKSKSYYLCTSLSTPALGAGGSGSTGGAVGGKGGSGVAGLPPPPWAETTWIYHDGEDTKMIVGEEKKFLLPFWLQVIFISLLLCLSGMFSGLNLGLMALDPMELRIVQNCGTEKEKNYAKRIEPVRRQGNYLLCSLLLGNVLVNTTLTILLDDIAGSGLVAVVVSTIGIVIFGEIVPQAICSRHGLAVGANTIFLTKFFMMMTFPASYPVSKLLDCVLGQEIGTVYNREKLLEMLRVTDPYNDLVKEELNIIQGALELRTKTVEDVMTPLRDCFMITGEAILDFNTMSEIMESGYTRIPVFEGERSNIVDLLFVKDLAFVDPDDCTPLKTITKFYNHPLHFVFNDTKLDAMLEEFKKGKSHLAIVQRVNNEGEGDPFYEVLGIVTLEDVIEEIIKSEILDETDLYSK

SEQ ID NO: 750293 - protein, 73 aa, Homo sapiens
HITYNMSFRKFRKSLPKLFLVSKGKSHLAIVQRVNNEGEGDPFYEVLGIVTLEDVIEEIIKSEILDETDLYSK

SEQ ID NO: 750294 - protein, 109 aa, Homo sapiens
LLVIFRSASPKHGFTIMNRLSMENRTEPITKDLDFQLQDPFLLYRNARLSIYGIWFYDKEECQRIAELMKNLTQYEQLKAHTEPGALRDHQQPTHQAPAPGGTAVPHSE

SEQ ID NO: 750295 - protein, 643 aa, Homo sapiens
RGSSLVLRSIESGFQEPRAYVWEGGKMAAVAAGGLVGKGRDISLAALQRHDPYINRIVDVASQVALYTFGHRANEWEKTDVEGTLFVYTRSASPKHGFTIMNRLSMENRTEPITKDLDFQLQDPFLLYRNARLSIYGIWFYDKEECQRIAELMKNLTQYEQLKAHQGTGAGISPVILNSGEGKEVDILRMLIKAKDEYTKCKTCSEPKKITSSSAIYDNPNLIKPIPVKPSENQQQRIPQPNQTLDPEPQHLSLTALFGKQDKATCQETVEPPQTLHQQQQQQQQQQEKLPIRQGVVRSLSYEEPRRHSPPIEKQLCPAIQKLMVRSADLHPLSELPENRPCENGSTHSAGEFFTGPVQPGSPHNIGTSRGVQNASRTQNLFEKLQSTPGAANKCDPSTPAPASSAALNRSRAPTSVTPVAPGKGLAQPPQAYFNGSLPPQTVGHQAHGREQSTLPRQTLPISGSQTGSSGVISPQELLKKLQIVQQEQQLHASNRPALAAKFPVLAQSSGTGKPLESWINKTPNTEQQTPLFQVISPQRIPATAAPSLLMSPMVFAQPTSVPPKERESGLLPVGGQEPPAAATSLLLPIQSPEPSVITSSPLTKLQLQEALLYLIQNDDNFLNIIYEAYLFSMTQAAMKKTM

SEQ ID NO: 750296 - protein, 509 aa, Homo sapiens
RASFRMHCVRSWQTLLKGTRDLTQYEQLKAHQGTGAGISPVILNSGEGKEVDILRMLIKAKDEYTKCKTCSEPKKITSSSAIYDNPNLIKPIPVKPSENQQQRIPQPNQTLDPEPQHLSLTALFGKQDKATCQETVEPPQTLHQQQQQQQQQQEKLPIRQGVVRSLSYEEPRRHSPPIEKQLCPAIQKLMVRSADLHPLSELPENRPCENGSTHSAGEFFTGPVQPGSPHNIGTSRGVQNASRTQNLFEKLQSTPGAANKCDPSTPAPASSAALNRSRAPTSVTPVAPGKGLAQPPQAYFNGSLPPQTVGHQAHGREQSTLPRQTLPISGSQTGSSGVISPQELLKKLQIVQQEQQLHASNRPALAAKFPVLAQSSGTGKPLESWINKTPNTEQQTPLFQVISPQRIPATAAPSLLMSPMVFAQPTSVPPKERESGLLPVGGQEPPAAATSLLLPIQSPEPSVITSSPLTKLQLQEALLYLIQNDDNFLNIIYEAYLFSMTQAAMKKTM

SEQ ID NO: 750297 - protein, 515 aa, Homo sapiens
MQIKVSIYGIWFYDKEECQRIAELMKNLTQYEQLKAHQGTGAGISPVILNSGEGKEVDILRMLIKAKDEYTKCKTCSEPKKITSSSAIYDNPNLIKPIPVKPSENQQQRIPQPNQTLDPEPQHLSLTALFGKQDKATCQETVEPPQTLHQQQQQQQQQQEKLPIRQGVVRSLSYEEPRRHSPPIEKQLCPAIQKLMVRSADLHPLSELPENRPCENGSTHSAGEFFTGPVQPGSPHNIGTSRGVQNASRTQNLFEKLQSTPGAANKCDPSTPAPASSAALNRSRAPTSVTPVAPGKGLAQPPQAYFNGSLPPQTVGHQAHGREQSTLPRQTLPISGSQTGSSGVISPQELLKKLQIVQQEQQLHASNRPALAAKFPVLAQSSGTGKPLESWINKTPNTEQQTPLFQVISPQRIPATAAPSLLMSPMVFAQPTSVPPKERESGLLPVGGQEPPAAATSLLLPIQSPEPSVITSSPLTKLQLQEALLYLIQNDDNFLNIIYEAYLFSMTQAAMKKTM

SEQ ID NO: 750298 - protein, 408 aa, Homo sapiens
RGSSLVLRSIESGFQEPRAYVWEGGKMAAVAAGGLVGKGRDISLAALQRHDPYINRIVDVASQVALYTFGHRANEWEKTDVEGTLFVYTRSASPKHGFTIMNRLSMENRTEPITKDLDFQLQDPFLLYRNARLSIYGIWFYDKEECQRIAELMKNLTQYEQLKAHQGTGAGISPVILNSGEGKEVDILRMLIKAKDEYTKCKTCSEPKKITSSSAIYDNPNLIKPIPVKPSENQQQRIPQPNQTLDPEPQHLSLTALFGKQDKATCQETVEPPQTLHHSSSSSSSSSKRSFQLGRGLYAPCPMRNPEDTHPPLRSSSVQPFRNSWSGAQTSTHCQSCLKTGLVKMAVPILRENFLQDLSSQGLLTTLELLVVYKMLPELRTCSRNFRVPQGQQTSVTLVHQHLPAQLP

SEQ ID NO: 750299 - protein, 492 aa, Homo sapiens
RGSSLVLRSIESGFQEPRAYVWEGGKMAAVAAGGLVGKGRDISLAALQRHDPYINRIVDVASQVALYTFGHRANEWEKTDVEGTLFVYTRSASPKHGFTIMNRLSMENRTEPITKDLDFQLQDPFLLYRNARLSIYGIWFYDKEECQRIAELMKNLTQYEQLKAHQGTGAGISPVILNSGEGKEVDILRMLIKAKDEYTKCKTCSEPKKITSSSAIYDNPNLIKPIPVKPSENQQQRIPQPNQTLDPEPQHLSLTALFGKQDKATCQETVEPPQTLHQQQQQQQQQQEKLPIRQGVVRSLSYEEPRRHSPPIEKQLCPAIQKLMVRSADLHPLSELPENRPCENGSTHSAGEFFTGPVQPGSPHNIGTSRGVQNASRTQNLFEKLQSTPGAANKCDPSTPAPASSAALNRSRAPTSVTPVAPGKGLAQPPQAYFNGSLPPQTVGHQAHGREQSTLPRQTLPISGSQTGSSGVISPQELLKKLQIVQQMMTTS

SEQ ID NO: 750300 - protein, 125 aa, Homo sapiens
KGLAQPPQAYFNGSLPPQTVGHQAHGREQSTLPRQTLPISGSQTGSSGVISPQELLKKLQIVQQEQQLHASNRPALAAKFPVLAQSSGTGKPLESWINKTPNTEQQTPLFQVNMYQGQNKTAWAA

SEQ ID NO: 750301 - protein, 257 aa, Homo sapiens
MVSLFTPFKDMIRLVRSALSQRWGPLKLRARPHSRYRLANFSNAQRHVPKHERTRQGTTTSQEGEQQYHHGDESNRTEIPQRVDKHTYCLFLSAHLHLHARSQQHNRTNRRHNTQHTTQRTEETREKKKNSRAGESGEESEETHRAKERERERTRNRGRANRKQARRGARERKTRTGREIKTESGDDRESERDSEKAEERYREAEDSRSDENPRREQNTSDEEADRTPHETRSKRGKTQRRHQADSKTQQEEKKRQN

SEQ ID NO: 750302 - protein, 135 aa, Homo sapiens
MYRAVRICGSGPGSVLSVISICSTNEIWVMSELEYYINNENVVPSARAFVERESPECNTGPNLHGLFGRKTGQAPGYSYTAANKNKGIIWGEDTLMEYLENPKKYIPGTKMIFVGIKKKEERADLIAYLKKATNE

SEQ ID NO: 750303 - protein, 128 aa, Homo sapiens
REWGRPASERECSLCQRLKRELNMGDVEKGKKIFIMKCSQCHTVEKGGKHKTGPNLHGLFGRKTGQAPGYSYTAANKNKGIIWGEDTLMEYLENPKKYIPGTKMIFVGIKKKEERADLIAYLKKATNE

SEQ ID NO: 750304 - protein, 82 aa, Homo sapiens
MPIKELNNPKTLLRGRDLPANPPVTGEQKFPEGAGTGVSVSGTAKDGKRKTPGVDKGDFSSDLGLWISPQQKSFWCPRGLEK

SEQ ID NO: 750305 - protein, 97 aa, Homo sapiens [sequence omitted]

SEQ ID NO: 750306 - protein, 145 aa, Homo sapiens
MDSQKEALQRIISTLANKNDEIQNFIDTLHHTLKGVQENSSNILSELDEEFDSLYSILDEVKESMINCIKQEQARKSQELQSQISQCNNALENSEELLEFATRSLDIKEPEEFSKVHKNCINTLNKGSCIFKKAFLFFFSFGFLY

SEQ ID NO: 750307 - protein, 93 aa, Homo sapiens
CPHSRPLTCPGSPGVRLGKEGKECVSRDWPEPISTLSPGTGGEGGRGENLREQGLRQGAPARPSPLPKMRGLHSMPSPQNLGKRVSEFRSLRS

SEQ ID NO: 750308 - protein, 122 aa, Homo sapiens
FFLRWSLALSPRLECNGAISAHCNLCLLSSSDSASASQVAGITGAGHQGWLIFVFLVEMRFLHVGQAGLELQTSGDPPVSPSQSAEGMSHCTRPRFFMRLPSCHLRNVLVVLRFGGEVWDND

SEQ ID NO: 750309 - protein, 632 aa, Homo sapiens
MRLAVGALLVCAVLGLCLAVPDKTVRWCAVSEHEATKCQSFRDHMKSVIPSDGPSVACVKKASYLDCIRAIAANEADAVTLDAGLVYDAYLAPNNLKPVVAEFYGSKEDPQTFYYAVAVVKKDSGFQMNQLRGKKSCHTGLGRSAGWNIPIGLLYCDLPEPRKPLEKAVANFFSGSCAPCADGTDFPQLCQLCPGCGCSTLNQYFGYSGAFKCLKDGAGDVAFVKHSTIFENLANKADRDQYELLCLDNTRKPVDEYKDCHLAQVPSHTVVARSMGGKEDLIWELLNQAQEHFGKDKSKEFQLFSSPHGKDLLFKDSAHGFLKVPPRMDAKMYLGYEYVTAIRNLREGTCPEAPTDECKPVKWCALSHHERLKCDEWSVNSVGKIECVSAETTEDCIAKIMNGEADAMSLDGGFVYIAGKCGLVPVLAENYNKSDNCEDTPEAGYFAVAVVKKSASDLTWDNLKGKKSCHTAVGRTAGWNIPMGLLYNKINHCRFDEFFSEGCAPGSKKDSSLCKLCMGSGLNLCEPNNKEGYYGYTGAFRCLVEKGDVAFVKHQTVPQNTGGKNPDPWAKNLNEKDYELLCLDGTRKPVEEYANCHLARAPNHAVVTRKDKEACVHKILRQQQHPIWKQRN

SEQ ID NO: 750310 - protein, 125 aa, Homo sapiens
VNSSTYLEATEYLVDASFLIFPCDHSVIRGSGQVAVRITPPQISWYHQGTATATLFGSNVTDCSGNFCLFRSETKDLLFRDDTVCLAKLHDRNTYEKYLGEEYVKAVGNLRKCSTSCTPGSLHFP

SEQ ID NO: 750311 - protein, 115 aa, Homo sapiens
MIYRGLVRVGVQQTLKSRPEEKRKGVGVKGAGIRQHLKALHRLRELHCERAVTFDTPRAKFGTSKDLLFRDDTVCLAKLHDRNTYEKYLGEEYVKAVGNLRKCSTSCTPGSLHFP

SEQ ID NO: 750312 - protein, 119 aa, Homo sapiens
MSCCALMVPGNLWRSMRTATWPEPRITLWSHGKIRKLASTRYYVNSSTLFGSNVTDCSGNFCLFRSETKDLLFRDDTVCLAKLHDRNTYEKYLGEEYVKAVGNLRKCSTSCTPGSLHFP

SEQ ID NO: 750313 - protein, 122 aa, Homo sapiens
  misc_feature (10)..(10): Xaa can be any naturally occurring amino acid
  misc_feature (14)..(14): Xaa can be any naturally occurring amino acid
ANRYHTQAEXTSLXDKAELTRCAALAGGSPGCLVEKGDVAFVKHQTVPQNTGGKNPDPWAKNLNEKDYELLCLDGTRKPVEEYANCHLARAPNHAVVTRKDKEACVHKILRQQQHPIWKQRN

SEQ ID NO: 750314 - protein, 304 aa, Homo sapiens
LFDVCPLLPDDGAHSLGWDEEIHNLLLWIRVMMRERAKLVMGVQAGEVIRSNSVGKIECVSAETTEDCIAKIMNGEADAMSLDGGFVYIAGKCGLVPVLAENYNKSDNCEDTPEAGYFAVAVVKKSASDLTWDNLKGKKSCHTAVGRTAGWNIPMGLLYNKINHCRFDEFFSEGCAPGSKKDSSLCKLCMGSGLNLCEPNNKEGYYGYTGAFRCLVEKGDVAFVKHQTVPQNTGGKNPDPWAKNLNEKDYELLCLDGTRKPVEEYANCHLARAPNHAVVTRKDKEACVHKILRQQQHPIWKQRN

SEQ ID NO: 750315 - protein, 105 aa, Homo sapiens
MSCCALMVPGNLWRSMRTATWPEPRITLWSHGKIRKLASTRYYVNSSCLFRSETKDLLFRDDTVCLAKLHDRNTYEKYLGEEYVKAVGNLRKCSTSCTPGSLHFP

SEQ ID NO: 750316 - protein, 505 aa, Homo sapiens
MNQLRGKKSCHTGLGRSAGWNIPIGLLYCDLPEPRKPLEKAVANFFSGSCAPCADGTDFPQLCQLCPGCGCSTLNQYFGYSGAFKCLKDGAGDVAFVKHSTIFENLANKADRDQYELLCLDNTRKPVDEYKDCHLAQVPSHTVVARSMGGKEDLIWELLNQAQEHFGKDKSKEFQLFSSPHGKDLLFKDSAHGFLKVPPRMDAKMYLGYEYVTAIRNLREGTCPEAPTDECKPVKWCALSHHERLKCDEWSVNSVGKIECVSAETTEDCIAKIMNGEADAMSLDGGFVYIAGKCGLVPVLAENYNKSDNCEDTPEAGYFAVAVVKKSASDLTWDNLKGKKSCHTAVGRTAGWNIPMGLLYNKINHCRFDEFFSEGCAPGSKKDSSLCKLCMGSGLNLCEPNNKEGYYGYTGAFRCLVEKGDVAFVKHQTVPQNTGGKNPDPWAKNLNEKDYELLCLDGTRKPVEEYANCHLARAPNHAVVTRKDKEACVHKILRQQQHPIWKQRN

SEQ ID NO: 750317 - protein, 505 aa, Homo sapiens; identical to SEQ ID NO: 750316

SEQ ID NO: 750318 - protein, 641 aa, Homo sapiens
  misc_feature (1)..(3): Xaa can be any naturally occurring amino acid
  misc_feature (5)..(5): Xaa can be any naturally occurring amino acid
  misc_feature (13)..(14): Xaa can be any naturally occurring amino acid
XXXLXPVKPDELXXGALLVCAVPGLCLAVPDKTVRWCAVSEHEATKCQSFRDHMKSVIPSDGPSVACVKKASYLDCIRAIAANEADAVTLDAGLVYDAYLAPNNLKPVVAEFYGSKEDPQTFYYAVAVVKKDSGFQMNQLRGKKSCHTGLGRSAGWNIPIGLLYCDLPEPRKPLEKAVANFFSGSCAPCADGTDFPQLCQLCPGCGCSTLNQYFGYSGAFKCLKDGAGDVAFVKHSTIFENLANKADRDQYELLCLDNTRKPVDEYKDCHLAQVPSHTVVARSMGGKEDLIWELLNQAQEHFGKDKSKEFQLFSSPHGKDLLFKDSAHGFLKVPPRMDAKMYLGYEYVTAIRNLREGTCPEAPTDECKPVKWCALSHHERLKCDEWSVNSVGKIECVSAETTEDCIAKIMNGEADAMSLDGGFVYIAGKCGLVPVLAENYNKSDNCEDTPEAGYFAVAVVKKSASDLTWDNLKGKKSCHTAVGRTAGWNIPMGLLYNKINHCRFDEFFSEGCAPGSKKDSSLCKLCMGSGLNLCEPNNKEGYYGYTGAFRCLVEKGDVAFVKHQTVPQNTGGKNPDPWAKNLNEKDYELLCLDGTRKPVEEYANCHLARAPNHAVVTRKDKEACVHKILRQQQHPIWKQRN

SEQ ID NO: 750319 - protein, 614 aa, Homo sapiens
MRLAVGALLVCAVLGLCLAVPDKTVRWCAVSEHEATKCQSFRDHMKSVIPSDGPSVACVKKASYLDCIRAIAANEADAVTLDAGLVYDAYLAPNNLKPVVAEFYGSKEDPQTFYYAVAVVKKDSGFQMNQLRGKKSCHTGLGRSAGWNIPIGLLYCDLPEPRKPLEKAVANFFSGSCAPCADGTDFPQLCQLCPGCGCSTLNQYFGYSGAFKCLKDGAGDVAFVKHSTIFENLANKADRDQYELLCLDNTRKPVDEYKDCHLAQVPSHTVVARSMGGKEDLIWELLNQAQEHFGKDKSKEFQLFSSPHGKDLLFKDSAHGFFAIRNLREGTCPEAPTDECKPVKWCALSHHERLKCDEWSVNSVGKIECVSAETTEDCIAKIMNGEADAMSLDGGFVYIAGKCGLVPVLAENYNKSDNCEDTPEAGYFAVAVVKKSASDLTWDNLKGKKSCHTAVGRTAGWNIPMGLLYNKINHCRFDEFFSEGCAPGSKKDSSLCKLCMGSGLNLCEPNNKEGYYGYTGAFRCLVEKGDVAFVKHQTVPQNTGGKNPDPWAKNLNEKDYELLCLDGTRKPVEEYANCHLARAPNHAVVTRKDKEACVHKILRQQQHPIWKQRN

SEQ ID NO: 750320 - protein, 385 aa, Homo sapiens
MRLAVGALLVCAVLGLCLAVPDKTVRWCAVSEHEATKCQSFRDHMKSVIPSDGPSVACVKKASYLDCIRAIAANEADAVTLDAGLVYDAYLAPNNLKPVVAEFYGSKEDPQTFYYAVAVVKKDSGFQMNQLRGKKSCHTGLGRSAGWNIPIGLLYCDLPEPRKPLEKAVANFFSGSCAPCADGTDFPQLCQLCPGCGCSTLNQYFGYSGAFKCLKDGAGDVAFVKHSTIFENLANKADRDQYELLCLDNTRKPVDEYKDCHLAQVPSHTVVARSMGGKEDLIWELLNQAQEHFGKDKSKEFQLFSSPHGKDLLFKDSAHGFLKVPPRMDAKMYLGYEYVTAIRNLREGTCPEAPTDECKPVKWCALSHHERLKCDEWSVMEKLMP

SEQ ID NO: 750321 - protein, 399 aa, Homo sapiens
MVLGMWPLSSTRLYLNTRKPVDEYKDCHLAQVPSHTVVARSMGGKEDLIWELLNQAQEHFGKDKSKEFQLFSSPHGKDLLFKDSAHGFLKVPPRMDAKMYLGYEYVTAIRNLREGTCPEAPTDECKPVKWCALSHHERLKCDEWSVNSVGKIECVSAETTEDCIAKIMNGEADAMSLDGGFVYIAGKCGLVPVLAENYNKSDNCEDTPEAGYFAVAVVKKSASDLTWDNLKGKKSCHTAVGRTAGWNIPMGLLYNKINHCRFDEFFSEGCAPGSKKDSSLCKLCMGSGLNLCEPNNKEGYYGYTGAFRCLVEKGDVAFVKHQTVPQNTGGKNPDPWAKNLNEKDYELLCLDGTRKPVEEYANCHLARAPNHAVVTRKDKEACVHKILRQQQHPIWKQRN

SEQ ID NO: 750322 - protein, 621 aa, Homo sapiens
MRLAVGALLVCAVLGLCLAVPDKTVRWCAVSEHEATKCQSFRDHMKSVIPSDGPSVACVKKASYLDCIRAIAANEADAVTLDAGLVYDAYLAPNNLKPVVAEFYGSKEDPQTFYYAVAVVKKDSGFQMNQLRGKKSCHTGLGRSAGWNIPIGLLYCDLPEPRKPLEKAVANFFSGSCAPCADGTDFPQLCQLCPGCGCSTLNQYFGYSGAFKCLKDGAGDVAFVKHSTIFENLANKADRDQYELLCLDNTRKPVDEYKDCHLAQVPSHTVVARSMGGKEDLIWELLNQAQEHFGKDKSKEFQLFSSPHGKDLLFKDSAHGFLKVPPRMDAKMYLGYEYVTAIRNLREGTCPEAPTDECKPVKWCALSHHERLKCDEWSVNSVGKIECVSAETTEDCIAKIMNGEADAMSLDGGFVYIAGKCGLVPVLAENYNRYFAVAVVKKSASDLTWDNLKGKKSCHTAVGRTAGWNIPMGLLYNKINHCRFDEFFSEGCAPGSKKDSSLCKLCMGSGLNLCEPNNKEGYYGYTGAFRCLVEKGDVAFVKHQTVPQNTGGKNPDPWAKNLNEKDYELLCLDGTRKPVEEYANCHLARAPNHAVVTRKDKEACVHKILRQQQHPIWKQRN

SEQ ID NO: 750323 - protein, 414 aa, Homo sapiens
MRLAVGALLVCAVLGLCLAVPDKTVRWCAVSEHEATKCQSFRDHMKSVIPSDGPSVACVKKASYLDCIRAIAANEADAVTLDAGLVYDAYLAPNNLKPVVAEFYGSKEDPQTFYYAVAVVKKDSGFQMNQLRPEAPTDECKPVKWCALSHHERLKCDEWSVNSVGKIECVSAETTEDCIAKIMNGEADAMSLDGGFVYIAGKCGLVPVLAENYNKSDNCEDTPEAGYFAVAVVKKSASDLTWDNLKGKKSCHTAVGRTAGWNIPMGLLYNKINHCRFDEFFSEGCAPGSKKDSSLCKLCMGSGLNLCEPNNKEGYYGYTGAFRCLVEKGDVAFVKHQTVPQNTGGKNPDPWAKNLNEKDYELLCLDGTRKPVEEYANCHLARAPNHAVVTRKDKEACVHKILRQQQHPIWKQRN

SEQ ID NO: 750324 - protein, 293 aa, Homo sapiens
  misc_feature (6)..(6): Xaa can be any naturally occurring amino acid
PPPFLXLPSFSPEAPTDECKPVKWCALSHHERLKCDEWSVNSVGKIECVSAETTEDCIAKIMNGEADAMSLDGGFVYIAGKCGLVPVLAENYNKSDNCEDTPEAGYFAVAVVKKSASDLTWDNLKGKKSCHTAVGRTAGWNIPMGLLYNKINHCRFDEFFSEGCAPGSKKDSSLCKLCMGSGLNLCEPNNKEGYYGYTGAFRCLVEKGDVAFVKHQTVPQNTGGKNPDPWAKNLNEKDYELLCLDGTRKPVEEYANCHLARAPNHAVVTRKDKEACVHKILRQQQHPIWKQRN

SEQ ID NO: 750325 - protein, 544 aa, Homo sapiens
MRLAVGALLVCAVLGLCLAVPDKTVRWCAVSEHEATKCQSFRDHMKSVIPSDGPSVACVKKASYLDCIRAIAANEADAVTLDAGLVYDAYLAPNNLKPVVAEFYGSKEDPQTFYYAVAVVKKDSGFQMNQLRGKKSCHTGLGRSAGWNIPIGLLYCDLPEPRKPLEKAVANFFSGSCAPCADGTDFPQLCQLCPGCGCSTLNQYFGYSGAFKCLKDGAGDVAFVKHSTIFENLANKADRDQYELLCLDNTRKPVDEYKDCHLAQVPSHTVVARSMGGKEDLIWELLNQAQEHFGKDKSKEFQLFSSPHGKDLLFKDSAHGFLKVPPRMDAKMYLGYEYVTAIRNLREGTCPEAPTDECKPVKWCALSHHERLKCDEWSVNSVGKIECVSAETTEDCIAKIMNGEADAMSLDGGFVYIAGKCGLVPVLAENYNKSDNCEDTPEAGYFAVAVVKKSASDLTWDNLKGKKSCHTAVGRTAGWNIPMGLLYNKINHCRFDEFFSEGCAPGSKKDSSLCKLCMGSGLNLCEPNNKEGYYGYTGAFRKKP

SEQ ID NO: 750326 - protein, 590 aa, Homo sapiens
MRLAVGALLVCAVLGLCLAVPDKTVRWCAVSEHEATKCQSFRDHMKSVIPSDGPSVACVKKASYLDCIRAIAANEADAVTLDAGLVYDAYLAPNNLKPVVAEFYGSKEDPQTFYYAVAVVKKDSGFQMNQLRGKKSCHTGLGRSAGWNIPIGLLYCDLPEPRKPLEKAVANFFSGSCAPCADGTDFPQLCQLCPGCGCSTLNQYFGYSGAFKCLKDGAGDVAFVKHSTIFENLANKADRDQYELLCLDNTRKPVDEYKDCHLAQVPSHTVVARSMGGKEDLIWELLNQAQEHFGKDKSKEFQLFSSPHGKDLLFKDSAHGFLKVPPRMDAKMYLGYEYVTAIRNLREGTCPEAPTDECKPVKWCALSHHERLKCDEWSVNSVGKIECVSAETTEDCIAKIMNGEADAMSLDGGFVYIAGKCGLVPVLAENYNKSDNCEDTPEAGYFAVAVVKKSASDLTWDNLKGKKSCHTAVGRTAGWNIPMGLLYNKINHCRFDEFFSEGCAPGSKKDSSLCKLCMGSGLNLCEPNNKEGYYGYTGAFRCLVEKGDVAFVKHQTVPQNTGGKNPDPWAKNLNVPPGQSPESRCGHTER

SEQ ID NO: 750327 - protein, 632 aa, Homo sapiens; identical to SEQ ID NO: 750309

SEQ ID NO: 750328 - protein, 632 aa, Homo sapiens; identical to SEQ ID NO: 750309

SEQ ID NO: 750329 - protein, 632 aa, Homo sapiens; identical to SEQ ID NO: 750309

SEQ ID NO: 750330 - protein, 632 aa, Homo sapiens; identical to SEQ ID NO: 750309

SEQ ID NO: 750331 - protein, 638 aa, Homo sapiens
MRLAVGALLVCAVLGLCLAVPDKTVRWCAVSEHEATKCQSFRDHMKSVIPSDGPSVACVKKASYLDCIRAIAANEADAVTLDAGLVYDAYLAPNNLKPVVAEFYGSKEDPQTFYYAVAVVKKDSGFQMNQLRGKKSCHTGLGRSAGWNIPIGLLYCDLPEPRKPLEKAVANFFSGSCAPCADGTDFPQLCQLCPGCGCSTLNQYFGYSGAFKCLKDGAGDVAFVKHSTIFENLANKADRDQYELLCLDNTRKPVDEYKDCHLAQVPSHTVVARSMGGKEDLIWELLNQAQEHFGKDKSKEFQLFSSPHGKDLLFKDSAHGFLKVPPRMDAKMYLGYEYVTAIRNLREGTCPEAPTDECKPVKWCALSHHERLKCDEWSVNSVGKIECVSAETTEDCIAKIMNGEADAMSLDGGFVYIAGKCGLVPVLAENYNKSDNCEDTPEAGYFAVAVVKKSASDLTWDNLKGKKSCHTAVGRTAGWNIPMGLLYNKINHCRFDEFFSEGCAPGSKKDSSLCKLCMGSGLNLCEPNNKEGYYGYTGAFRCLVEKGDVAFVKHQTVPQNTGGKNPDPWAKNLNEKDYELLCLDGTRKPVEEYANCHLARAPNHAVVTRKDKEACVHKILRQQQLFVPVGNQGPSVQR

SEQ ID NO: 750332 - protein, 141 aa, Homo sapiens
  misc_feature (1)..(3): Xaa can be any naturally occurring amino acid
  misc_feature (5)..(5): Xaa can be any naturally occurring amino acid
  misc_feature (13)..(14): Xaa can be any naturally occurring amino acid
XXXLXPVKPDELXXGALLVCAVPGLCLAVPDKTVRWCAVSEHEATKCQSFRDHMKSVIPSDGPSVACVKKASYLDCIRAIAANEADAVTLDAGLVYDAYLAPNNCHLARAPNHAVVTRKDKEACVHKILRQQQHPIWKQRN

SEQ ID NO: 750333 - protein, 393 aa, Homo sapiens
MRLAVGALLVCAVLGLCLAVPDKTVRWCAVSEHEATKCQSFRDHMKSVIPSDGPSVACVKKASYLDCIRAIAANEADAVTLDAGLVYDAYLAPNNLKPVVAEFYGSKEDPQTFYYAVAVVKKDSGFQMNQLRGKKSCHTGLGRSAGWNIPIGLLYCDLPEPRKPLEKAVANFFSGSCAPCADGTDFPQLCQLCPGCGCSTLNQYFGYSGAFKCLKDGAGDVAFVKHSTIFENLANKADRDQYELLCLDNTRKPVDEYKDCHLAQVPSHTVVARSMGGKEDLIWELLNQAQEHFWAKKKKNKKKKIFLAPPLGPLRESFKRPIGWAGGPPSADEVTPGSHSWSPRKHPGHGNTGSRIPPPITTPPRQTRRSDTHPKAHSDTTQASTPDTNQAHV

SEQ ID NO: 750334 - protein, 178 aa, Homo sapiens
MNQLRGKKSCHTGLGRSAGWNIPIGLLYCDLPEPRKPLEKAVANFFSGSCAPCADGTDFPQLCQLCPGCGCSTLNQYFGYSGAFKCLKDGAGDVAFVKHSTIFENLANKADRDQYELLCLDNTRKPVDEYKDCHLAQVPSHTVVARSMGGKEDLIWELLNQAQEHFGKDFKSFLFALL

SEQ ID NO: 750335 - protein, 243 aa, Homo sapiens
MRLAVGALLVCAVLGLCLAVPDKTVRWCAVSEHEATKCQSFRDHMKSVIPSDGPSVACVKKASYLDCIRAIAANEADAVTLDAGLVYDAYLAPNNLKPVVAEFYGSKEDPQTFYYAVAVVKKDSGFQMNQLRGKKSCHTGLGRSAGWNIPIGLLYCDLPEPRKPLEKAVANFFSGSCAPCADGTDFPQLCQLCPGCGCSTLNQYFGYSGAFKCLKDGAGDVAFVKHSTIFENLQTAGRPSRYR

SEQ ID NO: 750336 - protein, 175 aa, Homo sapiens
MRLAVGALLVCAVLGLCLAVPDKTVRWCAVSEHEATKCQSFRDHMKSVIPSDGPSVACVKKASYLDCIRAIAANEADAVTLDAGLVYDAYLAPNNLKPVVAEFYGSKEDPQTFYYAVAVVKKDSGFQMNQLRGKKSCHTGLGRSAGWNIPIGLLYCDLPEPRKPLEKAVANFCVF

SEQ ID NO: 750337 - protein, 184 aa, Homo sapiens
SLPGITRGIGVKMEEYAREPCPWRIVDDCGGAFTMGTIGGGIFQAIKGFRNSPVGVNHRLRGSLTAIKTRAPQLGGSFAVWGGLFSMIDCSMVQVRGKEDPWNSITSGALTGAILAARNGPVAMVGSAAMGGILLALIEGAGILLTRLCLCTVSQWSSVCRRPLPVCLQLSYLPHLCGDYRQYQ

SEQ ID NO: 750338 - protein, 69 aa, Homo sapiens
LRNERQFKEEKLAEQLKQAEELRQYKVLVHSQERELTQLREKLREGRDASRSLNQHLLRIPGTPSQVVP

SEQ ID NO: 750339 - protein, 190 aa, Homo sapiens
KQWYQRRVPITAGGIGVKMEEYAREPCPWRIVDDCGGAFTMGTIGGGIFQAIKGFRNSPVGVNHRLRGSLTAIKTRAPQLGGSFAVWGGLFSMIDCSMVQVRGKEDPWNSITSGALTGAILAARNGPVAMVGSAAMGGILLALIEGAGILLTRLCLCTVSQWSSVCRRPLPVCLQLSYLPHLCGDYRQYQ

SEQ ID NO: 750340 - protein, 181 aa, Homo sapiens
KQWYQRRVPITAGGIGVKMEEYAREPCPWRIVDDCGGAFTMGTIGGGIFQAIKGFRNSPVGVNHRLRGSLTASSFAVWGGLFSMIDCSMVQVRGKEDPWNSITSGALTGAILAARNGPVAMVGSAAMGGILLALIEGAGILLTRLCLCTVSQWSSVCRRPLPVCLQLSYLPHLCGDYRQYQ

SEQ ID NO: 750341 - protein, 78 aa, Homo sapiens
AYAGLGMSSADVHSDRDIVRGLDDWDYSGRLFKQPKVVVKFSSWEKYTDSARDVDKLVKTQVCTVRSVALQFGEGCFP

SEQ ID NO: 750342 - protein, 184 aa, Homo sapiens; identical to SEQ ID NO: 750337

SEQ ID NO: 750343 - protein, 183 aa, Homo sapiens
SLPGITRGIGVKMEEYAREPCPWRIVDDCGGAFTMGTIGGGIFQAIKGFRNSPVGVNHRLRGSLTAIKTRAPQLGGSFAVWGGLFSMIDCSMVQVRGKEDPWNSITSGALTGAILAARNGPVAMVGSAAMGGILLALIEGAGILLTRLCLCTVSQCVPSTQLPSSPLWRLSTISVGLLSLGFL

SEQ ID NO: 750344 - protein, 89 aa, Homo sapiens
KQWYQRRVPITAGGIGVKMEEYAREPCPWRIVDDCGGAFTMGTIGGGIFQAIKGFRNSPVGVNHRLRGSLTAIKTRAPQLGGKQNFHFN

SEQ ID NO: 750345 - protein, 184 aa, Homo sapiens; identical to SEQ ID NO: 750337

SEQ ID NO: 750346 - protein, 101 aa, Homo sapiens
KQWYQRRVPITAGGIGVKMEEYAREPCPWRIVDDCGGAFTMGTIGGGIFQAIKGFRNSPVGVNHRLRGSLTAIKTRAPQLGVMKKLVLLLSPIFQMRKFSS

SEQ ID NO: 750347 - protein, 88 aa, Homo sapiens
KQWYQRRVPITAGGIGVKMEEYAREPCPWRIVDDCGGAFTMGTIGGGIFQAIKGFRNSPVGVNHRLRGSLTAIKTRAPQLGAWIGLHL

SEQ ID NO: 750348 - protein, 147 aa, Homo sapiens
KQWYQRRVPITAGGIGVKMEEYAREPCPWRIVDDCGGAFTMGTIGGGIFQAIKGFRNSPVGVNHRLRGSLTAIKTRAPQLGDGPVAMVGSAAMGGILLALIEGAGILLTRLCLCTVSQWSSVCRRPLPVCLQLSYLPHLCGDYRQYQ

SEQ ID NO: 750349 - protein, 100 aa, Homo sapiens
AVVSTQSAHYGRGHWSQDGGVRARALVSFTAVFAFLLPPCPLPSFSLVQAPKVQARLNRSLVDLGLVTGQCGLSRPVGFLALYLVPPRPREPPSPNPAPV

SEQ ID NO: 750350 - protein, 183 aa, Homo sapiens
MSAARESHPHGVKRSASPDDDLGSSNWEAADLGNEERKQKFLRLMGAGKKEHTGRLVIGDHKSTSHFRTGEEDKKINEELESQYQQSMDSKLSGRYRRHCGLGFSEVEDHDGEGDVAGDDDDDDDDSPDPESPDDSESDSESEKEESAEELQAAEHPDEVEDPKNKKDAKSNYKMMFVKSSGS

SEQ ID NO: 750351 - protein, 79 aa, Homo sapiens
MEKVMWLEMMMMTMMIHLILKVQMILKAIQSQRKEESAEETPKLLSTLTVKAGDPPHKVPNGLINDARYTHGPYPPSPF

SEQ ID NO: 750352 - protein, 74 aa, Homo sapiens
MWEAARLGYMNERKRKVLETYGCMRNEQNILVVLFIRRSQINISLPNRTCNLLKNWRLISATFAHATYRPTRDS

SEQ ID NO: 750353 - protein, 81 aa, Homo sapiens
  misc_feature (7)..(7): Xaa can be any naturally occurring amino acid
YLEDPEXLLLRENLCWFCGWEERREGSAFFVGIPVEGCSAAMKSLTRHGVNAFMPSLETDDLGSSTWEAAGSRGSSRNSRG

SEQ ID NO: 750354 - protein, 183 aa, Homo sapiens; identical to SEQ ID NO: 750350

SEQ ID NO: 750355 - protein, 183 aa, Homo sapiens; identical to SEQ ID NO: 750350

SEQ ID NO: 750356 - protein, 183 aa, Homo sapiens; identical to SEQ ID NO: 750350

SEQ ID NO: 750357 - protein, 183 aa, Homo sapiens; identical to SEQ ID NO: 750350

SEQ ID NO: 750358 - protein, 183 aa, Homo sapiens; identical to SEQ ID NO: 750350

SEQ ID NO: 750359 - protein, 183 aa, Homo sapiens; identical to SEQ ID NO: 750350

SEQ ID NO: 750360 - protein, 90 aa, Homo sapiens
  misc_feature (20)..(20): Xaa can be any naturally occurring amino acid
  misc_feature (54)..(54): Xaa can be any naturally occurring amino acid
VVALLWRPSARDCKLLVQRXGKHGAQRSGSRQFIQSRIAQSKGCMCGAMNDVVXPGQCGIERWVHDTSPSRLTNLGDRSNLARQASTVGT

SEQ ID NO: 750361 - protein, 148 aa, Homo sapiens
MMSLTRHGVNAFMPSLETDDMGLSSFRKTSSKLPLSLHYAGDLAMWEAARLGYMNERKRKVLETYGCMRNEQNILVVLFIRRSQINISLPNRQEDIGDIVDCGFSEVEDHDGEGDVAGDDDDDDDDSPDPESPDDSESDSESEKRRIC

SEQ ID NO: 750362 - protein, 81 aa, Homo sapiens
MMEKVMWLEMMMMTMMIHLILKVQMILKAIQSQRKEESAEETPKLLSTLTCTAGSQHPNTFTQHTLHSTSALTCLPHSPRP

SEQ ID NO: 750363 - protein, 106 aa, Homo sapiens [sequence omitted]

SEQ ID NO: 750364 - protein, 98 aa, Homo sapiens
RWRGTGFSPGPQLEAGSRARRSRPCPVTTGKKKVLPRRRSGDLAMWEAARLGYMNERKRKVLETYGCMRNEQNILVVLFIRRSQINISLPNRGRRQEN

SEQ ID NO: 750365 - protein, 104 aa, Homo sapiens
MWEAARLGYMNERKRKVLETYGCMRNEQNILVVLFIRRSQINISLPNRQEDIGDIVDCGFSEVEDHDGEGDVAGDDDDDDDDSPDPESPDDSESDSESEKRRIC

SEQ ID NO: 750366 - protein, 183 aa, Homo sapiens; identical to SEQ ID NO: 750350

SEQ ID NO: 750367 - protein, 183 aa, Homo sapiens; identical to SEQ ID NO: 750350

SEQ ID NO: 750368 - protein, 183 aa, Homo sapiens; identical to SEQ ID NO: 750350

SEQ ID NO: 750369 - protein, 183 aa, Homo sapiens; identical to SEQ ID NO: 750350

SEQ ID NO: 750370 - protein, 183 aa, Homo sapiens; identical to SEQ ID NO: 750350

SEQ ID NO: 750371 - protein, 233 aa, Homo sapiens
MYHGMNPSNGDGFLEQQQQQQQPQSPQRLLAVILWFQLALCFGPAQLTGGFDDLQVCADPGIPENGFRTPSGGVFFEGSVARFHCQDGFKLKGATKRLCLKHFNGTLGWIPSDNSICVQEDCRIPQIEDAEIHNKTYRHGEKLIITCHEGFKIRYPDLHNMVSLCRDDGTWNNLPICQGPLAPQHTPAQGTRTQAQGSQKPVTASQALLSCSKVCIHLPGAKRAPTLLRTTLT

SEQ ID NO: 750372 - protein, 290 aa, Homo sapiens
MYHGMNPSNGDGFLEQQQQQQQPQSPQRLLAVILWFQLALCFGPAQLTGGFDDLQVCADPGIPENGFRTPSGGVFFEGSVARFHCQDGFKLKGATKRLCLKHFNGTLGWIPSDNSICVQEDCRIPQIEDAEIHNKTYRHGEKLIITCHEGFKIRYPDLHNMVSLCRDDGTWNNLPICQGCLRPLASSNGYVNISELQTSFPVGTVISYRCFPGFKLDGSAYLECLQNLIWSSSPPRCLALEGGRPEHLFPVLYFPHIRLAAAVLYFCPVLKSSPTPAPTCSSTSTTTSLF

SEQ ID NO: 750373 - protein, 233 aa, Homo sapiens; identical to SEQ ID NO: 750371

SEQ ID NO: 750374 - protein, 255 aa, Homo sapiens [sequence omitted]

SEQ ID NO: 750375 - protein, 110 aa, Homo sapiens
GALEMLLTGNLSPSEHGLVLSAWPLILWGLFLLWLLSVAEQPDFFACGRNLPLQSGSCKITSSPEGHWCHILLVRTNLMASPDSGGGKHNPPFDRLFPKTATAISYQKST

SEQ ID NO: 750376 - protein, 115 aa, Homo sapiens
SFPYPHLPSLLLEPRKKPSAELAFRRFFFKYQFPFVPRQPPIRAGVCWVWRKAGIVFHAPGGKVVHLLFFLIRFPAILQESQWLQLLLSAISGGSPCLRPYTLIPWQEEKNKTKQ

SEQ ID NO: 750377 - protein, 408 aa, Homo sapiens
MAEGTAEAPLENGGGGDSGAGALERGVAPIKRQYLTTKEQFHQFLEAKGQEKTCRETELDIRGKLYLAPLTTCGNLPFRRICKRFGADVTCGEMAVCTNLLQGQMSEWALLKRHQCEDIFGVQLEGAFPDTMTKCAELLSRTVEVDFVDINVGCPIDLVYKKGGGCALMNRSTKFQQIVRGMNQVLDVPLTVKIRTGVQERVNLAHRLLPELRDWGVALVTLHGRSREQRYTKLADWQYIEECVQAASPMPLFGNGDILSFEDANRAMQTGVTGIMIARGALLKPWLFTEIKEQRHWDISSSERLDILRDFTNYGLEHWGSDTQGVEKTRRFLLEWLSFLCRYVPVGLLERLPQRINERPPYYLGRDYLETLMASQKAADWIRISEMLLGPVPPSFAFLPKHKANAYK

SEQ ID NO: 750378 - protein, 311 aa, Homo sapiens
MAEGTAEAPLENGGGGDSGAGALERGVAPIKRQYLTTKEQFHQFLEAKGQEKTCRETEVGDPAGNELAEPEAKRIRLEDGQTADGQTEEAAEPGEQLQTQKRARGQNKGRPHVKPTNYDKNRLCPSLIQESAAKCFFGDRCRFLHDVGRYLETKPADLGPRCVLFETFGRCPYGVTCRFAGAHLRPEGQNLVQEELAARGTQPPSIRNGLDKALQQQLRKREVRFERAEQALRRFSQGPTPAAAVPEGTAAEGAPRQENCGAQQVPAGPGTSTFQSPGELGPGGETASCGVKKGGSWNLAYRGRLERGRGE

SEQ ID NO: 750379 - protein, 686 aa, Homo sapiens
MAEGTAEAPLENGGGGDSGAGALERGVAPIKRQYLTTKEQFHQFLEAKGQEKTCRETEVGDPAGNELAEPEAKRIRLEDGQTADGQTEEAAEPGEQLQTQKRARGQNKGRPHVKPTNYDKNRLCPSLIQESAAKCFFGDRCRFLHDVGRYLETKPADLGPRCVLFETFGRCPYGVTCRFAGAHLRPEGQNLVQEELAARGTQPPSIRNGLDKALQQQLRKREVRFERAEQALRRFSQGPTPAAAVPEGTAAEGAPRQENCGAQQVPAGPGTSTPPSSPVRTCGPLTDEDVVRLRPCEKKRLDIRGKLYLAPLTTCGNLPFRRICKRFGADVTCGEMAVCTNLLQGQMSEWALLKRHQCEDIFGVQLEGAFPDTMTKCAELLSRTVEVDFVDINVGCPIDLVYKKGGGCALMNRSTKFQQIVRGMNQVLDVPLTVKIRTGVQERVNLAHRLLPELRDWGVALVTLHGRSREQRYTKLADWQYIEECVQAASPMPLFGNGDILSFEDANRAMQTGVTGIMIARGALLKPWLFTEIKEQRHWDISSSERLDILRDFTNYGLEHWGSDTQGVEKTRRFLLEWLSFLCRYVPVGLLERLPQRINERPPYYLGRDYLETLMASQKAADWIRIRCLGGLELGSCSRGPGVTEGTLQVLGLTSLFHLLSHSEMLLGPVPPSFAFLPKHKANAYK

SEQ ID NO: 750380 - protein, 650 aa, Homo sapiens
MAEGTAEAPLENGGGGDSGAGALERGVAPIKRQYLTTKEQFHQFLEAKGQEKTCRETEVGDPAGNELAEPEAKRIRLEDGQTADGQTEEAAEPGEQLQTQKRARGQNKGRPHVKPTNYDKNRLCPSLIQESAAKCFFGDRCRFLHDVGRYLETKPADLGPRCVLFETFGRCPYGVTCRFAGAHLRPEGQNLVQEELAARGTQPPSIRNGLDKALQQQLRKREVRFERAEQALRRFSQGPTPAAAVPEGTAAEGAPRQENCGAQQVPAGPGTSTPPSSPVRTCGPLTDEDVVRLRPCEKKRLDIRGKLYLAPLTTCGNLPFRRICKRFGADVTCGEMAVCTNLLQGQMSEWALLKRHQCEDIFGVQLEGAFPDTMTKCAELLSRTVEVDFVDINVGCPIDLVYKKGGGCALMNRSTKFQQIVRGMNQVLDVPLTVKIRTGVQERVNLAHRLLPELRDWGVALVTLHGRSREQRYTKLADWQYIEECVQAASPMPLFGNGDILSFEDANRAMQTGVTGIMIARGALLKPWLFTEIKEQRHWDISSSERLDILRDFTNYGLEHWGSDTQGVEKTRRFLLEWLSFLCRYVPVGLLERLPQRINERPPYYLGRDYLETLMASQKAADWIRISEMLLGPVPPSFAFLPKHKANAYK

SEQ ID NO: 750381 - protein, 639 aa, Homo sapiens
MAEGTAEAPLENGGGGDSGAGALERGVAPIKRQYLTTKEQFHQFLEAKGQEKTCRETEVGDPAGNELAEPEAKRIRLEDGQTADGQTEEAAEPGEQLQTQKRARGQNKGRPHVKPTNYDKNRLCPSLIQESAAKCFFGDRCRFLHDVGRYLETKPADLGPRCVLFETFGRCPYGVTCRFAGAHLRPEGQNLVQEELAARGTQPPSIRNGLDKALQQQLRKREVRFERAEQALRRFSQGPTPAAAVPEGTAAEGAPRQENCGAQQVPAGPGTSTPPSSPVRTCGPLTDEDVVRLRPCEKKRLDIRGKLYLAPLTTCGNLPFRRICKRFGADVTCGEMAVCTNLLQGQMSEWALLKRHQCEDIFGVQLEGAFPDTMTKCAELLSRTVEVDFVDINVGCPIDLVYKKGGGCALMNRSTKFQQIVRGMNQVLDVPLTVKIRTGVQERVNLAHRLLPELRDWGVALVTLHGRSREQRYTKLADWQYIEECVQAASPMPLFGNGDILSFEDANRAMQTGVTGIMIARGALLKPWLFTEIKEQRHWDISSSERLDILRDFTNYGLEHWGSDTQGVEKTRRFLLEWLSFLCRYVPVGLLERLPQRINERPPYYLGRDYLETLMASQKAADWIRISNAPCRALNPLST

SEQ ID NO: 750382 - protein, 691 aa, Homo sapiens
MAEGTAEAPLENGGGGDSGAGALERGVAPIKRQYLTTKEQFHQFLEAKGQEKTCRETEVGDPAGNELAEPEAKRIRLEDGQTADGQTEEAAEPGEQLQTQKRARGQNKGRPHVKPTNYDKNRLCPSLIQESAAKCFFGDRCRFLHDVGRYLETKPADLGPRCVLFETFGRCPYGVTCRFAGAHLRPEGQNLVQEELAARGTQPPSIRNGLDKALQQQLRKREVRFERAEQALRRFSQGPTPAAAVPEGTAAEGAPRQENCGAQQVPAGPGTSTPPSSPVRTCGPLTDEDVVRLRPCEKKRLDIRGKLYLAPLTTCGNLPFRRICKRFGADVTCGEMAVCTNLLQGQMSEWALLKRHQCEDIFGVQLEGAFPDTMTKCAELLSRTVEVDFVDINVGCPIDLVYKKGGGCALMNRSTKFQQIVRGMNQVRPATSSHWLPNNSPGPCLPPPPTVSHHLPPSPTTSHHRLQVLDVPLTVKIRTGVQERVNLAHRLLPELRDWGVALVTLHGRSREQRYTKLADWQYIEECVQAASPMPLFGNGDILSFEDANRAMQTGVTGIMIARGALLKPWLFTEIKEQRHWDISSSERLDILRDFTNYGLEHWGSDTQGVEKTRRFLLEWLSFLCRYVPVGLLERLPQRINERPPYYLGRDYLETLMASQKAADWIRISEMLLGPVPPSFAFLPKHKANAYK

SEQ ID NO: 750383 - protein, 726 aa, Homo sapiens
MAEGTAEAPLENGGGGDSGAGALERGVAPIKRQYLTTKEQFHQFLEAKGQEKTCRETEVGDPAGNELAEPEAKRIRLEDGQTADGQTEEAAEPGEQLQTQKRARGQNKGRPHVKPTNYDKNRLCPSLIQESAAKCFFGDRCRFLHDVGRYLETKPADLGPRCVLFETFGRCPYGVTCRFAGAHLRPEGQNLVQEELAARGTQPPSIRNGLDKALQQQLRKREVRFERAEQALRRFSQGPTPAAAVPEGTAAEGAPRQENCGAQQVPAGPGTSTPPSSPVRTCGPLTDEDVVRLRPCEKKRLDIRGKLYLAPLTTCGNLPFRRICKRFGADVTCGEMAVCTNLLQGQMSEWALLKRHQCEDIFGVQLEGAFPDTMTKCAELLSRTVEVDFVDINVGCPIDLVYKKVAALDVCLGFPIWAEEALTQPAMSRWRVRGLGSSVALESLPFLQVGVSWWGPPGSRGEGSWVSPRPALPPPACLFQGGGCALMNRSTKFQQIVRGMNQVLDVPLTVKIRTGVQERVNLAHRLLPELRDWGVALVTLHGRSREQRYTKLADWQYIEECVQAASPMPLFGNGDILSFEDANRAMQTGVTGIMIARGALLKPWLFTEIKEQRHWDISSSERLDILRDFTNYGLEHWGSDTQGVEKTRRFLLEWLSFLCRYVPVGLLERLPQRINERPPYYLGRDYLETLMASQKAADWIRISEMLLGPVPPSFAFLPKHKANAYK

SEQ ID NO: 750384 - protein, 743 aa, Homo sapiens
MAEGTAEAPLENGGGGDSGAGALERGVAPIKRQYLTTKEQFHQFLEAKGQEKTCRETEVGDPAGNELAEPEAKRIRLEDGQTADGQTEEAAEPGEQLQTQKRARGQNKGRPHVKPTNYDKNRLCPSLIQESAAKCFFGDRCRFLHDVGRYLETKPADLGPRCVLFETFGRCPYGVTCRFAGAHLRPEGQNLVQEELAARGTQPPSIRNGLDKALQQQLRKREVRFERAEQALRRFSQGPTPAAAVPEGTAAEGAPRQENCGAQQVPAGPGTSTPPSSPVRTCGPLTDEDVVRLRPCEKKRLDIRGKLYLAPLTTCGNLPFRRICKRFGADVTCGEMAVCTNLLQGQMSEWALLKRHQCEDIFGVQLEGAFPDTMTKCAELLSRTVEVDFVDINVGCPIDLVYKKGGGCALMNRSTKFQQIVRGMNQVLDVPLTVKIRTGVQERVNLAHRLLPELRDWGVALVTPGSLGLFLSAVSLSASYPAWRLLPQLHGRSREQRYTKLADWQYIEECVQAASPMPLFGGCSGKPPPSPLPPLVTHTSGLFAFHLGPPRTTLMGATGSAKTPEGLVSRTPGPTCPCLPETPASVSSGNGDILSFEDANRAMQTGVTGIMIARGALLKPWLFTEIKEQRHWDISSSERLDILRDFTNYGLEHWGSDTQGVEKTRRFLLEWLSFLCRYVPVGLLERLPQRINERPPYYLGRDYLETLMASQKAADWIRISEMLLGPVPPSFAFLPKHKANAYK

SEQ ID NO: 750385 - protein, 485 aa, Homo sapiens
MAEGTAEAPLENGGGGDSGAGALERGVAPIKRQYLTTKEQFHQFLEAKGQEKTCRETEVGDPAGNELAEPEAKRIRLEDGQTADGQTEEAAEPGEQLQTQKRARGQNKGRPHVKPTNYDKNRLCPSLIQESAAKCFFGDRCRFLHDVGRYLETKPADLGPRCVLFETFGRCPYGVTCRFAGAHLRPEGQNLVQEELAARGTQPPSIRNGLDKALQQQLRKREVRFERAEQALRRFSQGPTPAAAVPEGTAAEGAPRQENCGAQQVPAGPGTSTPPSSPVRTCGPLTDEDVVRLRPCEKKRLDIRGKLYLAPLTTCGNLPFRRICKRFGADVTCGEMAVCTNLLQGQMSEWALLKRHQCEDIFGVQLEGAFPDTMTKCAELLSRTVEVDFVDINVGCPIDLVYKKGGGCALMNRSTKFQQIVRGMNQVLDVPLTVKIRTGVQERVNLAHRLLPELRDWGVALVTEMGTSCHLRMPTAPCRLVSPGS

SEQ ID NO: 750386 - protein, 539 aa, Homo sapiens [sequence omitted]

SEQ ID NO: 750387 - protein, 311 aa, Homo sapiens; identical to SEQ ID NO: 750378

SEQ ID NO: 750388 - protein, 284 aa, Homo sapiens
MAEGTAEAPLENGGGGDSGAGALERGVAPIKRQYLTTKEQFHQFLEAKGQEKTCRETEVGDPAGNELAEPEAKRIRLEDGQTADGQTEEAAEPGEQLQTQKRARGQNKGRPHVKPTNYDKNRLCPSLIQESAAKCFFGDRCRFLHDVGRYLETKPADLGPRCVLFETFGRCPYGVTCRFAGAHLRPEGQNLLEHWGSDTQGVEKTRRFLLEWLSFLCRYVPVGLLERLPQRINERPPYYLGRDYLETLMASQKAADWIRISEMLLGPVPPSFAFLPKHKANAYK

SEQ ID NO: 750389 - protein, 153 aa, Homo sapiens
MASRGHTIPGRLVAGPTDRHPSHSGALLKPWLFTEIKEQRHWDISSSERLDILRDFTNYGLEHWGSDTQGVEKTRRFLLEWLSFLCRYVPVGLLERLPQRINERPPYYLGRDYLETLMASQKAADWIRISEMLLGPVPPSFAFLPKHKANAYK

SEQ ID NO: 750390 - protein, 83 aa, Homo sapiens
LLPGPRLPGDADGQPEGSRLDPHQVPGWAGVGELQSGARGHGGYFAGPGPDLAFHLLSHSEMLLGPVPPSFAFLPKHKANAYK

SEQ ID NO: 750391 - protein, 650 aa, Homo sapiens; identical to SEQ ID NO: 750380

SEQ ID NO: 750392 - protein, 650 aa, Homo sapiens; identical to SEQ ID NO: 750380

SEQ ID NO: 750393 - protein, 640 aa, Homo sapiens
MAEGTAEAPLENGGGGDSGAGALERGVAPIKRQYLTTKEQFHQFLEAKGQEKTCRETEVGDPAGNELAEPEAKRIRLEDGQTADGQTEEAAEPGEQLQTQKRARGQNKGRPHVKPTNYDKNRLCPSLIQESAAKCFFGDRCRFLHDVGRYLETKPADLGPRCVLFETFGRCPYGVTCRFAGAHLRPEGQNLVQEELAARGTQPPSIRNGLDKALQQQLRKREVRFERAEQALRRFSQGPTPAAAVPEGTAAEGAPRQENCGAQQVPAGPGTSTPPSSPVRTCGPLTDEDVVRLRPCEKKRLDIRGKLYLAPLTTCGNLPFRRICKRFGADVTCGEMAVCTNLLQGQMSEWALLKRHQCEDIFGVQLEGAFPDTMTKCAELLSRTVEVDFVDINVGCPIDLVYKKGGGCALMNRSTKFQQIVRGMNQVLDVPLTVKIRTGVQERVNLAHRLLPELRDWGVALVTLHGRSREQRYTKLADWQYIEECVQAASPMPLFGNGDILSFEDANRAMQTGVTGIMIARGALLKPWLFTEIKEQRHWDISSSERLDILRDFTNYGLEHWGSDTQGVEKTRRFLLEWLSFLCRYVPVGLLERLPQRINERPPYYLGRDYLETLMASQKAADWIRISKCSLSCDWDTLGH

SEQ ID NO: 750394 - protein, 722 aa, Homo sapiens
MAEGTAEAPLENGGGGDSGAGALERGVAPIKRQYLTTKEQFHQFLEAKGQEKTCRETEVGDPAGNELAEPEAKRIRLEDGQTADGQTEEAAEPGEQLQTQKRARGQNKGRPHVKPTNYDKNRLCPSLIQESAAKCFFGDRCRFLHDVGRYLETKPADLGPRCVLFETFGRCPYGVTCRFAGAHLRPEGQNLVQEELAARGTQPPSIRNGLDKALQQQLRKREVRFERAEQALRRFSQGPTPAAAVPEGTAAEGAPRQENCGAQQVPAGPGTSTPPSSPVRTCGPLTDEDVVRLRPCEKKRLDIRGKLYLAPLTTCGNLPFRRICKRFGADVTCGEMAVCTNLLQGQMSEWALLKRHQCEDIFGVQLEGAFPDTMTKCAELLSRTVEVDFVDINVGCPIDLVYKKGGGCALMNRSTKFQQIVRGMNQVLDVPLTVKIRTGVQERVNLAHRLLPELRDWGVALVTVGLGTPRALGPRGRPRVPSYMAPLLPSLPLHLHTSLCLRLCLSLSLSAWLSWSLPLCVSLSASYPAWRLLPQLHGRSREQRYTKLADWQYIEECVQAASPMPLFGNGDILSFEDANRAMQTGVTGIMIARGALLKPWLFTEIKEQRHWDISSSERLDILRDFTNYGLEHWGSDTQGVEKTRRFLLEWLSFLCRYVPVGLLERLPQRINERPPYYLGRDYLETLMASQKAADWIRISEMLLGPVPPSFAFLPKHKANAYK

SEQ ID NO: 750395 - protein, 675 aa, Homo sapiens
MAEGTAEAPLENGGGGDSGAGALERGVAPIKRQYLTTKEQFHQFLEAKGQEKTCRETEVGDPAGNELAEPEAKRIRLEDGQTADGQTEEAAEPGEQLQTQKRARGQNKGRPHVKPTNYDKNRLCPSLIQESAAKCFFGDRCRFLHDVGRYLETKPADLGPRCVLFETFGRCPYGVTCRFAGAHLRPEGQNLVQEELAARGTQPPSIRNGLDKALQQQLRKREVRFERAEQALRRFSQGPTPAAAVPEGTAAEGAPRQENCGAQQVPAGPGTSTPPSSPVRTCGPLTDEDVVRLRPCEKKRLDIRGKLYLAPLTTCGNLPFRRICKRFGADVTCGEMAVCTNLLQGQMSEWALLKRHQCEDIFGVQLEGAFPDTMTKCAELLSRTVEVDFVDINVGCPIDLVYKKGGGCALMNRSTKFQQIVRGMNQVLDVPLTVKIRTGVQERVNLAHRLLPELRDWGVALVTPGSLGLFLSAVSLSASYPAWRLLPQLHGRSREQRYTKLADWQYIEECVQAASPMPLFGNGDILSFEDANRAMQTGVTGIMIARGALLKPWLFTEIKEQRHWDISSSERLDILRDFTNYGLEHWGSDTQGVEKTRRFLLEWLSFLCRYVPVGLLERLPQRINERPPYYLGRDYLETLMASQKAADWIRISEMLLGPVPPSFAFLPKHKANAYK

SEQ ID NO: 750396 - protein, 767 aa, Homo sapiens
MAEGTAEAPLENGGGGDSGAGALERGVAPIKRQYLTTKEQFHQFLEAKGQEKTCRETEVGDPAGNELAEPEAKRIRLEDGQTADGQTEEAAEPGEQLQTQKRARGQNKGRPHVKPTNYDKNRLCPSLIQESAAKCFFGDRCRFLHDVGRYLETKPADLGPRCVLFETFGRCPYGVTCRFAGAHLRPEGQNLVQEELAARGTQPPSIRNGLDKALQQQLRKREVRFERAEQALRRFSQGPTPAAAVPEGTAAEGAPRQENCGAQQVPAGPGTSTPPSSPVRTCGPLTDEDVVRLRPCEKKRLDIRGKLYLAPLTTCGNLPFRRICKRFGADVTCGEMAVCTNLLQGQMSEWALLKRHQCEDIFGVQLEGAFPDTMTKCAELLSRTVEVDFVDINVGCPIDLVYKKVAALDVCLGFPIWAEEALTQPAMSRWRVRGLGSSVALESLPFLQVGVSWWGPPGSRGEGSWVSPRPALPPPACLFQGGGCALMNRSTKFQQIVRGMNQVRPATSSHWLPNNSPGPCLPPPPTVSHHLPPSPTTPTTVLQVLDVPLTVKIRTGVQERVNLAHRLLPELRDWGVALVTLHGRSREQRYTKLADWQYIEECVQAASPMPLFGNGDILSFEDANRAMQTGVTGIMIARGALLKPWLFTEIKEQRHWDISSSERLDILRDFTNYGLEHWGSDTQGVEKTRRFLLEWLSFLCRYVPVGLLERLPQRINERPPYYLGRDYLETLMASQKAADWIRISEMLLGPVPPSFAFLPKHKANAYK

SEQ ID NO: 750397 - protein, 662 aa, Homo sapiens
AEGEKPPALHSGPFFRLQGGQRRYLRSCTLGPVTCAKDTTCMLGRYLTTKEQFHQFLEAKGQEKTCRETEVGDPAGNELAEPEAKRIRLEDGQTADGQTEEAAEPGEQLQTQKRARGQNKGRPHVKPTNYDKNRLCPSLIQESAAKCFFGDRCRFLHDVGRYLETKPADLGPRCVLFETFGRCPYGVTCRFAGAHLRPEGQNLVQEELAARGTQPPSIRNGLDKALQQQLRKREVRFERAEQALRRFSQGPTPAAAVPEGTAAEGAPRQENCGAQQVPAGPGTSTPPSSPVRTCGPLTDEDVVRLRPCEKKRLDIRGKLYLAPLTTCGNLPFRRICKRFGADVTCGEMAVCTNLLQGQMSEWALLKRHQCEDIFGVQLEGAFPDTMTKCAELLSRTVEVDFVDINVGCPIDLVYKKGGGCALMNRSTKFQQIVRGMNQVLDVPLTVKIRTGVQERVNLAHRLLPELRDWGVALVTLHGRSREQRYTKLADWQYIEECVQAASPMPLFGNGDILSFEDANRAMQTGVTGIMIARGALLKPWLFTEIKEQRHWDISSSERLDILRDFTNYGLEHWGSDTQGVEKTRRFLLEWLSFLCRYVPVGLLERLPQRINERPPYYLGRDYLETLMASQKAADWIRISEMLLGPVPPSFAFLPKHKANAYK

SEQ ID NO: 750398 - protein, 304 aa, Homo sapiens
MSEWALLKRHQCEDIFGVQLEGAFPDTMTKCAELLSRTVEVDFVDINVGCPIDLVYKKGGGCALMNRSTKFQQIVRGMNQVLDVPLTVKIRTGVQERVNLAHRLLPELRDWGVALVTLHGRSREQRYTKLADWQYIEECVQAASPMPLFGNGDILSFEDANRAMQTGVTGIMIARGALLKPWLFTEIKEQRHWDISSSERLDILRDFTNYGLEHWGSDTQGVEKTRRFLLEWLSFLCRYVPVGLLERLPQRINERPPYYLGRDYLETLMASQKAADWIRISEMLLGPVPPSFAFLPKHKANAYK

SEQ ID NO: 750399 - protein, 352 aa, Homo sapiens
MAEGTAEAPLENGGGGDSGAGALERGVAPIKRQYLTTKEQFHQFLEAKGQEKTCRETEVGDPAGNELAEPEAKRIRLEDGQTADGQTEEAAEPGEQLQTQKRARGQNKGRPHVKPTNYDKNRLCPSLIQESAAKCFFGDRCRFLHDVGRYLETKPADLGPRCVLFETFGRCPYGVTCRFAGAHLRPEGQNLPSLCSSGNGDILSFEDANRAMQTGVTGIMIARGALLKPWLFTEIKEQRHWDISSSERLDILRDFTNYGLEHWGSDTQGVEKTRRFLLEWLSFLCRYVPVGLLERLPQRINERPPYYLGRDYLETLMASQKAADWIRISEMLLGPVPPSFAFLPKHKANAYK

SEQ ID NO: 750400 - protein, 183 aa, Homo sapiens
MEAEATRSQAGWWLGPLIVTRPTVAPCSSRGSSRRSRSSGTGTSRRPSAWTSCGTSPTTAWSTGARTRRAWRRPGAFCSSGCPSCAGGHRGWLGWAARGPRLVRADSSLSCPPTRRRYVPVGLLERLPQRINERPPYYLGRDYLETLMASQKAADWIRISEMLLGPVPPSFAFLPKHKANAYK

SEQ ID NO: 750401 - protein, 109 aa, Homo sapiens
GLIGTCRGPAKEPDHLGQVCPRLWVEGRLQGLSSWGGGQAPLVCIFFPPAGHPWQTLPGPPHHGRTWVRWLVGWQGGSVVIPTGLSVCPHLLDCGAGAHIQGSAVCVCV

SEQ ID NO: 750402 - protein, 118 aa, Homo sapiens
MTSQSQGIHQLLQAEKRAKDKLEEAKKRKGKRLKQAKEEAMVEIDQYRMQRDKEFRLKQSKIMGSQNNLSDEIEEQTLGKIQELNGHYNKYMESVMNQLLSMVCDMKPEIHVNYRATN

SEQ ID NO: 750403 - protein, 106 aa, Homo sapiens
MTSQSQGIHQLLQAEKRAKDKLEEAKKRKGKRLKQAKEEAMVEIDQYRMQRDKEFRLKQSKIMGSQNNLSDEIEEQTLGKIQELNGHYNKYMESVMNQLLSMVPDM

SEQ ID NO: 750404 - protein, 141 aa, Homo sapiens
RPVSNLRCGNNLLCHLGKSFPNQEGVSFRKQKLLQLFLAEGDLRESGYLKYMGRLEKSPPGSSHWSWDQNVLSCLPSPVSTQEAGLGPWDMGWDCHSCLLTPTKPEAWCCCRRTEHLQGWARRANFLGPVSSIHILQRTPH

SEQ ID NO: 750405 - protein, 141 aa, Homo sapiens; identical to SEQ ID NO: 750404

SEQ ID NO: 750406 - protein, 123 aa, Homo sapiens
MPEFFVITVTLGHRTPYSLPSRLLKVPPDTQQEVPLRPSSDPGESQGSHSGGWRRVWRPTAPETLTRALSTPGRARAPGPRQPARSPRPTHRTQSAKAPATLSLSRTRKLPSRPARASSSSAA

SEQ ID NO: 750407 - protein, 458 aa, Homo sapiens
MSDLLSVFLHLLLLFKLVAPVTFRHHRYDDLVRTLYKVQNECPGITRVYSIGRSVEGRHLYVLEFSDHPGIHEPLEPEVKYVGNMHGNEALGRELMLQLSEFLCEEFRNRNQRIVQLIQDTRIHILPSMNPDGYEVAAAQGPNKPGYLVGRNNANGVDLNRNFPDLNTYIYYNEKYGGPNHHLPLPDNWKSQVEPETRAVIRWMHSFNFVLSANLHGGAVVANYPYDKSFEHRVRGVRRTASTPTPDDKLFQKLAKVYSYAHGWMFQGWNCGDYFPDGITNGASWYSLSKGMQDFNYLHTNCFEITLELSCDKFPPEEELQREWLGNREALIQFLEQVHQGIKGMVLDENYNNLANAVISVSGINHDVTSGDHGDYFRLLLPGIYTVSATAPGYDPETVTVTVGPAEPTLVNFHLKRSIPQVSPVRRAPSRRHGVRAKVQPQARKKEMEMRQLQRGPA

SEQ ID NO: 750408 - protein, 374 aa, Homo sapiens
MHGNEALGRELMLQLSEFLCEEFRNRNQRIVQLIQDTRIHILPSMNPDGYEVAAAQGPNKPGYLVGRNNANGVDLNRNFPDLNTYIYYNEKYGGPNHHLPLPDNWKSQVEPETRAVIRWMHSFNFVLSANLHGGAVVANYPYDKSFEHRVRGVRRTASTPTPDDKLFQKLAKVYSYAHGWMFQGWNCGDYFPDGITNGASWYSLSKGMQDFNYLHTNCFEITLELSCDKFPPEEELQREWLGNREALIQFLEQVHQGIKGMVLDENYNNLANAVISVSGINHDVTSGDHGDYFRLLLPGIYTVSATAPGYDPETVTVTVGPAEPTLVNFHLKRSIPQVSPVRRAPSRRHGVRAKVQPQARKKEMEMRQLQRGPA

SEQ ID NO: 750409 - protein, 74 aa, Homo sapiens
EFRNRNQRIVQLIQDTRIHILPSMNPDGYEVAAAQDEVQGRCRGEIKAFLGNKVQWTRFPLCPTVNITNVKSKR

SEQ ID NO: 750410 - protein, 41 aa, Homo sapiens
STIKFQMKKVLCLAVAVGHVKMTDDELVYNIHLAVNFLVSL

SEQ ID NO: 750411 - protein, 72 aa, Homo sapiens
AGLLRDGFSTSLPFKASISATAASAWFLSIPSTFPPQGLGACSSSASLLVYAWLVLISFEFGRGAPHERGLP

SEQ ID NO: 750412 - protein, 460 aa, Homo sapiens
MAESENRKELSESSQEEAGNQIMVEGLGEHLERGEDAAAGLGDDGKCGEEAAAGLGEEGENGEDTAAGSGEDGKKGGDTDEDSEADRPKGLIGYVLDTDFVESLPVKVKYRVLALKKLQTRAANLESKFLREFHDIERKFAEMYQPLLEKRRQIINAIYEPTEEECEYKSDSEDCDDEEMCHEEMYGNEEGMVHEYVDEDDGYEDYYYDYAVEEEEEEEEEDDIEATGEENKEEEDPKGIPDFWLTVLKNVDTLTPLIKKYDEPILKLLTDIKVKLSDPGEPLSFTLEFHFKPNEYFKNELLTKTYVLKSKLAYYDPHPYRGTAIEYSTGCEIDWNEGKNVTLKTIKKKQKHRIWGTIRTVTEDFPKDSFFNFFSPHGITSNGRDGNDDFLLGHNLRTYIIPRSVLFFSGDALESQQEGVVREVNDAIYDKIIYDNWMAAIEEVKACCKNLEALVEDIDR

SEQ ID NO: 750413 - protein, 460 aa, Homo sapiens; identical to SEQ ID NO: 750412

SEQ ID NO: 750414 - protein, 215 aa, Homo sapiens
MAESENRKELSESSQEEAGNQIMVEGLGEHLERGEDAAAGLGDDGKCGEEAAAGLGEEGENGEDTAAGSGEDGKKGGDTDEDSEADRPKGLIGYVLDTDFVESLPVKVKYRVLALKKLQTRAANLESKFLREFHDIERKFAEMYQPLLEKRRQIINAIYEPTEEECEYKSDSEDCDDEEMCHEEMYGNEEGMVHEYVDEDDGYEDYYYDYAVEEV

SEQ ID NO: 750415 - protein, 74 aa, Homo sapiens
VVREGYNQHFRGMGPIAYLASCRIRHVESQQEGVVREVNDAIYDKIIYDNWMAAIEEVKACCKNLEALVEDIDR

SEQ ID NO: 750416 - protein, 364 aa, Homo sapiens
GPRLPRVRATELRRPWVSSAKGLFTECFWYLQPRWGSDRGSGIGLHNYSRARTLLGWKELERPLQAVTGSWCWHWLRLSHTHTRTHTHTHTRTGTPLVAFTVFTFRLKAGSAGDMRGTPKTHLLAFSLLCLLSKVRTQLCPTPCTCPWPPPRCPLGVPLVLDGCGCCRVCARRLGEPCDQLHVCDASQGLVCQPGAGPGGRGALCLLAEDDSSCEVNGRLYREGETFQPHCSIRCRCEDGGFTCVPLCSEDVRLPSWDCPHPRRVEVLGKCCPEWVCGQGGGLGTQPLPAQGPQFSGLVSSLPPGVPCPEWSTAWGPCSTTCGLGMATRVSNQNRFCRLETQRRLCLSRPCPPSRGRSPQNSAF

SEQ ID NO: 750417 - protein, 364 aa, Homo sapiens; identical to SEQ ID NO: 750416

SEQ ID NO: 750418 - protein, 250 aa, Homo sapiens
MRGTPKTHLLAFSLLCLLSKVRTQLCPTPCTCPWPPPRCPLGVPLVLDGCGCCRVCARRLGEPCDQLHVCDASQGLVCQPGAGPGGRGALCLLAEDDSSCEVNGRLYREGETFQPHCSIRCRCEDGGFTCVPLCSEDVRLPSWDCPHPRRVEVLGKCCPEWVCGQGGGLGTQPLPAQGPQFSGLVSSLPPGVPCPEWSTAWGPCSTTCGLGMATRVSNQNRFCRLETQRRLCLSRPCPPSRGRSPQNSAF

SEQ ID NO: 750419 - protein, 242 aa, Homo sapiens
MPRGFTWLRYLGIFLGVALGNEPLEMWPLTQNEECTVTGFLRDKLQYRSRLQYMKHYFPINYKISVPYEGVFRIANVTRLQRAQVSERELRYLWVLVSLSATESVQDVLLEGHPSWKYLQEVQTLLLNVQQGLTDVEVSPKVESVLSLLNAPGPNLKLVRPKALLDNCFRVMELLYCSCCKQSSVLNWQDCEVPSPQSCSPEPSLQYAATQLYPPPPWSPSSPPHSTGSVRPVRAQGEGLLP

SEQ ID NO: 750420 - protein, 242 aa, Homo sapiens; identical to SEQ ID NO: 750419

SEQ ID NO: 750421 - protein, 242 aa, Homo sapiens; identical to SEQ ID NO: 750419

SEQ ID NO: 750422 - protein, 242 aa, Homo sapiens; identical to SEQ ID NO: 750419

SEQ ID NO: 750423 - protein, 143 aa, Homo sapiens
  misc_feature (135)..(135): Xaa can be any naturally occurring amino acid
  misc_feature (141)..(141): Xaa can be any naturally occurring amino acid
MTTSRCSHLPEVLPDCTSSAAPVVKTVEDCGSLVNGQPQYVMQVSAKDGQLLSTVVRTLATQSPFNDRPMCRICHEGSSQEDLLSPCECTGTLGTIHRSCLEHWLSSSNTSYCELCHFRFAVERKPRPLVEWLEXTLGPPXIE

SEQ ID NO: 750424 - protein, 253 aa, Homo sapiens
MTTSRCSHLPEVLPDCTSSAAPVVKTVEDCGSLVNGQPQYVMQVSAKDGQLLSTVVRTLATQSPFNDRPMCRICHEGSSQEDLLSPCECTGTLGTIHRSCLEHWLSSSNTSYCELCHFRFAVERKPRPLVEWLRNPGPQHEKRTLFGDMVCFLFITPLATISGWLCLRGAVDHLHFSSRLEAVGLIALTVALFTIYLFWTLVSFRYHCRLYNEWRRTNQRVILLIPKSVNVPSNQPSLLGLHSVKRNSKETVV

SEQ ID NO: 750425 - protein, 253 aa, Homo sapiens; identical to SEQ ID NO: 750424

SEQ ID NO: 750426 - protein, 148 aa, Homo sapiens
CGEKTGTGEGKQRLGCSDSLNYPPLQWLRNPGPQHEKRTLFGDMVCFLFITPLATISGWLCLRGAVDHLHFSSRLEAVGLIALTVALFTIYLFWTLVSFRYHCRLYNEWRRTNQRVILLIPKSVNVPSNQPSLLGLHSVKRNSKETVV

SEQ ID NO: 750427 - protein, 105 aa, Homo sapiens
MVCFLFITPLATISGWLCLRGAVDHLHFSSRLEAVGLIALTVALFTIYLFWTLVSFRYHCRLYNEWRRTNQRVILLIPKSVNVPSNQPSLLGLHSVKRNSKETVV

SEQ ID NO: 750428 - protein, 253 aa, Homo sapiens; identical to SEQ ID NO: 750424

SEQ ID NO: 750429 - protein, 253 aa, Homo sapiens; identical to SEQ ID NO: 750424

SEQ ID NO: 750430 - protein, 134 aa, Homo sapiens
  misc_feature (8)..(8): Xaa can be any naturally occurring amino acid
LKLRASVXKTNKWLRNPGPQHEKRTLFGDMVCFLFITPLATISGWLCLRGAVDHLHFSSRLEAVGLIALTVALFTIYLFWTLVSFRYHCRLYNEWRRTNQRVILLIPKSVNVPSNQPSLLGLHSVKRNSKETVV

SEQ ID NO: 750431 - protein, 487 aa, Homo sapiens
FQAVRLRVTPERSGSPSSSDVSIPARSLRRGRRAEAEWDRCGSFWGFLSTKMDNSSDPPGILESWRTQKTAEVTAEDATPHGSPPRATVSQVPAPSSAQASCWPPAVSATRWVGRRRPEAPVSPPLQVARRAGVRTGTCTELWEVCGAGVLFAEIARSRSERFPESPGFHLWLGDPVRNSSFLGPQLPPGGVPMGQLSSAPPAGARYWRVDPRCGWLLAPQRYARGGSEGSWSLSANGLLGPPPPSRAARVPLQRVPQRPPAATALRNNQLPRRRRVPPACPRPQATGRRLRGGPSATTTGCRLRQSWADDAPGLAPPLAAAPPPLQSLVGLPCFPPHSLSRSVNCQRAVGDCVAAAAARLAALPLRCPPEPMCPGPLGREQPPTGGNLALRTAAGTSVCYRDSARTMEILYECGTVGLIALTVALFTIYLFWTLVSFRYHCRLYNEWRRTNQRVILLIPKSVNVPSNQPSLLGLHSVKRNSKETVV

SEQ ID NO: 750432 - protein, 99 aa, Homo sapiens
QNRPDLADRWYKIWQGPCRASHRFSGAGCKLKLQALLSLEPSGTAQFAHLPNRPWVRDTDAGVFKSLGLEVQRHQLSPPLSSDIPRLPFPLSVSQFSHL

SEQ ID NO: 750433 - protein, 270 aa, Homo sapiens
MNPFQKNESKETLFSPVSIEEVPPRPPSPPKKPSPTICGSNYPLSIAFIVVNEFCERFSYYGMKAVLILYFLYFLHWNEDTSTSIYHAFSSLCYFTPILGAAIADSWLGKFKVLSLIGLSLIALGTGGIKPCVAAFGGDQFEEKHAEERTRYFSVFYLSINAGSLISTFITPMLRGDVQCFGEDCYALAFGVPGLLMVIALVRVANGNARIYNKTPPEGHHSWLKFSNCLWSLITQSLSRNRSETSKATRMANTGGAKFQSSHQAVTPDK

SEQ ID NO: 750434 - protein, 729 aa, Homo sapiens
MNPFQKNESKETLFSPVSIEEVPPRPPSPPKKPSPTICGSNYPLSIAFIVVNEFCERFSYYGMKAVLILYFLYFLHWNEDTSTSIYHAFSSLCYFTPILGAAIADSWLGKFKTIIYLSLVYVLGHVIKSLGALPILGGQVVHTVLSLIGLSLIALGTGGIKPCVAAFGGDQFEEKHAEERTRYFSVFYLSINAGSLISTFITPMLRGDVQCFGEDCYALAFGVPGLLMVIALVVFAMGSKIYNKPPPEGNIVAQVFKCIWFAISNRFKNRSGDIPKRQHWLDWAAEKYPKQLIMDVKALTRVLFLYIPLPMFWALLDQQGSRWTLQAIRMNRNLGFFVLQPDQMQVLNPLLVLIFIPLFDFVIYRLVSKCGINFSSLRKMAVGMILACLAFAVAAAVEIKINEMAPAQPGPQEVFLQVLNLADDEVKVTVVGNENNSLLIESIKSFQKTPHYSKLHLKTKSQDFHFHLKYHNLSLYTEHSVQEKNWYSLVIREDGNSISSMMVKDTESRTTNGMTTVRFVNTLHKDVNISLSTDTSLNVGEDYGVSAYRTVQRGEYPAVHCRTEDKNFSLNLGLLDFGAAYLFVITNNTNQGLQAWKIEDIPANKMSIAWQLPQYALVTAGEVMFSVTGLEFSYSQAPSSMKSVLQAAWLLTIAVGNIIVLVVAQFSGLVQWAEFILFSCLLLVICLIFSIMGYYYVPVKTEDMRGPADKHIPHIQGNMIKLETKKTKL

SEQ ID NO: 750435 - protein, 729 aa, Homo sapiens; identical to SEQ ID NO: 750434

SEQ ID NO: 750436 - protein, 729 aa, Homo sapiens; identical to SEQ ID NO: 750434

SEQ ID NO: 750437 - protein, 375 aa, Homo sapiens [sequence omitted]

SEQ ID NO: 750438 - protein, 190 aa, Homo sapiens
FPSLDIYSNLNSSCSRYPAVHCRTEDKNFSLNLGLLDFGAAYLFVITNNTNQGLQAWKIEDIPANKMSIAWQLPQYALVTAGEVMFSVTGLEFSYSQAPSSMKSVLQAAWLLTIAVGNIIVLVVAQFSGLVQWAEFILFSCLLLVICLIFSIMGYYYVPVKTEDMRGPADKHIPHIQGNMIKLETKKTKL

SEQ ID NO: 750439 - protein, 69 aa, Homo sapiens
PYSSHIYFPLQWAEFILFSCLLLVICLIFSIMGYYYVPVKTEDMRGPADKHIPHIQGNMIKLETKKTKL

SEQ ID NO: 750440 - protein, 713 aa, Homo sapiens
  misc_feature (4)..(4): Xaa can be any naturally occurring amino acid
  misc_feature (6)..(6): Xaa can be any naturally occurring amino acid
KKEXKXKKGKKKKIKKIFFTICGSNYPLSIAFIVVNEFCERFSYYGMKAVLILYFLYFLHWNEDTSTSIYHAFSSLCYFTPILGAAIADSWLGKFKTIIYLSLVYVLGHVIKSLGALPILGGQVVHTVLSLIGLSLIALGTGGIKPCVAAFGGDQFEEKHAEERTRYFSVFYLSINAGSLISTFITPMLRGDVQCFGEDCYALAFGVPGLLMVIALVVFAMGSKIYNKPPPEGNIVAQVFKCIWFAISNRFKNRSGDIPKRQHWLDWAAEKYPKQLIMDVKALTRVLFLYIPLPMFWALLDQQGSRWTLQAIRMNRNLGFFVLQPDQMQVLNPLLVLIFIPLFDFVIYRLVSKCGINFSSLRKMAVGMILACLAFAVAAAVEIKINEMAPAQPGPQEVFLQVLNLADDEVKVTVVGNENNSLLIESIKSFQKTPHYSKLHLKTKSQDFHFHLKYHNLSLYTEHSVQEKNWYSLVIREDGNSISSMMVKDTESRTTNGMTTVRFVNTLHKDVNISLSTDTSLNVGEDYGVSAYRTVQRGEYPAVHCRTEDKNFSLNLGLLDFGAAYLFVITNNTNQGLQAWKIEDIPANKMSIAWQLPQYALVTAGEVMFSVTGLEFSYSQAPSSMKSVLQAAWLLTIAVGNIIVLVVAQFSGLVQWAEFILFSCLLLVICLIFSIMGYYYVPVKTEDMRGPADKHIPHIQGNMIKLETKKTKL

SEQ ID NO: 750441 - protein, 571 aa, Homo sapiens
  misc_feature (4)..(4): Xaa can be any naturally occurring amino acid
  misc_feature (6)..(6): Xaa can be any naturally occurring amino acid
KKEXKXKKGKKKKIKKIFFTICGSNYPLSIAFIVVNEFCERFSYYGMKAVLILYFLYFLHWNEDTSTSIYHAFSSLCYFTPILGAAIADSWLGKFKTIIYLSLVYVLGHVIKSLGALPILGGQVVHTVLSLIGLSLIALGTGGIKPCVAAFGGDQFEEKHAEERTRYFSVFYLSINAGSLISTFITPMLRGDVQCFGEDCYALAFGVPGLLMVIALDHLGKWLLVMILACLAFAVAAAVEIKINEMAPAQPGPQEVFLQVLNLADDEVKVTVVGNENNSLLIESIKSFQKTPHYSKLHLKTKSQDFHFHLKYHNLSLYTEHSVQEKNWYSLVIREDGNSISSMMVKDTESRTTNGMTTVRFVNTLHKDVNISLSTDTSLNVGEDYGVSAYRTVQRGEYPAVHCRTEDKNFSLNLGLLDFGAAYLFVITNNTNQGLQAWKIEDIPANKMSIAWQLPQYALVTAGEVMFSVTGLEFSYSQAPSSMKSVLQAAWLLTIAVGNIIVLVVAQFSGLVQWAEFILFSCLLLVICLIFSIMGYYYVPVKTEDMRGPADKHIPHIQGNMIKLETKKTKL

SEQ ID NO: 750442 - protein, 350 aa, Homo sapiens
MAVGMILACLAFAVAAAVEIKINEMAPAQPGPQEVFLQVLNLADDEVKVTVVGNENNSLLIESIKSFQKTPHYSKLHLKTKSQDFHFHLKYHNLSLYTEHSVQEKNWYSLVIREDGNSISSMMVKDTESRTTNGMTTVRFVNTLHKDVNISLSTDTSLNVGEDYGVSAYRTVQRGEYPAVHCRTEDKNFSLNLGLLDFGAAYLFVITNNTNQGLQAWKIEDIPANKMSIAWQLPQYALVTAGEVMFSVTGLEFSYSQAPSSMKSVLQAAWLLTIAVGNIIVLVVAQFSGLVQWAEFILFSCLLLVICLIFSIMGYYYVPVKTEDMRGPADKHIPHIQGNMIKLETKKTKL

SEQ ID NO: 750443 - protein, 76 aa, Homo sapiens
GTKGSRLQSHGRGYAGRGGDTVVRRDCDPRTGKSKKKSAPSILSNGRIGQVGKFKNGTLILSPVDIKKINSSRVAK

SEQ ID NO: 750444 - protein, 302 aa, Homo sapiens
PEAGVQRGRMRVDSSADPTMSQEQGPGSSTPPSSPTLLDALLQNLYDFGGTEGETEQKKIIKKRENKKRDVMASAALAAEPSPLPGSLIRGQRKSASSFFKELREERHCAPSGTPTGPEILAAAVPPSSLKNNREQVEVVEFHSNKKRKLTPDHNKNTKQANPSVLERDVDTQEFNLEKARLEVHRFGITGYGKGKERILEQERAIMLGAKPPKKSYVNYKVLQEQIKEKKAAKEEEKRLAQETDIFKKKKRKGQEDRKSKKKSAPSILSNGRIGQVGKFKNGTLILSPVDIKKINSSRVAK

SEQ ID NO: 750445 - protein, 248 aa, Homo sapiens
PEAGVQRGRMRVDSSADPTMSQEQGPGSSTPPSSPTLLDALLQNLYDFGGTEGETEQKKIIKKRENKKRDVMASAALAAEPSPLPGSLIRGQRKSASSFFKELREERHCAPSGTPTGPEILAAAVPPSSLKNNREQVEVVEFHSNKKRKLTPDHNKNTKQANPSVLERDVDTQEFNLEKARLEVHRFGITGYGKGKERILEQERAIMLGAKPPKKSYVNYKVLQEQIKEKKAAKEEEKRLECLMLRNL

SEQ ID NO: 750446 - protein, 302 aa, Homo sapiens; identical to SEQ ID NO: 750444

SEQ ID NO: 750447 - protein, 250 aa, Homo sapiens
PEAGVQRGRMRVDSSADPTMSQEQGPGSSTPPSSPTLLDALLQNLYDFGGTEGETEQKKIIKKRENKKRDVMASAALAAEPSPLPGSLIRGQRKSASSFFKELREERHCAPSGTPTGPEILAAAVPPSSLKNNREQVEVVEFHSNKKRKLTPDHNKNTKQANPSVLERDVDTQEFNLEKARLEVHRFGITGYGKGKERILEQERAIMLGAKPPKKSYVNYKVLQEQIKEKKAAKEEEKRLVGVMVCPLFN

SEQ ID NO: 750448 - protein, 53 aa, Homo sapiens
CIFIRTEPSQCPLSVDVDVFIIPGCSNKVASTEWPINNRNLFLTVLEARSLRS

SEQ ID NO: 750449 - protein, 67 aa, Homo sapiens
QCVLEALPTLIVVKSEPAYTVQAHHVAFRTLLSKPAQHRNACSLFPLPVLSDLYQRPVLADSDCVLL

SEQ ID NO: 750450 - protein, 113 aa, Homo sapiens
RRSLALSLRLECSGAIAAHCNFYLPGSSNSLASISRVAGIIGAHQHAQLIFVFLVETGFHHVGQVGPEFLTSGDPPNQASQSAGITGVSHHARPVFSTKCFILQYVKVIKGAS

SEQ ID NO: 750451 - protein, 377 aa, Homo sapiens
MRGQRSLLLGPARLCLRLLLLLGYRRRCPPLLRGLVQRWRYGKVCLRSLLYNSFGGSDTAVDAAFEPVYWLVDNVIRWFGVVFVVLVIVLTGSIVAIAYLCVLPLILRTYSVPRLCWHFFYSHWNLILIVFHYYQAITTPPGYPPQGRNDIATVSICKKCIYPKPARTHHCSICNRCVLKMDHHCPWLNNCVGHYNHRYFFSFCFFMTLGCVYCSYGSWDLFREAYAAIEKMKQLDKNKLQAVANQTYHQTPPPTFSFRERMTHKSLVYLWFLCSSVALALGALTVWHAVLISRGETSIERHINKKERRRLQAKGRVFRNPYNYGCLDNWKVFLGVDTGRHWLTRVLLPSSHLPHGNGMSWEPPPWVTAHSASVMAV

SEQ ID NO: 750452 - protein, 246 aa, Homo sapiens
MRGQRSLLLGPARLCLRLLLLLGYRRRCPPLLRGLVQRWRYGKVCLRSLLYNSFGGSDTAVDAAFEPVYWLVDNVIRWFGVVFVVLVIVLTGSIVAIAYLCVLPLILRTYSVPRLCWHFFYSHWNLILIVFHYYQAITTPPGYPPQGRNDIATVSICKKCIYPKPARTHHCSICNRCVLKMDHHCPWLNNCVGHYNHRYFFSFCFFMTLGCVYCSYGSWDLPEGMCLEMKGEKITGCTILNTRFEK

SEQ ID NO: 750453 - protein, 361 aa, Homo sapiens
MRGQRSLLLGPARLCLRLLLLLGYRRRCPPLLRGLVQRWRYGKVCLRSLLYNSFGGSDTAVDAAFEPVYWLVDNVIRWFGVVFVVLVIVLTGSIVAIAYLCVLPLILRTYSVPRLCWHFFYSHWNLILIVFHYYQAITTPPGYPPQGRNDIATVSICKKCIYPKPARTHHCSICNRCVLKMDHHCPWLNNCVGHYNHRYFFSFCFFMTLGCVYCSYGSWDLFREAYAAIETYHQTPPPTFSFRERMTHKSLVYLWFLCSSVALALGALTVWHAVLISRGETSIERHINKKERRRLQAKGRVFRNPYNYGCLDNWKVFLGVDTGRHWLTRVLLPSSHLPHGNGMSWEPPPWVTAHSASVMAV

SEQ ID NO: 750454 - protein, 359 aa, Homo sapiens
MRGQRSLLLGPARLCLRLLLLLGYRRRCPPLLRGLVQRWRYGKVCLRSLLYNSFGGSDTAVDAAFEPVYWLVDNVIRWFGVVFVVLVIVLTGSIVAIAYLCVLPLILRTYSVPRLCWHFFYSHWNLILIVFHYYQAITTPPGYPPQGRNDIATVSICKKCIYPKPARTHHCSICNRCVLKMDHHCPWLNNCVGHYNHRYFFSFCFFMTLGCVYCSYGSWDLFREAYAAIEKMKQLDKNKLQAVANQTYHQTPPPTFSFRERMTHKSLVYLWFLCSRGETSIERHINKKERRRLQAKGRVFRNPYNYGCLDNWKVFLGVDTGRHWLTRVLLPSSHLPHGNGMSWEPPPWVTAHSASVMAV

SEQ ID NO: 750455 - protein, 361 aa, Homo sapiens; identical to SEQ ID NO: 750453

SEQ ID NO: 750456 - protein, 368 aa, Homo sapiens
MRGQRSLLLGPARLCLRLLLLLGYRRRCPPLLRGLVQRWRYGKVCLRSLLYNSFGGSDTAVDAAFEPVYWLVDNVIRWFGVVFVVLVIVLTGSIVAIAYLCVLPLILRTYSVPRLCWHFFYSHWNLILIVFHYYQAITTPPGYPPQGRNDIATVSICKKCIYPKPARTHHCSICNRCVLKMDHHCPWLNNCVGHYNHRYFFSFCFFMTLGCVYCSYGSWDLFREAYAAIETYHQTPPPTFSFRERMTHKSLVYLWFLCSLRPSFLSSVALALGALTVWHAVLISRGETSIERHINKKERRRLQAKGRVFRNPYNYGCLDNWKVFLGVDTGRHWLTRVLLPSSHLPHGNGMSWEPPPWVTAHSASVMAV

SEQ ID NO: 750457 - protein, 322 aa, Homo sapiens
MRGQRSLLLGPARLCLRLLLLLGYRRRCPPLLRGLVQRWRYGKVCLRSLLYNSFGGSDTAVDAAFEPVYWLVDNVIRWFGVVFVVLVIVLTGSIVAIAYLCVLPLILRTYSVPRLCWHFFYSHWNLILIVFHYYQAITTPPGYPPQGRNDIATVSICKKCIYPKPARTHHCSICNSYGSWDLFREAYAAIETYHQTPPPTFSFRERMTHKSLVYLWFLCSSVALALGALTVWHAVLISRGETSIERHINKKERRRLQAKGRVFRNPYNYGCLDNWKVFLGVDTGRHWLTRVLLPSSHLPHGNGMSWEPPPWVTAHSASVMAV

SEQ ID NO: 750458 - protein, 377 aa, Homo sapiens; identical to SEQ ID NO: 750451

SEQ ID NO: 750459 - protein, 440 aa, Homo sapiens
QPHIRLSTRPRVNRPRAGPGPLPGAAGGGPWWFGLSRARPGRRVGGGGSERRQRLRGSVWLRTMRGQRSLLLGPARLCLRLLLLLGYRRRCPPLLRGLVQRWRYGKVCLRSLLYNSFGGSDTAVDAAFEPVYWLVDNVIRWFGVVFVVLVIVLTGSIVAIAYLCVLPLILRTYSVPRLCWHFFYSHWNLILIVFHYYQAITTPPGYPPQGRNDIATVSICKKCIYPKPARTHHCSICNRCVLKMDHHCPWLNNCVGHYNHRYFFSFCFFMTLGCVYCSYGSWDLFREAYAAIEKMKQLDKNKLQAVANQTYHQTPPPTFSFRERMTHKSLVYLWFLCSSVALALGALTVWHAVLISRGETSIERHINKKERRRLQAKGRVFRNPYNYGCLDNWKVFLGVDTGRHWLTRVLLPSSHLPHGNGMSWEPPPWVTAHSASVMAV

SEQ ID NO: 750460 - protein, 307 aa, Homo sapiens
MRGQRSLLLGPARLCLRLLLLLGYRRRCPPLLRGLVQRWRYGKVCLRSLLYNSFGGSDTAVDAAFEPVYWLVDNVIRWFGVVFVVLVIVLTGSIVAIAYLCVLPLILRTYSVPRLCWHFFYSHWNLILIVFHYYQAITTPPGYPPQGRNDIATVSICKKCIYPKPARTHHCSICNRCVLKMDHHCHILPPALSKLPTSLRPSFLSSVALALGALTVWHAVLISRGETSIERHINKKERRRLQAKGRVFRNPYNYGCLDNWKVFLGVDTGRHWLTRVLLPSSHLPHGNGMSWEPPPWVTAHSASVMAV

SEQ ID NO: 750461 - protein, 313 aa, Homo sapiens
ASRGRVVNGRCAVDAAFEPVYWLVDNVIRWFGVVFVVLVIVLTGSIVAIAYLCVLPLILRTYSVPRLCWHFFYSHWNLILIVFHYYQAITTPPGYPPQGRNDIATVSICKKCIYPKPARTHHCSICNRCVLKMDHHCPWLNNCVGHYNHRYFFSFCFFMTLGCVYCSYGSWDLFREAYAAIETYHQTPPPTFSFRERMTHKSLVYLWFLCSSVALALGALTVWHAVLISRGETSIERHINKKERRRLQAKGRVFRNPYNYGCLDNWKVFLGVDTGRHWLTRVLLPSSHLPHGNGMSWEPPPWVTAHSASVMAV

SEQ ID NO: 750462 - protein, 314 aa, Homo sapiens
MLGRGRFYRPREARGSVGSLLYNSFGGSDTAVDAAFEPVYWLVDNVIRWFGVVFVVLVIVLTGSIVAIAYLCVLPLILRTYSVPRLCWHFFYSHWNLILIVFHYYQAITTPPGYPPQGRNDIATVSICKKCIYPKPARTHHCSICNRCVLKMDHHCPWLNNCVGHYNHRYFFSFCFFMTLGCVYCSYGSWDLFREAYAAIETYHQTPPPTFSFRERMTHKSLVYLWFLCSRGETSIERHINKKERRRLQAKGRVFRNPYNYGCLDNWKVFLGVDTGRHWLTRVLLPSSHLPHGNGMSWEPPPWVTAHSASVMAV

SEQ ID NO: 750463 - protein, 324 aa, Homo sapiens
MRGQRSLLLGPARLCLRLLLLLGYRRRCPPLLRGLVQRWRYGKVCLRSLLYNSFGGSDTAVDAAFEPVYWLVDNVIRWFGVVFVVLVIVLTGSIVAIAYLCVLPLILRTYSVPRLCWHFFYSHWNLILIVFHYYQAITTPPGYPPQGRNDIATVSICKKCIYPKPARTHHCSICNRCVLKMDHHCPWLNNCVGHYNHRYFFSFCFFMTLGCVYCSYGSWDLFREAYAAIETYHQTPPPTFSFRERMTHKSLVYLWFLCSSVALALGALTVWHAVLISRGETSIERHINKKERRRLQAKGRVFRNPYNYGCLDNWKVFLGVDTGR

SEQ ID NO: 750464 - protein, 71 aa, Homo sapiens
QDEVKGKPAVERRASFNYGCLDNWKVFLGVDTGRHWLTRVLLPSSHLPHGNGMSWEPPPWVTAHSASVMAV

SEQ ID NO: 750465 - protein, 69 aa, Homo sapiens
QPHIRLSTRPRVNRPRAGPGPLPGAAGGGPWWFGLSRARPGRRVGGGGSERRQRLRGSVWLTGESAGGR

SEQ ID NO: 750466 - protein, 361 aa, Homo sapiens; identical to SEQ ID NO: 750453

SEQ ID NO: 750467 - protein, 361 aa, Homo sapiens; identical to SEQ ID NO: 750453

SEQ ID NO: 750468 - protein, 296 aa, Homo sapiens
MRGQRSLLLGPARLCLRLLLLLGYRRRCPPLLRGLVQRWRYGKVCLRSLLYNSFGGSDTAVDAAFEPVYWLVDNVIRWFGVGRNDIATVSICKKCIYPKPARTHHCSICNRCVLKMDHHCPWLNNCVGHYNHRYFFSFCFFMTLGCVYCSYGSWDLFREAYAAIETYHQTPPPTFSFRERMTHKSLVYLWFLCSSVALALGALTVWHAVLISRGETSIERHINKKERRRLQAKGRVFRNPYNYGCLDNWKVFLGVDTGRHWLTRVLLPSSHLPHGNGMSWEPPPWVTAHSASVMAV

SEQ ID NO: 750469 - protein, 343 aa, Homo sapiens
MRGQRSLLLGPARLCLRLLLLLGYRRRCPPLLRGLVQRWRYGKVCLRSLLYNSFGGSDTAVDAAFEPVYWLVDNVIRWFGVVFVVLVIVLTGSIVAIAYLCVLPLILRTYSVPRLCWHFFYSHWNLILIVFHYYQAITTPPGYPPQGRNDIATVSICKKCIYPKPARTHHCSICNRCVLKMDHHCPWLNNCVGHYNHRYFFSFCFFMTLGCVYCSYGSWDLFREAYAAIETYHQTPPPTFSFRERMTHKSLVYLWFLCSRGETSIERHINKKERRRLQAKGRVFRNPYNYGCLDNWKVFLGVDTGRHWLTRVLLPSSHLPHGNGMSWEPPPWVTAHSASVMAV

SEQ ID NO: 750470 - protein, 377 aa, Homo sapiens; identical to SEQ ID NO: 750451

SEQ ID NO: 750471 - protein, 377 aa, Homo sapiens; identical to SEQ ID NO: 750451

SEQ ID NO: 750472 - protein, 333 aa, Homo sapiens
VSLGRGRFYRPREARGSVGSLLYNSFGGSDTAVDAAFEPVYWLVDNVIRWFGVVFVVLVIVLTGSIVAIAYLCVLPLILRTYSVPRLCWHFFYSHWNLILIVFHYYQAITTPPGYPPQGRNDIATVSICKKCIYPKPARTHHCSICNRCVLKMDHHCPWLNNCVGHYNHRYFFSFCFFMTLGCVYCSYGSWDLFREAYAAIETYHQTPPPTFSFRERMTHKSLVYLWFLCSSVALALGALTVWHAVLISRGETSIERHINKKERRRLQAKGRVFRNPYNYGCLDNWKVFLGVDTGRHWLTRVLLPSSHLPHGNGMSWEPPPWVTAHSASVMAV

SEQ ID NO: 750473 - protein, 361 aa, Homo sapiens; identical to SEQ ID NO: 750453

SEQ ID NO: 750474 - protein, 179 aa, Homo sapiens
MDHHCPWLNNCVGHYNHRYFFSFCFFMTLGCVYCSYGSWDLFREAYAAIEKMKQLDKNKLQAVANQTYHQTPPPTFSFRERMTHKSLVYLWFLCSRGETSIERHINKKERRRLQAKGRVFRNPYNYGCLDNWKVFLGVDTGRHWLTRVLLPSSHLPHGNGMSWEPPPWVTAHSASVMAV

SEQ ID NO: 750475 - protein, 194 aa, Homo sapiens
MRGQRSLLLGPARLCLRLLLLLGYRRRCPPLLRGLVQRWRYGKVCLRSLLYNSFGGSDTAVDAAFEPVYWLVDNVIRWFGVVFVVLVIVLTGSIVAIAYLCVLPLILRTYSVPRLCWHFFYSHWNLILIVFHYYQAITTPPGYPPQGRNDIATVSICKKCIYPKPARTHHCSICNSQLARQFWQTRVVVSRKNG

SEQ ID NO: 750476 - protein, 138 aa, Homo sapiens
NETFFCPLRSSRLRALLQVYGSIQVNPKKSVCGGVHTTNYYGEEDKEDMDRRRMALRPGSRRPTAFFFHSRWLVPNLLAFFLGLSGAGPIHLPMPWPNGRRHRVLDPHTQLSTHEAPGRWKPVAPRRMKACPQVLLEW

SEQ ID NO: 750477 - protein, 126 aa, Homo sapiens
TKLNIFCTGSIQVNPKKSVCGGVHTTNYYGEEDKEDMDRRRMALRPGSRRPTAFFFHSRWLVPNLLAFFLGLSGAGPIHLPMPWPNGRRHRVLDPHTQLSTHEAPGRWKPVAPRRMKACPQVLLEW

SEQ ID NO: 750478 - protein, 538 aa, Homo sapiens
MRHVQAEPSPSSEPEAGPSQPPVRQGALQGGLLMGYSPAGGATSPGVYQVSIFSPPAGTSEPHRALKRQAPSTEGPRELKRGPGLGAREGLPPEEPSTVGLLGPEGPGLGLGVASQHFSHRGLCVVEQRSSVTSSWTSGAWSPPCPPSNASCNTLHTRDWASPDPGGQGSLGESPGPAPPGQLHTLDTDLHSLAQIGGKSPVAGVGNGGSLWPRESPGTANGHSPEHTPPGPGPPGPCPTKRRLLPAGEAPDVSSEEEGPAPRRRRGSLGHPTAANSSDAKATPFWSHLLPGPKEPVLDPTDCGPMGRRLKGARRLKLSPLRSLRKGPGLLSPPSASPVPTPAVSRTLLGNFEESLLRGRFAPSGHIEGFTAEIGASGSYCPQHVTLPVTVTFFDVSEQNAPAPFLGIVDLNPLGRKGYSVPKVGTVQVTLFNPNQTVVKMFLVTFDFSDMPAAHMTFLRHRLFLVPVGEEGNANPTHRLLCYLLHLRFRSSRSGRLSLHGDIRLLFSRRSLELDTGLPYELQAVTEAPHNPRYSPLP

SEQ ID NO: 750479 - protein, 538 aa, Homo sapiens; identical to SEQ ID NO: 750478

SEQ ID NO: 750480 - protein, 476 aa, Homo sapiens
MRHVQAEPSPSSEPEAGPSQPPVRQGALQGGLLMGYSPAGGATSPGVYQVSIFSPPAGTSEPHRALKRQAPSTEGPRELKRGPGLGAREGLPPEEPSTVGLLGPEGPGLGLGVASQHFSHRGLCVVEQRSSVTSSWTSGAWSPPCPPSNASCNTLHTRDWASPDPGGQGSLGESPGPAPPGQLHTLDTDLHSLAQIGGKSPVAGVGNGGSLWPRESPGTANGHSPEHTPPGPGPPGPCPTKRRLLPAGEAPDVSSEEEGPAPRRRRGSLGHPTAANSSDAKATPFWSHLLPGPKEPVLDPTDCGPMGRRLKGARRLKLSPLRSLRKGPGLLSPPSASPVPTPAVSRTLLGNFEESLLRGRFAPSGHIEGFTAEIGASGSYCPQHVTLPVTVTFFDVSEQNAPAPFLGIVDLNPLGRKGYSVPKVGTVQVPCPSPVPSLPLPSDLSLKAKLCVCVCAQACLCVVCVCECACMHTHRG

SEQ ID NO: 750481 - protein, 233 aa, Homo sapiens
MGRRLKGARRLKLSPLRSLRKGPGLLSPPSASPVPTPAVSRTLLGNFEESLLRGRFAPSGHIEGFTAEIGASGSYCPQHVTLPVTVTFFDVSEQNAPAPFLGIVDLNPLGRKGYSVPKVGTVQVTLFNPNQTVVKMFLVTFDFSDMPAAHMTFLRHRLFLVPVGEEGNANPTHRLLCYLLHLRFRSSRSGRLSLHGDIRLLFSRRSLELDTGLPYELQAVTEAPHNPRYSPLP

SEQ ID NO: 750482 - protein, 538 aa, Homo sapiens; identical to SEQ ID NO: 750478

SEQ ID NO: 750483 - protein, 538 aa, Homo sapiens; identical to SEQ ID NO: 750478

SEQ ID NO: 750484 - protein, 130 aa, Homo sapiens
GSGERGKQPSGPTNLDCPVPETLFNPNQTVVKMFLVTFDFSDMPAAHMTFLRHRLFLVPVGEEGNANPTHRLLCYLLHLRFRSSRSGRLSLHGDIRLLFSRRSLELDTGLPYELQAVTEAPHNPRYSPLP

SEQ ID NO: 750485 - protein, 71 aa, Homo sapiens
EDEQAVTVLFQSQGVDEGYLYVAVGSDNYTNTTTSPSATGPTELQVWGRVSVEEGTRMGVRFADDLETAVC

SEQ ID NO: 750486 - protein, 538 aa, Homo sapiens; identical to SEQ ID NO: 750478

SEQ ID NO: 750487 - protein, 538 aa, Homo sapiens; identical to SEQ ID NO: 750478

SEQ ID NO: 750488 - protein, 538 aa, Homo sapiens; identical to SEQ ID NO: 750478

SEQ ID NO: 750489 - protein, 165 aa, Homo sapiens [sequence omitted]

SEQ ID NO: 750490 - protein, 108 aa, Homo sapiens
PLPCTELSLGQQLLRATTDEDLQTAILLLAHGSREEVNETCGEGDGCTALHLACRKGNVVLEQLLIWYGVDVMARDAHGNTALTYARQASSQECINVLLQYGCPDECV

SEQ ID NO: 750491 - protein, 124 aa, Homo sapiens
KKKPIKRLRARAGLGLKGHSPTSPVPFPLHHIPLDKLPPPLLPPAPSSVSCPQLPHGASLPIIMIVKLKCTSAALGECTKFRLLGPPSGFLIQEAWGRGLRLCIPSKFPGDADAAGPGPHFENC

SEQ ID NO: 750492 - protein, 70 aa, Homo sapiens
RVNLETWQESPGLPSCWGHVALGAAVAIFTATQESLPESETNTEQQRQRQTGSRAFSPSAGSQLEPWPFQ

SEQ ID NO: 750493 - protein, 104 aa, Homo sapiens
MLPSMQTVPSADVGSLTGARWLGLISAQIHWLTTKLSSHSLIREMQIKAITTTTRMAKIKKTDNPSVDKDMRKPESSQIAGGNIKQYGHDGKQFGSFLKSSIYT

SEQ ID NO: 750494 - protein, 170 aa, Homo sapiens
DFFPDYRDSRLSRTWQRALEEMSQERRGQDRGSPGPGSGFEVPASQLLASGGRESGRARSCGSDVQLRVWGGGPRRAPGEGSRRRCGELAWATPLSVQTSLLPGLGQPLLPDPNSGLQSPGEVVAFTPNTPSRTVNFIGWARQRPFASAQRSPLRPLSLWRAGGRPSPRQ

SEQ ID NO: 750495 - protein, 1007 aa, Homo sapiens
MEQAGTRPAATEHPRLRRPMPWLLLLPLLLLLLLLLPGPAASQLRYSVPEEQAPGALVGNVARALGLELRRLGPGCLRINHLGAPSPRYLELDLTSGALFVNERIDREALCEQRPRCLLSLEVLAHNPVAVSAVEVEILDINDNSPRFPRPNYQLQVSESVAPGARFHIESAQDPDVGANSVQTYELSPSEHFELDLKPLQENSKVLELVLRKGLDREQAALHHLVLTAVDGGIPARSGTAQISVRVLDTNDNSPAFDQSTYRVQLREDSPPGTLVVKLNASDPDEGSNGELRYSLSSYTSDRERQLFSIDASTGEVRVIGGLDYEEASSYQIYVQATDRGPVPMAGHCKVLVDIVDVNDNAPEVVLTDLYSPVPENATPNTIVAVLSVNDQDSGPNRKVSLGLEATLPFRLNGFGNSYTLVVSGPLDRERVAVYNITVTATDGGIPQLTSLRTLKVEISDINDNPPSFLEDSYSIYIQENNLPGVLLCTVQATDPDEKENAEVTYSLLEREIQGLPVTSYVSINSASGSLYAVNSFDYEKFREFFVTVEAQDKGSPPLSSTVTANVYVVDMNDHAPHILYPTSTNSSAAFEMVPRTAPAGYLVTKVIAMDSDSGQNAWLFYHLAQTSDLDLFKVELHTGEIRTTRKMGDESGSTFNLTVVVRDNGEPSLSASVAITVAVVDRVSKILPDTQRHVKSPRTYSEITLYLIIALSTVSFIFLLTIIILSIIKCYRYTAYGTACCGGFCGVRERSPAELYKQANNNIDARIPHGLKVQPHFIEVRGNGSLTKTYCYKACLTAGSGSDTFMFYNTGAQTGPGPSGAQAAVTDSRNLTGQSGQNAGNLIILKNEAVSQNEPRQPNPDWRYSASLRAGMHSSVHLEEAGILRAGPGGPDQQWPTVSSATPEPEAGEVSPPVGAGVNSNSWTFKYGPGNPKQSGPGELPDKFIIPGSPAIISIRQEPTNSQIDKSDFITFGKKEETKKKKKKKKGNKTQEKKEKGNSTTDNSDQ

SEQ ID NO: 750496 - protein, 818 aa, Homo sapiens
MVGCGVAVLCLWVSCGAAAGQLEYSVPEETERGVAVGNLSADLRLPAAAMSSRNFRFLSSHRELYFGVDLPSGNLVVREPADREQLCRAKAACVLTYDLVLEDPLELHKIRIHVLDTNDNSPLFPAGDVQLHIPEFLTPGARFTLPNAQDDDEGSNGILSYSLSPSQHFRLDMGSRVDGSEYPELVLEKALDREQRATHLLVLTARDGGLPARSGDAQVTIIVVDTNDNAPVFERSVYRTKVPETAPNGTVLFRVQALDPDEGSNGEVQYSLSNSTQAELRHRFHVHPKSGEVQVAASLGPPETLLEAYIEARDEGVFGLASTAKLLVEVTDVNDHAPELDFLTLSNPVPEDAAPGTVIALFSVKDEDLDSNGRVICGMSSAGPFQLTASFDNYYSLLIDGPLDREQISEYQVLITASDSGSPPLSTRRTITVSVADVNDNTPNFPQPQQELFVAENNGPGASLGRVFAQDPDLGKNGLVSYELLDVISEGPSASSLVAVESSSGAITAKTSFDFEQLRGFHFQVEGRDGGIPPRSATVTINLFVVDRNDNYPVILFPLPRNGSVPVEIVPRSARTGHLVTKVVAEDADSGSNAWLSYHISRASDSSLFRISANIGELRTARLVLPTDAVKQRVVVVVRDHGDPPLSSSVTLGVLLSNSVPQLLPDFEDVWEPGGQLSAQNLYLVIALACISFLFLGCLLFFVCTKLHQSPGCCAQSCCRSTEDLRYGSKMVSNPCMTSATIDVTTVERLSQTYLYRASLGLGSDNNSLLLRGEYNAADLRNLATGVGLNLPISCIQIRNRKGDHANVNAMVSKFYGI

SEQ ID NO: 750497 - protein, 963 aa, Homo sapiens [sequence omitted]

SEQ ID NO: 750498 - protein, 884 aa, Homo sapiens
MEQAGTRPAATEHPRLRRPMPWLLLLPLLLLLLLLLPGPAASQLRYSVPEEQAPGALVGNVARALGLELRRLGPGCLRINHLGAPSPRYLELDLTSGALFVNERIDREALCEQRPRCLLSLEVLAHNPVAVSAVEVEILDINDNSPRFPRPNYQLQVSESVAPGARFHIESAQDPDVGANSVQTYELSPSEHFELDLKPLQENSKVLELVLRKGLDREQAALHHLVLTAVDGGIPARSGTAQISVRVLDTNDNSPAFDQSTYRVQLREDSPPGTLVVKLNASDPDEGSNGELRYSLSSYTSDRERQLFSIDASTGEVRVIGGLDYEEASSYQIYVQATDRGPVPMAGHCKVLVDIVDVNDNAPEVVLTDLYSPVPENATPNTIVAVLSVNDQDSGPNRKVSLGLEATLPFRLNGFGNSYTLVVSGPLDRERVAVYNITVTATDGGIPQLTSLRTLKVEISDINDNPPSFLEDSYSIYIQENNLPGVLLCTVQATDPDEKENAEVTYSLLEREIQGLPVTSYVSINSASGSLYAVNSFDYEKFREFFVTVEAQDKGSPPLSSTVTANVYVVDMNDHAPHILYPTSTNSSAAFEMVPRTAPAGYLVTKVIAMDSDSGQNAWLFYHLAQTSDLDLFKVELHTGEIRTTRKMGDESGSTFNLTVVVRDNGEPSLSASVAITVAVVDRVSKILPDTQRHVKSPRTYSEITLYLIIALSTVSFIFLLTIIILSIIKCYRYTAYGTACCGGFCGVRERSPAELYKQANNNIDARIPHGLKVQPHFIEVRGNGSLTKTYCYKACLTAGSGSDTFMFYNTGAQTGPGPSGAQAAVTDSRNLTGQSGQNAGNLIILKNEAVSQNEVRQWSGGLLQTHAFVTHPPISCDLALLSH

SEQ ID NO: 750499 - protein, 290 aa, Homo sapiens
MNTIVFNKLSGAVLFEDGGASERERGGRPYSGVLDSPHARPEVGIPDGPPLKDNLGLRHRRTGARQNGGKVRHKRQALQDMARPLKQWLYKHRDNPYPTKTEKILLALGSQMTLVQVSNWFANARRRLKNTVRQPDLSWALRIKLYNKYVQGNAERLSVSSDDSCSEDGENPPRTHMNEGGYNTPVHHPVIKSENSVIKAGVRPESRASEDYVAPPKYKSSLLNRYLNDSLRHVMATNTTMMGKTRQRNHSGSFSSNEFEEELVSPSSSETEGNFVYRTGKSVLSVVIPA

SEQ ID NO: 750500 - protein, 534 aa, Homo sapiens [sequence omitted]

SEQ ID NO: 750501 - protein, 480 aa, Homo sapiens [sequence omitted]

SEQ ID NO: 750502 - protein, 592 aa, Homo sapiens
MRVLCAFPEAMPSSNSRPPACLAPGALYLALLLHLSLSSQAGDRRPLPVDRAAGLKEKTLILLDVSTKNPVRTVNENFLSLQLDPSIIHDGWLDFLSSKRLVTLARGLSPAFLRFGGKRTDFLQFQNLRNPAKSRGGPGPDYYLKNYEDDIVRSDVALDKQKGCKIAQHPDVMLELQREKAAQMHLVLLKEQFSNTYSNLILTARSLDKLYNFADCSGLHLIFALNALRRNPNNSWNSSSALSLLKYSASKKYNISWELGNEPNNYRTMHGRAVNGSQLGKDYIQLKSLLQPIRIYSRASLYGPNIGRPRKNVIALLDGFMKVAGSTVDAVTWQHCYIDGRVVKVMDFLKTRLLDTLSDQIRKIQKVVNTYTPGKKIWLEGVVTTSAGGTNNLSDSYAAGFLWLNTLGMLANQGIDVVIRHSFFDHGYNHLVDQNFNPLPDYWLSLLYKRLIGPKVLAVHVAGLQRKPRPGRVIRDKLRIYAHCTNHHNHNYVRGSITLFIINLHRSRKKIKLAGTLRDKLVHQYLLQPYGQEGLKSKSVQLNGQPLVMVDDGTLPELKPRPLRAGRTLVIPPVTMGFFVVKNVNALACRYR

SEQ ID NO: 750503 - protein, 229 aa, Homo sapiens
MQPSLDIKPFMSFPVDSSSAVGLFPNFNTMDPVQKAVINHTFGVSIPPKKKQVISCNVCQLRFNSDSQAEAHYKGSKHAKKVKALDATKNKPKMVPSKDSAKANPSCSITPITGNNSDKSEDKGKLKASSSSQPSSSESGSFLLKSGTTPLPPGAATSPSKSTNWQPPRLHAVVETPQRRKKAQQHSLYSVHMTKWAWDNSLVLNIAGPTTKAHQSTKTTARNPEKRAR

SEQ ID NO: 750504 - protein, 368 aa, Homo sapiens
MQPSLDIKPFMSFPVDSSSAVGLFPNFNTMDPVQKAVINHTFGVSIPPKKKQVISCNVCQLRFNSDSQAEAHYKGSKHAKKVKALDATKNKPKMVPSKDSAKANPSCSITPITGNNSDKSEDKGKLKASSSSQPSSSESGSFLLKSGTTPLPPGAATSPSKSTNGAPGTVVESEEEKAKKLLYCSLCKVAVNSLSQLEAHNTGSKHKTMVEARNGAGPIKSYPRPGSRLKMQNGSKGSGLQNKTFHCEICDVHVNSEIQLKQHISSRRHKDRVAGKPLKPKYSPYNKLQRSPSILAAKLAFQKDMMKPLAPAFLSSPLAAAAAVSSALSLPPRPSASLFQAPAIPPALLRPGHGPIRATPASILFAPY

SEQ ID NO: 750505 - protein, 368 aa, Homo sapiens; identical to SEQ ID NO: 750504

SEQ ID NO: 750506 - protein, 433 aa, Homo sapiens
FERDHSCKVWQRLGKVDYKLLENRDYVFFNNVYTTSSRLFGTWQMLGSTCHTTTLPALVRTPTLMMQPSLDIKPFMSFPVDSSSAVGLFPNFNTMDPVQKAVINHTFGVSIPPKKKQVISCNVCQLRFNSDSQAEAHYKGSKHAKKVKALDATKNKPKMVPSKDSAKANPSCSITPITGNNSDKSEDKGKLKASSSSQPSSSESGSFLLKSGTTPLPPGAATSPSKSTNGAPGTVVESEEEKAKKLLYCSLCKVAVNSLSQLEAHNTGSKHKTMVEARNGAGPIKSYPRPGSRLKMQNGSKGSGLQNKTFHCEICDVHVNSEIQLKQHISSRRHKDRVAGKPLKPKYSPYNKLQRSPSILAAKLAFQKDMMKPLAPAFLSSPLAAAAAVSSALSLPPRPSASLFQAPAIPPALLRPGHGPIRATPASILFAPY

SEQ ID NO: 750507 - protein, 368 aa, Homo sapiens; identical to SEQ ID NO: 750504

SEQ ID NO: 750508 - protein, 390 aa, Homo sapiens [sequence omitted]

SEQ ID NO: 750509 - protein, 368 aa, Homo sapiens; identical to SEQ ID NO: 750504

SEQ ID NO: 750510 - protein, 381 aa, Homo sapiens
MQPSLDIKPFMSFPVDSSSAVGLFPNFNTKRRGLFETNKFCQMDPVQKAVINHTFGVSIPPKKKQVISCNVCQLRFNSDSQAEAHYKGSKHAKKVKALDATKNKPKMVPSKDSAKANPSCSITPITGNNSDKSEDKGKLKASSSSQPSSSESGSFLLKSGTTPLPPGAATSPSKSTNGAPGTVVESEEEKAKKLLYCSLCKVAVNSLSQLEAHNTGSKHKTMVEARNGAGPIKSYPRPGSRLKMQNGSKGSGLQNKTFHCEICDVHVNSEIQLKQHISSRRHKDRVAGKPLKPKYSPYNKLQRSPSILAAKLAFQKDMMKPLAPAFLSSPLAAAAAVSSALSLPPRPSASLFQAPAIPPALLRPGHGPIRATPASILFAPY

SEQ ID NO: 750511 - protein, 127 aa, Homo sapiens
MDAAENAVKGVGSTLITHQKILRGGVPGLEGGGSTLTTDSEDTAREHSRWEESQVLATVLLTAMTYNGEGISQGRRCGRGRGDQPQRGTLPRRSHTGRSGCEHRCGMLTGKLCETQFPGLLPRLAVR

SEQ ID NO: 750512 - protein, 155 aa, Homo sapiens [sequence omitted]

SEQ ID NO: 750513 - protein, 75 aa, Homo sapiens
MFPSDSIPGLTEEEEETHKIGSLAENAFSDPAGSANPLEPSQDEKSIPLIWGAVLLVGLLVAAVVLFAVMAKRKQ

SEQ ID NO: 750514 - protein, 154 aa, Homo sapiens
ATRMVSTYQNSKLSWRNCRATIKDLKNARVVILITFPFTLPIWLWRVTVDYHKLNPGDFNCRYFFQMCFCCWSKSIQSLTFGMQILIWHTLLFCIPISKDHQNQFTFDWQGLHYTLTNLHQGYIKSYDVSSLMQRTWIAPSFHIFCLSVMLIPC

SEQ ID NO: 750515 - protein, 72 aa, Homo sapiens
MHFTSIGVRTDCAGGTPPGGTAAWGACYPAAPVMARVELGALEGTRKRCHKPKREGKQLLGEDLHAVAGKQR

SEQ ID NO: 750516 - protein, 327 aa, Homo sapiens
MEVAVPVKQEAEGLALDSPWHRFRRFHLGDAPGPREALGLLRALCRDWLRPEVHTKEQMLELLVLEQFLSALPADTQAWVCSRQPQSGEEAVALLEELWGPAASPDGSSATRVPQDVTQGPGATGGKEDSGMIPLAGTAPGAEGPAPGDSQAVRPYKQEPSSPPLAPGLPAFLAAPGTTSCPECGKTSLKPAHLLRHRQSHSGEKPHACPECGKAFRRKEHLRRHRDTHPGSPGSPGPALRPLPAREKPHACCECGKTFYWREHLVRHRKTHSGARPFACWECGKGFGRREHVLRHQRIHGRAAASAQGAVAPGPDGGGPFPPWPLG

SEQ ID NO: 750517 - protein, 299 aa, Homo sapiens
GFKMAPWQGVGRRPWFLTWGPLCGAASVSPSMTVASPQQGWDCTAGRRWLGEGEIEALAQVSEFKTVLSFQGPAASPDGSSATRVPQDVTQGPGATGGKEDSGMIPLAGTAPGAEGPAPGDSQAVRPYKQEPSSPPLAPGLPAFLAAPGTTSCPECGKTSLKPAHLLRHRQSHSGEKPHACPECGKAFRRKEHLRRHRDTHPGSPGSPGPALRPLPAREKPHACCECGKTFYWREHLVRHRKTHSGARPFACWECGKGFGRREHVLRHQRIHGRAAASAQGAVAPGPDGGGPFPPWPLG

SEQ ID NO: 750518 - protein, 73 aa, Homo sapiens
  misc_feature (60)..(60): Xaa can be any naturally occurring amino acid
MEVAVPVKQEAEGLALDSPWHRFRRFHLGDAPGPREALGLLRALCRDWLRPEVPRKPFFXTVWWENNDSVGRL

SEQ ID NO: 750519 - protein, 327 aa, Homo sapiens; identical to SEQ ID NO: 750516

SEQ ID NO: 750520 - protein, 327 aa, Homo sapiens; identical to SEQ ID NO: 750516

SEQ ID NO: 750521 - protein, 196 aa, Homo sapiens
MIPLAGTAPGAEGPAPGDSQAVRPYKQEPSSPPLAPGLPAFLAAPGTTSCPECGKTSLKPAHLLRHRQSHSGEKPHACPECGKAFRRKEHLRRHRDTHPGSPGSPGPALRPLPAREKPHACCECGKTFYWREHLVRHRKTHSGARPFACWECGKGFGRREHVLRHQRIHGRAAASAQGAVAPGPDGGGPFPPWPLG

SEQ ID NO: 750522 - protein, 433 aa, Homo sapiens
MRAEGLGGLERFCSPGKGRGLRALQPFQVGDLLFSCPAYAYVLTVNERGNHCEYCFTRKEGLSKCGRCKQAFYCNVECQKEDWPMHKLECSPMVVFGENWNPSETVRLTARILAKQKIHPERTPSEKLLAVKEFESHLDKLDNEKKDLIQSDIAALHHFYSKHLEFPDNDSLVVLFAQVNCNGFTIEDEELSHLGSAIFPDVALMNHSCCPNVIVTYKGTLAEVRAVQEIKPGEEVFTSYIDLLYPTEDRNDRLRDSYFFTCECQECTTKDKDKAKVEIRKLSDPPKAEAIRDMVRYARNVIEEFRRAKHYKSPSELLEICELSQEKMSSVFEDSNVYMLHMMYQAMGVCLYMQDWEGALQYGQKIIKPYSKHYPLYSLNVASMWLKLGRLYMGLEHKAAGEKALKKAIAIMEVAHGKDHPYISEIKQEIESH

SEQ ID NO: 750523 - protein, 433 aa, Homo sapiens; identical to SEQ ID NO: 750522

SEQ ID NO: 750524 - protein, 349 aa, Homo sapiens
MHKLECSPMVVFGENWNPSETVRLTARILAKQKIHPERTPSEKLLAVKEFESHLDKLDNEKKDLIQSDIAALHHFYSKHLEFPDNDSLVVLFAQVNCNGFTIEDEELSHLGSAIFPDVALMNHSCCPNVIVTYKGTLAEVRAVQEIKPGEEVFTSYIDLLYPTEDRNDRLRDSYFFTCECQECTTKDKDKAKVEIRKLSDPPKAEAIRDMVRYARNVIEEFRRAKHYKSPSELLEICELSQEKMSSVFEDSNVYMLHMMYQAMGVCLYMQDWEGALQYGQKIIKPYSKHYPLYSLNVASMWLKLGRLYMGLEHKAAGEKALKKAIAIMEVAHGKDHPYISEIKQEIESH

SEQ ID NO: 750525 - protein, 407 aa, Homo sapiens
QSNIGIQESLPAYAYVLTVNERGNHCEYCFTRKEGLSKCGRCKQAFYCNVECQKEDWPMHKLECSPMVVFGENWNPSETVRLTARILAKQKIHPERTPSEKLLAVKEFESHLDKLDNEKKDLIQSDIAALHHFYSKHLEFPDNDSLVVLFAQVNCNGFTIEDEELSHLGSAIFPDVALMNHSCCPNVIVTYKGTLAEVRAVQEIKPGEEVFTSYIDLLYPTEDRNDRLRDSYFFTCECQECTTKDKDKAKVEIRKLSDPPKAEAIRDMVRYARNVIEEFRRAKHYKSPSELLEICELSQEKMSSVFEDSNVYMLHMMYQAMGVCLYMQDWEGALQYGQKIIKPYSKHYPLYSLNVASMWLKLGRLYMGLEHKAAGEKALKKAIAIMEVAHGKDHPYISEIKQEIESH

SEQ ID NO: 750526 - protein, 433 aa, Homo sapiens; identical to SEQ ID NO: 750522

SEQ ID NO: 750527 - protein, 433 aa, Homo sapiens; identical to SEQ ID NO: 750522

SEQ ID NO: 750528 - protein, 244 aa, Homo sapiens
NNKGLGLTRLFLVALMNHSCCPNVIVTYKGTLAEVRAVQEIKPGEEVFTSYIDLLYPTEDRNDRLRDSYFFTCECQECTTKDKDKAKVEIRKLSDPPKAEAIRDMVRYARNVIEEFRRAKHYKSPSELLEICELSQEKMSSVFEDSNVYMLHMMYQAMGVCLYMQDWEGALQYGQKIIKPYSKHYPLYSLNVASMWLKLGRLYMGLEHKAAGEKALKKAIAIMEVAHGKDHPYISEIKQEIESH

SEQ ID NO: 750529 - protein, 229 aa, Homo sapiens [sequence omitted]

SEQ ID NO: 750530 - protein, 421 aa, Homo sapiens
MRAEGLGGLERFCSPGKGRGLRALQPFQVGDLLFSCPAYAYVLTVNERGNHCEYCFTRKEGLSKCGRCKQAFYCNVECQKEDWPMHKLECSPMVVFGENWNPSETVRLTARILAKQKIHPERTPSEKLLAVKEFESHLDKLDNEKKDLIQSDIAALHHFYSKHLEFPDNDSLVVLFAQVNCNGFTIEDEELSHLGSAIFPDVALMNHSCCPNVIVTYKGTLAEVRAVQEIKPGEEVFTSYIDLLYPTEDRNDRLRDSYFFTCECQECTTKDKDKAKVEIRKLSDPPKAEAIRDMVRYARNVIEEFRRAKHYKSPSELLEICELSQEKMSSVFEDSNVYMLHMMYQAMGVCLYMQDWEGALQYGQKIIKPYSKHYPLYSLNVASMWLKLGRLYMGLEHKAAGEKALKKPCHHGYRRDPLDAT

SEQ ID NO: 750531 - protein, 272 aa, Homo sapiens
MRAEGLGGLERFCSPGKGRGLRALQPFQVGDLLFSCPAYAYVLTVNERGNHCEYCFTRKEGLSKCGRCKQAFYCNVECQKEDWPMHKLECSPMVVFGENWNPSETVRLTARILAKQKIHPERTPSEKLLAVKEFESHLDKLDNEKKDLIQSDIAALHHFYSKHLEFPDNDSLVVLFAQVNCNGFTIEDEELSHLGSAIFPDVALMNHSCCPNVIVTYKGTLAEVRAVQEIKPGEEVFTSYIDLLYPTEDRNDRLRDSYFFTCECQECTTKDK

SEQ ID NO: 750532 - protein, 76 aa, Homo sapiens
LSYVVKGKGRSLEHKHYPLYSLNVASMWLKLGRLYMGLEHKAAGEKALKKAIAIMEVAHGKDHPYISEIKQEIESH

SEQ ID NO: 750533 - protein, 254 aa, Homo sapiens
AGGRPPFRGAGSRRRVRRAAPTPPPAALGDASPITARREPQLGHSRRPRPAATMRAEGLGGLERFCSPGKGRGLRALQPFQVGDLLFSCPAYAYVLTVNERGNHCEYCFTRKEGLSKCGRCKQAFYCNVECQKEDWPMHKLECSPMVVFGENWNPSETVRLTARILAKQKIHPERTPSEKLLAVKEFESHLDKLDNEKKDLIQSDIAALHHFYSKHLEFPDNDSLVVLFAQVNCNGFTIEDEELSHLGSAIFPE

SEQ ID NO: 750534 - protein, 226 aa, Homo sapiens
  misc_feature (11)..(11): Xaa can be any naturally occurring amino acid
  misc_feature (14)..(14): Xaa can be any naturally occurring amino acid
RIPSLGNPPRXAGXKFRDCTGKSRPGEEVFTSYIDLLYPTEDRNDRLRDSYFFTCECQECTTKDKDKAKVEIRKLSDPPKAEAIRDMVRYARNVIEEFRRAKHYKSPSELLEICELSQEKMSSVFEDSNVYMLHMMYQAMGVCLYMQDWEGALQYGQKIIKPYSKHYPLYSLNVASMWLKLGRLYMGLEHKAAGEKALKKAIAIMEVAHGKDHPYISEIKQEIESH

SEQ ID NO: 750535 - protein, 400 aa, Homo sapiens
MRAEGLGGLERFCSPGKGRGLRALQPFQVGDLLFSCPAYAYVLTVNERGNHCEYCFTRKEGLSKCGRCKQAFYCNVECQKEDWPMHKLECSPMVVFGENWNPSETVRLTARILAKQKIHPERTPSEKLLAVKEFESHLDKLDNEKKDLIQSDIAALHHFYSKHLEFPDNDSLVVLFAQVNCNGFTIEDEELSHLGSAIFPDVALMNHSCCPNVIVTYKGTLAEVRAVQEIKPGEEVFTSYIDLLYPTEDRNDRLRDSYFFTCECQECTTKDKDKAKVEIRKLSDPPKAEAIRDMVRYARNVIEEFRRAKHYKSPSELLEICELSQEKMSSVFEDSNVYMLHMMYQAMGVCLYMQDWEGALQYGQKIIKPYSKHYPLCSRPMKSLPSFNHREATLREYKVR

SEQ ID NO: 750536 - protein, 366 aa, Homo sapiens
  misc_feature (346)..(346): Xaa can be any naturally occurring amino acid
AGGRPPFRGAGSRRRVRRAAPTPPPAALGDASPITARREPQLGHSRRPRPAATMRAEGLGGLERFCSPGKGRGLRALQPFQVGDLLFSCPAYAYVLTVNERGNHCEYCFTRKEGLSKCGRCKQAFYCNVECQKEDWPMHKLECSPMVVFGENWNPSETVRLTARILAKQKIHPERTPSEKLLAVKEFESHLDKLDNEKKDLIQSDIAALHHFYSKHLEFPDNDSLVVLFAQVNCNGFTIEDEELSHLGSAIFPDVALMNHSCCPNVIVTYKGTLAEVRAVQEIKPGEEVFTSYIDLLYPTEDRNDRLRDSYFFTCVKLPQRGKGLYHAKGGTKRGIKWAKVEIRKXPFPKGPGKNFPPNAKKRQET

SEQ ID NO: 750537 - protein, 165 aa, Homo sapiens [sequence omitted]

SEQ ID NO: 750538 - protein, 126 aa, Homo sapiens
MSVATGSSEAAGGASGGGARVFFQSPRGGAGGSPGSSSGSGSSREDSAPVATAAAAGQVQQQQQRRHQQGKVTVKYDRKELRKRLVLEEWIVEQLGQLYGCEEFIKELLSRIRGMRKLSPPQKKSV

SEQ ID NO: 750539 - protein, 165 aa, Homo sapiens [sequence omitted]

SEQ ID NO: 750540 - protein, 165 aa, Homo sapiens [sequence omitted]

SEQ ID NO: 750541 - protein, 287 aa, Homo sapiens
MSVATGSSEAAGGASGGGARVFFQSPRGGAGGSPGSSSGSGSSREDSAPVATAAAAGQVQQQQQRRHQQGKVTVKYDRKELRKRLVLEEWIVEQLGQLYGCEEEEMPEVEIDIDDLLDADSDEERASKLQEALVDCYKPTETESRSVAQVGVQWCDLGSLQPPPPEFNQFSRLSLLSSWDYRRASPRPANFCIFSRDGVSPCWPGWSQTPDLRYSPASASQSAGITGVSHRTRPIGIYQRAAFSDKRHEETEPSAEEECMILEQGETLPETKKESWDLYFMKTFVKE

SEQ ID NO: 750542 - protein, 165 aa, Homo sapiens [sequence omitted]

SEQ ID NO: 750543 - protein, 116 aa, Homo sapiens
KRLAAGSFLKRKSRQDLLADWSGCERGVKDDTRDFCSWWALPCIRKGKTWEEQRVEVRSGVGFCACSVSEAFGEQIGDMLDWGVHCSRERSRLQIEIGVFGPGAVAHSCNPSTLGG

SEQ ID NO: 750544 - protein, 436 aa, Homo sapiens
CCEACPRTVNLQGREGGTSIKPKSWAFSPQGTERVKTPADSAGKEIMPSKSLSNLSVTTGANESGSVPEGWERDFLPASDGTTTELVIRCVIPSLYLLIITVGLLGNIMLVKIFITNSAMRSVPNIFISNLAAGDLLLLLTCVPVDASRYFFDEWMFGKVGCKLIPVIQLTSVGVSVFTLTALSADRYRAIVNPMDMQTSGALLRTCVKAMGIWVVSVLLAVPEAVFSEVARISSLDNSSFTACIPYPQTDELHPKIHSVLIFLVYFLIPLAIISIYYYHIAKTLIKSAHNLPGEYNEHTKKQMETRKRLAKIVLVFVGCFIFCWFPNHILYMYRSFNYNEIDPSLGHMIVTLVARVLSFGNSCVNPFALYLLSESFRRHFNSQLCCGRKSYQERGTSYLLSSSAVRMTSLKSNAKNMVTNSVLLNGHSMKQEMAL

SEQ ID NO: 750545 - protein, 406 aa, Homo sapiens
CCEACPRTVNLQGREGGTSIKPKSWAFSPQGTERVKTPADSAGKEIMPSKSLSNLSVTTGANESGSVPEGWERDFLPASDGTTTELVIRCVIPSLYLLIITVGLLGNIMLVKIFITNSAMRSVPNIFISNLAAGDLLLLLTCVPVDASRYFFDEWMFGKVGCKLIPVIQLTSVGVSVFTLTALSADRYRAIVNPMDMQTSGALLRTCVKAMGIWVVSVLLAVPEAVFSEVARISSLDNSSFTACIPYPQTDELHPKIHSVLIFLVYFLIPLAIISIYYYHIAKTLIKSAHNLPGEYNEHTKKQMETRKRLAKIVLVFVGCFIFCWFPNHILYMYRSFNYNEIDPSLGHMIVTLVARVLSFGNSCVNPFALYLLSESFRRHFNSQLCCGRKSYQERGTSYLLSSSAA

SEQ ID NO: 750546 - protein, 321 aa, Homo sapiens
AQPSPVSHQQQPQQSPLPPGIKPTIQIKQESGVKIITQQVQPSKILPKPVTATLPTSSNSPIMVVSSNGAIMTTKLVTTPTGTQATYTRPTVSPSIGRMAATPGAATYVKTTSGSIITVVPKSLATLGGKIISSNIVSGTTTKITTIPMTSKPNVIVVQKTTGKGTTIQGLPGKNVVTTLLNAGGEKTIQTVPTGAKPAILTATRPITKMIVTQPKGIGSTVQPAAKIIPTKIVYGQQGKTQVLIKPKPVTFQATVVSEQTRQLVTETLQQASRVAEAGNSSIQEGKEEPQNYTDSSSSSTESSQSSQGKIYFTSDLYKYY

SEQ ID NO: 750547 - protein, 331 aa, Homo sapiens
AQPSPVSHQQQPQQSPLPPGIKPTIQIKQESGVKIITQQVQPSKILPKPVTATLPTSSNSPIMVVSSNGAIMTTKLVTTPTGTQATYTRPTVSPSIGRMAATPGAATYVKTTSGSIITVVPKSLATLGGKIISSNIVSGTTTKITTIPMTSKPNVIVVQKTTGKGTTIQGLPGKNVVTTLLNAGGEKTIQTVPTGAKPAILTATRPITKMIVTQPKGIGSTVQPAAKIIPTKIVYGQQGKTQVLIKPKPVTFQATVVSEQTRQLVTETLQQASRVAEAGNSSIQEGKEEPQDSQPVVHVIASRRQDWSEHEIAMETSPTIIYQDVSSESQS

SEQ ID NO: 750548 - protein, 142 aa, Homo sapiens
AQPSPVSHQQQPQQSPLPPGIKPTIQIKQESGVKIITQQVQPSKILPKPVTATLPTSSNSPIMVVSSNGAIMTTKLVTTPTGTQATYTRPTVSPSIGRMAATPGAATYVKTTSGSIITVVPKSLATLGGKIISSNIVSGRYI

SEQ ID NO: 750549 - protein, 312 aa, Homo sapiens
MESALPAAGFLYWVGAGTVAYLALRISYSLFTALRVWGVGNEAGVGPGLGEWAVVTGSTDGIGKSYAEELAKHGMKVVLISRSKDKLDQVSSEIKEKFKVETRTIAVDFASEDIYDKIKTGLAGLEIGILVNNVGMSYEYPEYFLDVPDLDNVIKKMININILSVCKMTQLVLPGMVERSKGAILNISSGSGMLPVPLLTIYSATKTFVDFFSQCLHEEYRSKGVFVQSVLPYFVATKLAKIRKPTLDKPSPETFVKSAIKTVGLQSRTNGYLIHALMGSIISNLPSWIYLKIVMNMNKSTRAHYLKKTKKN

SEQ ID NO: 750550 - protein, 238 aa, Homo sapiens
MKVVLISRSKDKLDQVSSEIKEKFKVETRTIAVDFASEDIYDKIKTGLAGLEIGILVNNVGMSYEYPEYFLDVPDLDNVIKKMININILSVCKMTQLVLPGMVERSKGAILNISSGSGMLPVPLLTIYSATKTFVDFFSQCLHEEYRSKGVFVQSVLPYFVATKLAKIRKPTLDKPSPETFVKSAIKTVGLQSRTNGYLIHALMGSIISNLPSWIYLKIVMNMNKSTRAHYLKKTKKN

SEQ ID NO: 750551 - protein, 238 aa, Homo sapiens; identical to SEQ ID NO: 750550

SEQ ID NO: 750552 - protein, 125 aa, Homo sapiens
SRGSRGCKSPLLTIYSATKTFVDFFSQCLHEEYRSKGVFVQSVLPYFVATKLAKIRKPTLDKPSPETFVKSAIKTVGLQSRTNGYLIHALMGSIISNLPSWIYLKIVMNMNKSTRAHYLKKTKKN

SEQ ID NO: 750553 - protein, 312 aa, Homo sapiens; identical to SEQ ID NO: 750549

SEQ ID NO: 750554 - protein, 312 aa, Homo sapiens; identical to SEQ ID NO: 750549

SEQ ID NO: 750555 - protein, 312 aa, Homo sapiens; identical to SEQ ID NO: 750549

SEQ ID NO: 750556 - protein, 312 aa, Homo sapiens; identical to SEQ ID NO: 750549

SEQ ID NO: 750557 - protein, 268 aa, Homo sapiens
MESALPAAGFLYWVGAGTVAYLALRISYSLFTALRVWGVGNEAGVGPGLGEWAVVTGSTDGIGKSYAEELAKHGMKVVLISRSKDKLDQVSSEIKEKFKVETRTIAVDFASEDIYDKIKTGLAGLEIGILVNNVGMSYEYPEYFLDVPDLDNVIKKMININILSVCKMTQLVLPGMVERSKGAILNISSGSGMLPVPLLTIYSATKTFVDFFSQCLHEEYRSKGVFVQSVLPYFVATKLAKIRKPTLDKPSPETFVKSAIKTRCGRRY

SEQ ID NO: 750558 - protein, 156 aa, Homo sapiens
MESALPAAGFLYWVGAGTVAYLALRISYSLFTALRVWGVGNEAGVGPGLGEWAVVTGSTDGIGKSYAEELAKHGMKVVLISRSKDKLDQVSSEIKEKFKVETRTIAVDFASEDIYDKIKTGLAGLEIGILGWAGLKPQPSSHRVGLSGVQPHPGSS

SEQ ID NO: 750559 - protein, 312 aa, Homo sapiens; identical to SEQ ID NO: 750549

SEQ ID NO: 750560 - protein, 312 aa, Homo sapiens; identical to SEQ ID NO: 750549

SEQ ID NO: 750561 - protein, 102 aa, Homo sapiens
IILSPDTHLQTTPHDKPSSVLPYFVATKLAKIRKPTLDKPSPETFVKSAIKTVGLQSRTNGYLIHALMGSIISNLPSWIYLKIVMNMNKSTRAHYLKKTKKN

SEQ ID NO: 750562 - protein, 312 aa, Homo sapiens; identical to SEQ ID NO: 750549

SEQ ID NO: 750563 - protein, 138 aa, Homo sapiens
MESALPAAGFLYWVGAGTVAYLALRISYSLFTALRVWGVGNEAGVGPGLGEWAVVTGSTDGIGKSYAEELLRRLRQENRLNPGGGGCSEPRSHRGTPAWVTEQDSVSKKLAKHGMKVVLISRSKDKLDQVSSEISNYT

SEQ ID NO: 750564 - protein, 98 aa, Homo sapiens
MESALPAAGFLYWVGAGTVAYLALRISYSLFTALRVWGVGNEAGVGPGLGEWAVVTGSTDGIGKSYAEELAKHGMKVVLISRSKDKLDQVSSEISNYT

SEQ ID NO: 750565 - protein, 123 aa, Homo sapiens
MLKKSGESGLLVLFQFSKGMLSPFPHSVLCWLWVCIDGFYYIKEIMAQVAVSTLPMEDEESMEDEESIEDEESVEDDSVESRMVVTLLISALESTMLEFLMNLQSAFCMNCVWIHCLHWMMKT

SEQ ID NO: 750566 - protein, 301 aa, Homo sapiens
MLKKSGESGLLVLFQFSKGMLSPFPHSVLCWLWVCIDGFYYIKGSWHKLQFSTLPMEDEESMEDEESIEDEESVEDDSVESRMVVTFLISALESTMLEFLMNLQSAFCMNCVWIHCLHWMMKTGVLLLRPWCVMFPILCPSVLIVQFPPMSENMWCLVFCPCNSLLRMMVSSFIHVPTKYMNSSFFMLHSIPWCCVPEKVSEPLRGPSHEKGNRIVNGKGKGLLQTFFLGSLALKWKILCERSSTTERMCPTLERQNKALPGAFEGRARTVSTRTVDKKALPGAKQGDLVPKAKSRHQLRT

SEQ ID NO: 750567 - protein, 593 aa, Homo sapiens
METPPLPPACTKQGHQKPLDSKDDNTEKHCPVTVNPWHMKKAFKVMNELRSQNLLCDVTIVAEDMEISAHRVVLAACSPYFHAMFTGEMSESRAKRVRIKEVDGWTLRMLIDYVYTAEIQVTEENVQVLLPAAGLLQLQDVKKTCCEFLESQLHPVNCLGIRAFADMHACTDLLNKANTYAEQHFADVVLSEEFLNLGIEQVCSLISSDKLTISSEEKVFEAVIAWVNHDKDVRQEFMARLMEHVRLPLLPREYLVQRVEEEALVKNSSACKDYLIEAMKYHLLPTEQRILMKSVRTRLRTPMNLPKLMVVVGGQAPKAIRSVECYDFKEERWHQVAELPSRRCRAGMVYMAGLVFAVGGFNGSLRVRTVDSYDPVKDQWTSVANMRDRRSTLGAAVLNGLLYAVGGFDGSTGLSSVEAYNIKSNEWFHVAPMNTRRSSVGVGVVGGLLYAVGGYDGASRQYLSTVECYNATTNEWTYIAEMSTRRSGAGVGVLNNLLYAVGGHDGPLVRKSVEVYDPTTNAWRQVADMNMCRRNAGVCAVNGLLYVVGGDDGSCNLASVEYYNPTTDKWTVVSSCMSTGRSYAGVTVIDKPL

SEQ ID NO: 750568 - protein, 505 aa, Homo sapiens
MSESRAKRVRIKEVDGWTLRMLIDYVYTAEIQVTEENVQVLLPAAGLLQLQDVKKTCCEFLESQLHPVNCLGIRAFADMHACTDLLNKANTYAEQHFADVVLSEEFLNLGIEQVCSLISSDKLTISSEEKVFEAVIAWVNHDKDVRQEFMARLMEHVRLPLLPREYLVQRVEEEALVKNSSACKDYLIEAMKYHLLPTEQRILMKSVRTRLRTPMNLPKLMVVVGGQAPKAIRSVECYDFKEERWHQVAELPSRRCRAGMVYMAGLVFAVGGFNGSLRVRTVDSYDPVKDQWTSVANMRDRRSTLGAAVLNGLLYAVGGFDGSTGLSSVEAYNIKSNEWFHVAPMNTRRSSVGVGVVGGLLYAVGGYDGASRQYLSTVECYNATTNEWTYIAEMSTRRSGAGVGVLNNLLYAVGGHDGPLVRKSVEVYDPTTNAWRQVADMNMCRRNAGVCAVNGLLYVVGGDDGSCNLASVEYYNPTTDKWTVVSSCMSTGRSYAGVTVIDKPL

SEQ ID NO: 750569 - protein, 332 aa, Homo sapiens
METPPLPPACTKQGHQKPLDSKDDNTEKHCPVTVNPWHMKKAFKVMNELRSQNLLCDVTIVAEDMEISAHRVVLAACSPYFHAMFTGEMSESRAKRVRIKEVDGWTLRMLIDYVYTAEIQVTEENVQVLLPAAGLLQLQDVKKTCCEFLESQLHPVNCLGIRAFADMHACTDLLNKANTYAEQHFADVVLSEEFLNLGIEQVCSLISSDKLTISSEEKVFEAVIAWVNHDKDVRQEFMARLMEHVRLPLLPREYLVQRVEEEALVKNSSACKDYLIEAMKYHLLPTEQRILMKSVRTRLRTPMNLPKLMVVVGGQAPKAIRSVECYDYQTTR

SEQ ID NO: 750570 - protein, 577 aa, Homo sapiens
METPPLPPACTKQGHQKPLDSKDDNTEKHCPVTVNPWHMKKAFKVMNELRSQNLLCDVTIVAEDMEISAHRVVLAACSPYFHAMFTGEMSESRAKRVRIKEVDGWTLRMLIDYVYTAEIQVTEENVQTCCEFLESQLHPVNCLGIRAFADMHACTDLLNKANTYAEQHFADVVLSEEFLNLGIEQVCSLISSDKLTISSEEKVFEAVIAWVNHDKDVRQEFMARLMEHVRLPLLPREYLVQRVEEEALVKNSSACKDYLIEAMKYHLLPTEQRILMKSVRTRLRTPMNLPKLMVVVGGQAPKAIRSVECYDFKEERWHQVAELPSRRCRAGMVYMAGLVFAVGGFNGSLRVRTVDSYDPVKDQWTSVANMRDRRSTLGAAVLNGLLYAVGGFDGSTGLSSVEAYNIKSNEWFHVAPMNTRRSSVGVGVVGGLLYAVGGYDGASRQYLSTVECYNATTNEWTYIAEMSTRRSGAGVGVLNNLLYAVGGHDGPLVRKSVEVYDPTTNAWRQVADMNMCRRNAGVCAVNGLLYVVGGDDGSCNLASVEYYNPTTDKWTVVSSCMSTGRSYAGVTVIDKPL

SEQ ID NO: 750571 - protein, 537 aa, Homo sapiens
METPPLPPACTKQGHQKPLDSKDDNTEKHCPVTVNPWHMKKAFKVMNELRSQNLLCDVTIVAEDMEISAHRVVLAACSPYFHAMFTGEMSESRAKRVRIKEVDGWTLRMLIDYVYTAEIQVTEENVQHFADVVLSEEFLNLGIEQVCSLISSDKLTISSEEKVFEAVIAWVNHDKDVRQEFMARLMEHVRLPLLPREYLVQRVEEEALVKNSSACKDYLIEAMKYHLLPTEQRILMKSVRTRLRTPMNLPKLMVVVGGQAPKAIRSVECYDFKEERWHQVAELPSRRCRAGMVYMAGLVFAVGGFNGSLRVRTVDSYDPVKDQWTSVANMRDRRSTLGAAVLNGLLYAVGGFDGSTGLSSVEAYNIKSNEWFHVAPMNTRRSSVGVGVVGGLLYAVGGYDGASRQYLSTVECYNATTNEWTYIAEMSTRRSGAGVGVLNNLLYAVGGHDGPLVRKSVEVYDPTTNAWRQVADMNMCRRNAGVCAVNGLLYVVGGDDGSCNLASVEYYNPTTDKWTVVSSCMSTGRSYAGVTVIDKPL

SEQ ID NO: 750572 - protein, 146 aa, Homo sapiens
MDLTFPPISSFGGPTMKPLSLLQPYASAYSLSGPIQRWTHRGYRGWPSLLCFTDPTQDHTTSFHCLEMPCLLIPSSADEHLCCFHFLAITKMLLRASMIFAHLKKCFSPLLLWEISPWLCPFFVAQPSPRFWLSLSGSMSAPCLTS

SEQ ID NO: 750573 - protein, 146 aa, Homo sapiens; identical to SEQ ID NO: 750572

SEQ ID NO: 750574 - protein, 116 aa, Homo sapiens
SKSSAIKFEVYPTSLIKNNFEGLVVKLINRWIYDLPKDAFWSYFSQAQELFWESTDCVNNLCKDVVLNKKITTKLQESKFDVVLADALGACGELLAEHVKGMLNTCPLLTVSWLHT

SEQ ID NO: 750575 - protein, 622 aa, Homo sapiens
MSRQTTSVGSSCLDLWREKNDRLVRQAKVAQNSGLTLRRQQLAQDALEGLRGLLHSLQGLPAAVPVLPLELTVTCNFIILRASLAQGFTEDQAQDIQRSLERVLETQEQQGPRLEQGLRELWDSVLRASCLLPELLSALHRLVGLQAALWLSADRLGDLALLLETLNGSQSGASKDLLLLLKTWSPPAEELDAPLTLQDAQGLKDVLLTAFAYRQGLQELITGNPDKALSSLHEAASGLCPRPVLVQVYTALGSCHRKMGNPQRALLYLVAALKEGSAWGPPLLEASRLYQQLGDTTAELESLELLVEALNVPCSSKAPQFLIEVELLLPPPDLASPLHCGTQSQTKHILASRCLQTGRAGDAAEHYLDLLALLLDSSEPRFSPPPSPPGPCMPEVFLEAAVALIQAGRAQDALTLCEELLSRTSSLLPKMSRLWEDARKGTKELPYCPLWVSATHLLQGQAWVQLGAQKVAISEFSRCLELLFRATPEEKEQGAAFNCEQGCKSDAALQQLRAAALISRGLEWVASGQDTKALQDFLLSVQMCPGNRDTYFHLLQTLKRLDRRDEATALWWRLEAQTKGSHEDALWSLPLYLESYLSWIRPSDRDAFLEEFRTSLPKSCDL

SEQ ID NO: 750576 - protein, 221 aa, Homo sapiens
RVAANLTAKVRGWVVCEELLSRTSSLLPKMSRLWEDARKGTKELPYCPLWVSATHLLQGQAWVQLGAQKVAISEFSRCLELLFRATPEEKEQGAAFNCEQGCKSDAALQQLRAAALISRGLEWVASGQDTKALQDFLLSVQMCPGNRDTYFHLLQTLKRLDRRDEATALWWRLEAQTKGSHEDALWSLPLYLESYLSWIRPSDRDAFLEEFRTSLPKSCDL

SEQ ID NO: 750577 - protein, 622 aa, Homo sapiens; identical to SEQ ID NO: 750575

SEQ ID NO: 750578 - protein, 587 aa, Homo sapiens
MSRQTTSVGSSCLDLWREKNDRLVRQAKVAQNSGLTLRRQQLAQDALEGLRGLLHSLQGLPAAVPVLPLELTVTCNFIILRASLAQGFTEDQAQDIQRSLERVLETQEQQGPRLEQGLRELWDSVLRASCLLPELLSALHRLVGLQAALWLSADRLGDLALLLETLNGSQSGASKDLLLLLKTWSPPAEELDAPLTLQDAQGLKDVLLTAFAYRQGLQELITGNPDKALSSLHEAASGLCPRPVLVQVYTALGSCHRKMGNPQRALLYLVAALKEGSAWGPPLLEASRLYQQLGDTTAELESLELLVEALNVPCSSKAPQFLIEVELLLPPPDLASPLHCGTQSQTKHILASRCLQTGRAGDAAEHYLDLLALLLDSSEPRFSPPPSPPGPCMPEVFLEAAVALIQAGRAQDALTLCEELLSRTSSLLPKMSRLWEDARKGTKELPYCPLWVSATHLLQGQAWVQLGAQKVAISEFSRCLELLFRATPEEKEQGAAFNCEQGCKSDAALQQLRAAALISRGLEWVASGQDTKALQDFLLSVQMCPGNRDTYFHLLQTLKRLDRRDEATALWWRLEAQTKGSHEDALW

SEQ ID NO: 750579 - protein, 619 aa, Homo sapiens
MHPLPLLQGEKKGLILSDNPSLMWQVAQNSGLTLRRQQLAQDALEGLRGLLHSLQGLPAAVPVLPLELTVTCNFIILRASLAQGFTEDQAQDIQRSLERVLETQEQQGPRLEQGLRELWDSVLRASCLLPELLSALHRLVGLQAALWLSADRLGDLALLLETLNGSQSGASKDLLLLLKTWSPPAEELDAPLTLQDAQGLKDVLLTAFAYRQGLQELITGNPDKALSSLHEAASGLCPRPVLVQVYTALGSCHRKMGNPQRALLYLVAALKEGSAWGPPLLEASRLYQQLGDTTAELESLELLVEALNVPCSSKAPQFLIEVELLLPPPDLASPLHCGTQSQTKHILASRCLQTGRAGDAAEHYLDLLALLLDSSEPRFSPPPSPPGPCMPEVFLEAAVALIQAGRAQDALTLCEELLSRTSSLLPKMSRLWEDARKGTKELPYCPLWVSATHLLQGQAWVQLGAQKVAISEFSRCLELLFRATPEEKEQGAAFNCEQGCKSDAALQQLRAAALISRGLEWVASGQDTKALQDFLLSVQMCPGNRDTYFHLLQTLKRLDRRDEATALWWRLEAQTKGSHEDALWSLPLYLESYLSWIRPSDRDAFLEEFRTSLPKSCDL

SEQ ID NO: 750580 - protein, 364 aa, Homo sapiens
MGNPQRALLYLVAALKEGSAWGPPLLEASRLYQQLGDTTAELESLELLVEALNVPCSSKAPQFLIEVELLLPPPDLASPLHCGTQSQTKHILASRCLQTGRAGDAAEHYLDLLALLLDSSEPRFSPPPSPPGPCMPEVFLEAAVALIQAGRAQDALTLCEELLSRTSSLLPKMSRLWEDARKGTKELPYCPLWVSATHLLQGQAWVQLGAQKVAISEFSRCLELLFRATPEEKEQGAAFNCEQGCKSDAALQQLRAAALISRGLEWVASGQDTKALQDFLLSVQMCPGNRDTYFHLLQTLKRLDRRDEATALWWRLEAQTKGSHEDALWSLPLYLESYLSWIRPSDRDAFLEEFRTSLPKSCDL

SEQ ID NO: 750581 - protein, 298 aa, Homo sapiens
APGCRIGRGTLRRQQLAQDALEGLRGLLHSLQGLPAAVPVLPLELTVTASRCLQTGRAGDAAEHYLDLLALLLDSSEPRFSPPPSPPGPCMPEVFLEAAVALIQAGRAQDALTLCEELLSRTSSLLPKMSRLWEDARKGTKELPYCPLWVSATHLLQGQAWVQLGAQKVAISEFSRCLELLFRATPEEKEQGAAFNCEQGCKSDAALQQLRAAALISRGLEWVASGQDTKALQDFLLSVQMCPGNRDTYFHLLQTLKRLDRRDEATALWWRLEAQTKGSHEDALWHHPSFSPGLSPCT

SEQ ID NO: 750582 - protein, 119 aa, Homo sapiens [sequence omitted]

SEQ ID NO: 750583 - protein, 613 aa, Homo sapiens
MSRQTTSVGSSCLDLWREKNDRLVRQAKVAQNSGLTLRRQQLAQDALEGLRGLLHSLQGLPAAVPVLPLELTVTCNFIILRASLAQGFTEDQAQDIQRSLERVLETQEQQGPRLEQGLRELWDSVLRASCLLPELLSALHRLVGLQAALWLSADRLGDLALLLETLNGSQSGASKDLLLLLKTWSPPAEELDAPLTLQDAQGLKDVLLTAFAYRQGLQELITGNPDKALSSLHEAASGLCPRPVLVQVYTALGSCHRKMGNPQRALLYLVAALKEGSAWGPPLLEASRLYQQLGDTTAELESLELLVEALNVPCSSKAPQFLIEVELLLPPPDLASPLHCGTQSQTKHILAGDAAEHYLDLLALLLDSSEPRFSPPPSPPGPCMPEVFLEAAVALIQAGRAQDALTLCEELLSRTSSLLPKMSRLWEDARKGTKELPYCPLWVSATHLLQGQAWVQLGAQKVAISEFSRCLELLFRATPEEKEQGAAFNCEQGCKSDAALQQLRAAALISRGLEWVASGQDTKALQDFLLSVQMCPGNRDTYFHLLQTLKRLDRRDEATALWWRLEAQTKGSHEDALWSLPLYLESYLSWIRPSDRDAFLEEFRTSLPKSCDL

SEQ ID NO: 750584 - protein, 622 aa, Homo sapiens; identical to SEQ ID NO: 750575

SEQ ID NO: 750585 - protein, 600 aa, Homo sapiens
MSRQTTSVGSSCLDLWREKNDRLVRQAKVAQNSGLTLRRQQLAQDALEGLRGLLHSLQGLPAAVPVLPLELTVTCNFIILRASLAQGFTEDQAQDIQRSLERVLETQEQQGPRLEQGLRELWDSVLRASCLLPELLSALHRLVGLQAALWLSADRLGDLALLLETLNGSQSGASKDLLLLLKTWSPPAEELDAPLTLQDAQGLKDVLLTAFAYRQGLQELITGNPDKALSSLHEAASGLCPRPVLVQVYTALGSCHRKMGNPQRALLYLVAALKEGSAWGPPLLEASRLYQQLGDTTAELESLELLVEALNVPCSSKAPQFLIEVELLLPPPDLASPLHCGTQSQTKHILASRCLQTGRAGDAAEHYLDLLALLLDSSEPRFSPPPSPPGPCMPEVFLEAAVALIQAGRAQDALTLCEELLSRTSSLLPKMSRLWEDARKGTKELPYCPLWVSATHLLQGQAWVQLGAQKVAISEFSRCLELLFRATPEEKEQGAAFNCEQGCKSDAALQQLRAAALISRGLEWVASGQDTKALQDFLLSVQMCPGNRDTYFHLLQTLKRLDRRDEATALWWRLEAQTKGSHEDALWHHPSFSPGLSPCT

SEQ ID NO: 750586 - protein, 604 aa, Homo sapiens
MSRQTTSVGSSCLDLWREKNDRLVRQAKVAQNSGLTLRRQQLAQDALEGLRGLLHSLQGLPAAVPVLPLELTVTCNFIILRASLAQGFTEDQAQDIQRSLERVLETQEQQGPRLEQGLRELWDSVLRASCLLPELLSALHRLVGLQAALWLSADRLGDLALLLETLNGSQSGASKDLLLLLKTWSPPAEELDAPLTLQDAQGLKDVLLTAFAYRQGLQELITGNPDKALSSLHEAASGLCPRPVLVQVYTALGSCHRKMGNPQRALLYLVAALKEGSAWGPPLLEASRLYQQLGDTTAELESLELLVEALNVPCSSKAPQFLIEVELLLPPPDLASPLHCGTQSQTKHILASRCLQTGRAGDAAEHYLDLLALLLDSSEPRFSPPPSPPGPCMPEVFLEAAVALIQAGRAQDALTLCEELLSRTSSLLPKMSRLWEDARKGTKELPYCPLWVSATHLLQGQAWVQLGAQKVAISEFSRCLELLFRATPEEKEQGAAFNCEQGCKSDAALQQLRAAALISRGLEWVASGQDTKALQDFLLSVQMCPGNRDTYFHLLQTLIVTPSLKNFGHLCQSLVTCSCHVLKSLSWVPSGLSLCGEGFLLHHH

SEQ ID NO: 750587 - protein, 228 aa, Homo sapiens
QPLHPSDPTEKQQPKRLHVSNIPFRFRDPDLRQMFGQFGKILDVEIIFNERGSKGFGFVTFETSSDADRAREKLNGTIVEGRKIEVNNATARVMTNKKTGNPYTNGWKLNPVVGAVYGPEFYAVTGFPYPTTGTAVAYRGAHLRGRGRAVYNTFRAAPPPPPIPTYGAVVYQDGFYGAEIYGGYAAYRYAQPAAAAAAYSDSYGRVYAAADPYHHTIGPAATYSIGTM

SEQ ID NO: 750588 - protein, 457 aa, Homo sapiens
QPLHPSDPTEKQQPKRLHVSNIPFRFRDPDLRQMFGQFGKILDVEIIFNERGSKGFGFVTFETSSDADRAREKLNGTIVEGRKIEVNNATARVMTNKKTGNPYTNGWKLNPVVGAVYGPEFYAVTGFPYPTTGTAVAYRGAHLRGRGRAVYNTFRAAPPPPPIPTYGAVVYQDGFYGAEIYGGYAAYRYAQPAAAAAAYSDSYGRVYAAADPYHHTIGPAATYSIGTMASLCRGGYSRFTPYQQETQPLTAFTLTAYYTPNPTAQNQAQPPEDSAPLPVSDTHGWPPATLKSIDYFSPASWSPHPTCAGVCVFDPGFSCMSATVISYFDFVDVVLPKPLQVRCAHRGVQAGPGDQAAPNLGVAVAPYEGKSHISWPPRLHRTTETPGRASPKATRPAPCHGPSVQHPDAGREGLQAPSVGLPGLRVLPQAFTQPTTGVATAPPRPIQLKLIFFIKFY

SEQ ID NO: 750589 - protein, 228 aa, Homo sapiens; identical to SEQ ID NO: 750587

SEQ ID NO: 750590 - protein, 153 aa, Homo sapiens
TRIFNERGSKVNNATARVMTNKKTGNPYTNGWKLNPVVGAVYGPEFYAVTGFPYPTTGTAVAYRGAHLRGRGRAVYNTFRAAPPPPPIPTYGAVVYQDGFYGAEIYGGYAAYRYAQPAAAAAAYSDSYGRVYAAADPYHHTIGPAATYSIGTM

SEQ ID NO: 750591 - protein, 244 aa, Homo sapiens
RLTAAAPTMAETKLQLFVKASEDGESVGHCPSCQRLFMVLLLKGVPFTLTTVDTRRSPDVLKDFAPGSQLPILLYDSDAKTDTLQIEDFLEETLGPPDFPSLAPRYRESNTAGNDVFHKFSAFIKNPVPAQDEALYQQLLRALARLDSYLRAPLEHELAGEPQLRESRRRFLDGDRLTLADCSLLPKLHIVDTVCAHFRQAPIPAELRGVRRYLDSAMQEKEFKYTCPHSAEILAAYRPAVHPR

SEQ ID NO: 750592 - protein, 244 aa, Homo sapiens; identical to SEQ ID NO: 750591

SEQ ID NO: 750593 - protein, 244 aa, Homo sapiens; identical to SEQ ID NO: 750591

SEQ ID NO: 750594 - protein, 258 aa, Homo sapiens
LQLFVKASEDGESVGHCPSCQRLFMVLLLKGVPFTLTTVDTRRLRPHPVDPRLASHTGGPASSHPAAARRSPDVLKDFAPGSQLPILLYDSDAKTDTLQIEDFLEETLGPPDFPSLAPRYRESNTAGNDVFHKFSAFIKNPVPAQDEALYQQLLRALARLDSYLRAPLEHELAGEPQLRESRRRFLDGDRLTLADCSLLPKLHIVDTVCAHFRQAPIPAELRGVRRYLDSAMQEKEFKYTCPHSAEILAAYRPAVHPR

SEQ ID NO: 750595 - protein, 207 aa, Homo sapiens
MVLLLKGVPFTLTTVDTRRSPDVLKDFAPGSQLPILLYDSDAKTDTLQIEDFLEETLGPPDFPSLAPRYRESNTAGNDVFHKFSAFIKNPVPAQDEALYQQLLRALARLDSYLRAPLEHELAGEPQLRESRRRFLDGDRLTLADCSLLPKLHIVDTVCAHFRQAPIPAELRGVRRYLDSAMQEKEFKYTCPHSAEILAAYRPAVHPR

SEQ ID NO: 750596 - protein, 271 aa, Homo sapiens
RLTAAAPTMAETKLQLFVKASEDGESVGHCPSCQRLFMVLLLKGVPFTLTTVDTRRSPDVLKDFAPGSQLPILLYDSDAKTDTLQIEDFLEETLGPPDFPSLAPRYRESNTAGNDVFHKFSAFIKNPVPAQDEGEAGSGGRVPRREGALGLVLTAAACPLALYQQLLRALARLDSYLRAPLEHELAGEPQLRESRRRFLDGDRLTLADCSLLPKLHIVDTVCAHFRQAPIPAELRGVRRYLDSAMQEKEFKYTCPHSAEILAAYRPAVHPR

SEQ ID NO: 750597 - protein, 233 aa, Homo sapiens
AGTAHLSSRDMTGTPGAVATRDGEAPERSPPCSPSYDLTGKVMLLGDTGVGKTCFLIQFKDGAFLSGTFIATVGIDFRNKVVTVDGVRVKLQIWDTAGQERFRSVTHAYYRDAQALLLLYDITNKSSFDNIRAWLTEIHEYAQRDVVIMLLGNKADMSSERVIRSEDGETLAREYGVPFLETSAKTGMNVELAFLAIAKELKYRAGHQADEPSFQIRDYVESQKKRSSCCSFM

SEQ ID NO: 750598 - protein, 199 aa, Homo sapiens
AGTAHLSSRDMTGTPGAVATRDGEAPERSPPCSPSYDLTGKVMLLGDTGVGKTCFLIQFKDGAFLSGTFIATVGIDFRNKVVTVDGVRVKLQIWDTAGQERFRSVTHAYYRDAQALLLLYDITNKSSFDNIRAWLTEIHEYAQRDVVIMLLGNKADMSSERVIRSEDGETLAREYGVPFLETSAKTGMNVELAFLAIAK

SEQ ID NO: 750599 - protein, 233 aa, Homo sapiens; identical to SEQ ID NO: 750597

SEQ ID NO: 750600 - protein, 233 aa, Homo sapiens; identical to SEQ ID NO: 750597

SEQ ID NO: 750601 - protein, 233 aa, Homo sapiens; identical to SEQ ID NO: 750597

SEQ ID NO: 750602 - protein, 233 aa, Homo sapiens; identical to SEQ ID NO: 750597

SEQ ID NO: 750603 - protein, 152 aa, Homo sapiens
IPGFPALVYGKSPLTAWAWRMSARFISRSSSQQMGEPEGRWFSPGVGPLGGQALLRLPQPNSASLSFCRRPAGVRVPIVVLFCWRAPLDDQPLSSADVLLFTSGRLCVCLLGSRVFIGPGWGHGGSGWSWKCNIWTGKQECLSSPRSVGVEP

SEQ ID NO: 750604 - protein, 261 aa, Homo sapiens
LAAMRLSSSPPRGPQQLSSFGSVDWLSQSSCSGPTHTPRPADFSLGSLPGPGQTSGAREPPQAVSIKEAAGSSNLPAPERTMAGLSKEPNTLRAPRVRTAFTMEQVRTLEGVFQHHQYLSPLERKRLAREMQLSEVQIKTWFQNRRMKHKRQMQDPQLHSPFSGSLHAPPAFYSTSSGLANGLQLLCPWAPLSGPQALMLPPGSFWGLCQVAQEALASAGASCCGQPLASHPPTPGRPSLGPALSTGPRGLCAMPQTGDAF

SEQ ID NO: 750605 - protein, 101 aa, Homo sapiens
ETGEFTQLKELNIQGNCLTLLLPELGNLYLTGQKKVCKVENSPWVTPIAGQFQLDVSCVSECVCSETYEYLYGSTCRQIQNHQNIIITNQEKMSWETPDRQ

SEQ ID NO: 750606 - protein, 103 aa, Homo sapiens
RAWPPGDSGLALVNQLTAAADLGFRDTKRKTEGRRDEASGTSSGKRGPGTRGTVPCSLPLALSLTWHAECWAQRPQWHSGERVRRHNSVPPALAPHVHLRCTP

SEQ ID NO: 750607 - protein, 106 aa, Homo sapiens [sequence omitted]

SEQ ID NO: 750608 - protein, 395 aa, Homo sapiens
MWLPRVSSTAVTALLLAQTFLLLFLVSRPGPSSPAGGEARVHVLVLSSWRSGSSFVGQLFNQHPDVFYLMEPAWHVWTTLSQGSAATLHMAVRDLVRSVFLCDMDVFDAYLPWRRNLSDLFQWAVSRALCSPPACSAFPRGAISSEAVCKPLCARQSFTLAREACRSYSHVVLKEVRFFNLQVLYPLLSDPALNLRIVHLVRDPRAVLRSREQTAKALARDNGIVLGTNGTWVEADPGLRVVREVCRSHVRIAEAATLKPPPFLRGRYRLVRFEDLAREPLAEIRALYAFTGLSLTPQLEAWIHNITHGSGPGARREAFKTSSRNALNVSQAWRHALPFAKIRRVQELCAGALQLLGYRPVYSEDEQRNLALDLVLPRGLNGFTWASSTASHPRN

SEQ ID NO: 750609 - protein, 395 aa, Homo sapiens; identical to SEQ ID NO: 750608

SEQ ID NO: 750610 - protein, 395 aa, Homo sapiens; identical to SEQ ID NO: 750608

SEQ ID NO: 750611 - protein, 395 aa, Homo sapiens; identical to SEQ ID NO: 750608

SEQ ID NO: 750612 - protein, 114 aa, Homo sapiens [sequence omitted]

SEQ ID NO: 750613 - protein, 105 aa, Homo sapiens
GFPFPSDNQSSGEVRLLACPYPQMALKAPLQTPGTPRNPAAQPLLRTTWSLYSKGKKGPPGQVPRGCSNEVTDKAALQAAGGMRVQKHAADVSMGAFSHLPCSLY

SEQ ID NO: 750614 - protein, 108 aa, Homo sapiens
MGPQQRRWFWLIHLLSSSCSFSGRAFLEGHFCIIQEAVLKVNLKTTLLALLTIFKYQIAFIKSLPFKNMKRFAYPMWRPDEENLPGSYQVNTTCLIRKTQTRSEGAHV

SEQ ID NO: 750615 - protein, 74 aa, Homo sapiens
GTRLTDFKNEAVDSSRNSRSPWESHVLAKPSPGSRHCRSSTSPSLHSEALGTRERTPVLTSHIDPLYVLQLPPT

SEQ ID NO: 750616 - protein, 251 aa, Homo sapiens
RPQSSAPSARWALRRRSCWRLPTSRLASTGSSGGRTPRGPPTSTTPSVGASAAERRLRHLGGGDWEGNVGGVHLIEHLFCPKLSAIYRLSLITIGTVGMIVPFVGWLPEGVARILTHEAGITDIVVLQAALLHDTVEDTDTTLDEVELHFGAQVRRLVEEVTDDKTLPKLERKRLQVEQAPHSSPGAKLVKLADKLYNLRDLNRCTPEGWSEHRVQEYFEWAAQVVKGLQGTNRQLEEALKHLFKQRGLTI

SEQ ID NO: 750617 - protein, 152 aa, Homo sapiens
AAVVGPIRAMGSEAAQLLEAADFAARKHRQQRRKDPEGTPYINHPIGVARILTHEAGITDIVVLQAALLHDTVEDTDTTLDEVELHFGAQVRRLVEEVTDDKTLPKLERKRLQVEQAPHSSPGAKLVKLADKLYNLRDLNRCTPEGTLSYGL

SEQ ID NO: 750618 - protein, 152 aa, Homo sapiens; identical to SEQ ID NO: 750617

SEQ ID NO: 750619 - protein, 182 aa, Homo sapiens
AAVVGPIRAMGSEAAQLLEAADFAARKHRQQRRKDPEGTPYINHPIGVARILTHEAGITDIVVLQAALLHDTVEDTDTTLDEVELHFGAQVRRLVEEVTDDKTLPKLERKRLQVEQAPHSSPGAKLVKLADKLYNLRDLNRCTPEDGQNIESRNNSSGIDKHHRCHEEKRESGGTNIHSKSV

SEQ ID NO: 750620 - protein, 188 aa, Homo sapiens
AAVVGPIRAMGSEAAQLLEAADFAARKHRQQRRKDPEGTPYINHPIGVARILTHEAGITDIVVLQAALLHDTVEDTDTTLDEVELHFGAQVRRLVEEVTDDKTLPKLERKRLQVEQAPHSSPGAKLVKLADKLYNLRDLNRCTPEGWSEHRVQEYFEWAAQVVKGLQGTNRQLEEALKHLFKQRGLTI

SEQ ID NO: 750621 - protein, 188 aa, Homo sapiens; identical to SEQ ID NO: 750620

SEQ ID NO: 750622 - protein, 149 aa, Homo sapiens
AAVVGPIRAMGSEAAQLLEAADFAARKHRQQRRKDPEGTPYINHPIGVARILTHEAGITDIVVLQAALLHDTVEDTDTTLDEVELHFGAQVRRLVEEVTDDKTLPKLERKRLQVEQAPHSSPGAKLVKLADKLYNLRDLNRCTPEVKIQ

SEQ ID NO: 750623 - protein, 158 aa, Homo sapiens
RPQSSAPSARWALRRRSCWRLPTSRLASTGSSGGRTPRGPPTSTTPSVGASAAERRLRHLGGGDWEGNVGGVHLIEHLFCPKLSAIYRLSLITIGTVGMIVPFVGWLPEGKVLDQGHPASQSPQGATSGSPKPTTHRLGTTSDLTSCFAPPRQVWHGS

SEQ ID NO: 750624 - protein, 107 aa, Homo sapiens
LARLRIVPPSGSADIVSCVSAVAVEELKLGKMVCIPCIVIPVLLWIYKKFLEPYIYPLVSPFVSRIWPKKAIQESNDTNKGKVNFKGADMNGLPTKGPTEICDKKKD

SEQ ID NO: 750625 - protein, 107 aa, Homo sapiens; identical to SEQ ID NO: 750624

SEQ ID NO: 750626 - protein, 191 aa, Homo sapiens
LDPRSLRTRRTPRQSCKSRGSNLRVHFKNTRETAQAIKGMHIRKATKYLKDVTLQKQCVPFRRYNGGVGRCAQAKQWGWTQGRWPKKSAEFLLHMLKNAESNAELKGLDVDSLVIEHIQVNKAPKMRRRTYRAHGRINPYMSSPCHIEMILTEKEQIVPKPEEEVAQKNKDIPEETEETKTYGTGVNSALK

SEQ ID NO: 750627 - protein, 183 aa, Homo sapiens
MVRYSLDPENPTKSCKSRGSNLRVHFKNTRETAQAIKGMHIRKATKYLKDVTLQKQCVPFRRYNGGVGRCAQAKQWGWTQGRWPKKSAEFLLHMLKNAESNAELKGLDVDSLVIEHIQVNKAPKMRRRTYRAHGRINPYMSSPCHIEMILTEKEQIVPKPEEEVAQKNKDIQEELKNKNFGRE

SEQ ID NO: 750628 - protein, 78 aa, Homo sapiens
WLVEPVVESAEGSLSVSPALLRGPNPPAIAAILASGAPASRPPGGELLGLLNPRWRRWLLMREDVAEGLTLGAGSVGL

SEQ ID NO: 750629 - protein, 190 aa, Homo sapiens
MVRYSLDPENPTKSCKSRGSNLRVHFKNTRETAQAIKGMHIRKATKYLKDVTLQKQCVPFRRYNGGVGRCAQAKQWGWTQGRWPKKSAEFLLHMLKNAESNAELKGLDVDSLVIEHIQVNKAPKMRRRTYRAHGRINPYMSSPCHIEMILTEKEQIVPKPEEEVAQKNKDIPEETEETKTYGTGVNSALK

SEQ ID NO: 750630 - protein, 178 aa, Homo sapiens
MVRYSLDPENPTKSCKSRGSNLRVHFKNTRETAQAIKGMHIRKATKYLKDVTLQKQCVPFRRYNGGVGRCAQAKQWGWTQGRWPKKSAEFLLHMLKNAESNAELKGLDVDSLVIEHIQVNKAPKMRRRTYRAHGRINPYMSSPCHIEMILTEKEQIVPKPEEEVAQKNKDINAEGEET

SEQ ID NO: 750631 - protein, 190 aa, Homo sapiens; identical to SEQ ID NO: 750629

SEQ ID NO: 750632 - protein, 253 aa, Homo sapiens
MVRYSLDPENPTKSCKSRGSNLRVHFKNTRETAQAIKGMHIRKATKYLKDVTLQKQCVPFRRYNGGVGRCAQAKQWGWTQGRWPKKSAEFLLHMLKNAESNAELKGLDVDSLVIEHIQVNKAPKMRRRTYRAHGRINPYMSSPCHIEMILTEKEQIVPKPEEEVAQKNKVEELKLGKMVCIPCIVIPVLLWIYKKFLEPYIYPLVSPFVSRIWPKKAIQESNDTNKGKVNFKGADMNGLPTKGPTEICDKKKD

SEQ ID NO: 750633 - protein, 253 aa, Homo sapiens; identical to SEQ ID NO: 750632

SEQ ID NO: 750634 - protein, 253 aa, Homo sapiens; identical to SEQ ID NO: 750632

SEQ ID NO: 750635 - protein, 253 aa, Homo sapiens; identical to SEQ ID NO: 750632

SEQ ID NO: 750636 - protein, 190 aa, Homo sapiens; identical to SEQ ID NO: 750629

SEQ ID NO: 750637 - protein, 190 aa, Homo sapiens; identical to SEQ ID NO: 750629

SEQ ID NO: 750638 - protein, 190 aa, Homo sapiens; identical to SEQ ID NO: 750629

SEQ ID NO: 750639 - protein, 170 aa, Homo sapiens
MVRYSLDPENPTKSCKSRGSNLRVHFKNTRETAQAIKGMHIRKATKYLKDVTLQKQCVPFRRYNGGVGRCAQAKQWGWTQGRWPKKSAEFLLHMLKNAESNAELKGLDVDSLVIEHIQVNKAPKMRRRTYRAHGRINPYMSSPCHIEMILTEKEQIVPKPEEEVAQKNKG

SEQ ID NO: 750640 - protein, 170 aa, Homo sapiens; identical to SEQ ID NO: 750639

SEQ ID NO: 750641 - protein, 253 aa, Homo sapiens; identical to SEQ ID NO: 750632

SEQ ID NO: 750642 - protein, 180 aa, Homo sapiens
MVRYSLDPENPTKSCKSRGSNLRVHFKNTRETAQAIKGMHIRKATKYLKDVTLQKQCVPFRRYNGGVGRCAQAKQWGWTQGRWPKKSAEFLLHMLKNAESNAELKGLDVDSLVIEHIQVNKAPKMRRRTYRAHGRINPYMSSPCHIEMILTEKEQIVPKPEEEVAQKNKDIPDTTGKQTL

SEQ ID NO: 750643 - protein, 253 aa, Homo sapiens; identical to SEQ ID NO: 750632

SEQ ID NO: 750644 - protein, 160 aa, Homo sapiens
MLKNAESNAELKGLDVDSLVIEHIQVNKAPKMRRRTYRAHGRINPYMSSPCHIEMILTEKEQIVPKPEEEVAQKNKVEELKLGKMVCIPCIVIPVLLWIYKKFLEPYIYPLVSPFVSRIWPKKAIQESNDTNKGKVNFKGADMNGLPTKGPTEICDKKKD

SEQ ID NO: 750645 - protein, 243 aa, Homo sapiens
MRFIVVIQQFLMFHSKKNTRETAQAIKGMHIRKATKYLKDVTLQKQCVPFRRYNGGVGRCAQAKQWGWTQGRWPKKSAEFLLHMLKNAESNAELKGLDVDSLVIEHIQVNKAPKMRRRTYRAHGRINPYMSSPCHIEMILTEKEQIVPKPEEEVAQKNKVEELKLGKMVCIPCIVIPVLLWIYKKFLEPYIYPLVSPFVSRIWPKKAIQESNDTNKGKVNFKGADMNGLPTKGPTEICDKKKD

SEQ ID NO: 750646 - protein, 170 aa, Homo sapiens; identical to SEQ ID NO: 750639

SEQ ID NO: 750647 - protein, 105 aa, Homo sapiens
MVRYSLDPENPTKSCKSRGSNLRVHFKNTRETAQAIKGMHIRKATKYLKDVTLQKQCVPFRRYNGGVGRCAQAKQWGWTQGRWPKKSAEFLLHMLKPRGILTQVE

SEQ ID NO: 750648 - protein, 190 aa, Homo sapiens; identical to SEQ ID NO: 750629

SEQ ID NO: 750649 - protein, 105 aa, Homo sapiens; identical to SEQ ID NO: 750647

SEQ ID NO: 750650 - protein, 195 aa, Homo sapiens
MVRYSLDPENPTKSCKSRGSNLRVHFKNTRETAQAIKGMHIRKATKYLKDVTLQKQCVPFRRYNGGVGRCAQAKQWGWTQGRWPKKSAEFLLHMLKNAESNAELKGLDVDSLVIEHIQVNKAPKMRRRTYRAHGRINPYMSSPCHIEMILTEKEQIVPKPEEEVAQKNKDIPEETGETHHLSMIICLPCWPPCPN

SEQ ID NO: 750651 - protein, 144 aa, Homo sapiens
RSNIRMVTKQCVPFRRYNGGVGRCAQAKQWGWTQGRWPKKSAEFLLHMLKNAESNAELKGLDVDSLVIEHIQVNKAPKMRRRTYRAHGRINPYMSSPCHIEMILTEKEQIVPKPEEEVAQKNKDIPEETEETKTYGTGVNSALK

SEQ ID NO: 750652 - protein, 190 aa, Homo sapiens; identical to SEQ ID NO: 750629

SEQ ID NO: 750653 - protein, 190 aa, Homo sapiens; identical to SEQ ID NO: 750629

SEQ ID NO: 750654 - protein, 190 aa, Homo sapiens; identical to SEQ ID NO: 750629

SEQ ID NO: 750655 - protein, 190 aa, Homo sapiens; identical to SEQ ID NO: 750629

SEQ ID NO: 750656 - protein, 253 aa, Homo sapiens; identical to SEQ ID NO: 750632

SEQ ID NO: 750657 - protein, 253 aa, Homo sapiens; identical to SEQ ID NO: 750632

SEQ ID NO: 750658 - protein, 190 aa, Homo sapiens; identical to SEQ ID NO: 750629

SEQ ID NO: 750659 - protein, 190 aa, Homo sapiens; identical to SEQ ID NO: 750629

SEQ ID NO: 750660 - protein, 253 aa, Homo sapiens; identical to SEQ ID NO: 750632

SEQ ID NO: 750661 - protein, 186 aa, Homo sapiens
MVRYSLDPENPTKSCKSRGSNLRVHFKNTRETAQAIKGMHIRKATKYLKDVTLQKQCVPFRRYNGGVGRCAQAKQWGWTQGRWPKKSAEFLLHMLKNAESNAELKGLDVDSLVIEHIQVNKAPKMRRRTYRAHGRINPYMSSPCHIEMILTEKEQIVPKPEEEVAQKNKDIQKKWRTKLMAGSKSA

SEQ ID NO: 750662 - protein, 170 aa, Homo sapiens; identical to SEQ ID NO: 750639

SEQ ID NO: 750663 - protein, 183 aa, Homo sapiens; identical to SEQ ID NO: 750627

SEQ ID NO: 750664 - protein, 253 aa, Homo sapiens; identical to SEQ ID NO: 750632

SEQ ID NO: 750665 - protein, 243 aa, Homo sapiens
MSYSCKSRGSNLRVHFKNTRETAQAIKGMHIRKATKYLKDVTLQKQCVPFRRYNGGVGRCAQAKQWGWTQGRWPKKSAEFLLHMLKNAESNAELKGLDVDSLVIEHIQVNKAPKMRRRTYRAHGRINPYMSSPCHIEMILTEKEQIVPKPEEEVAQKNKVEELKLGKMVCIPCIVIPVLLWIYKKFLEPYIYPLVSPFVSRIWPKKAIQESNDTNKGKVNFKGADMNGLPTKGPTEICDKKKD

SEQ ID NO: 750666 - protein, 215 aa, Homo sapiens
MHIRKATKYLKDVTLQKQCVPFRRYNGGVGRCAQAKQWGWTQGRWPKKSAEFLLHMLKNAESNAELKGLDVDSLVIEHIQVNKAPKMRRRTYRAHGRINPYMSSPCHIEMILTEKEQIVPKPEEEVAQKNKVEELKLGKMVCIPCIVIPVLLWIYKKFLEPYIYPLVSPFVSRIWPKKAIQESNDTNKGKVNFKGADMNGLPTKGPTEICDKKKD

SEQ ID NO: 750667 - protein, 130 aa, Homo sapiens
MVRYSLDPENPTKSCKSRGSNLRVHFKNTRETAQAIKGMHIRKATKYLKDVTLQKQCVPFRRYNGGVGRCAQAKQWGWTQGRWPKKSAEFLLHMLKNAESNAELKVTQTTNILCNLGGCLINVGCSDLCP

SEQ ID NO: 750668 - protein, 180 aa, Homo sapiens
MSYSCKSRGSNLRVHFKNTRETAQAIKGMHIRKATKYLKDVTLQKQCVPFRRYNGGVGRCAQAKQWGWTQGRWPKKSAEFLLHMLKNAESNAELKGLDVDSLVIEHIQVNKAPKMRRRTYRAHGRINPYMSSPCHIEMILTEKEQIVPKPEEEVAQKNKDIPEETEETKTYGTGVNSALK

SEQ ID NO: 750669 - protein, 134 aa, Homo sapiens
RERQKGHREAERTVYIHIHSGLQEEEMYCLTVLSLTHSLRHPGIHTAASCHCKRLPELFLFIQEERKSRQRLREINKCISKEPERRCFHLAVLPSIQAQREMHSRTLTASTNSIPSHGAGRAHDTKCPTRRPSC

SEQ ID NO: 750670 - protein, 288 aa, Homo sapiens
SVGDGRDLLEEQRALVLARAAGGDVIDARHHVVLGREGHDGHARGRGHHGEVGQQLADEHELAAEVDFAHAGRIIHQEDKLQALAELPQQPHASPERLAQPLHSAPRRFVARSGRRGDTPGGPGRGLGEEAEAEIARRGHLLKGRPARNERQTPATKGQARPHRAGDRAAAPERRRRLGREEALGGRTRRGACAELGAGQRPRASAPFHLTLGTDTIQTPQQLGNSGGNGARSLPLSLSSFFLPSLLLLSLPEAYKMFEGKGAVKKNLPLPSFSPSLPLPAPVYFLYL

SEQ ID NO: 750671 - protein, 110 aa, Homo sapiens
FFEMESHSVTQAGVQSHDLSSLQPPPPGFKQSSLFGLPSSWDYRCVPPCPANFFVFLVETGFRHVGQAGLELLTSNDLPVSACQSAGITGVSHRSQRKSMILYEVTICYP

SEQ ID NO: 750672 - protein, 87 aa, Homo sapiens
RTVVHCFRCPRLSNWPRRSTSAKLPGSSSLATPAARSPAEAGKQRACAVGTGAGGEKRGAEGGRWSRVAYRAACDAGTPRAPNVAPV

SEQ ID NO: 750673 - protein, 87 aa, Homo sapiens; identical to SEQ ID NO: 750672

SEQ ID NO: 750674 - protein, 1327 aa, Homo sapiens
MRSFLQQDVNKTKSRLNVLNGLANNMDDLKINTDITGAKEELLDDNNFISDKESGVHKPKDCQTSFQKNNTLTLPEELSKDKSENALSGGQSSLFIHAGAPTVSSENFILPKGAAVNGPVSHSSLTKTSNMNKGSVSLTTGQPVDQPTTESCSTLKVAADLQLSTPQKASQHQVLFLLSDVAHAKNPTHSNKKLPTSASVGCDIQNSVGSNIKSDGTLINQVEVGEDGEDLLVKDDCVNTVTGISSGTDGFRSENDTNWDPQKEFIQFLMTNEETVDKAPPHSKIGLEKKKKAKMDVSKITRYTEDCFSDSNCVPNKSKMQEVDFLEQNEELQAVDSQKYALSKVKPESTDEDLESVDAFQHLIYNPDKCGEESSPVHTSTFLSNTLKKKCEESDSESPATFSTEEPSFYPCTKCNVNFREKKHLHRHMMYHLDGNSHFRHLNVPRPYACRECGRTFRDRNSLLKHMIIHQERRQKLMEEIRELKELQDEGRSARLQCPQCVFGTNCPKTFVQHAKTHEKDKRYYCCEECNFMAVTENELECHRGIAHGAVVKCPMVTSDIAQRKTQKKTFMKDSVVGSSKKSATYICKMCPFTTSAKSVLKKHTEYLHSSSCVDSFGSPLGLDKRKNDILEEPVDSDSTKTLTKQQSTTFPKNSALKQDVKRTFGSTSQSSSFSKIHKRPHRIQKARKSIAQSGVNMCNQNSSPHKNVTIKSSVDQKPKYFHQAAKEKSNAKANSHYLYRHKYENYRMIKKSGESYPVHFKKEEASSLNSLHLFSSSSNSHNNFISDPHKPDAKRPESFKDHRRVAVKRVIKESKKESSVGGEDLDSYPDFLHKMTVVVLQKLNSAEKKDSYETEDESSWDNVELGDYTTQAIEDETYSDINQEHVNLFPLFKSKVEGQEPGENATLSYDQNDGFYFEYYEDTGSNNFLHEIHDPQHLETADASLSKHSSVFHWTDLSLEKKSCPYCPATFETGVGLSNHVRGHLHRAGLSYEARHVVSPEQIATSDKMQHFKRTGTGTPVKRVRKAIEKSETTSEHTCQLCGGWFDTKIGLSNHVRGHLKRLGKTKWDAHKSPICVLNEMMQNEEKYEKILKALNSRRIIPRPFVAQKLASSDDFISQNVIPLEAYRNGLKTEALSVSASEEEGLNFLNEYDETKPELPSGKKNQSLTLIELLKNKRMGEERNSAISPQKIHNQTARKRFVQKCVLPLNEDSPLMYQPQKMDLTMHSALDCKQKKSRSRSGSKKKMLTLPHGADEVYILRCRFCGLVFRGPLSVQEDWIKHLQRHIVNANLPRTGAGMVEVTSLLKKPASITETSFSLLMAEAAS

SEQ ID NO: 750675 - protein, 1327 aa, Homo sapiens
MRSFLQQDVNKTKSRLNVLNGLANNMDDLKINTDITGAKEELLDDNNFISDKESGVHKPKDCQTSFQKNNTLTLPEELSKDKSENALSGGQSSLFIHAGAPTVSSENFILPKGAAVNGPVSHSSLTKTSNMNKGSVSLTTGQPVDQPTTESCSTLKVAADLQLSTPQKASQHQVLFLLSDVAHAKNPTHSNKKLPTSASVGCDIQNSVGSNIKSDGTLINQVEVGEDGEDLLVKDDCVNTVTGISSGTDGFRSENDTNWDPQKEFIQFLMTNEETVDKAPPHSKIGLEKKRKRKMDVSKITRYTEDCFSDSNCVPNKSKMQEVDFLEQNEELQAVDSQKYALSKVKPESTDEDLESVDAFQHLIYNPDKCGEESSPVHTSTFLSNTLKKKCEESDSESPATFSTEEPSFYPCTKCNVNFREKKHLHRHMMYHLDGNSHFRHLNVPRPYACRECGRTFRDRNSLLKHMIIHQERRQKLMEEIRELKELQDEGRSARLQCPQCVFGTNCPKTFVQHAKTHEKDKRYYCCEECNFMAVTENELECHRGIAHGAVVKCPMVTSDIAQRKTQKKTFMKDSVVGSSKKSATYICKMCPFTTSAKSVLKKHTEYLHSSSCVDSFGSPLGLDKRKNDILEEPVDSDSTKTLTKQQSTTFPKNSALKQDVKRTFGSTSQSSSFSKIHKRPHRIQKARKSIAQSGVNMCNQNSSPHKNVTIKSSVDQKPKYFHQAAKEKSNAKANSHYLYRHKYENYRMIKKSGESYPVHFKKEEASSLNSLHLFSSSSNSHNNFISDPHKPDAKRPESFKDHRRVAVKRVIKESKKESSVGGEDLDSYPDFLHKMTVVVLQKLNSAEKKDSYETEDESSWDNVELGDYTTQAIEDETYSDINQEHVNLFPLFKSKVEGQEPGENATLSYDQNDGFYFEYYEDTGSNNFLHEIHDPQHLETADASLSKHSSVFHWTDLSLEKKSCPYCPATFETGVGLSNHVRGHLHRAGLSYEARHVVSPEQIATSDKMQHFKRTGTGTPVKRVRKAIEKSETTSEHTCQLCGGWFDTKIGLSNHVRGHLKRLGKTKWDAHKSPICVLNEMMQNEEKYEKILKALNSRRIIPRPFVAQKLASSDDFISQNVIPLEAYRNGLKTEALSVSASEEEGLNFLNEYDETKPELPSGKKNQSLTLIELLKNKRMGEERNSAISPQKIHNQTARKRFVQKCVLPLNEDSPLMYQPQKMDLTMHSALDCKQKKSRSRSGSKKKMLTLPHGADEVYILRCRFCGLVFRGPLSVQEDWIKHLQRHIVNANLPRTGAGMVEVTSLLKKPASITETSFSLLMAEAAS

SEQ ID NO: 750676 - protein, 1327 aa, Homo sapiens; identical to SEQ ID NO: 750674

SEQ ID NO: 750677 - protein, 1330 aa, Homo sapiens
ARYDTASSLYTGCTGNQELNVLNGLANNMDDLKINTDITGAKEELLDDNNFISDKESGVHKPKDCQTSFQKNNTLTLPEELSKDKSENALSGGQSSLFIHAGAPTVSSENFILPKGAAVNGPVSHSSLTKTSNMNKGSVSLTTGQPVDQPTTESCSTLKVAADLQLSTPQKASQHQVLFLLSDVAHAKNPTHSNKKLPTSASVGCDIQNSVGSNIKSDGTLINQVEVGEDGEDLLVKDDCVNTVTGISSGTDGFRSENDTNWDPQKEFIQFLMTNEETVDKAPPHSKIGLEKKKKAKMDVSKITRYTEDCFSDSNCVPNKSKMQEVDFLEQNEELQAVDSQKYALSKVKPESTDEDLESVDAFQHLIYNPDKCGEESSPVHTSTFLSNTLKKKCEESDSESPATFSTEEPSFYPCTKCNVNFREKKHLHRHMMYHLDGNSHFRHLNVPRPYACRECGRTFRDRNSLLKHMIIHQERRQKLMEEIRELKELQDEGRSARLQCPQCVFGTNCPKTFVQHAKTHEKDKRYYCCEECNFMAVTENELECHRGIAHGAVVKCPMVTSDIAQRKTQKKTFMKDSVVGSSKKSATYICKMCPFTTSAKSVLKKHTEYLHSSSCVDSFGSPLGLDKRKNDILEEPVDSDSTKTLTKQQSTTFPKNSALKQDVKRTFGSTSQSSSFSKIHKRPHRIQKARKSIAQSGVNMCNQNSSPHKNVTIKSSVDQKPKYFHQAAKEKSNAKANSHYLYRHKYENYRMIKKSGESYPVHFKKEEASSLNSLHLFSSSSNSHNNFISDPHKPDAKRPESFKDHRRVAVKRVIKESKKESSVGGEDLDSYPDFLHKMTVVVLQKLNSAEKKDSYETEDESSWDNVELGDYTTQAIEDETYSDINQEHVNLFPLFKSKVEGQEPGENATLSYDQNDGFYFEYYEDTGSNNFLHEIHDPQHLETADASLSKHSSVFHWTDLSLEKKSCPYCPATFETGVGLSNHVRGHLHRAGLSYEARHVVSPEQIATSDKMQHFKRTGTGTPVKRVRKAIEKSETTSEHTCQLCGGWFDTKIGLSNHVRGHLKRLGKTKWDAHKSPICVLNEMMQNEEKYEKILKALNSRRIIPRPFVAQKLASSDDFISQNVIPLEAYRNGLKTEALSVSASEEEGLNFLNEYDETKPELPSGKKNQSLTLIELLKNKRMGEERNSAISPQKIHNQTARKRFVQKCVLPLNEDSPLMYQPQKMDLTMHSALDCKQKKSRSRSGSKKKMLTLPHGADEVYILRCRFCGLVFRGPLSVQEDWIKHLQRHIVNANLPRTGAGMVEVTSLLKKPASITETSFSLLMAEAAS

SEQ ID NO: 750678 - protein, 105 aa, Homo sapiens
MLIRQNLALDCKQKKSRSRSGSKKKMLTLPHGADEVYILRCRFCGLVFRGPLSVQEDWIKHLQRHIVNANLPRTGAGMVEVTSLLKKPASITETSFSLLMAEAAS

SEQ ID NO: 750679 - protein, 87 aa, Homo sapiens; identical to SEQ ID NO: 750672

SEQ ID NO: 750680 - protein, 87 aa, Homo sapiens; identical to SEQ ID NO: 750672

SEQ ID NO: 750681 - protein, 87 aa, Homo sapiens
ACGRGGRWGPRSLRSDSLAFVSLGSYSARGKQVCSTSPVNLKMSCPRLFSVIGNLGGGAKGYLLRDFYRQLLLGSIYGLATLVEKFS

SEQ ID NO: 750682 - protein, 1327 aa, Homo sapiens; identical to SEQ ID NO: 750675

SEQ ID NO: 750683 - protein, 126 aa, Homo sapiens [sequence omitted]

SEQ ID NO: 750684 - protein, 258 aa, Homo sapiens
MARPPVPGSVVVPNWHESAEGKEYLACILRKNRRRVFGLLERPVLLPPVSIDTASYKIFVSGKSGVGKTALVAKLAGLEVPVVHHGTTGIQTTVVFWPAKLQASSRVVMFRFEFWDCGESALKKFDHMLLACMENTDAFLFLFSFTDRASFEDLPGQLARIAGEAPGVVRMVIGSKFDQYMHTDVPERDLTAFRQAWELPLLRVKSVPGRRLADGRTLDGRAGLADVAHILNGLAEQLWHQDQVAAGLLPNPPESAPE

SEQ ID NO: 750685 - protein, 103 aa, Homo sapiens
RSSSMDQRTLGISCLLGSRTRETAEHRVTYLWAPTNRRPLRPAVCHPCPFLLWSGFLGFARDVFKCSAQNRGEGGVWWKFFVMMSVWKAAVQTFNCYYYVLQV

SEQ ID NO: 750686 - protein, 110 aa, Homo sapiens
SLKVQVHFKPHTNFLLFLLCTAKTGGLLTQKTGWESGLGPLSSPETPPPRQDAGRGIPFSPHGKEGAPSHRKPWAAPACSFFLEFSSFPTTCLGVVPIGVCVSVCAWICV

SEQ ID NO: 750687 - protein, 150 aa, Homo sapiens
GISVLPLKSRLYQKMLTGKGLDGLHVERLPIMDTSLKTINDEAPTVALSFQLLSSERPENFLTPSGPPETHRVSRAVGMPLSLTHPTLFQARHPSLFLTLDYVLVYPLTSGSVSSSIHHLRLKRLINETHNSAAGMQQIFTAPFQFAERL

SEQ ID NO: 750688 - protein, 165 aa, Homo sapiens
MALLALLLVVALPRVWTDANLTARQRDPEDSQRTDEGDNRVWCHVCERENTFECQNPRRCKWTEPYCVIAAVKIFPRFFMVAKQCSAGCAAMERPKPEEKRFLLEEPMPFFYLKCCKIRYCNLEGPPINSSVFKEYAGSMGESCGGLWLAILLLLASIAAGLSLS

SEQ ID NO: 750689 - protein, 165 aa, Homo sapiens; identical to SEQ ID NO: 750688

SEQ ID NO: 750690 - protein, 165 aa, Homo sapiens; identical to SEQ ID NO: 750688

SEQ ID NO: 750691 - protein, 105 aa, Homo sapiens
MALLALLLVVALPRVWTDANLTARQRDPEDSQRTDEGDNRVWCHVCERENTFECQNPRRCKWTEPYCVIAAVTVLRWLCSDGETQARGEAVSPGRAHALLLPQVL

SEQ ID NO: 750692 - protein, 158 aa, Homo sapiens
MRLQRPRQAPAGGRRAPRGGRGSPYRPDPGRGARRLRRFQKGGEGAPRADPPWAPLGTMALLALLLVVALPRVWTDANLTARQRDPEDSQRTDEGDNRVWCHVCERENTFECQNPRRCKWTEPYCVIAAVRRSSGLVNSDSAQQSLSSPSVSTKLVGC

SEQ ID NO: 750693 - protein, 931 aa, Homo sapiens
MRKGLRATAARCGLGLGYLLQMLVLPALALLSASGTGSAAQDDDFFHELPETFPSDPPEPLPHFLIEPEEAYIVKNKPVNLYCKASPATQIYFKCNSEWVHQKDHIVDERVDETSGLIVREVSIEISRQQVEELFGPEDYWCQCVAWSSAGTTKSRKAYVRIAYLRKTFEQEPLGKEVSLEQEVLLQCRPPEGIPVAEVEWLKNEDIIDPVEDRNFYITIDHNLIIKQARLSDTANYTCVAKNIVAKRKSTTATVIVYVNGGWSTWTEWSVCNSRCGRGYQKRTRTCTNPAPLNGGAFCEGQSVQKIACTTLCPVDGRWTPWSKWSTCGTECTHWRRRECTAPAPKNGGKDCDGLVLQSKNCTDGLCMQTAPDSDDVALYVGIVIAVIVCLAISVVVALFVYRKNHRDFESDIIDSSALNGGFQPVNIKAARQDLLAVPPDLTSAAAMYRGPVYALHDVSDKIPMTNSPILDPLPNLKIKVYNTSGAVTPQDDLSEFTSKLSPQMTQSLLENEALSLKNQSLARQTDPSCTAFGSFNSLGGHLIVPNSGVSLLIPAGAIPQGRVYEMYVTVHRKETMRPPMDDSQTLLTPVVSCGPPGALLTRPVVLTMHHCADPNTEDWKILLKNQAAQGQWEDVVVVGEENFTTPCYIKLDAEACHILTENLSTYALVGHSTTKAAAKRLKLAIFGPLCCSSLEYSIRVYCLDDTQDALKEILHLERQTGGQLLEEPKALHFKGSTHNLRLSIHDIAHSLWKSKLLAKYQEIPFYHVWSGSQRNLHCTFTLERFSLNTVELVCKLCVRQVEGEGQIFQLNCTVSEEPTGIDLPLLDPANTITTVTGPSAFSIPLPIRQKLCSSLDAPQTRGHDWRMLAHKLNLDRYLNYFATKSSPTGVILDLWEAQNFPDGNLSMLAAVLEEMGRHETVVSLAAEGQY

SEQ ID NO: 750694 - protein, 163 aa, Homo sapiens
MRKGLRATAARCGLGLGYLLQMLVLPALALLSASGTGSAAQDDDFFHELPETFPSDPPEPLPHFLIEPEEAYIVKNKPVNLYCKASPATQIYFKCNSEWVHQKDHIVDERVDETSGLIVREVSIEISRQQVEELFGPEDYWCQCVAWSSAGTTKSRKAYVRIA

SEQ ID NO: 750695 - protein, 571 aa, Homo sapiens
QSLTLQAVGPDTDSAAPASQPRTPSEAQAPGAALEGSPAPQPPVPSPLHLRAPLTLERHRELSRGGLGKFPGPLCQEVPGSPALHPPPPPRAVPGGAAPWSGEAGAVCSGSPDPSRSCVSQPPRPPADHAPAPLALQSHWAVSPPLPARQGLRAMGSAHPRPWLRLRPQPQPRPALWVLLFFLLLLAAAMPRSAPNDILDLRLPPGPVLNANTVCLTLPGLSRRQMEVCVRHPDVAASAIQGIQIAIHECQHQFRDQRWNCSSLETRNKIPYESPIFSRGFRESAFAYAIAAAGVVHAVSNACALGKLKACGCDASRRGDEEAFRRKLHRLQLDALQRGKGLSHGVPEHPALPTASPGLQDSWEWGGCSPDMGFGERFSKDFLDSREPHRDIHARMRLHNNRVGRQAVMENMRRKCKCHGTSGSCQLKTCWQVTPEFRTVGALLRSRFHRATLIRPHNRNGGQLEPGPAGAPSPAPGAPGPRRRASPADLVYFEKSPDFCEREPRLDSAGTVGRLCNKSSAGSDGCGSMCCGRGHNILRQTRSERCHCRFHWCCFVVCEECRITEWVSVCK

SEQ ID NO: 750696 - protein, 571 aa, Homo sapiens; identical to SEQ ID NO: 750695

SEQ ID NO: 750697 - protein, 417 aa, Homo sapiens [sequence omitted]

SEQ ID NO: 750698 - protein, 605 aa, Homo sapiens
QSLTLQAVGPDTDSAAPASQPRTPSEAQAPGAALEGSPAPQPPVPSPLHLRAPLTLERHRELSRGGLGKFPGPLCQEVPGSPALHPPPPPRAVPGGAAPWSGEAGAVCSGSPDPSRSCVSQPPRPPADHAPAPLALQSHWAVSPPLPARQGLRAMGSAHPRPWLRLRPQPQPRPALWVLLFFLLLLAAAMPRSAPNDILDLRLPPGPVLNANTVCLTLPGLSRRQMEVCVRHPDVAASAIQGIQIAIHECQHQFRDQRWNCSSLETRNKIPYESPIFSRGFRESAFAYAIAAAGVVHAVSNACALGKLKACGCDASRRGDEEAFRRKLHRLQLDALQRGKGLSHGVPEHPALPTASPGLQDSWEWGGCSPDMGFGERFSKDFLDSREPHRDIHARMRLHNNRVGRQAVMENMRRKCKCHGTSGSCQLKTCWQVTPEFRTVGALLRSRFHRATLIRPHNRNGGQLEPGPAGAPSPAPGAPGPRRRASPADLVYFEKSPDFCEREPRLDSAGTVGRLCNKSSAGSDGCGSMCCGRGHNILRQTRSERCHCRFHWCCFVVCEECRITEWVSVCKVSPCRPGWSAVVQSRLAAASTSRAQAILPPQPPE

SEQ ID NO: 750699 - protein, 393 aa, Homo sapiens
GCKCHAGGFGQPSPSMSSFDLPAPSPPRCSPQFPSIGQEPPEMNLYYENFFHPQGVPSPQRPSFEGGGEYGATPNPYLWFNGPTMTPPPYLPGPNASPFLPQAYGVQRPLLPSVSGLGGSDLGWLPIPSQEELMKLVRPPYSYSALIAMAIHGAPDKRLTLSQIYQYVADNFPFYNKSKAGWQNSIRHNLSLNDCFKKVPRDEDDPGKGNYWTLDPNCEKMFDNGNFRRKRKRKSDVSSSTASLALEKTESSLPVDSPKTTEPQDILDGASPGGTTSSPEKRPSPPPSGAPCLNSFLSSMTAYVSGGSPTSHPLVTPGLSPEPSDKTGQNSLTFNSFSPLTNLSNHSGGGDWANPMPTNMLSYGGSVLSQFSPHFYNSVNTSGVLYPREGTEV

SEQ ID NO: 750700 - protein, 1010 aa, Homo sapiens
HEAPRLRQLVVTEEDGGARPEALGKIAPRTPAELGARADQELVTALMCDLRRPAAGGMMDLAYVCEWEKWSKSTHCPSVPLACAWSCRNLITFTMDLRSDDQDLTRMIHILDTEHPWDLHSIPSEHHEAITCLEWDQSGSRLLSADADGQIKCWSMADHLANSWESSVGSLVEGDPIVALSWLHNGVKLALHVEKSGASSFGEKFSRVKFSPSLTLFGGKPMEGWIAVTVSGLVTVSLLKPSGQVLTSTESLCRLRGRVALADIAFTGGGNIVVATADGSSASPVQFYKVCVSVVSEKCRIDTEILPSLFMRCTTDLNRKDKFPAITHLKFLARDMSEQVLLCASSQTSSIVECWSLRKEGLPVNNIFQQISPVVGDKQPTILKWRILSATNDLDRVSAVALPKLPISLTNTDLKVASDTQFYPGLGLALAFHDGSVHIVHRLSLQTMAVFYSSAAPRPVDEPAMKRPRTAGPAVHLKAMQLSWTSLALVGIDSHGKLSVLRLSPSMGHPLEVGLALRHLLFLLEYCMVTGYDWWDILLHVQPSMVQSLVEKLHEEYTRQTAALQQVLSTRILAMKASLCKLSPCTVTRVCDYHTKLFLIAISSTLKSLLRPHFLNTPDKSPGDRLTEICTKITDVDIDKVMINLKTEEFVLDMNTLQALQQLLQWVGDFVLYLLASLPNQPCPTSEPCPTSEPSPPRSPPPPRSPPLHEASAGSLLRPGHSFLRDGTSLGMLRELMVVIRIWGLLKPSCLPVYTATSDTQDSMSLLFRLLTKLWICCRDEGPASEPDEALVDECCLLPSQLLIPSLDWLPASDGLVSRLQPKQPLRLQFGRAPTLPGSAATLQLDGLARAPGQPKIDHLRRLHLGACPTEECKACTRCGCVTMLKSPNRTTAVKQWEQRWIKNCLCGGLWWRVPLSYTLSPAAPQLLLSYPSAAPEPGCCKSHRSPWTLLGAVNLSPPCRAVEGRGPDACVTSRASEEAPAFVQLGPQSTHHSPRTPRSLDHLHPEDRP

SEQ ID NO: 750701 - protein, 797 aa, Homo sapiens
HEAPRLRQLVVTEEDGGARPEALGKIAPRTPAELGARADQELVTALMCDLRRPAAGGMMDLAYVCEWEKWSKSTHCPSVPLACAWSCRNLITFTMDLRSDDQDLTRMIHILDTEHPWDLHSIPSEHHEAITCLEWDQSGSRLLSADADGQIKCWSMADHLANSWESSVGSLVEGDPIVALSWLHNGVKLALHVEKSGASSFGEKFSRVKFSPSLTLFGGKPMEGWIAVTVSGLVTVSLLKPSGQVLTSTESLCRLRGRVALADIAFTGGGNIVVATADGSSASPVQFYKVCVSVVSEKCRIDTEILPSLFMRCTTDLNRKDKFPAITHLKFLARDMSEQVLLCASSQTSSIVECWSLRKEGLPVNNIFQQISPVVGDKQPTILKWRILSATNDLDRVSAVALPKLPISLTNTDLKVASDTQFYPGLGLALAFHDGSVHIVHRLSLQTMAVFYSSAAPRPVDEPAMKRPRTAGPAVHLKAMQLSWTSLALVGIDSHGKLSVLRLSPSMGHPLEVGLALRHLLFLLEYCMVTGYDWWDILLHVQPSMVQSLVEKLHEEYTRQTAALQQVLSTRILAMKASLCKLSPCTVTRVCDYHTKLFLIAISSTLKSLLRPHFLNTPDKSPGDRLTEICTKITDVDIDKVMINLKTEEFVLDMNTLQALQQLLQWVGDFVLYLLASLPNQVAMRAQRASRTRRWWMNAACCPASCLSPAWTGCQPATAWLAACSPSSPFVCSLAGRPRCLAVLPPCSSTASPGPQASPRSTTCGGCTLALAPRRNARPAPGAAVSPCSSRPTEPRR

SEQ ID NO: 750702 - protein, 923 aa, Homo sapiens
HEAPRLRQLVVTEEDGGARPEALGKIAPRTPAELGARADQELVTALMCDLRRPAAGGMMDLAYVCEWEKWSKSTHCPSVPLACAWSCRNLITFTMDLRSDDQDLTRMIHILDTEHPWDLHSIPSEHHEAITCLEWDQSGSRLLSADADGQIKCWSMADHLANSWESSVGSLVEGDPIVALSWLHNGVKLALHVEKSGASSFGEKFSRVKFSPSLTLFGGKPMEGWIAVTVSGLVTVSLLKPSGQVLTSTESLCRLRGRVALADIAFTGGGNIVVATADGSSASPVQFYKVCVSVVSEKCRIDTEILPSLFMRCTTDLNRKDKFPAITHLKFLARDMSEQVLLCASSQTSSIVECWSLRKEGLPVNNIFQQISPVVGDKQPTILKWRILSATNDLDRVSAVALPKLPISLTNTDLKVASDTQFYPGLGLALAFHDGSVHIVHRLSLQTMAVFYSSAAPRPVDEPAMKRPRTAGPAVHLKAMQLSWTSLALVGIDSHGKLSVLRLSPSMGHPLEVGLALRHLLFLLEYCMVTGYDWWDILLHVQPSMVQSLVEKLHEEYTRQTAALQQVLSTRILAMKASLCKLSPCTVTRVCDYHTKLFLIAISSTLKSLLRPHFLNTPDKSPGDRLTEICTKITDVDIDKVMINLKTEEFVLDMNTLQALQQLLQWVGDFVLYLLASLPNQGSLLRPGHSFLRDGTSLGMLRELMVVIRIWGLLKPSCLPVYTATSDTQDSMSLLFRLLTKLWICCRDEGPASEPDEALVDECCLLPSQLLIPSLDWLPASDGLVSRLQPKQPLRLQFGRAPTLPGSAATLQLDGLARAPGQPKIDHLRRLHLGACPTEECKACTRCGCVTMLKSPNRTTAVKQWEQRWIKNCLAVEGRGPDACVTSRASEEAPAFVQLGPQSTHHSPRTPRSLDHLHPEDRP

SEQ ID NO: 750703 - protein, 978 aa, Homo sapiens
HEAPRLRQLVVTEEDGGARPEALGKIAPRTPAELGARADQELVTALMCDLRRPAAGGMMDLAYVCEWEKWSKSTHCPSVPLACAWSCRNLITFTMDLRSDDQDLTRMIHILDTEHPWDLHSIPSEHHEAITCLEWDQSGSRLLSADADGQIKCWSMADHLANSWESSVGSLVEGDPIVALSWLHNGVKLALHVEKSGASSFGEKFSRVKFSPSLTLFGGKPMEGWIAVTVSGLVTVSLLKPSGQVLTSTESLCRLRGRVALADIAFTGGGNIVVATADGSSASPVQFYKVCVSVVSEKCRIDTEILPSLFMRCTTDLNRKDKFPAITHLKFLARDMSEQVLLCASSQTSSIVECWSLRKEGLPVNNIFQQISPVVGDKQPTILKWRILSATNDLDRVSAVALPKLPISLTNTDLKVASDTQFYPGLGLALAFHDGSVHIVHRLSLQTMAVFYSSAAPRPVDEPAMKRPRTAGPAVHLKAMQLSWTSLALVGIDSHGKLSVLRLSPSMGHPLEVGLALRHLLFLLEYCMVTGYDWWDILLHVQPSMVQSLVEKLHEEYTRQTAALQQVLSTRILAMKASLCKLSPCTVTRVCDYHTKLFLIAISSTLKSLLRPHFLNTPDKSPGDRLTEICTKITDVDIDKVMINLKTEEFVLDMNTLQALQQLLQWVGDFVLYLLASLPNQGSLLRPGHSFLRDGTSLGMLRELMVVIRIWGLLKPSCLPVYTATSDTQDSMSLLFRLLTKLWICCRDEGPASEPDEALVDECCLLPSQLLIPSLDWLPASDGLVSRLQPKQPLRLQFGRAPTLPGSAATLQLDGLARAPGQPKIDHLRRLHLGACPTEECKACTRCGCVTMLKSPNRTTAVKQWEQRWIKNCLCGGLWWRVPLSYTLSPAAPQLLLSYPSAAPEPGCCKSHRSPWTLLGAVNLSPPCRAVEGRGPDACVTSRASEEAPAFVQLGPQSTHHSPRTPRSLDHLHPEDRP

SEQ ID NO: 750704 - protein, 106 aa, Homo sapiens
NASSFLNSNQQRMKTSAQPAIRADKSTNAILSWVSLSNSTPEDEKYGPCAAPASHVIPDDHVLVPQVLQVFPVVPCAPTGSRSFYDTQEALKPEGWVFLHLLPQCS

SEQ ID NO: 750705 - protein, 101 aa, Homo sapiens
MANMNSDSRHLGTSEVDHERDPGPMNIQFEPSDLRSKRPFCIEPTNIVNVNHVIQRVSDHASAMNKRIHYYSRLTTPADKALIAPELSGREFILVAREFWT

SEQ ID NO: 750706 - protein, 251 aa, Homo sapiens
MANMNSDSRHLGTSEVDHERDPGPMNIQFEPSDLRSKRPFCIEPTNIVNVNHVIQRVSDHASAMNKRIHYYSRLTTPADKALIAPDHVVPAPEECYVYSPLGSAYKLQSYTEGYGKNTSLVTIFMIWNTMMGTSILSIPWGIKQAGFTTGMCVIILMGLLTLYCCYRVVKSRTMMFSLDTTSWEYPDVCRHYFGSFGQWSSLLFSLVSLIGAMIVYWVLMSNFLFNTGKFIFSKYLYHMLLTQYFQILLPL

SEQ ID NO: 750707 - protein, 67 aa, Homo sapiens
GFLHVSPCPWDGDAGITRPVGFSAMPFSNCGLSTYCMPGTTWGGDLGISLRDAVILFSELPDLWKSM

SEQ ID NO: 750708 - protein, 89 aa, Homo sapiens
AELPLDVPHIRLDSPPSFDNTTYTSLPLDSPSGKPSLPAPSSLPPLPPKVLVCSKPVTYATVIFPGGNKGGGTSCGPAQNPPNNQTPSS

SEQ ID NO: 750709 - protein, 150 aa, Homo sapiens
MGVQPPNFSWVLPGRLAGLALPRLPAHYQFLLDLGVRHLVSLTERGPPHSDSCPGLTLHRLRIPDFCPPAPDQIDRFVQIVDEANARGEAVGVHCALGFGRTGTMLACYLVKERGLAAGDAIAEIRRLRPGSIETYEQEKAVFQFYQRTK

SEQ ID NO: 750710 - protein, 162 aa, Homo sapiens
ADHVAREAPRPAMGVQPPNFSWVLPGRLAGLALPRLPAHYQFLLDLGVRHLVSLTERGPPHSDSCPGLTLHRLRIPDFCPPAPDQIDRFVQIVDEANARGEAVGVHCALGFGRTGTMLACYLVKERGLAAGDAIAEIRRLRPGSIETYEQEKAVFQFYQRTK

SEQ ID NO: 750711 - protein, 162 aa, Homo sapiens; identical to SEQ ID NO: 750710

SEQ ID NO: 750712 - protein, 150 aa, Homo sapiens; identical to SEQ ID NO: 750709

SEQ ID NO: 750713 - protein, 99 aa, Homo sapiens
AAAYYYYYCSNSSFKRCTGKSPPIPHAAPPQSQATSCLLLVGGGLLSPSSLTFNLTLTLHRAPTLHPSWKAGLMASHWPPPPDQSVLFRGLAPFPVSLK

SEQ ID NO: 750714 - protein, 277 aa, Homo sapiens
  misc_feature (6)..(6): Xaa can be any naturally occurring amino acid
DLEDPXRLNGEYKMPTPPLPLLKRQNGSWGPEERKTHMPFQKGMPFDLCFLVQSSDFKVMVNGILFVQYFHRVPFHRVDTISVNGSVQLSYISFQNPRTVPVQPAFSTVPFSQPVCFPPRPRGRRQKPPGVWPANPAPITQTVIHTVQSAPGQMFSTPAIPPMMYPHPAYPMPFITTILGGLYPSKSILLSGTVLPSAQRFHINLCSGNHIAFHLNPRFDENAVVRNTQIDNSWGSEERSLPRKMPFVRGQSFSVRHRSLELGEAPMGAQGEGVKEV

SEQ ID NO: 750715 - protein, 311 aa, Homo sapiens
MAFSGSQAPYLSPAVPFSGTIQGGLQDGLQITVNGTVLSSSGTRFAVNFQTGFSGNDIAFHFNPRFEDGGYVVCNTRQNGSWGPEERKTHMPFQKGMPFDLCFLVQSSDFKVMVNGILFVQYFHRVPFHRVDTISVNGSVQLSYISFQTQTVIHTVQSAPGQMFSTPAIPPMMYPHPAYPMPFITTILGGLYPSKSILLSGTVLPSAQRFHINLCSGNHIAFHLNPRFDENAVVRNTQIDNSWGSEERSLPRKMPFVRGQSFSVWILCEAHCLKVAVDGQHLFEYYHRLRNLPTINRLEVGGDIQLTHVQT

SEQ ID NO: 750716 - protein, 266 aa, Homo sapiens
MGPFSAPVEPDGGYVVCNTRQNGSWGPEERKTHMPFQKGMPFDLCFLVQSSDFKVMVNGILFVQYFHRVPFHRVDTISVNGSVQLSYISFQPPGVWPANPAPITQTVIHTVQSAPGQMFSTPAIPPMMYPHPAYPMPFITTILGGLYPSKSILLSGTVLPSAQRFHINLCSGNHIAFHLNPRFDENAVVRNTQIDNSWGSEERSLPRKMPFVRGQSFSVWILCEAHCLKVAVDGQHLFEYYHRLRNLPTINRLEVGGDIQLTHVQT

SEQ ID NO: 750717 - protein, 298 aa, Homo sapiens
MGPFSAPVEPDGGYVVCNTRQNGSWGPEERKTHMPFQKGMPFDLCFLVQSSDFKVMVNGILFVQYFHRVPFHRVDTISVNGSVQLSYISFQNPRTVPVQPAFSTVPFSQPVCFPPRPRGRRQKPPGVWPANPAPITQTVIHTVQSAPGQMFSTPAIPPMMYPHPAYPMPFITTILGGLYPSKSILLSGTVLPSAQRFHINLCSGNHIAFHLNPRFDENAVVRNTQIDNSWGSEERSLPRKMPFVRGQSFSVWILCEAHCLKVAVDGQHLFEYYHRLRNLPTINRLEVGGDIQLTHVQT

SEQ ID NO: 750718 - protein, 234 aa, Homo sapiens
MAFSGSQAPYLSPAVPFSGTIQGGLQDGLQITVNGTVLSSSGTRFAVNFQTGFSGNDIAFHFNPRFEDGGYVVCNTRQNGSWGPEERKTHMPFQKGMPFDLCFLVQSSDFKVMVNGILFVQYFHRVPFHRVDTISVNGSVQLSYISFQTQTVIHTVQSAPGQMFSTPAIPPMMYPHPAYPMPFITTILGGLYPSKSILLSGTVLPSAQRCGSCVKLTASRWPWMVSTCLNTTIA

SEQ ID NO: 750719 - protein, 149 aa, Homo sapiens [sequence omitted]

SEQ ID NO: 750720 - protein, 312 aa, Homo sapiens
MAFSGSQAPYLSPAVPFSGTIQGGLQDGLQITVNGTVLSSSGTRFAVNFQTGFSGNDIAFHFNPRFEDGGYVVCNTRQNGSWGPEERKTHMPFQKGMPFDLCFLVQSSDFKVMVNGILFVQYFHRVPFHRVDTISVNGSVQLSYISFQPPGVWPANPAPITQTVIHTVQSAPGQMFSTPAIPPMMYPHPAYPMPFITTILGGLYPSKSILLSGTVLPSAQRFHINLCSGNHIAFHLNPRFDENAVVRNTQIDNSWGSEERSLPRKMPFVRGQSFSVWILCEAHCLKVAVDGQHLFEYYHRLRWPPQPLLSDL

SEQ ID NO: 750721 - protein, 219 aa, Homo sapiens
MAFSGSQAPYLSPAVPFSGTIQGGLQDGLQITVNGTVLSSSGTRFAVNFQTGFSGNDIAFHFNPRFEDGGYVVCNTRQNGSWGPEERKTHMPFQKGMPFDLCFLVQSSDFKVMVNGILFVQYFHRVPFHRVDTISVNGSVQLSYISFQNPRTVPVQPAFSTVPFSQPVCFPPRPRGRRQKPPGVWPANPAPITQTVIHTVQSAPGQMFSTPPSQSTEIR

SEQ ID NO: 750722 - protein, 244 aa, Homo sapiens
MAFSGSQAPYLSPAVPFSGTIQGGLQDGLQITVNGTVLSSSGTRFAVNFQTGFSGNDIAFHFNPRFEDGGYVVCNTRQNGSWGPEERKTHMPFQKGMPFDLCFLVQSSDFKVMVNGILFVQYFHRVPFHRVDTISVNGSVQLSYISFQVRLSTWHRPRGWDAGPSVAVSKPCWVGPSQSPTQVTLGTTSASLSQYLPAPSPLSLCPSFCVTVSVRNTCLGLPDSSAAPFSSSLSFHPGKEGILF

SEQ ID NO: 750723 - protein, 323 aa, Homo sapiens
MAFSGSQAPYLSPAVPFSGTIQGGLQDGLQITVNGTVLSSSGTRFAVNFQTGFSGNDIAFHFNPRFEDGGYVVCNTRQNGSWGPEERKTHMPFQKGMPFDLCFLVQSSDFKVMVNGILFVQYFHRVPFHRVDTISVNGSVQLSYISFQPPGVWPANPAPITQTVIHTVQSAPGQMFSTPAIPPMMYPHPAYPMPFITTILGGLYPSKSILLSGTVLPSAQRFHINLCSGNHIAFHLNPRFDENAVVRNTQIDNSWGSEERSLPRKMPFVRGQSFSVWILCEAHCLKVAVDGQHLFEYYHRLRNLPTINRLEVGGDIQLTHVQT

SEQ ID NO: 750724 - protein, 355 aa, Homo sapiens
MAFSGSQAPYLSPAVPFSGTIQGGLQDGLQITVNGTVLSSSGTRFAVNFQTGFSGNDIAFHFNPRFEDGGYVVCNTRQNGSWGPEERKTHMPFQKGMPFDLCFLVQSSDFKVMVNGILFVQYFHRVPFHRVDTISVNGSVQLSYISFQNPRTVPVQPAFSTVPFSQPVCFPPRPRGRRQKPPGVWPANPAPITQTVIHTVQSAPGQMFSTPAIPPMMYPHPAYPMPFITTILGGLYPSKSILLSGTVLPSAQRFHINLCSGNHIAFHLNPRFDENAVVRNTQIDNSWGSEERSLPRKMPFVRGQSFSVWILCEAHCLKVAVDGQHLFEYYHRLRNLPTINRLEVGGDIQLTHVQT

SEQ ID NO: 750725 - protein, 208 aa, Homo sapiens
MAFSGSQAPYLSPAVPFSGTIQGGLQDGLQITVNGTVLSSSGTRFAVNFQTGFSGNDIAFHFNPRFEDGGYVVCNTRQNGSWGPEERKTHMPFQKGMPFDLCFLVQSSDFKVMVNGILFVQYFHRVPFHRVDTISVNGSVQLSYISFQNPRTVPVQPAFSTVPFSQPVCFPPRPRGRRQKPPGVWPANPAPITQTVIHTVLISIRGSS

SEQ ID NO: 750726 - protein, 187 aa, Homo sapiens
AYRGRIFTPAIPPMMYPHPAYPMPFITTILGGLYPSKSILLSGTVLPSAQRFHINLCSGNHIAFHLNPRFDENAVVRNTQIDNSWGSEERSLPRKMPFVRGQSFSVWILCEAHCLKVAVDGQHLFEYYHRLGTHAYLGYAGGEHHTGSHRGAAGNDTLRQAVPGRHGPKYILEQFLQQELLINITEH

SEQ ID NO: 750727 - protein, 362 aa, Homo sapiens
MCQQAFSFLYFKDTGKGASPLKRTLWSGGGGQWEAIRPAFLSSVSQAPYLSPAVPFSGTIQGGLQDGLQITVNGTVLSSSGTRFAVNFQTGFSGNDIAFHFNPRFEDGGYVVCNTRQNGSWGPEERKTHMPFQKGMPFDLCFLVQSSDFKVMVNGILFVQYFHRVPFHRVDTISVNGSVQLSYISFQPPGVWPANPAPITQTVIHTVQSAPGQMFSTPAIPPMMYPHPAYPMPFITTILGGLYPSKSILLSGTVLPSAQRFHINLCSGNHIAFHLNPRFDENAVVRNTQIDNSWGSEERSLPRKMPFVRGQSFSVWILCEAHCLKVAVDGQHLFEYYHRLRNLPTINRLEVGGDIQLTHVQT

SEQ ID NO: 750728 - protein, 323 aa, Homo sapiens; identical to SEQ ID NO: 750723

SEQ ID NO: 750729 - protein, 149 aa, Homo sapiens [sequence omitted]

SEQ ID NO: 750730 - protein, 323 aa, Homo sapiens; identical to SEQ ID NO: 750723

SEQ ID NO: 750731 - protein, 298 aa, Homo sapiens
MAFSGSQAPYLSPAVPFSGTIQGGLQDGLQITVNGTVLSSSGTRFAVNFQTGFSGNDIAFHFNPRFEDGGYVVCNTRQNGSWGPEERKTHMPFQKGMPFDLCFLVQSSDFKVMVNGILFVQYFHRVPFHRVDTISVNGSVQLSYISFQPPGVWPANPAPITQTVIHTVQSAPGQMFSTPAIPPMMYPHPAYPMPFITTILGGLYPSKSILLSGTVLPSAQRFHINLCSGNHIAFHLNPRFDENAVVRNTQIDNSWGSEERSLPRKMPFVRGQSFSVRHRSLELGEAPMGAQGEGVKEV

SEQ ID NO: 750732 - protein, 105 aa, Homo sapiens
GFRKATDDGEEMGLRIRWIKVQVGCPPQFHINLCSGNHIAFHLNPRFDENAVVRNTQIDNSWGSEERSLPRKMPFVRGQSFSVRHRSLELGEAPMGAQGEGVKEV

SEQ ID NO: 750733 - protein, 265 aa, Homo sapiens [sequence omitted]

SEQ ID NO: 750734 - protein, 265 aa, Homo sapiens [sequence omitted]

SEQ ID NO: 750735 - protein, 265 aa, Homo sapiens [sequence omitted]

SEQ ID NO: 750736 - protein, 264 aa, Homo sapiens
GRALRGCSDLERVLSGDEGVERAECVRFREHLVTLHLGAVGSNRFWRGGQIRTVISARVQEGGYLDVWVPHPLPEPFPQPYPCAEDEECGTDEYCASPTRGGDAGVQICLACRKRRKRCMRHAMCCPGNYCKNGICVSSDQNHFRGEIEETITESFGNDHSTLDGYSRRTTLSSKMYHTKGQEGSVCLRSSDCASGLCCARHFWSKICKPVLKEGQVCTKHRRKGSHGLEIFQRCYCGEGLSCRIQKDHHQASNSSRLHTCQRH

SEQ ID NO: 750737 - protein, 249 aa, Homo sapiens
MALGAAGATRVFVAMVAAALGGHPLLGVSATLNSVLNSNAIKNLPPPLGGAAGHPGSAVSAAPGILYPGGNKYQTIDNYQPYPCAEDEECGTDEYCASPTRGGDAGVQICLACRKRRKRCMRHAMCCPGNYCKNGICVSSDQNHFRGEIEETITESFGNDHSTLDGYSRRTTLSSKMYHTKGQEGSVCLRSSDCASGLCCARHFWSKICKPVLKEGQVCTKHRRKGSHGLEIFQRCYCGEGEFHISSFV

SEQ ID NO: 750738 - protein, 265 aa, Homo sapiens [sequence omitted]

SEQ ID NO: 750739 - protein, 265 aa, Homo sapiens [sequence omitted]

SEQ ID NO: 750740 - protein, 92 aa, Homo sapiens
VFNREEERSWEVSEEYVCLLIKIISEEKLRKPSLKALVMIIAPWMGIPEEPPCLQKCITPKDKKVLFVSGHQTVPQDCVVLDTSGPRSVNLS

SEQ ID NO: 750741 - protein, 163 aa, Homo sapiens
LGSEGEGLGETWLSHPASRVWHGQVCLCSEAYSHWAVTGEAWDPLSALSSSRLAALEARVAQLREARAQQAQQVEEWRAQNAVQRAAYEALRAHVGLREAALRRLQEEARDLLERLVQRKARAAAERNLRNERRERAKQARVSQELKKAAKRTVSISDVSISE

SEQ ID NO: 750742 - protein, 275 aa, Homo sapiens
MAGPGVPGAPAARWKRHIVRQLRLRDRTQKALFLELVPAYNHLLEKAELLDKFSKKLQPEPNSVTPTTHQGPWEESELDSDQVPSLVALRVKWQEEEEGLRLVCGEMAYQVVEKGAALGTLESELQQRQSRLAALEARVAQLREARAQQAQQVEEWRAQNAVQRAAYEALRAHVGLREAALRRLQEEARDLLERLVQRKARAAAERNLRNERRERAKQARVSQELKKAAKRTVSISEGPDTLGDGMRERRETLALAPEPEPLEKEACEKWKRPFR

SEQ ID NO: 750743 - protein, 350 aa, Homo sapiens
MPQGSWRLPPEKDLLNALLDPNPPYPSFKKRRGHSIGGAPEQRYQIIPVCVAARLPTRAQDVLDAHLSEVNAVRFGPNSSLLATGGADRLIHLWNVVGSRLEANQTLEGAGGSITSVDFDPSGYQVLAATYNQAAQLWKVGEAQSKETLSGHKDKVTAAKFKLTRHQAVTGSRDRTVKEWDLGRAYCSRTINVLSYCNDVVCGDHIIISGHNDQKIRFWDSRGPHCTQVIPVQGRVTSLSLSHDQLHLLSCSRDNTLKVIDLRVSNIRQVFRADGFKCGSDWTKAVFSPDRSYALAGSCDGALYIWDVDTGKLESRLQGPHCAAVNAVAWCYSGSHMVSVDQGRKVVLWQ

SEQ ID NO: 750744 - protein, 444 aa, Homo sapiens
MPVSGTEGGSSRPLEEGTGSSPACVRGAAPGSQDAFYPTRAKQARVSQELKKAAKRTVSISEGPDTLGDGMRERRETLALAPEPEPLEKEACEKWKRPFRSASATSLTLSHCVDVVKGLLDFKKRRGHSIGGAPEQRYQIIPVCVAARLPTRAQDVLDAHLSEVNAVRFGPNSSLLATGGADRLIHLWNVVGSRLEANQTLEGAGGSITSVDFDPSGYQVLAATYNQAAQLWKVGEAQSKETLSGHKDKVTAAKFKLTRHQAVTGSRDRTVKEWDLGRAYCSRTINVLSYCNDVVCGDHIIISGHNDQKIRFWDSRGPHCTQVIPVQGRVTSLSLSHDQLHLLSCSRDNTLKVIDLRVSNIRQVFRADGFKCGSDWTKAVFSPDRSYALAGSCDGALYIWDVDTGKLESRLQGPHCAAVNAVAWCYSGSHMVSVDQGRKVVLWQ

SEQ ID NO: 750745 - protein, 420 aa, Homo sapiens [sequence omitted]

SEQ ID NO: 750746 - protein, 436 aa, Homo sapiens
RPTRRRDLLERLVQRKARAAAERNLRNERRERAKQARVSQELKKAAKRTVSISEGPDTLGDGMRERRETLALAPEPEPLEKEACEKWKRPFRSASATSLTLSHCVDVVKGLLDFKKRRGHSIGGAPEQRYQIIPVCVAARLPTRAQDVLDAHLSEVNAVRFGPNSSLLATGGADRLIHLWNVVGSRLEANQTLEGAGGSITSVDFDPSGYQVLAATYNQAAQLWKVGEAQSKETLSGHKDKVTAAKFKLTRHQAVTGSRDRTVKEWDLGRAYCSRTINVLSYCNDVVCGDHIIISGHNDQKIRFWDSRGPHCTQVIPVQGRVTSLSLSHDQLHLLSCSRDNTLKVIDLRVSNIRQVFRADGFKCGSDWTKAVFSPDRSYALAGSCDGALYIWDVDTGKLESRLQGPHCAAVNAVAWCYSGSHMVSVDQGRKVVLWQ

SEQ ID NO: 750747 - protein, 297 aa, Homo sapiens
IRAGAKGFVLDAHLSEVNAVRFGPNSSLLATGGADRLIHLWNVVGSRLEANQTLEGAGGSITSVDFDPSGYQVLAATYNQAAQLWKVGEAQSKETLSGHKDKVTAAKFKLTRHQAVTGSRDRTVKEWDLGRAYCSRTINVLSYCNDVVCGDHIIISGHNDQKIRFWDSRGPHCTQVIPVQGRVTSLSLSHDQLHLLSCSRDNTLKVIDLRVSNIRQVFRADGFKCGSDWTKAVFSPDRSYALAGSCDGALYIWDVDTGKLESRLQGPHCAAVNAVAWCYSGSHMVSVDQGRKVVLWQ

SEQ ID NO: 750748 - protein, 116 aa, Homo sapiens
ESAAMAGPGVPGAPAARWKRHIVRQLRLRDRTQKALFLELVPAYNHLLEKAELLDKFSKKLQPEPNSVTPTTHQGPWEESELDSDQVPSLVALRVKWQEEEEGLRLVCGEVSWEGV

SEQ ID NO: 750749 - protein, 116 aa, Homo sapiens; identical to SEQ ID NO: 750748

SEQ ID NO: 750750 - protein, 117 aa, Homo sapiens
ESAAMAGPGVPGAPAARWKRHIVRQLRLRDRTQKALFLELVPAYNHLLEKAELLDKFSKKLQPEPNSVTPTTHQGPWEESELDSDQVPSLVALRVKWQEEEEGLRLVCGEIHRKLEG

SEQ ID NO: 750751 - protein, 319 aa, Homo sapiens
ESAAMAGPGVPGAPAARWKRHIVRQLRLRDRTQKALFLELVPAYNHLLEKAELLDKFSKKLQPEPNSVTPTTHQGPWEESELDSDQVPSLVALRVKWQEEEEGLRLVCGELAFQEGGGQVSSRLPERLRPRRDWRPGGASAPPCPPVRPQMAYQVVEKGAALGTLESELQQRQSRLAALEARVAQLREARAQQAQQVEEWRAQNAVQRAAYEALRAHVGLREAALRRLQEEARDLLERLVQRKARAAAERNLRNERRERAKQARVSQELKKAAKRTVSISEGPDTLGDGMRERRETLALAPEPEPLEKEACEKWKRPFR

SEQ ID NO: 750752 - protein, 275 aa, Homo sapiens; identical to SEQ ID NO: 750742

SEQ ID NO: 750753 - protein, 275 aa, Homo sapiens; identical to SEQ ID NO: 750742

SEQ ID NO: 750754 - protein, 423 aa, Homo sapiens
MPVSGTEGGSSRPLEEGTGSSPACVRGAAPGSQDAFYPTRAKQARVSQELKKAAKRTVSISEGPDTLGDGMRERRETLALAPEPEPLEKEACEKWKRPFSFKKRRGHSIGGAPEQRYQIIPVCVAARLPTRAQDVLDAHLSEVNAVRFGPNSSLLATGGADRLIHLWNVVGSRLEANQTLEGAGGSITSVDFDPSGYQVLAATYNQAAQLWKVGEAQSKETLSGHKDKVTAAKFKLTRHQAVTGSRDRTVKEWDLGRAYCSRTINVLSYCNDVVCGDHIIISGHNDQKIRFWDSRGPHCTQVIPVQGRVTSLSLSHDQLHLLSCSRDNTLKVIDLRVSNIRQVFRADGFKCGSDWTKAVFSPDRSYALAGSCDGALYIWDVDTGKLESRLQGPHCAAVNAVAWCYSGSHMVSVDQGRKVVLWQ

SEQ ID NO: 750755 - protein, 407 aa, Homo sapiens
ESAAMAGPGVPGAPAARWKRHIVRQLRLRDRTQKALFLELVPAYNHLLEKAELLDKFSKKLQPEPNSVTPTTHQGPWEESELDSDQVPSLVALRVKWQEEEEGLRLVCGEMAYQVVEKGAALGTLESELQQRQSRLAALEARVAQLREARAQQAQQVEEWRAQNAVQRAAYEALRAHVGLREAALRRLQEEARDLLERLVQRKARAAAERNLRNERRERAKQARVSQELKKAAKRTVSISEGPDTLGDGMRERRETLALAPEPEPLEKEACEKWKRPFRGPHCTQVIPVQGRVTSLSLSHDQLHLLSCSRDNTLKVIDLRVSNIRQVFRADGFKCGSDWTKAVFSPDRSYALAGSCDGALYIWDVDTGKLESRLQGPHCAAVNAVAWCYSGSHMVSVDQGRKVVLWQ

SEQ ID NO: 750756 - protein, 107 aa, Homo sapiens
QTTQVQQSGQSQVAGAVPEAPLKPAPPFPQRCRQRRGLVLLREPHGERGPGQEGCALAVGPRPACLGWSSCPKPEASFGAMQGLGLGLELALGFNGEEGLAGPGLFV

SEQ ID NO: 750757 - protein, 335 aa, Homo sapiens [sequence omitted]

SEQ ID NO: 750758 - protein, 454 aa, Homo sapiens
TLTAFLMMGNLSPNLKSHAVTMFEVGKLSDESLDSFLIELEKVQSTGEGEAQRYFDHALTLRNTILFLRHNKDLVAQTAQPDQPNYGFPLDLLRCESLLGLDPATCSRVLNKNYTLLVSMAPLTNEIRPVSSCTPQHIGPAIPEVSSVWFKLYIYHVTGQGPPSLLLSKGTRLRKLPDIFQSYDRLLITSWGHDPGVVPTSNVLTMLNDALTHSAVLIQGHGLHGIGETVHVPFPFDETELQGEFTRVNMGVHKALQILRNRVDLQHLCGYVTMLNASSQLADRKLSDASDERGEPDLASGSDVNGSTESFEMVIEEATIDSATKQTSGATTEADWVPLELCFGIPLFSSELNRKVCRKIAAHGLCRKESLQNLLHSSRKLSLQVLNFVHSFQEGASILDIHTEPSFSSLLSQSSYADMGVPLPAKNLIFKDGVLSEWSGRSPSSLLIANLHLQ

SEQ ID NO: 750759 - protein, 454 aa, Homo sapiens; identical to SEQ ID NO: 750758

SEQ ID NO: 750760 - protein, 454 aa, Homo sapiens; identical to SEQ ID NO: 750758

SEQ ID NO: 750761 - protein, 405 aa, Homo sapiens
TLTAFLMMGNLSPNLKSHAVTMFEVGKLSDESLDSFLIELEKVQSTGEGEAQRYFDHALTLRNTILFLRHNKDLVAQTAQPDQPNYGFPLDLLRCESLLGLDPATCSRVLNKNYTLLVSMAPLTNEIRPVSSCTPQHIGPAIPEVSSVWFKLYIYHVTGQGPPSLLLSKGTRLRKLPDIFQSYDRLLITSWGHDPGVVPTSNVLTMLNDALTHSAVLIQGHGLHGIGETVHVPFPFDETELQGEFTRVNMGVHKALQILRNRVDLQHLCGYVTMLNASSQLADRKLSDASDERGEPDLASGSDVNGSTESFEMVIEEATIDSATKQTSGATTEADWVPLELCFGIPLFSSELNRKVCRKIAAHGLCRKESLQNLLHSSRKLSLQVLNFVHSFQVTKTKKSKWYLY

SEQ ID NO: 750762 - protein, 454 aa, Homo sapiens; identical to SEQ ID NO: 750758

SEQ ID NO: 750763 - protein, 454 aa, Homo sapiens; identical to SEQ ID NO: 750758

SEQ ID NO: 750764 - protein, 107 aa, Homo sapiens
MWVAVAAPAAGPGRGIMNIDVEFHIRHNYPWNKLPANVRQSLGNSQREYEKQVVLYSIRNQLRYRNNLVKHVKKDERRYYEELLKYSRDHLMLYPNHQSDIVCYVCL

SEQ ID NO: 750765 - protein, 454 aa, Homo sapiens; identical to SEQ ID NO: 750758

SEQ ID NO: 750766 - protein, 929 aa, Homo sapiens
DPNSRPRRLERTALFLLTGGDGGCGGGGTRLLRGMKIGSGFLSGGGGTGSSGGSGSGGGGSGGGGGGGSSGRRAEMEPTFPQGMVMFNHRLPPVTSFTRPAGSAAPPPQCVLSSSTSAAPAAEPPPPPAPDMTFKKEPAASAAAFPSQRTSWGFLQSLVSIKQEKPADPEEQQSHHHHHHHHYGGLFAGAEERSPGLGGGEGGSHGVIQDLSILHQHVQQQPAQHHRDVLLSSSSRTDDHHGTEEPKQDTNVKKAKRPKPESQGIKAKRKPSASSKPSLVGDGEGAILSPSQKPHICDHCSAAFRSSYHLRRHVLIHTGERPFQCSQCSMGFIQKYLLQRHEKIHSREKPFGCDQCSMKFIQKYHMERHKRTHSGEKPYKCDTCQQYFSRTDRLLKHRRTCGEVIVKGATSAEPGSSNHTNMGNLAVLSQGNTSSSRRKTKSKSIAIENKEQKTGKTNESQISNNINMQSYSVEMPTVSSSGGIIGTGIDELQKRVPKLIFKKGSRKNTDKNYLNFVSPLPDIVGQKSLSGKPSGSLGIVSNNSVETIGLLQSTSGKQGQISSNYDDAMQFSKKRRYLPTASSNSAFSINVGHMVSQQSVIQSAGVSVLDNEAPLSLIDSSALNAEIKSCHDKSGIPDEVLQSILDQYSNKSESQKEDPFNIAEPRVDLHTSGEHSELVQEENLSPGTQTPSNDKASMLQEYSKYLQQAFEKSTNASFTLGHGFQFVSLSSPLHNHTLFPEKQIYTTSPLECGFGQSVTSVLPSSLPKPPFGMLFGSQPGLYLSALDATHQQLTPSQELDDLIDSQKNLETSSAFQSSSQKLTSQKEQKNLESSTGFQIPSQELASQIDPQKDIEPRTTYQIENFAQAFGSQFKSGSRVPMTFITNSNGEVDHRVRTSVSDFSGYTNMMSDVSEPCSTRVKTPTSQSYR

SEQ ID NO: 750767 - protein, 929 aa, Homo sapiens; identical to SEQ ID NO: 750766

SEQ ID NO: 750768 - protein, 929 aa, Homo sapiens; identical to SEQ ID NO: 750766

SEQ ID NO: 750769 - protein, 743 aa, Homo sapiens
HAGPGWCWAGCCWTCWGSHGVIQDLSILHQHVQQQPAQHHRDVLLSSSSRTDDHHGTEEPKQDTNVKKAKRPKPESQGIKAKRKPSASSKPSLVGDGEGAILSPSQKPHICDHCSAAFRSSYHLRRHVLIHTGERPFQCSQCSMGFIQKYLLQRHEKIHSREKPFGCDQCSMKFIQKYHMERHKRTHSGEKPYKCDTCQQYFSRTDRLLKHRRTCGEVIVKGATSAEPGSSNHTNMGNLAVLSQGNTSSSRRKTKSKSIAIENKEQKTGKTNESQISNNINMQSYSVEMPTVSSSGGIIGTGIDELQKRVPKLIFKKGSRKNTDKNYLNFVSPLPDIVGQKSLSGKPSGSLGIVSNNSVETIGLLQSTSGKQGQISSNYDDAMQFSKKRRYLPTASSNSAFSINVGHMVSQQSVIQSAGVSVLDNEAPLSLIDSSALNAEIKSCHDKSGIPDEVLQSILDQYSNKSESQKEDPFNIAEPRVDLHTSGEHSELVQEENLSPGTQTPSNDKASMLQEYSKYLQQAFEKSTNASFTLGHGFQFVSLSSPLHNHTLFPEKQIYTTSPLECGFGQSVTSVLPSSLPKPPFGMLFGSQPGLYLSALDATHQQLTPSQELDDLIDSQKNLETSSAFQSSSQKLTSQKEQKNLESSTGFQIPSQELASQIDPQKDIEPRTTYQIENFAQAFGSQFKSGSRVPMTFITNSNGEVDHRVRTSVSDFSGYTNMMSDVSEPCSTRVKTPTSQSYR

SEQ ID NO: 750770 - protein, 893 aa, Homo sapiens
DPNSRPRRLERTALFLLTGGDGGCGGGGTRLLRGMKIGSGFLSGGGGTGSSGGSGSGGGGSGGGGGGGSSGRRAEMEPTFPQAPAAEPPPPPAPDMTFKKEPAASAAAFPSQRTSWGFLQSLVSIKQEKPADPEEQQSHHHHHHHHYGGLFAGAEERSPGLGGGEGGSHGVIQDLSILHQHVQQQPAQHHRDVLLSSSSRTDDHHGTEEPKQDTNVKKAKRPKPESQGIKAKRKPSASSKPSLVGDGEGAILSPSQKPHICDHCSAAFRSSYHLRRHVLIHTGERPFQCSQCSMGFIQKYLLQRHEKIHSREKPFGCDQCSMKFIQKYHMERHKRTHSGEKPYKCDTCQQYFSRTDRLLKHRRTCGEVIVKGATSAEPGSSNHTNMGNLAVLSQGNTSSSRRKTKSKSIAIENKEQKTGKTNESQISNNINMQSYSVEMPTVSSSGGIIGTGIDELQKRVPKLIFKKGSRKNTDKNYLNFVSPLPDIVGQKSLSGKPSGSLGIVSNNSVETIGLLQSTSGKQGQISSNYDDAMQFSKKRRYLPTASSNSAFSINVGHMVSQQSVIQSAGVSVLDNEAPLSLIDSSALNAEIKSCHDKSGIPDEVLQSILDQYSNKSESQKEDPFNIAEPRVDLHTSGEHSELVQEENLSPGTQTPSNDKASMLQEYSKYLQQAFEKSTNASFTLGHGFQFVSLSSPLHNHTLFPEKQIYTTSPLECGFGQSVTSVLPSSLPKPPFGMLFGSQPGLYLSALDATHQQLTPSQELDDLIDSQKNLETSSAFQSSSQKLTSQKEQKNLESSTGFQIPSQELASQIDPQKDIEPRTTYQIENFAQAFGSQFKSGSRVPMTFITNSNGEVDHRVRTSVSDFSGYTNMMSDVSEPCSTRVKTPTSQSYR

SEQ ID NO: 750771 - protein, 929 aa, Homo sapiens; identical to SEQ ID NO: 750766

SEQ ID NO: 750772 - protein, 936 aa, Homo sapiens
TAPRLRSTREAFNSIVERTALFLLTGGDGGCGGGGTRLLRGMKIGSGFLSGGGGTGSSGGSGSGGGGSGGGGGGGSSGRRAEMEPTFPQGMVMFNHRLPPVTSFTRPAGSAAPPPQCVLSSSTSAAPAAEPPPPPAPDMTFKKEPAASAAAFPSQRTSWGFLQSLVSIKQEKPADPEEQQSHHHHHHHHYGGLFAGAEERSPGLGGGEGGSHGVIQDLSILHQHVQQQPAQHHRDVLLSSSSRTDDHHGTEEPKQDTNVKKAKRPKPESQGIKAKRKPSASSKPSLVGDGEGAILSPSQKPHICDHCSAAFRSSYHLRRHVLIHTGERPFQCSQCSMGFIQKYLLQRHEKIHSREKPFGCDQCSMKFIQKYHMERHKRTHSGEKPYKCDTCQQYFSRTDRLLKHRRTCGEVIVKGATSAEPGSSNHTNMGNLAVLSQGNTSSSRRKTKSKSIAIENKEQKTGKTNESQISNNINMQSYSVEMPTVSSSGGIIGTGIDELQKRVPKLIFKKGSRKNTDKNYLNFVSPLPDIVGQKSLSGKPSGSLGIVSNNSVETIGLLQSTSGKQGQISSNYDDAMQFSKKRRYLPTASSNSAFSINVGHMVSQQSVIQSAGVSVLDNEAPLSLIDSSALNAEIKSCHDKSGIPDEVLQSILDQYSNKSESQKEDPFNIAEPRVDLHTSGEHSELVQEENLSPGTQTPSNDKASMLQEYSKYLQQAFEKSTNASFTLGHGFQFVSLSSPLHNHTLFPEKQIYTTSPLECGFGQSVTSVLPSSLPKPPFGMLFGSQPGLYLSALDATHQQLTPSQELDDLIDSQKNLETSSAFQSSSQKLTSQKEQKNLESSTGFQIPSQELASQIDPQKDIEPRTTYQIENFAQAFGSQFKSGSRVPMTFITNSNGEVDHRVRTSVSDFSGYTNMMSDVSEPCSTRVKTPTSQSYR

SEQ ID NO: 750773 - protein, 929 aa, Homo sapiens; identical to SEQ ID NO: 750766

SEQ ID NO: 750774 - protein, 256 aa, Homo sapiens
DPNSRPRRLERTALFLLTGGDGGCGGGGTRLLRGMKIGSGFLSGGGGTGSSGGSGSGGGGSGGGGGGGSSGRRAEMEPTFPQGMVMFNHRLPPVTSFTRPAGSAAPPPQCVLSSSTSAAPAAEPPPPPAPDMTFKKEPAASAAAFPSQRTSWGFLQSLVSIKQEKPADPEEQQSHHHHHHHHYGGLFAGAEERSPGLGGGEGGSHGVIQDLSILHQHVQQQPAQHHRDVLLSSSSRTDDHHGTEEPKQDTCQALPL

SEQ ID NO: 750775 - protein, 244 aa, Homo sapiens
MAAAASPAILPRLAILPYLLFDWSGTGRADAHSLWYNFTIIHLPRHGQQWCEVQSQVDQKNFLSYDCGSDKVLSMGHLEEQLYATDAWGKQLEMLREVGQRLRLELADTELEDFTPSGPLTLQVRMSCECEADGYIRGSWQFSFDGRKFLLFDSNNRKWTVVHAGARRMKEKWEKDSGLTTFFKMVSMRDCKSWLRDFLMHRKKRLEPTAPPTMAPGLAQPKAIATTLSPWSFLIILCFILPGI

SEQ ID NO: 750776 - protein, 288 aa, Homo sapiens
RGRAQRAGRWARWRLPSDSPRIPPAGAETPGRGSCRNYLPSSSPPPPEPSSFPSPPTSRGGPGSRDTMSDSEEESQDRQLKIVVLGDGASGKTSLTTCFAQETFGKQYKQTIGLDFFLRRITLPGNLNVTLQIWDIGGQTIGGKMLDKYIYGAQGVLLVYDITNYQSFENLEDWYTVVKKVSEESETQPLVALVGNKIDLEHMRTIKPEKHLRFCQENGFSSHFVSAKTGDSVFLCFQKVAAEILGIKLNKAEIEQSQRVVKADIVNYNQEPMSRTVNPPRSSMCAVQ

SEQ ID NO: 750777 - protein, 287 aa, Homo sapiens
RGRAQRAGRWARWRLPSDSPRIPPAGAETPGRGSCRNYLPSSSPPPPEPSSFPSPPTSRGGPGSRDTMSDSEEESQDRQLKIVVLGDGASGKTSLTTCFAQETFGKQYKQTIGLDFFLRRITLPGNLNVTLQIWDIGGQTIGGKMLDKYIYGAQGVLLVYDITNYQSFENLEDWYTVVKKVSEESETQPLVALVGNKIDLEHMRTIKPEKHLRFCQENGFSSHFVSAKTGDSVFLCFQKVAAEILGIKLNKAEIEQSQRIVRAEIVKYPEEENQHTTSTQSRICSVQ

SEQ ID NO: 750778 - protein, 287 aa, Homo sapiens; identical to SEQ ID NO: 750777

SEQ ID NO: 750779 - protein, 260 aa, Homo sapiens
RGRAQRAGRWARWRLPSDSPRIPPAGAETPGRGSCRNYLPSSSPPPPEPSSFPSPPTSRGGPGSRDTMSDSEEESQDRQLKIVVLGDGASGKTSLTTCFAQETFGKQYKQTIGLDFFLRRITLPGNLNVTLQIWDIGGQTIGGKMLDKYIYGAQGVLLVYDITNYQSFENLEDWYTVVKKVSEESETQPLVALVGNKIDLEHMRTIKPEKHLRFCQENGFSSHFVSAKTGDSVFLCFQKVAAEILGIKLNKAEIEQSQIY

SEQ ID NO: 750780 - protein, 122 aa, Homo sapiens
PRIPPAGADDTWVRVVPDLQLPVPSIRLPRPTEAFILTHCLTTPIEGGGAWYPEDIMIRRSEEREHRIGKLKIVVLGGQGASGKQLLNVRVLLKNTFGKQYKTNLYGLDYVYFEKDNSCQET

SEQ ID NO: 750781 - protein, 162 aa, Homo sapiens
RGRAQRAGRWARWRLPSDSPRIPPAGAETPGRGSCRNYLPSSSPPPPEPSSFPSPPTSRGGPGSRDTMSDSEEESQDRQLKIVVLGDGASGKTSLTTCFAQETFGKQYKQTIGLDFFLRRITLPGNLNVTLQIWDIGGQTIGGKMLDKYIYGAQLIWSICEQ

SEQ ID NO: 750782 - protein, 287 aa, Homo sapiens; identical to SEQ ID NO: 750777

SEQ ID NO: 750783 - protein, 206 aa, Homo sapiens
RGRAQRAGRWARWRLPSDSPRIPPAGAETPGRGSCRNYLPSSSPPPPEPSSFPSPPTSRGGPGSRDTMSDSEEESQDRQLKIVVLGDGASGKTSLTTCFAQETFGKQYKQTIGLDFFLRRITLPGNLNVTLQIWDIGGQTIGGKMLDKYIYGAQGVLLVYDITNYQSFENLEDWYTVVKKVSEESETQPLVALVGNKIDLEHFFYS

SEQ ID NO: 750784 - protein, 42 aa, Homo sapiens
TLVLWSPGQRLTGDACDSHWCAGRRVRDSLGTHVIHTGVLAA

SEQ ID NO: 750785 - protein, 121 aa, Homo sapiens
MQASQGSSVFPIVTLHGLRLHTVFVCTACQRVIMTSIWHRPVCPLSWLVPSAAFSNWGPGCRAVCSPRWATPAKIPTPKCDRVAHEEGSALRVPSRVHSSSQLLRVAPASPTSSLSPVMSR

SEQ ID NO: 750786 - protein, 121 aa, Homo sapiens; identical to SEQ ID NO: 750785

SEQ ID NO: 750787 - protein, 121 aa, Homo sapiens; identical to SEQ ID NO: 750785

SEQ ID NO: 750788 - protein, 113 aa, Homo sapiens
MGLRRSPYLWRRALRAAAGPLARDTLSPEPAAREAPLLLPSWVQELWQTRRRSSQAGIPVRAPRSPRAPEPALEPESLDFSGAGQRLRRDVSRPAVDPAANRLGLPCLAPGPF

SEQ ID NO: 750789 - protein, 167 aa, Homo sapiens
GRSTMSRPLEGPRGHAASPGLLWATRVTSTLAGLHELALSDETRHNWFASQMNKGSCLSPARLLSCCPRGFRSCGRRDAGAPRQGSPSVRPGARAPQSLRWNRSPWTSAELARDFGETSPAQRWTPQQTALACPAWPPDRSDSVPRPPVAPPRLTQEEWPRASRSRS

SEQ ID NO: 750790 - protein, 2223 aa, Homo sapiens
MAESASPPSSSAAAPAAEPGVTTEQPGPRSPPSSPPGLEEPLDGADPHVPHPDLAPIAFFCLRQTTSPRNWCIKMVCNPWFECVSMLVILLNCVTLGMYQPCDDMDCLSDRCKILQVFDDFIFIFFAMEMVLKMVALGIFGKKCYLGDTWNRLDFFIVMAGMVEYSLDLQNINLSAIRTVRVLRPLKAINRVPSMRILVNLLLDTLPMLGNVLLLCFFVFFIFGIIGVQLWAGLLRNRCFLEENFTIQGDVALPPYYQPEEDDEMPFICSLSGDNGIMGCHEIPPLKEQGRECCLSKDDVYDFGAGRQDLNASGLCVNWNRYYNVCRTGSANPHKGAINFDNIGYAWIVIFQVITLEGWVEIMYYVMDAHSFYNFIYFILLIIVGSFFMINLCLVVIATQFSETKQREHRLMLEQRQRYLSSSTVASYAEPGDCYEEIFQYVCHILRKAKRRALGLYQALQSRRQALGPEAPAPAKPGPHAKEPRHYHGKTKGQGDEGRHLGSRHCQTLHGPASPGNDHSGRELCPQHSPLDATPHTLVQPIPATLASDPASCPCCQHEDGRRPSGLGSTDSGQEGSGSGSSAGGEDEADGDGARSSEDGASSELGKEEEEEEQADGAVWLCGDVWRETRAKLRGIVDSKYFNRGIMMAILVNTVSMGIEHHEQPEELTNILEICNVVFTSMFALEMILKLAAFGLFDYLRNPYNIFDSIIVIISIWEIVGQADGGLSVLRTFRLLRVLKLVRFMPALRRQLVVLMKTMDNVATFCMLLMLFIFIFSILGMHIFGCKFSLRTDTGDTVPDRKNFDSLLWAIVTVFQILTQEDWNVVLYNGMASTSPWASLYFVALMTFGNYVLFNLLVAILVEGFQAEGDANRSYSDEDQSSSNIEEFDKLQEGLDSSGDPKLCPIPMTPNGHLDPSLPLGGHLGPAGAAGPAPRLSLQPDPMLVALGSRKSSVMSLGRMSYDQRSLSSSRSSYYGPWGRSAAWASRRSSWNSLKHKPPSAEHESLLSAERGGGARVCEVAADEGPPRAAPLHTPHAHHIHHGPHLAHRHRHHRRTLSLDNRDSVDLAELVPAVGAHPRAAWRAAGPAPGHEDCNGRMPSIAKDVFTKMGDRGDRGEDEEEIDYTLCFRVRKMIDVYKPDWCEVREDWSVYLFSPENRFRVLCQTIIAHKLFDYVVLAFIFLNCITIALERPQIEAGSTERIFLTVSNYIFTAIFVGEMTLKVVSLGLYFGEQAYLRSSWNVLDGFLVFVSIIDIVVSLASAGGAKILGVLRVLRLLRTLRPLRVISRAPGLKLVVETLISSLKPIGNIVLICCAFFIIFGILGVQLFKGKFYHCLGVDTRNITNRSDCMAANYRWVHHKYNFDNLGQALMSLFVLASKDGWVNIMYNGLDAVAVDQQPVTNHNPWMLLYFISFLLIVSFFVLNMFVGVVVENFHKCRQHQEAEEARRREEKRLRRLEKKRRKAQRLPYYATYCHTRLLIHSMCTSHYLDIFITFIICLNVVTMSLEHYNQPTSLETALKYCNYMFTTVFVLEAVLKLVAFGLRRFFKDRWNQLDLAIVLLSVMGITLEEIEINAALPINPTIIRIMRVLRIARVLKLLKMATGMRALLDTVVQALPQVGNLGLLFMLLFFIYAALGVELFGKLVCNDENPCEGMSRHATFENFGMAFLTLFQVSTGDNWNGIMKDTLRDCTHDERSCLSSLQFVSPLYFVSFVLTAQFVLINVVVAVLMKHLDDSNKEAQEDAEMDAELELEMAHGLGPGPRLPTGSPGAPGRGPGGAGGGGDTEGGLCRRCYSPAQENLWLDSVSLIIKDSLEGELTIIDNLSGSIFHHYSSPAGCKKCHHDKQEVQLAETEAFSLNSDRSSSILLGDDLSLEDPTACPPGRKDSKGELDPPEPMRVGDLGECFFPLSSTAVSPDPENFLCEMEEIPFNPVRSWLKHDSSQAPPSPFSPDASSPLLPMPAEFFHPAVSASQKGPEKGTGTGTLPKIALQGSWASLRSPRVNCTLLRQATGSDTSLDASPSSSAGSLQTTLEDSLTLSDSPRRALGPPAPAPGPRAGLSPAARRRLSLRGRGLFSLRGLRAHQRSHSSGGSTSPGCTHHDSMDPSDEEGRGGAGGGGAGSEHSETLSSLSLTSLFCPPPPPPAPGLTPARKFSSTSSLAAPGRPHAAALAHGLARSPSWAADRSKDPPGRAPLPMGLGPLAPPPQPLPGELEPGDAASKRKR

SEQ ID NO: 750791 - protein, 2016 aa, Homo sapiens
MAESASPPSSSAAAPAAEPGVTTEQPGPRSPPSSPPGLEEPLDGADPHVPHPDLAPIAFFCLRQTTSPRNWCIKMVCNPWFECVSMLVILLNCVTLGMYQPCDDMDCLSDRCKILQVFDDFIFIFFAMEMVLKMVALGIFGKKCYLGDTWNRLDFFIVMAGMVEYSLDLQNINLSAIRTVRVLRPLKAINRVPSMRILVNLLLDTLPMLGNVLLLCFFVFFIFGIIGVQLWAGLLRNRCFLEENFTIQGDVALPPYYQPEEDDEMPFICSLSGDNGIMGCHEIPPLKEQGRECCLSKDDVYDFGAGRQDLNASGLCVNWNRYYNVCRTGSANPHKGAINFDNIGYAWIVIFQVITLEGWVEIMYYVMDAHSFYNFIYFILLIIVGSFFMINLCLVVIATQFSETKQREHRLMLEQRQRYLSSSTVASYAEPGDCYEEIFQYVCHILRKAKRRALGLYQALQSRRQALGPEAPAPAKPGPHAKEPRHYHGKTKGQGDEGRHLGSRHCQTLHGPASPGNDHSGRELCPQHSPLDATPHTLVQPIPATLASDPASCPCCQHEDGRRPSGLGSTDSGQEGSGSGSSAGGEDEADGDGARSSEDGASSELGKEEEEEEQADGAVWLCGDVWRETRAKLRGIVDSKYFNRGIMMAILVNTVSMGIEHHEQPEELTNILEICNVVFTSMFALEMILKLAAFGLFDYLRNPYNIFDSIIVIISIWEIVGQADGGLSVLRTFRLLRVLKLVRFMPALRRQLVVLMKTMDNVATFCMLLMLFIFIFSILGMHIFGCKFSLRTDTGDTVPDRKNFDSLLWAIVTVFQILTQEDWNVVLYNGMASTSPWASLYFVALMTFGNYVLFNLLVAILVEGFQAEGDANRSYSDEDQSSSNIEEFDKLQEGLDSSGDPKLCPIPMTPNGHLDPSLPLGGHLGPAGAAGPAPRLSLQPDPMLVALGSRKSSVMSLGRMSYDQRSLSSSRSSYYGPWGRSAAWASRRSSWNSLKHKPPSAEHESLLSAERGGGARVCEVAADEGPPRAAPLHTPHAHHIHHGPHLAHRHRHHRRTLSLDNRDSVDLAELVPAVGAHPRAAWRAAGPAPGHEDCNGRMPSIAKDVFTKMGDRGDRGEDEEEIDYTLCFRVRKMIDVYKPDWCEVREDWSVYLFSPENRFRVLCQTIIAHKLFDYVVLAFIFLNCITIALERPQIEAGSTERIFLTVSNYIFTAIFVGEMTLKVVSLGLYFGEQAYLRSSWNVLDGFLVFVSIIDIVVSLASAGGAKILGVLRVLRLLRTLRPLRVISRAPGLKLVVETLISSLKPIGNIVLICCAFFIIFGILGVQLFKGKFYHCLGVDTRNITNRSDCMAANYRWVHHKYNFDNLGQALMSLFVLASKDGWVNIMYNGLDAVAVDQQPVTNHNPWMLLYFISFLLIVSFFVLNMFVGVVVENFHKCRQHQEAEEARRREEKRLRRLEKKRRKAQRLPYYATYCHTRLLIHSMCTSHYLDIFITFIICLNVVTMSLEHYNQPTSLETALKYCNYMFTTVFVLEAVLKLVAFGLRRFFKDRWNQLDLAIVLLSVMGITLEEIEINAALPINPTIIRIMRVLRIARVLKLLKMATGMRALLDTVVQALPQVGNLGLLFMLLFFIYAALGVELFGKLVCNDENPCEGMSRHATFENFGMAFLTLFQVSTGDNWNGIMKDTLRDCTHDERSCLSSLQFVSPLYFVSFVLTAQFVLINVVVAVLMKHLDDSNKEAQEDAEMDAELELEMAHGLGPGPRLPTGSPGAPGRGPGGAGGGGDTEGGLCRRCYSPAQENLWLDSVSLIIKDSLEGELTIIDNLSGSIFHHYSSPAGCKKCHHDKQEVQLAETEAFSLNSDRSSSILLGDDLSLEDPTACPPGRKDSKGELDPPEPMRVGDLGECFFPLSSTAVSPDPENFLCEMEEIPFNPVRSWLKHDSSQAPPSPFSPDASSPLLPMPAEFFHPAVSASQKGPEKGTGTGTLPKIALQGSWASLRSPRVNCTLLRQVPTPPRP

SEQ ID NO: 750792 - protein, 1981 aa, Homo sapiens
MAESASPPSSSAAAPAAEPGVTTEQPGPRSPPSSPPGLEEPLDGADPHVPHPDLAPIAFFCLRQTTSPRNWCIKMVCNPWFECVSMLVILLNCVTLGMYQPCDDMDCLSDRCKILQVFDDFIFIFFAMEMVLKMVALGIFGKKCYLGDTWNRLDFFIVMAGMVEYSLDLQNINLSAIRTVRVLRPLKAINRVPSMRILVNLLLDTLPMLGNVLLLCFFVFFIFGIIGVQLWAGLLRNRCFLEENFTIQGDVALPPYYQPEEDDEMPFICSLSGDNGIMGCHEIPPLKEQGRECCLSKDDVYDFGAGRQDLNASGLCVNWNRYYNVCRTGSANPHKGAINFDNIGYAWIVIFQVITLEGWVEIMYYVMDAHSFYNFIYFILLIIVGSFFMINLCLVVIATQFSETKQREHRLMLEQRQRYLSSSTVASYAEPGDCYEEIFQYVCHILRKAKRRALGLYQALQSRRQALGPEAPAPAKPGPHAKEPRHYQLCPQHSPLDATPHTLVQPIPATLASDPASCPCCQHEDGRRPSGLGSTDSGQEGSGSGSSAGGEDEADGDGARSSEDGASSELGKEEEEEEQADGAVWLCGDVWRETRAKLRGIVDSKYFNRGIMMAILVNTVSMGIEHHEQPEELTNILEICNVVFTSMFALEMILKLAAFGLFDYLRNPYNIFDSIIVIISIWEIVGQADGGLSVLRTFRLLRVLKLVRFMPALRRQLVVLMKTMDNVATFCMLLMLFIFIFSILGMHIFGCKFSLRTDTGDTVPDRKNFDSLLWAIVTVFQILTQEDWNVVLYNGMASTSPWASLYFVALMTFGNYVLFNLLVAILVEGFQAEGDANRSYSDEDQSSSNIEEFDKLQEGLDSSGDPKLCPIPMTPNGHLDPSLPLGGHLGPAGAAGPAPRLSLQPDPMLVALGSRKSSVMSLGRMSYDQRSLSSSRSSYYGPWGRSAAWASRRSSWNSLKHKPPSAEHESLLSAERGGGARVCEVAADEGPPRAAPLHTPHAHHIHHGPHLAHRHRHHRRTLSLDNRDSVDLAELVPAVGAHPRAAWRAAGPAPGHEDCNGRMPSIAKDVFTKMGDRGDRGEDEEEIDYTLCFRVRKMIDVYKPDWCEVREDWSVYLFSPENRFRVLCQTIIAHKLFDYVVLAFIFLNCITIALERPQIEAGSTERIFLTVSNYIFTAIFVGEMTLKVVSLGLYFGEQAYLRSSWNVLDGFLVFVSIIDIVVSLASAGGAKILGVLRVLRLLRTLRPLRVISRAPGLKLVVETLISSLKPIGNIVLICCAFFIIFGILGVQLFKGKFYHCLGVDTRNITNRSDCMAANYRWVHHKYNFDNLGQALMSLFVLASKDGWVNIMYNGLDAVAVDQQPVTNHNPWMLLYFISFLLIVSFFVLNMFVGVVVENFHKCRQHQEAEEARRREEKRLRRLEKKRRKAQRLPYYATYCHTRLLIHSMCTSHYLDIFITFIICLNVVTMSLEHYNQPTSLETALKYCNYMFTTVFVLEAVLKLVAFGLRRFFKDRWNQLDLAIVLLSVMGITLEEIEINAALPINPTIIRIMRVLRIARVLKLLKMATGMRALLDTVVQALPQVGNLGLLFMLLFFIYAALGVELFGKLVCNDENPCEGMSRHATFENFGMAFLTLFQVSTGDNWNGIMKDTLRDCTHDERSCLSSLQFVSPLYFVSFVLTAQFVLINVVVAVLMKHLDDSNKEAQEDAEMDAELELEMAHGLGPGPRLPTGSPGAPGRGPGGAGGGGDTEGGLCRRCYSPAQENLWLDSVSLIIKDSLEGELTIIDNLSGSIFHHYSSPAGCKKCHHDKQEVQLAETEAFSLNSDRSSSILLGDDLSLEDPTACPPGRKDSKGELDPPEPMRVGDLGECFFPLSSTAVSPDPENFLCEMEEIPFNPVRSWLKHDSSQAPPSPFSPDASSPLLPMPAEFFHPAVSASQKGPEKGTGTGTLPKIALQGSWASLRSPRVNCTLLRQVPTPPRP

SEQ ID NO: 750793 - protein, 327 aa, Homo sapiens
MRVGDLGECFFPLSSTAVSPDPENFLCEMEEIPFNPVRSWLKHDSSQAPPSPFSPDASSPLLPMPAEFFHPAVSASQKGPEKGTGTGTLPKIALQGSWASLRSPRVNCTLLRQATGSDTSLDASPSSSAGSLQTTLEDSLTLSDSPRRALGPPAPAPGPRAGLSPAARRRLSLRGRGLFSLRGLRAHQRSHSSGGSTSPGCTHHDSMDPSDEEGRGGAGGGGAGSEHSETLSSLSLTSLFCPPPPPPAPGLTPARKFSSTSSLAAPGRPHAAALAHGLARSPSWAADRSKDPPGRAPLPMGLGPLAPPPQPLPGELEPGDAASKRKR

SEQ ID NO: 750794 - protein, 408 aa, Homo sapiens
MAESASPPSSSAAAPAAEPGVTTEQPGPRSPPSSPPGLEEPLDGADPHVPHPDLAPIAFFCLRQTTSPRNWCIKMVCNPWFECVSMLVILLNCVTLGMYQPCDDMDCLSDRCKILQVFDDFIFIFFAMEMVLKMVALGIFGKKCYLGDTWNRLDFFIVMAGMVEYSLDLQNINLSAIRTVRVLRPLKAINRVPSMRILVNLLLDTLPMLGNVLLLCFFVFFIFGIIGVQLWAGLLRNRCFLEENFTIQGDVALPPYYQPEEDDEMPFICSLSGDNGIMGCHEIPPLKEQGRECCLSKDDVYDFGAGRQDLNASGLCVNWNRYYNVCRTGSANPHKGAINFDNIGYAWIVIFQVITLEGWVEIMYYVMDAHSFYNFIYFILLIIPLLPAPPYGLPRVSSSTSSCLTAAS

SEQ ID NO: 750795 - protein, 120 aa, Homo sapiens
MITAGPPAITSVFQKGSRRWMLISPTVVGEQAHLILLCSLFQKDIHRRCYRRFGGKMSGHVVRALMDEKVLGKEPGKGNLSRANSTCKRPEVSESDLAGAQERRRGVEVGRAGPQAVLGT

SEQ ID NO: 750796 - protein, 1244 aa, Homo sapiens
MLIKEYHILLPMSLDEYQVAQLYMIQKKSREESSGEGSGVEILANRPYTDGPGGSGQYTHKVYHVGSHIPGWFRALLPKAALQVEEESWNAYPYTRTRYTCPFVEKFSIEIETYYLPDGGQQPNVFNLSGAERRQRILDTIDIVRDAVAPGEYKAEEDPRLYHSVKTGRGPLSDDWARTAAQTGPLMCAYKLCKVEFRYWGMQAKIEQFIHDVGLRRVMLRAHRQAWCWQDEWTELSMADIRALEEETARMLAQRMAKCNTGSEGSEAQPPGKPSTEARSAASNTGTPDGPEAPPGPDASPDASFGKQWSSSSRSSYSSQHGGAVSPQSLSEWRMQNIARDSENSSEEEFFDAHEGFSDSEEVFPKEMTKWNSNDFIDAFASPVEAEGTPEPGAEAAKGIEDGAQAPRDSEGLDGAGELGAEACAVHALFLILHSGNILDSGPGDANSKQADVQTLSSAFEAVTRIHFPEALGHVALRLVPCPPICAAAYALVSNLSPYSHDGDSLSRSQDHIPLAALPLLATSSSRYQGAVATVIARTNQAYSAFLRSPEGAGFCGQVALIGDGVGGILGFDALCHSANAGTGSRGSSRRGSMNNELLSPEFGPVRDPLADGVEGLGRGSPEPSALPPQRIPSDMASPEPEGSQNSLQAAPATTSSWEPRRASTAFCPPAASSEAPDGPSSTARLDFKVSGFFLFGSPLGLVLALRKTVMPALEAAQMRPACEQIYNLFHAADPCASRLEPLLAPKFQAIAPLTVPRYQKFPLGDGSSLLLADTLQTHSSLFLEELEMLVPSTPTSTSGAFWKGSELATDPPAQPAAPSTTSEVVKILERWWGTKRIDYSLYCPEALTAFPTVTLPHLFHASYWESADVVAFILRQVIEKERPQLAECEEPSIYSPAFPREKWQRKRTQVKIRNVTSNHRASDTVVCEGRPQVLSGRFMYGPLDVVTLTGEKVDVYIMTQPLSGKWIHFGTEVTNSSGRLTFPVPPERALGIGVYPVRMVVRGDHTYAECCLTVVARGTEAVVFSIDGSFTASVSIMGSDPKVRAGAVDVVRHWQDSGYLIVYVTGRPDMQKHRVVAWLSQHNFPHGVVSFCDGLTHDPLRQKAMFLQSLVQEVELNIVAGYGSPKDVAVYAALGLSPSQTYIVGRAVRKLQAQCQFLSDGYVAHLGQLEAGSHSHASSGPPRAALGKSSYGVAAPVDFLRKQSQLLRSRGPSQAEREGPGTPPTTLARGKARSISLKLDSEE

SEQ ID NO: 750797 - protein, 1420 aa, Homo sapiens
RRGGTAGAPAGGSRGRSGPWAGTAPREGPATAGTRGRGWGRSGLRPTGRPALPGLGEGRPPQARGGAEAARGPPSAFRMLIKEYHILLPMSLDEYQVAQLYMIQKKSREESSGEGSGVEILANRPYTDGPGGSGQYTHKVYHVGSHIPGWFRALLPKAALQVEEESWNAYPYTRTRGMGELGMVRGQEGSGPGGYSSEPHPCLLPRYTCPFVEKFSIEIETYYLPDGGQQPNVFNLSGAERRQRILGEAWSYGGTLAPLSGSWLPQWAASEKSQPSPGLMSCLQKDGNCHPVPRGCQERGLKGAGAAQCCRTPSDTIDIVRDAVAPGEYKAEEDPRLYHSVKTGRGPLSDDWARTAAQTGPLMCAYKLCKVEFRYWGMQAKIEQFIHDVGLRRVMLRAHRQAWCWQDEWTELSMADIRALEEETARMLAQRMAKCNTGSEGSEAQPPGKPSTEARSAASNTGTPDGPEAPPGPDASPDASFGKQWSSSSRSSYSSQHGGAVSPQSLSEWRMQNIARDSENSSEEEFFDAHEGFSDSEEVFPKEMTKWNSNDFIDAFASPVEAEGTPEPGAEAAKGIEDGAQAPRDSEGLDGAGELGAEACAVHALFLILHSGNILDSGPGDANSKQADVQTLSSAFEAVTRIHFPEALGHVALRLVPCPPICAAAYALVSNLSPYSHDGDSLSRSQDHIPLAALPLLATSSSRYQGAVATVIARTNQAYSAFLRSPEGAGFCGQVALIGDGVGGILGFDALCHSANAGTGSRGSSRRGSMNNELLSPEFGPVRDPLADGVEGLGRGSPEPSALPPQRIPSDMASPEPEGSQNSLQAAPATTSSWEPRRASTAFCPPAASSEAPDGPSSTARLDFKVSGFFLFGSPLGLVLALRKTVMPALEAAQMRPACEQIYNLFHAADPCASRLEPLLAPKFQAIAPLTVPRYQKFPLGDGSSLLLADTLQTHSSLFLEELEMLVPSTPTSTSGAFWKGSELATDPPAQPAAPSTTSEVVKILERWWGTKRIDYSLYCPEALTAFPTVTLPHLFHASYWESADVVAFILRQVIEKERPQLAECEEPSIYSPAFPREKWQRKRTQVKIRNVTSNHRASDTVVCEGRPQVLSGRFMYGPLDVVTLTGEKVDVYIMTQPLSGKWIHFGTEVTNSSGRLTFPVPPERALGIGVYPVRMVVRGDHTYAECCLTVVARGTEAVVFSIDGSFTASVSIMGSDPKVRAGAVDVVRHWQDSGYLIVYVTGRPDMQKHRVVAWLSQHNFPHGVVSFCDGLTHDPLRQKAMFLQSLVQEVELNIVAGYGSPKDVAVYAALGLSPSQTYIVGRAVRKLQAQCQFLSDGYVAHLGQLEAGSHSHASSGPPRAALGKSSYGVAAPVDFLRKQSQLLRSRGPSQAEREGPGTPPTTLARGKARSISLKLDSEE

SEQ ID NO: 750798 - protein, 1322 aa, Homo sapiens
RRGGTAGAPAGGSRGRSGPWAGTAPREGPATAGTRGRGWGRSGLRPTGRPALPGLGEGRPPQARGGAEAARGPPSAFRMLIKEYHILLPMSLDEYQVAQLYMIQKKSREESSGEGSGVEILANRPYTDGPGGSGQYTHKVYHVGSHIPGWFRALLPKAALQVEEESWNAYPYTRTRYTCPFVEKFSIEIETYYLPDGGQQPNVFNLSGAERRQRILDTIDIVRDAVAPGEYKAEEDPRLYHSVKTGRGPLSDDWARTAAQTGPLMCAYKLCKVEFRYWGMQAKIEQFIHDVGLRRVMLRAHRQAWCWQDEWTELSMADIRALEEETARMLAQRMAKCNTGSEGSEAQPPGKPSTEARSAASNTGTPDGPEAPPGPDASPDASFGKQWSSSSRSSYSSQHGGAVSPQSLSEWRMQNIARDSENSSEEEFFDAHEGFSDSEEVFPKEMTKWNSNDFIDAFASPVEAEGTPEPGAEAAKGIEDGAQAPRDSEGLDGAGELGAEACAVHALFLILHSGNILDSGPGDANSKQADVQTLSSAFEAVTRIHFPEALGHVALRLVPCPPICAAAYALVSNLSPYSHDGDSLSRSQDHIPLAALPLLATSSSRYQGAVATVIARTNQAYSAFLRSPEGAGFCGQVALIGDGVGGILGFDALCHSANAGTGSRGSSRRGSMNNELLSPEFGPVRDPLADGVEGLGRGSPEPSALPPQRIPSDMASPEPEGSQNSLQAAPATTSSWEPRRASTAFCPPAASSEAPDGPSSTARLDFKVSGFFLFGSPLGLVLALRKTVMPALEAAQMRPACEQIYNLFHAADPCASRLEPLLAPKFQAIAPLTVPRYQKFPLGDGSSLLLADTLQTHSSLFLEELEMLVPSTPTSTSGAFWKGSELATDPPAQPAAPSTTSEVVKILERWWGTKRIDYSLYCPEALTAFPTVTLPHLFHASYWESADVVAFILRQVIEKERPQLAECEEPSIYSPAFPREKWQRKRTQVKIRNVTSNHRASDTVVCEGRPQVLSGRFMYGPLDVVTLTGEKVDVYIMTQPLSGKWIHFGTEVTNSSGRLTFPVPPERALGIGVYPVRMVVRGDHTYAECCLTVVARGTEAVVFSIDGSFTASVSIMGSDPKVRAGAVDVVRHWQDSGYLIVYVTGRPDMQKHRVVAWLSQHNFPHGVVSFCDGLTHDPLRQKAMFLQSLVQEVELNIVAGYGSPKDVAVYAALGLSPSQTYIVGRAVRKLQAQCQFLSDGYVAHLGQLEAGSHSHASSGPPRAALGKSSYGVAAPVDFLRKQSQLLRSRGPSQAEREGPGTPPTTLARGKARSISLKLDSEE

SEQ ID NO: 750799 - protein, 434 aa, Homo sapiens
ADGCGAGGHPDSLPCRAVLERWWGTKRIDYSLYCPEALTAFPTVTLPHLFHASYWESADVVAFILRQVIEKERPQLAECEEPSIYSPAFPREKWQRKRTQVKIRNVTSNHRASDTVVCEGRPQVLSGRFMYGPLDVVTLTGEKVDVYIMTQPLSGKWIHFGTEVTNSSGRLTFPVPPERALGIGVYPVRMVVRGDHTYAECCLTVVARGTEAVVFSIDGSFTASVSIMGSDPKVRAGAVDVVRHWQDSGYLIVYVTGRPDMQKHRVVAWLSQHNFPHGVVSFCDGLTHDPLRQKAMFLQSLVQEVELNIVAGYGSPKDVAVYAALGLSPSQTYIVGRAVRKLQAQCQFLSDGYVAHLGQLEAGSHSHASSGPPRAALGKSSYGVAAPVDFLRKQSQLLRSRGPSQAEREGPGTPPTTLARGKARSISLKLDSEE

SEQ ID NO: 750800 - protein, 510 aa, Homo sapiens
RRGGTAGAPAGGSRGRSGPWAGTAPREGPATAGTRGRGWGRSGLRPTGRPALPGLGEGRPPQARGGAEAARGPPSAFRMLIKEYHILLPMSLDEYQVAQLYMIQKKSREESSGEGSGVEILANRPYTDGPGGSGQYTHKVYHVGSHIPGWFRALLPKAALQVEEESWNAYPYTRTRYTCPFVEKFSIEIETYYLPDGGQQPNVFNLSGAERRQRILDTIDIVRDAVAPGEYKAEEDPRLYHSVKTGRGPLSDDWARTAAQTGPLMCAYKLCKVEFRYWGMQAKIEQFIHDVGLRRVMLRAHRQAWCWQDEWTELSMADIRALEEETARMLAQRMAKCNTGSEGSEAQPPGKPSTEARSAASNTGTPDGPEAPPGPDASPDASFGKQWSSSSRSSYSSQHGGAVSPQSLSEWRMQNIARDSENSSEEEFFDAHEGFSDSEEVFPKEMTKWNSNDFIDAFASPVEAEGTPEPGAEAAKGIEDGAQAPRDSEGLDGAGELGAEAWAQRLFQCV

SEQ ID NO: 750801 - protein, 1322 aa, Homo sapiens; identical to SEQ ID NO: 750798

SEQ ID NO: 750802 - protein, 1269 aa, Homo sapiens
RRGGTAGAPAGGSRGRSGPWAGTAPREGPATAGTRGRGWGRSGLRPTGRPALPGLGEGRPPQARGGAEAARGPPSAFRMLIKEYHILLPMSLDEYQVAQLYMIQKKSREESSGEGSGVEILANRPYTDGPGGSGQYTHKVYHVGSHIPGWFRALLPKAALQVEEESWNAYPYTRTRYTCPFVEKFSIEIETYYLPDGGQQPNVFNLSGAERRQRILDTIDIVRDAVAPGEYKAEEDPRLYHSVKTGRGPLSDDWARTAAQTGPLMCAYKLCKVEFRYWGMQAKIEQFIHDVGLRRVMLRAHRQAWCWQDEWTELSMADIRALEEETARMLAQRMAKCNTGSEGSEAQPPGKPSTEARSAASNTGTPDGPEAPPGPDASPDASFGKQWSSSSRSSYSSQHGGAVSPQSLSEWRMQNIARDSENSSEEEFFDAHEGFSDSEEVFPKEMTKWNSNDFIDAFASPVEAEGTPEPGAEAAKGIEDGAQAPRDSEGLDGAGELGAEACAVHALFLILHSGNILDSGPGDANSKQADVQTLSSAFEAVTRIHFPEALGHVALRLVPCPPICAAAYALVSNLSPYSHDGDSLSRSQDHIPLAALPLLATSSSRYQGAVATVIARTNQAYSAFLRSPEGAGFCGQVALIGDGVGGILGFDALCHSANAGTGSRGSSRRGSMNNELLSPEFGPVRDPLADGVEGLGRGSPEPSALPPQRIPSDMASPEPEGSQNSLQAAPATTSSWEPRRASTAFCPPAASSEAPDGPSSTARLDFKVSGFFLFGSPLGLVLALRKTVMPALEAAQMRPACEQIYNLFHAADPCASRLEPLLAPKFQAIAPLTVPRYQKFPLGDGSSLLLADTLQTHSSLFLEELEMLVPSTPTSTSGAFWKGSELATDPPAQPAAPSTTSEVVKILERWWGTKRIDYSLYCPEALTAFPTVTLPHLFHASYWESADVVAFILRQVIEKERPQLAECEEPSIYSPAFPREKWQRKRTQVKIRNHFGTEVTNSSGRLTFPVPPERALGIGVYPVRMVVRGDHTYAECCLTVVARGTEAVVFSIDGSFTASVSIMGSDPKVRAGAVDVVRHWQDSGYLIVYVTGRPDMQKHRVVAWLSQHNFPHGVVSFCDGLTHDPLRQKAMFLQSLVQEVELNIVAGYGSPKDVAVYAALGLSPSQTYIVGRAVRKLQAQCQFLSDGYVAHLGQLEAGSHSHASSGPPRAALGKSSYGVAAPVDFLRKQSQLLRSRGPSQAEREGPGTPPTTLARGKARSISLKLDSEE

SEQ ID NO: 750803 - protein, 753 aa, Homo sapiens
RRGGTAGAPAGGSRGRSGPWAGTAPREGPATAGTRGRGWGRSGLRPTGRPALPGLGEGRPPQARGGAEAARGPPSAFRMLIKEYHILLPMSLDEYQVAQLYMIQKKSREESSGEGSGVEILANRPYTDGPGGSGQYTHKVYHVGSHIPGWFRALLPKAALQVEEESWNAYPYTRTRYTCPFVEKFSIEIETYYLPDGGQQPNVFNLSGAERRQRILDTIDIVRDAVAPGEYKAEEDPRLYHSVKTGRGPLSDDWARTAAQTGPLMCAYKLCKVEFRYWGMQAKIEQFIHDVGLRRVMLRAHRQAWCWQDEWTELSMADIRALEEETARMLAQRMAKCNTGSEGSEAQPPGKPSTEARSAASNTGTPDGPEAPPGPDASPDASFGKQWSSSSRSSYSSQHGGAVSPQSLSEWRMQNIARDSENSSEEEFFDAHEGFSDSEEVFPKEMTKWNSNDFIDAFASPVEAEGTPEPGAEAAKGIEDGAQAPRDSEGLDGAGELGAEACAVHALFLILHSGNILDSGPGDANSKQADVQTLSSAFEAVTRIHFPEALGHVALRLVPCPPICAAAYALVSNLSPYSHDGDSLSRSQDHIPLAALPLLATSSSRYQGAVATVIARTNQAYSAFLRSPEGAGFCGQVALIGDGVGGILGFDALCHSANAGTGSRGSSRRGSMNNELLSPEFGPVRDPLADGVEGLGRGSPEPSALPPQRIPSDMASPEPEGSQNRAVSLHTCCSQGTQSVLPEIDSQAHVENP

SEQ ID NO: 750804 - protein, 473 aa, Homo sapiens
RRGGTAGAPAGGSRGRSGPWAGTAPREGPATAGTRGRGWGRSGLRPTGRPALPGLGEGRPPQARGGAEAARGPPSAFRMLIKEYHILLPMSLDEYQVAQLYMIQKKSREESSGEGSGVEILANRPYTDGPGGSGQYTHKVYHVGSHIPGWFRALLPKAALQVEEESWNAYPYTRTRYTCPFVEKFSIEIETYYLPDGGQQPNVFNLSGAERRQRILDTIDIVRDAVAPGEYKAEEDPRLYHSVKTGRGPLSDDWARTAAQTGPLMCAYKLCKVEFRYWGMQAKIEQFIHDVGLRRVMLRAHRQAWCWQDEWTELSMADIRALEEETARMLAQRMAKCNTGSEGSEAQPPGKPSTEARSAASNTGTPDGPEAPPGPDASPDASFGKQWSSSSRSSYSSQHGGAVSPQSLSEWRMQNIARDSENSSEEEFFDAHEGFSDSEEVFPKEMTKWNSNDFIDAFASPVEAEGTPGKDTA

SEQ ID NO: 750805 - protein, 364 aa, Homo sapiens
MWAPREQLLGWTAEALPAKDSAWPWEEKPRYLGPVTFEDVAVLFTEAEWKRLSLEQRNLYKEVMLENLRNLVSLAESKPEVHTCPSCPLAFGSQQFLSQDELHNHPIPGFHAGNQLHPGNPCPEDQPQSQHPSDKNHRGAEAEDQRVEGGVRPLFWSTNERGALVGFSSLFQRPPISSWGGNRILEIQLSPAQNASSEEVDRISKRAETPGFGAVTFGECALAFNQKSNLFRQKAVTAEKSSDKRQSQVCRECGRGFSRKSQLIIHQRTHTGEKPYVCGECGRGFIVESVLRNHLSTHSGEKPYVCSHCGRGFSCKPYLIRHQRTHTREKSFMCTVCGRGFREKSELIKHQRIHTGDKPYVCRD

SEQ ID NO: 750806 - protein, 422 aa, Homo sapiens
MIDFQMLNQLCRTIINPSVIPCLKYCGDQIGPVTFEDVAVLFTEAEWKRLSLEQRNLYKEVMLENLRNLVSLAESKPEVHTCPSCPLAFGSQQFLSQDELHNHPIPGFHAGNQLHPGNPCPEDQPQSQHPSDKNHRGAEAEDQRVEGGVRPLFWSTNERGALVGFSSLFQRPPISSWGGNRILEIQLSPAQNASSEEVDRISKRAETPGFGAVTFGECALAFNQKSNLFRQKAVTAEKSSDKRQSQVCRECGRGFSRKSQLIIHQRTHTGEKPYVCGECGRGFIVESVLRNHLSTHSGEKPYVCSHCGRGFSCKPYLIRHQRTHTREKSFMCTVCGRGFREKSELIKHQRCQVTVPLEEWSLHLTTSFCNCVLPLASMTLSCFIFFYISSLCCFLSYPTFRFYSEFSLQPYNLRDTFTRSPS

SEQ ID NO: 750807 - protein, 104 aa, Homo sapiens
MWAPREQLLGWTAEALPAKDSAWPWEEKPRYLGPVTFEDVAVLFTEAEWKRLSLEQRNLYKEVMLENLRNLVSLVLELGSPRSGLLPLDLNLDFGFDVGPCVWI

SEQ ID NO: 750808 - protein, 119 aa, Homo sapiens [sequence omitted]

SEQ ID NO: 750809 - protein, 364 aa, Homo sapiens; identical to SEQ ID NO: 750805

SEQ ID NO: 750810 - protein, 119 aa, Homo sapiens [sequence omitted]

SEQ ID NO: 750811 - protein, 168 aa, Homo sapiens
MERSGSPCAQIKPVNTLSCPQVVTLRSTHNSKHQETSHNHFALKQVPDHNGVDSLLFTKLRPNIGFIFQKKKNTDRTKTVLGAAVALEKSILSHSVGAGGNEENWQLRCPRDSGHEGVCLPKKRGARRRHTSRWANGYKGQSDATPPGGTAKTARDEEETKQHSRRRE

SEQ ID NO: 750812 - protein, 362 aa, Homo sapiens
MIDFQMLNQLCRTIINPSVIPCLKYCGDQIGPVTFEDVAVLFTEAEWKRLSLEQRNLYKEVMLENLRNLVSLAESKPEVHTCPSCPLAFGSQQFLSQDELHNHPIPGFHAGNQLHPGNPCPEDQPQSQHPSDKNHRGAEAEDQRVEGGVRPLFWSTNERGALVGFSSLFQRPPISSWGGNRILEIQLSPAQNASSEEVDRISKRAETPGFGAVTFGECALAFNQKSNLFRQKAVTAEKSSDKRQSQVCRECGRGFSRKSQLIIHQRTHTGEKPYVCGECGRGFIVESVLRNHLSTHSGEKPYVCSHCGRGFSCKPYLIRHQRTHTREKSFMCTVCGRGFREKSELIKHQRIHTGDKPYVCRD

SEQ ID NO: 750813 - protein, 119 aa, Homo sapiens [sequence omitted]

SEQ ID NO: 750814 - protein, 81 aa, Homo sapiens
NRSSSSSSSSSSSSSGHCYMVSTYYTSRRPHHSPESYPRFTDEDEKSQRGRNLPAVAQLLSKWSGPRAASEFFLTIFLSVP

SEQ ID NO: 750815 - protein, 81 aa, Homo sapiens; identical to SEQ ID NO: 750814

SEQ ID NO: 750816 - protein, 68 aa, Homo sapiens
ITEQLDMGELAASANHGHSPCYPERKGTPGDLSKRKMLVHFYPRRHSHPRATQQWILKNKTLCRRIKE

SEQ ID NO: 750817 - protein, 127 aa, Homo sapiens
GGLATTVFFLLFICSWIFLKPFHHQPSSSLPAPWRLKLFPAYVREGEPETATSGVKGVSSEPRTMAFCHCLLSSCCWGLGLLAAASFSANQESREVGTASTKTLKMSGEDRLSPGAQPGQQGKTSSL

SEQ ID NO: 750818 - protein, 186 aa, Homo sapiens
FPSAGSVFWVWVCFLSCVWVFCRPWGRPVPGRPLCCLLKGLCPCPGFLVSRRENQLKLSHDWLCYLAPEIVREMTPGKDEDQLPFSKAADVYAFGTVWYELQARDWPLKNQAAEASIWQIGSGEGMKRVLTSVSLGKEVSEILSACWAFDLQERPSFSLLMDMLEKLPKLNRRLSHPGHFWKSAEL

SEQ ID NO: 750819 - protein, 191 aa, Homo sapiens
PGSPGLLGGTWTPAREGVLRLEVASSDVGLLILAKLVRYICKQRQCKLSVAPGERTPELNSYPRFSDWLYTFNVRPEVVQEIPRDLTLDALLEMNEAKVKETLRRCGASGDECGRLQYALTCLRKVTGLAFITLGGIGRRGRRDGNEGHVTSAYEGMQRRAAKVAQRCRPDGLSDGKNTQDSEPSTEEHTR

SEQ ID NO: 750820 - protein, 972 aa, Homo sapiens
AAAEGGAGAAASRALQQCGQLQKLIDISIGSLRGLRTKCAVSNDLTQQEIRTLEAKLVRYICKQRQCKLSVAPGERTPELNSYPRFSDWLYTFNVRPEVVQEIPRDLTLDALLEMNEAKVKETLRRCGASGDECGRLQYALTCLRKVTGLGGEHKEDSSWSSLDARRESGSGPSTDTLSAASLPWPPGSSQLGRAGNSAQGPRSISVSALPASDSPTPSFSEGLSDTCIPLHASGRLTPRALHSFITPPTTPQLRRHTKLKPPRTPPPPSRKVFQLLPSFPTLTRSKSHESQLGNRIDDVSSMRCACLLPHLETSQGQLTEPSSEARSKLEDQARRGEPHHATGLAWPAPVLMDIDQGDAYIINHCAPLYPVVSELGSHGHELSPAEFLSLPIRPLSLQISRMDPQQMVRRDIGLSVTHRFSTKSWLSQVCHVCQKSMIFGVKCKHCRLKCHNKCTKEAPACRISFLPLTRLRRTESVPSDINNPVDRAAEPHFGTLPKALTKKEHPPAMNHLDSSSNPSSTTSSTPSSPAPFPTSSNPSSATTPPNPSPGQRDSRFNFPAAYFIHHRQQFIFPDISAFAHAAPLPEAADGTRLDDQPKADVLEAHEAEAEEPEAGKSEAEDDEDEVDDLPSSRRPWRGPISRKASQTSVYLQEWDIPFEQVELGEPIGQGRWGRVHRGRWHGEVAIRLLEMDGHNQDHLKLFKKEVMNYRQTRHENVVLFMGACMNPPHLAIITSFCKGRTLHSFVRDPKTSLDINKTRQIAQEIIKGMGYLHAKGIVHKDLKSKNVFYDNGKVVITDFGLFGISGVVREGRRENQLKLSHDWLCYLAPEIVREMTPGKDEDQLPFSKAADVYAFGTVWYELQARDWPLKNQAAEASIWQIGSGEGMKRVLTSVSLGKEVSEILSACWAFDLQERPSFSLLMDMLEKLPKLNRRLSHPGHFWKSADINSSKVVPRFERFGLGVLESSNPKM

SEQ ID NO: 750821 - protein, 905 aa, Homo sapiens
MAKLVRYICKQRQCKLSVAPGERTPELNSYPRFSDWLYTFNVRPEVVQEIPRDLTLDALLEMNEAKVKETLRRCGASGDECGRLQYALTCLRKVTGLGGEHKEDSSWSSLDARRESGSGPSTDTLSAASLPWPPGSSQLGRAGNSAQGPRSISVSALPASDSPTPSFSEGLSDTCIPLHASGRLTPRALHSFITPPTTPQLRRHTKLKPPRTPPPPSRKVFQLLPSFPTLTRSKSHESQLGNRIDDVSSMRCACLLPHLETSQGQLTEPSSEARSKLEDQARRGEPHHATGLAWPAPVLMDIDQGDAYIINHCAPLYPVVSELGSHGHELSPAEFLSLPIRPLSLQISRMDPQQMVRRDIGLSVTHRFSTKSWLSQVCHVCQKSMIFGVKCKHCRLKCHNKCTKEAPACRISFLPLTRLRRTESVPSDINNPVDRAAEPHFGTLPKALTKKEHPPAMNHLDSSSNPSSTTSSTPSSPAPFPTSSNPSSATTPPNPSPGQRDSRFNFPDISAFAHAAPLPEAADGTRLDDQPKADVLEAHEAEAEEPEAGKSEAEDDEDEVDDLPSSRRPWRGPISRKASQTSVYLQEWDIPFEQVELGEPIGQGRWGRVHRGRWHGEVAIRLLEMDGHNQDHLKLFKKEVMNYRQTRHENVVLFMGACMNPPHLAIITSFCKGRTLHSFVRDPKTSLDINKTRQIAQEIIKGMGYLHAKGIVHKDLKSKNVFYDNGKVVITDFGLFGISGVVREGRRENQLKLSHDWLCYLAPEIVREMTPGKDEDQLPFSKAADVYAFGTVWYELQARDWPLKNQAAEASIWQIGSGEGMKRVLTSVSLGKEVSEILSACWAFDLQERPSFSLLMDMLEKLPKLNRRLSHPGHFWKSADINSSKVVPRFERFGLGVLESSNPKM

SEQ ID NO: 750822 - protein, 435 aa, Homo sapiens
LQFRSSLLRWPFCVCDSPPLLFKAAYFIHHRQQFIFPDISAFAHAAPLPEAADGTRLDDQPKADVLEAHEAEAEEPEAGKSEAEDDEDEVDDLPSSRRPWRGPISRKASQTSVYLQEWDIPFEQVELGEPIGQGRWGRVHRGRWHGEVAIRLLEMDGHNQDHLKLFKKEVMNYRQTRHENVVLFMGACMNPPHLAIITSFCKGRTLHSFVRDPKTSLDINKTRQIAQEIIKGMGYLHAKGIVHKDLKSKNVFYDNGKVVITDFGLFGISGVVREGRRENQLKLSHDWLCYLAPEIVREMTPGKDEDQLPFSKAADVYAFGTVWYELQARDWPLKNQAAEASIWQIGSGEGMKRVLTSVSLGKEVSEILSACWAFDLQERPSFSLLMDMLEKLPKLNRRLSHPGHFWKSADINSSKVVPRFERFGLGVLESSNPKM

SEQ ID NO: 750823 - protein, 103 aa, Homo sapiens [sequence omitted]

SEQ ID NO: 750824 - protein, 353 aa, Homo sapiens
MEASASCMGWLPDERTPRSSTRHTSSHSWLSWHDTSFLICEGPECECTRDPDGGPVTLRNARALCRSELDGRESADVEYCCRLLVRGLGGGMHVVAVRVEMIARLTLAVPDRCVAGAGQGGMRHNRQCTPSFGSSIWNCAGRVESRASKRRFLRVRPRRTARRPAIALWPLEGSSSRHVRQAVEATSVPSGPSAYQSFRSVRSRSPGAYNEASPASPEVIPLRGSSYRIRLVIRPFADSPMCGAGPLEAVPGFPDEPQGVTLSKPPVFTWLPPKPGTPLGASGGQALPFEGLTRWGANAGRFGARCGSPGGHPGCAGDTLRPTRGGPLSSLVAYSGRRSQQSSVAVAESKTLP

SEQ ID NO: 750825 - protein, 155 aa, Homo sapiens
AAAEGGAGAAASRALQQCGQLQKLIDISIGSLRGLRTKCAVSNDLTQQEIRTLEVSGSGTRLGSRSGPGHLPPGPSTPGRVASLSPRRPPWRLPLPPALADAAAGGPGTSPHLGQDLWGGCVVGTGMEARGARAGWAARGHPLSPLLRPHPISSL

SEQ ID NO: 750826 - protein, 919 aa, Homo sapiens
MAKLVRYICKQRQCKLSVAPGERTPELNSYPRFSDWLYTFNVRPEVVQEIPRDLTLDALLEMNEAKVKETLRRCGASGDECGRLQYALTCLRKVTGLGGEHKEDSSWSSLDARRESGSGPSTDTLSAASLPWPPGSSQLGRAGNSAQGPRSISVSALPASDSPTPSFSEGLSDTCIPLHASGRLTPRALHSFITPPTTPQLRRHTKLKPPRTPPPPSRKVFQLLPSFPTLTRSKSHESQLGNRIDDVSSMRCACLLPHLETSQGQLTEPSSEARSKLEDQARRGEPHHATGLAWPAPVLMDIDQGDAYIINHCAPLYPVVSELGSHGHELSPAEFLSLPIRPLSLQISRMDPQQMVRRDIGLSVTHRFSTKSWLSQVCHVCQKSMIFGVKCKHCRLKCHNKCTKEAPACRISFLPLTRLRRTESVPSDINNPVDRAAEPHFGTLPKALTKKEHPPAMNHLDSSSNPSSTTSSTPSSPAPFPTSSNPSSATTPPNPSPGQRDSRFNFPAAYFIHHRQQFIFPDISAFAHAAPLPEAADGTRLDDQPKADVLEAHEAEAEEPEAGKSEAEDDEDEVDDLPSSRRPWRGPISRKASQTSVYLQEWDIPFEQVELGEPIGQGRWGRVHRGRWHGEVAIRLLEMDGHNQDHLKLFKKEVMNYRQTRHENVVLFMGACMNPPHLAIITSFCKGRTLHSFVRDPKTSLDINKTRQIAQEIIKGMGYLHAKGIVHKDLKSKNVFYDNGKVVITDFGLFGISGVVREGRRENQLKLSHDWLCYLAPEIVREMTPGKDEDQLPFSKAADVYAFGTVWYELQARDWPLKNQAAEASIWQIGSGEGMKRVLTSVSLGKEVSEILSACWAFDLQERPSFSLLMDMLEKLPKLNRRLSHPGHFWKSADINSSKVVPRFERFGLGVLESSNPKM

SEQ ID NO: 750827 - protein, 565 aa, Homo sapiens
MVRRDIGLSVTHRFSTKSWLSQVCHVCQKSMIFGVKCKHCRLKCHNKCTKEAPACRISFLPLTRLRRTESVPSDINNPVDRAAEPHFGTLPKALTKKEHPPAMNHLDSSSNPSSTTSSTPSSPAPFPTSSNPSSATTPPNPSPGQRDSRFNFPAAYFIHHRQQFIFPDISAFAHAAPLPEAADGTRLDDQPKADVLEAHEAEAEEPEAGKSEAEDDEDEVDDLPSSRRPWRGPISRKASQTSVYLQEWDIPFEQVELGEPIGQGRWGRVHRGRWHGEVAIRLLEMDGHNQDHLKLFKKEVMNYRQTRHENVVLFMGACMNPPHLAIITSFCKGRTLHSFVRDPKTSLDINKTRQIAQEIIKGMGYLHAKGIVHKDLKSKNVFYDNGKVVITDFGLFGISGVVREGRRENQLKLSHDWLCYLAPEIVREMTPGKDEDQLPFSKAADVYAFGTVWYELQARDWPLKNQAAEASIWQIGSGEGMKRVLTSVSLGKEVSEILSACWAFDLQERPSFSLLMDMLEKLPKLNRRLSHPGHFWKSADINSSKVVPRFERFGLGVLESSNPKM

SEQ ID NO: 750828 - protein, 919 aa, Homo sapiens; identical to SEQ ID NO: 750826

SEQ ID NO: 750829 - protein, 880 aa, Homo sapiens
MNEAKVKETLRRCGASGDECGRLQYALTCLRKVTGLGGEHKEDSSWSSLDARRESGSGPSTDTLSAASLPWPPGSSQLGRAGNSAQGPRSISVSALPASDSPTPSFSEGLSDTCIPLHASGRLTPRALHSFITPPTTPQLRRHTKLKPPRTPPPPSRKVFQLLPSFPTLTRSKSHESQLGNRIDDVSSMRCACLLPHLETSQGQLTEPSSEARSKLEDQARRGEPHHATGLAWPAPVLMDIDQGDAYIINHCAPLYPVVSELGSHGHELSPAEFLSLPIRPLSLQISRMDPQQMVRRDIGLSVTHRFSTKSWLSQVCHVCQKSMIFGVKCKHCRLKCHNKCTKEAPACRISFLPLTRLRRTESVPSDINNPVDRAAEPHFGTLPKALTKKEHPPAMNHLDSSSNPSSTTSSTPSSPAPFPTSSNPSSATTPPNPSPGQRDSRFNFPAAYFIHHRQQFIFPVPSAGHCWKCLLIAESLKENAFNISAFAHAAPLPEAADGTRLDDQPKADVLEAHEAEAEEPEAGKSEAEDDEDEVDDLPSSRRPWRGPISRKASQTSVYLQEWDIPFEQVELGEPIGQGRWGRVHRGRWHGEVAIRLLEMDGHNQDHLKLFKKEVMNYRQTRHENVVLFMGACMNPPHLAIITSFCKGRTLHSFVRDPKTSLDINKTRQIAQEIIKGMGYLHAKGIVHKDLKSKNVFYDNGKVVITDFGLFGISGVVREGRRENQLKLSHDWLCYLAPEIVREMTPGKDEDQLPFSKAADVYAFGTVWYELQARDWPLKNQAAEASIWQIGSGEGMKRVLTSVSLGKEVSEILSACWAFDLQERPSFSLLMDMLEKLPKLNRRLSHPGHFWKSADINSSKVVPRFERFGLGVLESSNPKM

SEQ ID NO: 750830 - protein, 397 aa, Homo sapiens
MPLSPVTWLGLQEKEETSRAQICCPSLFFLLSFQAEEPEAGKSEAEDDEDEVDDLPSSRRPWRGPISRKASQTSVYLQEWDIPFEQVELGEPIGQGRWGRVHRGRWHGEVAIRLLEMDGHNQDHLKLFKKEVMNYRQTRHENVVLFMGACMNPPHLAIITSFCKGRTLHSFVRDPKTSLDINKTRQIAQEIIKGMGYLHAKGIVHKDLKSKNVFYDNGKVVITDFGLFGISGVVREGRRENQLKLSHDWLCYLAPEIVREMTPGKDEDQLPFSKAADVYAFGTVWYELQARDWPLKNQAAEASIWQIGSGEGMKRVLTSVSLGKEVSEILSACWAFDLQERPSFSLLMDMLEKLPKLNRRLSHPGHFWKSADINSSKVVPRFERFGLGVLESSNPKM

SEQ ID NO: 750831 - protein, 222 aa, Homo sapiens
FPAGTVDLAQPSQPVDELELSVLERQPEENTPLNGADKVFPSLDEEVPPAEANKESPWSSCNKNVVGRCKLWMIITSIFLGVITVIIIGLCLAAVTYVDEDENEILELSSNKTFFIMLKIPEECVAEEELPHLLTERLTDVYSTSPSLSRYFTSVEIVDFSGENATVTYDLQFGVPSDDENFMKYMMSEELVLGILLQDFRDQNIPGCESLGLDPTSLLLYE

SEQ ID NO: 750832 - protein, 71 aa, Homo sapiens
AGAVASRGAAQTFPAGTVDLAQPSQPVDELELSVLERQPEENTPLNGADKVFPSLDEEVPPAEVRSPWRWP

SEQ ID NO: 750833 - protein, 236 aa, Homo sapiens
MVVREASAAQASLSQVLPQLRYLHIFLEQVHTHFQEQSVGERGAAIQLAEGLARQLCTDCQLNKLFYREEFVLATLLDPCFKGKIEAILPWGPTDIDHWKQVLVYKVKEIRVSEYSLNSPSPLQSPRGLCVDPTRVAKSSGVEGRSQGEPLQSSSHSGAFLLAQREKGLLESMGLLASERSGGSLSTKSHWASIIVKKYLWENETVGAQDDPLAYWEKKREAWPPSICLTPHRSLL

SEQ ID NO: 750834 - protein, 236 aa, Homo sapiens; identical to SEQ ID NO: 750833

SEQ ID NO: 750835 - protein, 236 aa, Homo sapiens; identical to SEQ ID NO: 750833

SEQ ID NO: 750836 - protein, 355 aa, Homo sapiens
RRRQACGRGGAELGRPWRNSASAAGGAGSGAAGSRATGFLLHRCAHRGRAPCRERGFSVRTLAPSPGKMKDRLAELLDLSKQYDQQFPDGDDEFDSPHEDIVFETDHILESLYRDIRDIQDENQLLVADVKRLGKQNARFLTSMRRLSSIKRDTNSIAKAIKARGEVIHCKLRAMKELSEAAEAQHGPHSAVARISRAQYNALTLTFQRAMHDYNQAEMKQRDNCKIRIQRQLEIMGKEVSGDQIEDMFEQGKWDVFSENLLADVKGARAALNEIESRHRELLRLESRIRDVHELFLQMAVLVEKQADTLNVIELNVQKTVDYTGQAKAQVRKAVQYEEKNPCRTLCCFCCPCLK

SEQ ID NO: 750837 - protein, 355 aa, Homo sapiens; identical to SEQ ID NO: 750836

SEQ ID NO: 750838 - protein, 355 aa, Homo sapiens; identical to SEQ ID NO: 750836

SEQ ID NO: 750839 - protein, 305 aa, Homo sapiens
EFAAASTSVRTLAPSPGKMKDRLAELLDLSKQYDQQFPDGDDEFDSPHEDIVFETDHILESLYRDIRDIQDENQLLVADVKRLGKQNARFLTSMRRLSSIKRDTNSIAKAIKARGEVIHCKLRAMKELSEAAEAQHGPHSAVARISRAQYNALTLTFQRAMHDYNQAEMKQRDNCKIRIQRQLEIMGKEVSGDQIEDMFEQGKWDVFSENLLADVKGARAALNEIESRHRELLRLESRIRDVHELFLQMAVLVEKQADTLNVIELNVQKTVDYTGQAKAQVRKAVQYEEKNPCRTLCCFCCPCLK

SEQ ID NO: 750840 - protein, 262 aa, Homo sapiens
LRPLPLVVVPGLLQLLFCDSKEVVHATEGLDWEDKDAPGTLVGNVVHSRIISPLRLFVKQSPVPKPGPMAYADSMENFWDWLANITEIQEPLARTKRRPIVKTGKFKKMFGWGDFHSNIKTVKLNLLITGKIVDHGNGTFSVYFRHNSTGLGNVSVSLVPPSKVVEFEVSPQSTLETKESKSFNCRIEYEKTDRAKKTALCNFDPSKICYQEQTQSHVSWLCSKPFKVICIYIAFYSVDYKLVQKVCPDYNYHSETPYLSSG

SEQ ID NO: 750841 - protein, 139 aa, Homo sapiens
LRPLPLVVVPGLLQLLFCDSKEVVHATEGLDWEDKDAPGTLVGNVVHSRIISPLRLFVKQSPVPKPGPMAYADSMENFWDWLANITEIQEPLARTKRRPIVKTGKFKKMFGWGDFHSNIKTVKLNLLITILMIPPEFEY

SEQ ID NO: 750842 - protein, 654 aa, Homo sapiens
MEEKKSSDKFKETSEVLERKISMRKPREELVKRGVLLEDPEQGGEDPGKPSDAMLKNGHTTPIGNARSSSPVQVEEEPVRLASLRKAIPEEDLKKRLGSTGSQPNSEAESVPENVPKPPLLPPKRPLSSSHEASEGQAKDATSSGGTARFIISTSITTAPAATTAATSLAKTVNLSVTPSPAPRTLPAAPASTNTTATPSLTHMVPAKQPPIPPPKPAHRNSNPVIAELSQAINSGTLLSKPSPPLPPKRGIPSTSVPTLESAAAITTKTPSDEREKSTCSMGSELLPMISPRSPSPPLPTHIPPEPPRTPPFPAKTFQVVPEIEFPPSLDLHQEIPQQEDQKKEVPKRILDQNFGEPHIPSRLPPLPLHIRIQQALTSPLPMTPILEGSHRAHSLLFENSDSFSEDSSTLGRTRSLPITIEMLKVPDDEEEEEQTCPSTFSEEMTPTSVIPKLPQCLREEEEKESDSDSEGPIQYRDEEDEDESYQSALANKVKRKDTLAMKLNHRPSEPELNLNSWPCKSKEEWNEIRHQIGNTLIRRLSQRPTPEELEQRNILQPKNEADRQAEKREIKRRLTRKLSQRPTVAELLARKILRFNEYVEVTDAQDYDRRADKPWTKLTPADKAAIRKELNEFKSSEMEVHEESKHFTRYHRP

SEQ ID NO: 750843 - protein, 654 aa, Homo sapiens; identical to SEQ ID NO: 750842

SEQ ID NO: 750844 - protein, 654 aa, Homo sapiens; identical to SEQ ID NO: 750842

SEQ ID NO: 750845 - protein, 654 aa, Homo sapiens; identical to SEQ ID NO: 750842

SEQ ID NO: 750846 - protein, 161 aa, Homo sapiens
HRTCFPFLHEKSLKPSEPELNLNSWPCKSKEEWNEIRHQIGNTLIRRLSQRPTPEELEQRNILQPKNEADRQAEKREIKRRLTRKLSQRPTVAELLARKILRFNEYVEVTDAQDYDRRADKPWTKLTPADKAAIRKELNEFKSSEMEVHEESKHFTRYHRP

SEQ ID NO: 750847 - protein, 102 aa, Homo sapiens
MKQESSRRGQTAPLSPAELGLQASQRPDTAQAMADALPMQAALTRSSLWLEGRRRSTPTGAAQRSALSSQTPHDPAHASPRQEHPSAEVLYAHSTCSVLFGD

SEQ ID NO: 750848 - protein, 72 aa, Homo sapiens
QTRNHENCTMCWSKSFLIFQISGSVGTRHILRKAWSTGTGAEDLSNRDGAAPSLTMRTKSNETQTTETILSD

SEQ ID NO: 750849 - protein, 608 aa, Homo sapiens
MTASPDYLVVLFGITAGATGAKLGSDEKELILLFWKVVDLANKKVGQLHEVLVRPDQLELTEDCKEETKIDVESLSSASQLDQALRQFNQSVSNELNIGVGTSFCLCTDGQLHVRQILHPEASKKNVLLPECFYSFFDLRKEFKKCCPGSPDIDKLDVATMTEYLNFEKSSSVSRYGASQVEDMGNIILAMISEPYNHRFSDPERVNYKFESGTCSKMELIDDNTVVRARGLPWQSSDQDIARFFKGLNIAKGGAALCLNAQGRRNGEALVRFVSEEHRDLALQRHKHHMGTRYIEVYKATGEDFLKIAGGTSNEVAQFLSKENQVIVRMRGLPFTATAEEVVAFFGQHCPITGGKEGILFVTYPDGRPTGDAFVLFACEEYAQNALRKHKDLLGKRYIELFRSTAAEVQQVLNRFSSAPLIPLPTPPIIPVLPQQFVPPTNVRDCIRLRGLPYAATIEDILDFLGEFATDIRTHGVHMVLNHQGRPSGDAFIQMKSADRAFMAAQKCHKKNMKDRYVEVFQCSAEEMNFVLMGGTLNRNGLSPPPCKLPCLSPPSYTFPAPAAVIPTEAAIYQPSVILNPRALQPSTAYYPAGTQLFMNYTAYYPSV

SEQ ID NO: 750850 - protein, 681 aa, Homo sapiens
MTASPDYLVVLFGITAGATGAKLGSDEKELILLFWKVVDLANKKVGQLHEVLVRPDQLELTEDCKEETKIDVESLSSASQLDQALRQFNQSVSNELNIGVGTSFCLCTDGQLHVRQILHPEASKKNVLLPECFYSFFDLRKEFKKCCPGSPDIDKLDVATMTEYLNFEKSSSVSRYGASQVEDMGNIILAMISEPYNHRFSDPERVNYKFESGTCSKMELIDDNTVVRARGLPWQSSDQDIARFFKGLNIAKGGAALCLNAQGRRNGEALVRFVSEEHRDLALQRHKHHMGTRYIEVYKATGEDFLKIAGGTSNEVAQFLSKENQVIVRMRGLPFTATAEEVVAFFGQHCPITGGKEGILFVTYPDGRPTGDAFVLFACEEYAQNALRKHKDLLGKRYIELFRSTAAEVQQVLNRFSSAPLIPLPTPPIIPVLPQQFVPPTNVRDCIRLRGLPYAATIEDILDFLGEFATDIRTHGVHMVLNHQGRPSGDAFIQMKSADRAFMAAQKCHKKNMKDRYVEVFQCSAEEMNFVLMGGTLNRNGLSPPPCKLPCLSPPSYTFPAPAAVIPTEAAIYQPSVILNPRALQPSTAYYPAGTQLFMNYTAYYPSPPGSPNSLGYFPTAANLSGVPPQPGTVVRMQGLAYNTGVKEILNFFQGYQYATEDGLIHTNDQARTLPKEWVCI

SEQ ID NO: 750851 - protein, 663 aa, Homo sapiens
MTASPDYLVVLFGITAGATGAKLGSDEKELILLFWKVVDLANKKVGQLHEVLVRPDQLELTEDCKEETKIDVESLSSASQLDQALRQFNQSVSNELNIGVGTSFCLCTDGQLHVRQILHPEASKKNVLLPECFYSFFDLRKEFKKCCPGSPDIDKLDVATMTEYLNFEKSSSVSRYGASQVEDMGNIILAMISEPYNHRFSDPERVNYKFESGTCSKMELIDDNTVVRARGLPWQSSDQDIARFFKGLNIAKGGAALCLNAQGRRNGEALVRFVSEEHRDLALQRHKHHMGTRYIEVYKATGEDFLKIAGGTSNEVAQFLSKENQVIVRMRGLPFTATAEEVVAFFGQHCPITGGKEGILFVTYPDGRPTGDAFVLFACEEYAQNALRKHKDLLGKRYIELFRSTAAEVQQVLNRFSSAPLIPLPTPPIIPVLPQQFVPPTNVRDCIRLRGLPYAATIEDILDFLGEFATDIRTHGVHMVLNHQGRPSGDAFIQMKSADRAFMAAQKCHKKNMKDRYVEVFQCSAEEMNFVLMGGTLNRNGLSPPPCKLPCLSPPSYTFPAPAAVIPTEAAIYQPSVILNPRALQPSTAYYPAGTQLFMNYTAYYPSPPGSPNSLGYFPTAANLSGVPPQPGTVVRMQGLAYNTGVKEILNFFQGYQCLKDVW

SEQ ID NO: 750852 - protein, 663 aa, Homo sapiens; identical to SEQ ID NO: 750851

SEQ ID NO: 750853 - protein, 681 aa, Homo sapiens; identical to SEQ ID NO: 750850

SEQ ID NO: 750854 - protein, 663 aa, Homo sapiens; identical to SEQ ID NO: 750851

SEQ ID NO: 750855 - protein, 681 aa, Homo sapiens; identical to SEQ ID NO: 750850

SEQ ID NO: 750856 - protein, 568 aa, Homo sapiens
MTASPDYLVVLFGITAGATGAKLGSDEKELILLFWKVVDLANKKVGQLHEVLVRPDQLELTEDCKEETKIDVESLSSASQLDQALRQFNQSVSNELNIGVGTSFCLCTDGQLHVRQILHPEASKKNVLLPECFYSFFDLRKEFKKCCPGSPDIDKLDVATMTEYLNFEKSSSVSRYGASQVEDMGNIILAMISEPYNHRFSDPERVNYKFESGTCSKMELIDDNTVVRARGLPWQSSDQDIARFFKGLNIAKGGAALCLNAQGRRNGEALVRFVSEEHRDLALQRHKHHMGTRYIEVYKATGEDFLKIAGGTSNEVAQFLSKENQVIVRMRGLPFTATAEEVVAFFGQHCPITGGKEGILFVTYPDGRPTGDAFVLFACEEYAQNALRKHKDLLGKRYIELFRSTAAEVQQVLNRFSSAPLIPLPTPPIIPVLPQQFVPPTNVRDCIRLRGLPYAATIEDILDFLGEFATDIRTHGVHMVLNHQGRPSGDAFIQMKSADRAFMAAQKCHKKNMKDRYVEVFQCSAEEMNFVLMGGTLNRNGLSPPPCKLPCKFFLGLGAILRYMLVGA

SEQ ID NO: 750857 - protein, 423 aa, Homo sapiens
MTASPDYLVVLFGITAGATGAKLGSDEKELILLFWKVVDLANKKVGQLHEVLVRPDQLELTEDCKEETKIDVESLSSASQLDQALRQFNQSVSNELNIGVGTSFCLCTDGQLHVRQILHPEASKKNVLLPECFYSFFDLRKEFKKCCPGSPDIDKLDVATMTEYLNFEKSSSVSRYGASQVEDMGNIILAMISEPYNHRFSDPERVNYKFESGTCSKMELIDDNTVVRARGLPWQSSDQDIARFFKGLNIAKGGAALCLNAQGRRNGEALVRFVSEEHRDLALQRHKHHMGTRYIEVYKATGEDFLKIAGGTSNEVAQFLSKENQVIVRMRGLPFTATAEEVVAFFGQHCPITGGKEGILFVTYPDGRPTGDAFVLFACEEYAQNALRKHKDLLGKRYIELFRSTAAEVQQVGFKNKYVVPLH

SEQ ID NO: 750858 - protein, 627 aa, Homo sapiens
MTASPDYLVVLFGITAGATGAKLGSDEKELILLFWKVVDLANKKVGQLHEVLVRPDQLELTEDCKEETKIDVESLSSASQLDQALRQFNQSVSNELNIGVGTSFCLCTDGQLHVRQILHPEASKKNVLLPECFYSFFDLRKEFKKCCPGSPDIDKLDVATMTECILKIITQESFEKIVPEKSLPLFTQAGVKWRDLGSLQPSPPGFKRFSCLSRPDHRFSDPERVNYKFESGTCSKMELIDDNTVVRARGLPWQSSDQDIARFFKGLNIAKGGAALCLNAQGRRNGEALVRFVSEEHRDLALQRHKHHMGTRYIEVYKATGEDFLKIAGGTSNEVAQFLSKENQVIVRMRGLPFTATAEEVVAFFGQHCPITGGKEGILFVTYPDGRPTGDAFVLFACEEYAQNALRKHKDLLGKRYIELFRSTAAEVQQVLNRFSSAPLIPLPTPPIIPVLPQQFVPPTNVRDCIRLRGLPYAATIEDILDFLGEFATDIRTHGVHMVLNHQGRPSGDAFIQMKSADRAFMAAQKCHKKNMKDRYVEVFQCSAEEMNFVLMGGTLNRNGLSPPPCKLPCLSPPSYTFPAPAAVIPTEAAIYQPSVILNPRALQPSTAYYPAGTQLFMNYTAYYPSV

SEQ ID NO: 750859 - protein, 636 aa, Homo sapiens
MTASPDYLVVLFGITAGATGAKLGSDEKELILLFWKVVDLANKKVGQLHEVLVRPDQLELTEDCKEETKIDVESLSSASQLDQALRQFNQSVSNELNIGVGTSFCLCTDGQLHVRQILHPEASKKNVLLPECFYSFFDLRKEFKKCCPGSPDIDKLDVATMTEYLNFEKSSSVSRYGASQVEDMGNIILAMISEPYNHRFSDPERVNYKFESGTCSKMELIDDNTVVRARGLPWQSSDQDIARFFKGLNIAKGGAALCLNAQGRRNGEALVRFVSEEHRDLALQRHKHHMGTRYIEVYKATGEDFLKIAGGTSNEVAQFLSKENQVIVRMRGLPFTATAEEVVAFFGQHCPITGGKEGILFVTYPDGRPTGDAFVLFACEEYAQNALRKHKDLLGKRYIELFRSTAAEVQQVLNRFSSAPLIPLPTPPIIPVLPQQFVPPTNVRDCIRLRGLPYAATIEDILDFLGEFATDIRTHGVHMVLNHQGRPSGDAFIQMKSADRAFMAAQKCHKKNMKDRYVEVFQCSAEEMNFVLMGGTLNRNGLSPPPCKLPCLSPPSYTFPAPAAVIPTEAAIYQPSVILNPRALQPSTAYYPAGTQLFMNYTAYYPSMQPRMDLYTQMTRPGLYPKNGFVFKGPSS

SEQ ID NO: 750860 - protein, 636 aa, Homo sapiens; identical to SEQ ID NO: 750859

SEQ ID NO: 750861 - protein, 608 aa, Homo sapiens; identical to SEQ ID NO: 750849

SEQ ID NO: 750862 - protein, 681 aa, Homo sapiens; identical to SEQ ID NO: 750850

SEQ ID NO: 750863 - protein, 607 aa, Homo sapiens
MTASPDYLVVLFGITAGATGAKLGSDEKELILLFWKVVDLANKKVGQLHEVLVRPDQLELTEDCKEETKIDVESLSSASQLDQALRQFNQSVSNELNIGVGTSFCLCTDGQLHVRQILHPEASKKNVLLPECFYSFFDLRKEFKKCCPGSPDIDKLDVATMTEYLNFEKSSSVSRYGASQVEDMGNIILAMISEPYNHRFSDPERVNYKFESGTCSKMELIDDNTVVRARGLPWQSSDQDIARFFKGLNIAKGGAALCLNAQGRRNGEALVRFVSEEHRDLALQRHKHHMGTRYIEVYKATGEDFLKIAGGTSNEVAQFLSKENQVIVRMRGLPFTATAEEVVAFFGQHCPITGGKEGILFVTYPDGRPTGDAFVLFACEEYAQNALRKHKDLLGKRYIELFRSTAAEVQQVLNRFSSAPLIPLPTPPIIPVLPQQFVPPTNVRDCIRLRGLPYAATIEDILDFLGEFATDIRTHGVHMVLNHQGRPSGDAFIQMKSADRAFMAAQKCHKKNMKDRYVEVFQCSAEEMNFVLMGGTLNRNGLSPPPCKLPCLSPPSYTFPAPAAVIPTEAAIYQPSVILNPRALQPSTAYYPAGTQLFMNYTAYYPR

SEQ ID NO: 750864 - protein, 175 aa, Homo sapiens
PLSPSPPIVMTASPDYLVVLFGITAGATGAKLGSDEKELILLFWKVVDLANKKVGQLHEVLVRPDQLELTEDCKEETKIDVESLSSASQLDQALRQFNQSVSNELNIGVGTSFCLCTDGQLHVRQILHPEASKKNVLLPECFYSFFDLRKEFKKCCPGSPDIDKLDVATMTECIL

SEQ ID NO: 750865 - protein, 180 aa, Homo sapiens
MESWWGLPCLAFLCFLMHARGQRDFDLADALDDPEPTKKPNSDIYPKPKPPYYPQPENPDSGGNIYPRPKPRPQPQPGNSGNSGGYFNDVDRDDGRYPPRPRPRPPAGGGGGGYSSYGNSDNTHGGDHHSTYGNPEGNMVAKIVSPIVSVVVVTLLGAAASYFKLNNRRNCFRTHEPENV

SEQ ID NO: 750866 - protein, 138 aa, Homo sapiens
MESWWGLPCLAFLCFLMHARGQRDFDLADALDDPEPTKKPNSDIYPKPKPPYYPQPENPDSGGNIYPRPKPRPQPQPGNSGNSGGYFNDVDRDDGRYPPRPRPRPPAGGGGGGYSSYGNSDNTHGGDHHSTYGNPEGN

SEQ ID NO: 750867 - protein, 179 aa, Homo sapiens [sequence omitted]

SEQ ID NO: 750868 - protein, 521 aa, Homo sapiens
SPGCLELSCGKARLLFDRPRGVRVRVAEGALRGPRRGCSGCCRRRGSNITYLSLSLLTLLCQGCRVGGGGQSAVGVSFPYWRGSWGREGEKKGVFAHSCFALELGSLLPKDALSGALLPTSHVFVCPLTFRLRTFSLEPSGGDGGSLAENSAGVASPGSPRSGETPRLERDPERAAAATGARRGSSQGLVERRAPSSMNCMKGPLHLEHRAAGTKLSAVSSSSCHHPQPLAMASVLAPGQPRSLDSSKHRLEVHTISDTSSPEAAEKDKSQQGKNEDVGAEDPSKKKRQRRQRTHFTSQQLQELEATFQRNRYPDMSTREEIAVWTNLTEARVRVWFKNRRAKWRKRERNQQAELCKNGFGPQFNGLMQPYDDMYPGYSYNNWAAKGLTSASLSTKSFPFFNSMNVNPLSSQSMFSPPNSISSMSMSSSMVPSAVTGVPGSSLNSLNNLNNLSSPSLNSAVPTPACPYAPPTPPYVYRDTCNSSLASLRLKAKQHSSFGYASVQNPASNLSACQYAVDRPV

SEQ ID NO: 750869 - protein, 395 aa, Homo sapiens
  misc_feature (31)..(31): Xaa can be any naturally occurring amino acid
  misc_feature (110)..(110): Xaa can be any naturally occurring amino acid
  misc_feature (130)..(131): Xaa can be any naturally occurring amino acid
  misc_feature (139)..(139): Xaa can be any naturally occurring amino acid
PPGAEQSPSRKAGKGPAAAPKRTTAKQEGRXRKGEGDEPPGDRGPAASRGGTPRAGRGTAARKKSDRGGRGAGRRERGRETNGRKRGAAGGQGGGQPAAGEGRGAKDAEXKKGEGTDAPESRKEAASSKXXPRQQPGAXEKDKSQQGKNEDVGAEDPSKKKRQRRQRTHFTSQQLQELEATFQRNRYPDMSTREEIAVWTNLTEARVRVWFKNRRAKWRKRERNQQAELCKNGFGPQFNGLMQPYDDMYPGYSYNNWAAKGLTSASLSTKSFPFFNSMNVNPLSSQSMFSPPNSISSMSMSSSMVPSAVTGVPGSSLNSLNNLNNLSSPSLNSAVPTPACPYAPPTPPYVYRDTCNSSLASLRLKAKQHSSFGYASVQNPASNLSACQYAVDRPV

SEQ ID NO: 750870 - protein, 395 aa, Homo sapiens; identical to SEQ ID NO: 750869
  misc_feature (31)..(31): Xaa can be any naturally occurring amino acid
  misc_feature (110)..(110): Xaa can be any naturally occurring amino acid
  misc_feature (130)..(131): Xaa can be any naturally occurring amino acid
  misc_feature (139)..(139): Xaa can be any naturally occurring amino acid

SEQ ID NO: 750871 - protein, 643 aa, Homo sapiens
GKAEAISAERVSRAAARRGGAGGPQAGGCRAQGADLLERGPGHEAESRRAARLVEAPGQAADSLRLREPQQDRPGGAMEGSPIPVLTVPTAPYEDQRQAAAGVCGTHRLFEGQRKYLPNFIQSVLSSIDLRERQGCTMVVGSDGRYFSRTAIEIVVQMAAANGIGRLIIGQNGILSTPAVSCIIRKIKAAGGIILTASHCPGGPGGEFGVKFNVANGGPAPDVVSDKIYQISKTIEEYAICPDLRIDLSRLGRQEFDLENKFKPFRVEIVDPVDIYLNLLRTIFDFHAIKGLLTGPSQLKIRIDAMHGVMGPYVRKVLCDELGAPANSAINCVPLEDFGGQHPDPNLTYATTLLEAMKGGEYGFGAAFDADGDRYMILGQNGFFVSPSDSLAIIAANLSCIPYFRQMGVRGFGRSMPTSMALDRVAKSMKVPVYETPAGWRFFSNLMDSGRCNLCGEESFGTGSDHLREKDGLWAVLVWLSIIAARKQSVEEIVRDHWAKFGRHYYCRFDYEGLDPKTTYYIMRDLEALVTDKSFIGQQFAVGSHVYSVAKTDSFEYVDPVDGTVTKKQGLRIIFSDASRLIFRLSSSSGVRATLRLYAESYERDPSGHDQEPQAVLSPLIAIALKISQIHERTGRRGPTVIT

SEQ ID NO: 750872 - protein, 643 aa, Homo sapiens; identical to SEQ ID NO: 750871

SEQ ID NO: 750873 - protein, 643 aa, Homo sapiens; identical to SEQ ID NO: 750871

SEQ ID NO: 750874 - protein, 56 aa, Homo sapiens
MQLSLLCTPVQGTRLLPVGSAWSLCHPHLGLGFFPATVGVRTHLHFLQHLKELRRL

SEQ ID NO: 750875 - protein, 49 aa, Homo sapiens
MSVISCISYSVKETKLNEKYIFKKVAILNYGREIKISKTYLQSGSGGRS

SEQ ID NO: 750876 - protein, 71 aa, Homo sapiens
VGVPSGTGTTAKEAGLRGSSTPAPPFRQGVLRMNVFPSLPLGYPSAEILLLLCTVFSIPQADISIKQILEF

SEQ ID NO: 750877 - protein, 36 aa, Homo sapiens
MPPPQGDVTALFLGPPGLGKSALIAALCDKDVETLE

SEQ ID NO: 750878 - protein, 650 aa, Homo sapiens
GGGRGPLVALGTLYLWALESRHKSATELWRWWLRRRRRQRRRQLWGLRLGVCRPPLLLGPGMYRWLVRILGTIFRFCDRSVPPARALLKRRRSDSTLFSTVDTDEIPAKRPRLDCFIHQVKNSLYNAASLFGFPFQLTTKPMVTSACNGTRNVAPSGEVFSNSSSCELTGSGSWNNMLKLGNKSPNGISDYPKIRVTVTRDQPRRVLPSFGFTLNSEGCNRRPGGRRHSKGNPESSLMWKPQEQAVTEMISEESGKGLRRPHCTVEEGVQKEEREKYRKLLERLKESGHGNSVCPVTSNYHSSQRSQMDTLKTKGWGEEQNHGVKTTQFVPKQYRLVETRGPLCSLRSEKRCSKGKITDTEKMVGIRFENESRRGYQLEPDLSEEVSARLRLGSGSNGLLRRKVSIIETKEKNCSGKERDRRTDDLLELTEDMEKEISNALGHGPQDEILSSAFKLRITRGDIQTLKNYHWLNDEVINFYMNLLVERNKKQGYPALHVFSTFFYPKLKSGGYQAVKRWTKGVNLFEQEIILVPIHRKVHWSLVVIDLRKKCLKYLDSMGQKGHRICEILLQYLQDESKTKRNSDLNLLEWTHHSMKPHEIPQQLNGSDCGMFTCKYADYISRDKPITFTQHQMPLFRKKMVWEILHQQLL

SEQ ID NO: 750879 - protein, 260 aa, Homo sapiens
GFGGPGYPRPTEAPLLLGPGMYRWLVRILGTIFRFCDRSVPPARALLKRRRSDSTLFSTVDTDEIPAKRPRLDGFIHQVKNSLYKAASLFGFPFQLTTKPMVTSACNGTRNVAPSGEVFSNSSSCELTGSGSWNNMLKLGNKSPNGISDYPKIRVTVTRDQPRRVLPSFGFTLNSEGCNRRPGGRRHSKGNPESSLMWKPQEQAVTEMISEESGKGLRRPHCTVEEVSLFSLISLKKILQLFPRMLPRDTQNGSTFDIPL

SEQ ID NO: 750880 - protein, 241 aa, Homo sapiens
ASLAVVVKTAKAAAAATALGFASRGVSAAAAAWACTLFSTVDTDEIPAKRPRLDGFIHQVKNSLYKAASLFGFPFQLTTKPMVTSACNGTRNVAPSGEVFSNSSSCELTGSGSWNNMLKLGNKSPNGISDYPKIRVTVTRDQPRRVLPSFGFTLNSEGCNRRPGGRRHSKGNPESSLMWKPQEQAVTEMISEESGKGLRRPHCTVEEVSLFSLISLKKILQLFPRMLPRDTQNGSTFDIPL

SEQ ID NO: 750881 - protein, 650 aa, Homo sapiens; identical to SEQ ID NO: 750878

SEQ ID NO: 750882 - protein, 650 aa, Homo sapiens; identical to SEQ ID NO: 750878

SEQ ID NO: 750883 - protein, 650 aa, Homo sapiens; identical to SEQ ID NO: 750878

SEQ ID NO: 750884 - protein, 650 aa, Homo sapiens; identical to SEQ ID NO: 750878

SEQ ID NO: 750885 - protein, 253 aa, Homo sapiens
GKITDTETMVGIRFENESRRGYQLEPDLSEEVSARLRLGSGSNGLLRRKVSIIETKEKNCSGKERDRRTDDLLELTEVFINFYMNLLVERNKKQGYPALHVFSTFFYPKLKSGGYQAVKRWTKGVNLFEQEIILVPIHRKVHWSLVVIDLRKKCLKYLDSMGQKGHRICEILLQYLQDESKTKRNSDLNLLEWTHHSMKPHEIPQQLNGSDCGMFTCKYADYISRDKPITFTQHQMPLFRKKMVWEILHQQLL

SEQ ID NO: 750886 - protein, 184 aa, Homo sapiens
GKITDTETMVGIRFENESRRGYQLEPDLSEEVSARLRLGSGSNGLLRRKVSIIETKEKNCSGKERDRRTDDLLELTEVIDLRKKCLKYLDSMGQKGHRICEILLQYLQDESKTKRNSDLNLLEWTHHSMKPHEIPQQLNGSDCGMFTCKYADYISRDKPITFTQHQMPLFRKKMVWEILHQQLL

SEQ ID NO: 750887 - protein, 111 aa, Homo sapiens [sequence omitted]

SEQ ID NO: 750888 - protein, 652 aa, Homo sapiens
GGGRGPLVALGTLYLWALESRHKSATELWRWWLRRRRRQRRRQLWGLRLGVCRPPLLLGPGMYRWLVRILGTIFRFCDRSVPPARALLKRRRSDSTLFSTVDTDEIPAKRPRLDCFIHQVKNSLYNAASLFGFPFQLTTKPMVTSACNGTRNVAPSGEVFSNSSSCELTGSGSWNNMLKLGNKSPNGISDYPKIRVTVTRDQPRRVLPSFGFTLNSEGCNRRPGGRRHSKGNPESSLMWKPQEQAVTEMISEESGKGLRRPHCTVEEGVQKEEREKYRKLLERLKESGHGNSVCPVTSNYHSSQRSQMDTLKTKGWGEEQNHGVKTTQFVPKQYRLVETRGPLCSLRSEKRCSKGKITDTEKMVGIRFENESRRGYQLEPDLSEEVSARLRLGSGSNGLLRRKVSIIETKEKNCSGKERDRRTDDLLELTEDMEKEISNALGHGPQDEILSSAFKLRITRGDIQTLKNYHWLNDEVINFYMNLLVERNKKQGYPALHVFSTFFYPKLKSGGYQAVKRWTKGVNLFEQEIILVPIHRKVHWSLVVIDLRKKCLKYLDSMGQKGHRICEILLQYLQDESKTKRNSDLNLLEWTHHSMKPHEIPQQLNGSDCGMFTCKYADYISRDKPITFTQHQMPLFRKKIARVIPSNHDRPW

SEQ ID NO: 750889 - protein, 642 aa, Homo sapiens
GGGRGPLVALGTLYLWALESRHKSATELWRWWLRRRRRQRRRQLWGLRLGVCRPPLLLGPGMYRWLVRILGTIFRFCDRSVPPARALLKRRRSDSTLFSTVDTDEIPAKRPRLDCFIHQVKNSLYNAASLFGFPFQLTTKPMVTSACNGTRNVAPSGEVFSNSSSCELTGSGSWNNMLKLGNKSPNGISDYPKIRVTVTRDQPRRVLPSFGFTLNSEGCNRRPGGRRHSKGNPESSLMWKPQEQAVTEMISEESGKGLRRPHCTVEEGVQKEEREKYRKLLERLKESGHGNSVCPVTSNYHSSQRSQMDTLKTKGWGEEQNHGVKTTQFVPKQYRLVETRGPLCSLRSEKRCSKGKITDTEKMVGIRFENESRRGYQLEPDLSEEVSARLRLGSGSNGLLRRKVSIIETKEKNCSGKERDRRTDDLLELTEDMEKEISNALGHGPQDEILSSAFKLRITRGDIQTLKNYHWLNDEVINFYMNLLVERNKKQGYPALHVFSTFFYPKLKSGGYQAVKRWTKGVNLFEQEIILVPIHRKVHWSLVVIDLRKKCLKYLDSMGQKGHRICEILLQYLQDESKTKRNSDLNLLEWTHHSMKPHEIPQQLNGSDCGMFTCKYADYISRDKPITFTQVSEDPLHPFTCY

SEQ ID NO: 750890 - protein, 550 aa, Homo sapiens
GGGRGPLVALGTLYLWALESRHKSATELWRWWLRRRRRQRRRQLWGLRLGVCRPPLLLGPGMYRWLVRILGTIFRFCDRSVPPARALLKRRRSDSTLFSTVDTDEIPAKRPRLDCFIHQVKNSLYNAASLFGFPFQLTTKPMVTSACNGTRNVAPSGEVFSNSSSCELTGSGSWNNMLKLGNKSPNGISDYPKIRVTVTRDQPRRVLPSFGFTLNSEGCNRRPGGRRHSKGNPESSLMWKPQEQAVTEMISEESGKGLRRPHCTVEEGVQKEEREKYRKLLERLKESGHGNSVCPVTSNYHSSQRSQMDTLKTKGWGEEQNHGVKTTQFVPKQYRLVETRGPLCSLRSEKRCSKGKITDTEKMVGIRFENESRRGYQLEPDLSEEVSARLRLGSGSNGLLRRKVSIIETKEKNCSGKERDRRTDDLLELTEDMEKEISNALGHGPQDEILSSAFKLRITRGDIQTLKNYHWLNDEVINFYMNLLVERNKKQGYPALHVFSTFFYPKLKSGGYQAVKRWTKGVNLFEQEIILVPIHRKVHWSLVVIERVNG

SEQ ID NO: 750891 - protein, 35 aa, Homo sapiens
MALASAVTLLLKADWLNLTSWLACHPALENMFVQG

SEQ ID NO: 750892 - protein, 207 aa, Homo sapiens
MVPHDVGLTILKGAVLFGQAPGVVRVRRSPLTYGVGVLNRFVPGRHPPEKLLVRDGRRWCTDVFERFVAAEQSVALGEEVRRSYCPARPGQRRVLINLYCCAAEDARFITDPGVRKCGALSLELEPADCGQDTAGAPPGRREIRAAMQFGDTEIKVTAVDVSTNRSVRASIDFLSTEGAPARCQRRLPGPALFRFRGLRSGLGRGKR

SEQ ID NO: 750893 - protein, 207 aa, Homo sapiens; identical to SEQ ID NO: 750892

SEQ ID NO: 750894 - protein, 370 aa, Homo sapiens
GGPYGAVGVDLAFEQLLCRIFGEDFIATFKRQRPAAWVDLTIAFEARKRTAGPHRAGALNISLPFSFIDFYRKQRGHNVETALRRSSVNFVKWSSQGMLRMSCEAMNELFQPTVSGIIQHIEALLARPEVQGVKLLFLVGGFAESAVLQHAVQAALGARGLRVVVPHDVGLTILKGAVLFGQAPGVVRVRRSPLTYGVGVLNRFVPGRHPPEKLLVRDGRRWCTDVFERFVAAEQSVALGEEVRRSYCPARPGQRRVLINLYCCAAEDARFITDPGVRKCGALSLELEPADCGQDTAGAPPGRREIRAAMQFGDTEIKVTAVDVSTNRSVRASIDFLSTEGAPARCQRRLPGPALFRFRGLRSGLGRGKR

SEQ ID NO: 750895 - protein, 207 aa, Homo sapiens; identical to SEQ ID NO: 750892

SEQ ID NO: 750896 - protein, 120 aa, Homo sapiens
MTDFVRLAVLPTVPESPEEEVKASQLSVQQNKLSVQSNPSPQLRSVMKVESSENVPSPTHPPVVINAADDDEDDDDQFSEEGDETKTPTLQPTPEVHNGLRVTSVQKPAVNMKKDECLNF

SEQ ID NO: 750897 - protein, 86 aa, Homo sapiens
KKSSTHRFAYNLMDFTDILKRMDKNPKIQEKPSTWSAAQESLPVVQAMLSYSSHAGSCSLEKCYLQMCTSCVCVCCSACVQNTCFF

SEQ ID NO: 750898 - protein, 165 aa, Homo sapiens
SLLPPGMGCNECTHPSCQHSLSMLGIGQCVECESGVLVLDPTSGPKWKVACNKCNVVAHCFENAHRVRVSADTCSVCEAALLDVDFNKAKSPLPGDDEQHMGCVFCDPVFQELVELKHAASCHPMHRGGPGRRQGRGRGRARRPPGKPNPRRPKDKMSALAAYFV

SEQ ID NO: 750899 - protein, 292 aa, Homo sapiens
HKATGVFISTARWCWERLPSLALKASSLDLATAALTVMLDSVTHSTFLPNASFCDPLMSWTDLFSNEEYYPAFEHQTACDSYWTSVHPEYWTKRHVWEWLQFCCDQYKLDTNCISFCNFNISGLQLCSMTQEEFVEAAGLCGEYLYFILQNIRTQGYSFFNDAEESKATIKDYADSNCLKTSGIKSQDCHSHSRTSLQSSHLWEFVRDLLLSPEENCGILEWEDREQGIFRVVKSEALAKMWGQRKKNDRMTYEKLSRALRYYYKTGILERVDRRLVYKFGKNAHGWQEDKL

SEQ ID NO: 750900 - protein, 265 aa, Homo sapiens
MPSLPHSHRVMLDSVTHSTFLPNASFCDPLMSWTDLFSNEEYYPAFEHQTACDSYWTSVHPEYWTKRHVWEWLQFCCDQYKLDTNCISFCNFNISGLQLCSMTQEEFVEAAGLCGEYLYFILQNIRTQGYSFFNDAEESKATIKDYADSNCLKTSGIKSQDCHSHSRTSLQSSHLWEFVRDLLLSPEENCGILEWEDREQGIFRVVKSEALAKMWGQRKKNDRMTYEKLSRALRYYYKTGILERVDRRLVYKFGKNAHGWQEDKL

SEQ ID NO: 750901 - protein, 1113 aa, Homo sapiens
MNCLDCLDRTNTVQSFIALEVLHLQLKTLGLSSKPIVDRFVESFKAMWSLNGHSLSKVFTGSRALEGKAKVGKLKDGARSMSRTIQSNFFDGVKQEAIKLLLVGDVYGEEVADKGGMLLDSTALLVTPRILKAMTERQSEFTNFKRIRIAMGTWNVNGGKQFRSNVLRTAELTDWLLDSPQLSGATDSQDDSSPADIFAVGFEEMVELSAGNIVNASTTNKKMWGEQLQKAISRSHRYILLTSAQLVGVCLYIFVRPYHVPFIRDVAIDTVKTGMGGKAGNKGAVGIRFQFHSTSFCFICSHLTAGQSQVKERNEDYKEITQKLCFPMGRNVFSHDYVFWCGDFNYRIDLTYEEVFYFVKRQDWKKLLEFDQLQLQKSSGKIFKDFHEGAINFGPTYKYDVGSAAYDTSDKCRTPAWTDRVLWWRKKHPFDKTAGELNLLDSDLDVDTKVRHTWSPGALQYYGRAELQASDHRPVLAIVEVEVQEVDVGARERVFQEVSSFQGPLDATVVVNLQSPTLEEKNEFPEDLRTELMQTLGSYGTIVLVRINQGQMLVTFADSHSALSVLDVDGMKVKGRAVKIRPKTKDWLKGLREEIIRKRDSMAPVSPTANSCLLEENFDFTSLDYESEGDILEDDEDYLVDEFNQPGVSDSELGGDDLSDVPGPTALAPPSKSPALTKKKQHPTYKDDADLVELKRELEAVGEFRHRSPSRSLSVPNRPRPPQPPQRPPPPTGLMVKKSASDASISSGTHGQYSILQTARLLPGAPQQPPKARTGISKPYNVKQIKTTNAQEAEAAIRCLLEARGGASEEALSAVAPRDLEASSEPEPTPGAAKPETPQAPPLLPRRPPPRVPAIKKPTLRRTGKPLSPEEQFEQQTVHFTIGPPETSVEAPPVVTAPRVPPVPKPRTFQPGKAAERPSHRKPASDEAPPGAGASVPPPLEAPPLVPKVPPRRKKSAPAAFHLQVLQSNSQLLQGLTYNSSDSPSGHPPAAGTVFPQGDFLSTSSATSPDSDGTKAMKPEAAPLLGDYQDPFWNLLHHPKLLNNTWLSKSSDPLDSGTRSPKRDPIDPVSAGASAAKAELPPDHEHKTLGHWVTISDQEKRTALQVFDPLAKT

SEQ ID NO: 750902 - protein, 188 aa, Homo sapiens
GRAGSCRGQRALGRTWPRPPPAVGPTLMALSKGLRLLGRLGAEGDCSVLLEARGRDDCLLFEAGTVATLAPEEKEVIKGQYGKLTDAYGCLGELRLKSGGTSLSFLVLVTGCTSVGRIPDAEIYKITATDFYPLQEEAKEEERLIALKKILSSGVFYFSWPNDGSRFDLTVRTQKQGDDSSEWGNSFF

SEQ ID NO: 750903 - protein, 113 aa, Homo sapiens [sequence omitted]

SEQ ID NO: 750904 - protein, 147 aa, Homo sapiens
TPLTACGLGSRQVGKLKDGARSMSRTIQSNFFDGVKQEAIKLLLVGDVYGEEVADKGGMLLDSTALLVTPRILKAMTERQSEFTNFKRIRIAMGTWNVNGGKQFRSNVLRTAELTDWLLDSPQLSGATDSQGEGSDFGGDKIQLHLT

SEQ ID NO: 750905 - protein, 227 aa, Homo sapiens
LLIYTLCPTFSQPLSPEEQFEQQTVHFTIGPPETSVEAPPVVTAPRVPPVPKPRTFQPGKAAERPSHRKPASDEAPPGAGASVPPPLEAPPLVPKVPPRRKKSAPAAFHLQVLQSNSQLLQGLTYNSSDSPSGHPPAAGTVFPQGDFLSTSSATSPDSDGTKAMKPEAAPLLGDYQDPFWNLLHHPKLLNNTWLSKSSDPLDSGTRSPEILGPSVVALYLPLATDLA

SEQ ID NO: 750906 - protein, 119 aa, Homo sapiens
GRAGSCRGQRALGRTWPRPPPAVGPTLMALSKGLRLLGRLGAEGDCSVLLEARGRDDCLLFEAGTVATLGESGPGAATPGGEGARIRPASGRRVPPLPEGIGRRWDCRGVGVARRGVAV

SEQ ID NO: 750907 - protein, 1523 aa, Homo sapiens
GRAGSCRGQRALGRTWPRPPPAVGPTLMALSKGLRLLGRLGAEGDCSVLLEARGRDDCLLFEAGTVATLAPEEKEVIKGQYGKLTDAYGCLGELRLKSGGTSLSFLVLVTGCTSVGRIPDAEIYKITATDFYPLQEEAKEEERLIALKKILSSGVFYFSWPNDGSRFDLTVRTQKQGDDSSEWGNSFFWNQLLHVPLRQHQVSCCDWLLKIICGVVTIRTVYASHKQAKACLVSRVSCERTGTRFHTRGVNDDGHVSNFVETEQMIYMDDGVSSFVQIRGSVPLFWEQPGLQVGSHHLRLHRGLEANAPAFDRHMVLLKEQYGQQVVVNLLGSRGGEEVLNRAFKKLLWASCHAGDTPMINFDFHQFAKGGKLEKLETLLRPQLKLHWEDFDVFTKGENVSPRFQKGTLRMNCLDCLDRTNTVQSFIALEVLHLQLKTLGLSSKPIVDRFVESFKAMWSLNGHSLSKVFTGSRALEGKAKVGKLKDGARSMSRTIQSNFFDGVKQEAIKLLLVGDVYGEEVADKGGMLLDSTALLVTPRILKAMTERQSEFTNFKRIRIAMGTWNVNGGKQFRSNVLRTAELTDWLLDSPQLSGATDSQDDSSPADIFAVGFEEMVELSAGNIVNASTTNKKMWGEQLQKAISRSHRYILLTSAQLVGVCLYIFVRPYHVPFIRDVAIDTVKTGMGGKAGNKGAVGIRFQFHSTSFCFICSHLTAGQSQVKERNEDYKEITQKLCFPMGRNVFSHDYVFWCGDFNYRIDLTYEEVFYFVKRQDWKKLLEFDQLQLQKSSGKIFKDFHEGAINFGPTYKYDVGSAAYDTSDKCRTPAWTDRVLWWRKKHPFDKTAGELNLLDSDLDVDTKVRHTWSPGALQYYGRAELQASDHRPVLAIVEVEVQEVDVGARERVFQEVSSFQGPLDATVVVNLQSPTLEEKNEFPEDLRTELMQTLGSYGTIVLVRINQGQMLVTFADSHSALSVLDVDGMKVKGRAVKIRPKTKDWLKGLREEIIRKRDSMAPVSPTANSCLLEENFDFTSLDYESEGDILEDDEDYLVDEFNQPGVSDSELGGDDLSDVPGPTALAPPSKSPALTKKKQHPTYKDDADLVELKRELEAVGEFRHRSPSRSLSVPNRPRPPQPPQRPPPPTGLMVKKSASDASISSGTHGQYSILQTARLLPGAPQQPPKARTGISKPYNVKQIKTTNAQEAEAAIRCLLEARGGASEEALSAVAPRDLEASSEPEPTPGAAKPETPQAPPLLPRRPPPRVPAIKKPTLRRTGKPLSPEEQFEQQTVHFTIGPPETSVEAPPVVTAPRVPPVPKPRTFQPGKAAERPSHRKPASDEAPPGAGASVPPPLEAPPLVPKVPPRRKKSAPAAFHLQVLQSNSQLLQGLTYNSSDSPSGHPPAAGTVFPQGDFLSTSSATSPDSDGTKAMKPEAAPLLGDYQDPFWNLLHHPKLLNNTWLSKSSDPLDSGTRSPKRDPIDPVSAGASAAKAELPPDHEHKTLGHWVTISDQEKRTALQVFDPLAKT

SEQ ID NO: 750908 - protein, 1474 aa, Homo sapiens
MNRNEQETLADAFCDVFLPPAPEEKEVIKGQYGKLTDAYGCLGELRLKSGGTSLSFLVLVTGCTSVGRIPDAEIYKITATDFYPLQEEAKEEERLIALKKILSSGVFYFSWPNDGSRFDLTVRTQKQGDDSSEWGNSFFWNQLLHVPLRQHQVSCCDWLLKIICGVVTIRTVYASHKQAKACLVSRVSCERTGTRFHTRGVNDDGHVSNFVETEQMIYMDDGVSSFVQIRGSVPLFWEQPGLQVGSHHLRLHRGLEANAPAFDRHMVLLKEQYGQQVVVNLLGSRGGEEVLNRAFKKLLWASCHAGDTPMINFDFHQFAKGGKLEKLETLLRPQLKLHWEDFDVFTKGENVSPRFQKGTLRMNCLDCLDRTNTVQSFIALEVLHLQLKTLGLSSKPIVDRFVESFKAMWSLNGHSLSKVFTGSRALEGKAKVGKLKDGARSMSRTIQSNFFDGVKQEAIKLLLVGDVYGEEVADKGGMLLDSTALLVTPRILKAMTERQSEFTNFKRIRIAMGTWNVNGGKQFRSNVLRTAELTDWLLDSPQLSGATDSQDDSSPADIFAVGFEEMVELSAGNIVNASTTNKKMWGEQLQKAISRSHRYILLTSAQLVGVCLYIFVRPYHVPFIRDVAIDTVKTGMGGKAGNKGAVGIRFQFHSTSFCFICSHLTAGQSQVKERNEDYKEITQKLCFPMGRNVFSHDYVFWCGDFNYRIDLTYEEVFYFVKRQDWKKLLEFDQLQLQKSSGKIFKDFHEGAINFGPTYKYDVGSAAYDTSDKCRTPAWTDRVLWWRKKHPFDKTAGELNLLDSDLDVDTKVRHTWSPGALQYYGRAELQASDHRPVLAIVEVEVQEVDVGARERVFQEVSSFQGPLDATVVVNLQSPTLEEKNEFPEDLRTELMQTLGSYGTIVLVRINQGQMLVTFADSHSALSVLDVDGMKVKGRAVKIRPKTKDWLKGLREEIIRKRDSMAPVSPTANSCLLEENFDFTSLDYESEGDILEDDEDYLVDEFNQPGVSDSELGGDDLSDVPGPTALAPPSKSPALTKKKQHPTYKDDADLVELKRELEAVGEFRHRSPSRSLSVPNRPRPPQPPQRPPPPTGLMVKKSASDASISSGTHGQYSILQTARLLPGAPQQPPKARTGISKPYNVKQIKTTNAQEAEAAIRCLLEARGGASEEALSAVAPRDLEASSEPEPTPGAAKPETPQAPPLLPRRPPPRVPAIKKPTLRRTGKPLSPEEQFEQQTVHFTIGPPETSVEAPPVVTAPRVPPVPKPRTFQPGKAAERPSHRKPASDEAPPGAGASVPPPLEAPPLVPKVPPRRKKSAPAAFHLQVLQSNSQLLQGLTYNSSDSPSGHPPAAGTVFPQGDFLSTSSATSPDSDGTKAMKPEAAPLLGDYQDPFWNLLHHPKLLNNTWLSKSSDPLDSGTRSPKRDPIDPVSAGASAAKAELPPDHEHKTLGHWVTISDQEKRTALQVFDPLAKT

SEQ ID NO: 750909 - protein, 1542 aa, Homo sapiens
GRAGSCRGQRALGRTWPRPPPAVGPTLMALSKGLRLLGRLGAEGDCSVLLEARGRDDCLLFEAGTVATLAPEEKEVIKGQYGKLTDAYGCLGELRLKSGGTSLSFLVLVTGCTSVGRIPDAEIYKITATDFYPLQEEAKEEERLIALKKILSSGVFYFSWPNDGSRFDLTVRTQKQGDDSSEWGNSFFWNQLLHVPLRQHQVSCCDWLLKIICGVVTIRTVYASHKQAKACLVSRVSCERTGTRFHTRGVNDDGHVSNFVETEQMIYMDDGVSSFVQIRGSVPLFWEQPGLQVGSHHLRLHRGLEANAPAFDRHMVLLKEQYGQQVVVNLLGSRGGEEVLNRAFKKLLWASCHAGDTPMINFDFHQFAKGGKLEKLETLLRPQLKLHWEDFDVFTKGENVSPRGGSLRTVPRLLLGGSVSPRFQKGTLRMNCLDCLDRTNTVQSFIALEVLHLQLKTLGLSSKPIVDRFVESFKAMWSLNGHSLSKVFTGSRALEGKAKVGKLKDGARSMSRTIQSNFFDGVKQEAIKLLLVGDVYGEEVADKGGMLLDSTALLVTPRILKAMTERQSEFTNFKRIRIAMGTWNVNGGKQFRSNVLRTAELTDWLLDSPQLSGATDSQDDSSPADIFAVGFEEMVELSAGNIVNASTTNKKMWGEQLQKAISRSHRYILLTSAQLVGVCLYIFVRPYHVPFIRDVAIDTVKTGMGGKAGNKGAVGIRFQFHSTSFCFICSHLTAGQSQVKERNEDYKEITQKLCFPMGRNVFSHDYVFWCGDFNYRIDLTYEEVFYFVKRQDWKKLLEFDQLQLQKSSGKIFKDFHEGAINFGPTYKYDVGSAAYDTSDKCRTPAWTDRVLWWRKKHPFDKTAGELNLLDSDLDVDTKVRHTWSPGALQYYGRAELQASDHRPVLAIVEVEVQEVDVGARERVFQEVSSFQGPLDATVVVNLQSPTLEEKNEFPEDLRTELMQTLGSYGTIVLVRINQGQMLVTFADSHSALSVLDVDGMKVKGRAVKIRPKTKDWLKGLREEIIRKRDSMAPVSPTANSCLLEENFDFTSLDYESEGDILEDDEDYLVDEFNQPGVSDSELGGDDLSDVPGPTALAPPSKSPALTKKKQHPTYKDDADLVELKRELEAVGEFRHRSPSRSLSVPNRPRPPQPPQRPPPPTGLMVKKSASDASISSGTHGQYSILQTARLLPGAPQQPPKARTGISKPYNVKQIKTTNAQEAEAAIRCLLEARGGASEEALSAVAPRDLEASSEPEPTPGAAKPETPQAPPLLPRRPPPRVPAIKKPTLRRTGKPLSPEEQFEQQTVHFTIGPPETSVEAPPVVTAPRVPPVPKPRTFQPGKAAERPSHRKPASDEAPPGAGASVPPPLEAPPLVPKVPPRRKKSAPAAFHLQVLQSNSQLLQGLTYNSSDSPSGHPPAAGTVFPQGDFLSTSSATSPDSDGTKAMKPEAAPLLGDYQDPFWNLLHHPKLLNNTWLSKSSDPLDSGTRSPKRDPIDPVSAGASAAKAELPPDHEHKTLGHWVTISDQEKRTALQVFDPLAKT

SEQ ID NO: 750910 - protein, 839 aa, Homo sapiens
MGGKAGNKGAVGIRFQFHSTSFCFICSHLTAGQSQVKERNEDYKEITQKLCFPMGRNVFSHDYVFWCGDFNYRIDLTYEEVFYFVKRQDWKKLLEFDQLQLQKSSGKIFKDFHEGAINFGPTYKYDVGSAAYDTSDKCRTPAWTDRVLWWRKKHPFDKTAGELNLLDSDLDVDTKVRHTWSPGALQYYGRAELQASDHRPVLAIVEVEVQEVDVGARERVFQEVSSFQGPLDATVVVNLQSPTLEEKNEFPEDLRTELMQTLGSYGTIVLVRINQGQMLVTFADSHSALSVLDVDGMKVKGRAVKIRPKTKDWLKGLREEIIRKRDSMAPVSPTANSCLLEENFDFTSLDYESEGDILEDDEDYLVDEFNQPGVSDSELGGDDLSDVPGPTALAPPSKSPALTKKKQHPTYKDDADLVELKRELEAVGEFRHRSPSRSLSVPNRPRPPQPPQRPPPPTGLMVKKSASDASISSGTHGQYSILQTARLLPGAPQQPPKARTGISKPYNVKQIKTTNAQEAEAAIRCLLEARGGASEEALSAVAPRDLEASSEPEPTPGAAKPETPQAPPLLPRRPPPRVPAIKKPTLRRTGKPLSPEEQFEQQTVHFTIGPPETSVEAPPVVTAPRVPPVPKPRTFQPGKAAERPSHRKPASDEAPPGAGASVPPPLEAPPLVPKVPPRRKKSAPAAFHLQVLQSNSQLLQGLTYNSSDSPSGHPPAAGTVFPQGDFLSTSSATSPDSDGTKAMKPEAAPLLGDYQDPFWNLLHHPKLLNNTWLSKSSDPLDSGTRSPKRDPIDPVSAGASAAKAELPPDHEHKTLGHWVTISDQEKRTALQVFDPLAKT

SEQ ID NO: 750911 - protein, 1165 aa, Homo sapiens
MINFDFHQFAKGGKLEKLETLLRPQLKLHWEDFDVFTKGENVSPRFQKGTLRMNCLDCLDRTNTVQSFIALEVLHLQLKTLGLSSKPIVDRFVESFKAMWSLNGHSLSKVFTGSRALEGKAKVGKLKDGARSMSRTIQSNFFDGVKQEAIKLLLVGDVYGEEVADKGGMLLDSTALLVTPRILKAMTERQSEFTNFKRIRIAMGTWNVNGGKQFRSNVLRTAELTDWLLDSPQLSGATDSQDDSSPADIFAVGFEEMVELSAGNIVNASTTNKKMWGEQLQKAISRSHRYILLTSAQLVGVCLYIFVRPYHVPFIRDVAIDTVKTGMGGKAGNKGAVGIRFQFHSTSFCFICSHLTAGQSQVKERNEDYKEITQKLCFPMGRNVFSHDYVFWCGDFNYRIDLTYEEVFYFVKRQDWKKLLEFDQLQLQKSSGKIFKDFHEGAINFGPTYKYDVGSAAYDTSDKCRTPAWTDRVLWWRKKHPFDKTAGELNLLDSDLDVDTKVRHTWSPGALQYYGRAELQASDHRPVLAIVEVEVQEVDVGARERVFQEVSSFQGPLDATVVVNLQSPTLEEKNEFPEDLRTELMQTLGSYGTIVLVRINQGQMLVTFADSHSALSVLDVDGMKVKGRAVKIRPKTKDWLKGLREEIIRKRDSMAPVSPTANSCLLEENFDFTSLDYESEGDILEDDEDYLVDEFNQPGVSDSELGGDDLSDVPGPTALAPPSKSPALTKKKQHPTYKDDADLVELKRELEAVGEFRHRSPSRSLSVPNRPRPPQPPQRPPPPTGLMVKKSASDASISSGTHGQYSILQTARLLPGAPQQPPKARTGISKPYNVKQIKTTNAQEAEAAIRCLLEARGGASEEALSAVAPRDLEASSEPEPTPGAAKPETPQAPPLLPRRPPPRVPAIKKPTLRRTGKPLSPEEQFEQQTVHFTIGPPETSVEAPPVVTAPRVPPVPKPRTFQPGKAAERPSHRKPASDEAPPGAGASVPPPLEAPPLVPKVPPRRKKSAPAAFHLQVLQSNSQLLQGLTYNSSDSPSGHPPAAGTVFPQGDFLSTSSATSPDSDGTKAMKPEAAPLLGDYQDPFWNLLHHPKLLNNTWLSKSSDPLDSGTRSPKRDPIDPVSAGASAAKAELPPDHEHKTLGHWVTISDQEKRTALQVFDPLAKT

SEQ ID NO: 750912 - protein, 543 aa, Homo sapiens
MKVKGRAVKIRPKTKDWLKGLREEIIRKRDSMAPVSPTANSCLLEENFDFTSLDYESEGDILEDDEDYLVDEFNQPGVSDSELGGDDLSDVPGPTALAPPSKSPALTKKKQHPTYKDDADLVELKRELEAVGEFRHRSPSRSLSVPNRPRPPQPPQRPPPPTGLMVKKSASDASISSGTHGQYSILQTARLLPGAPQQPPKARTGISKPYNVKQIKTTNAQEAEAAIRCLLEARGGASEEALSAVAPRDLEASSEPEPTPGAAKPETPQAPPLLPRRPPPRVPAIKKPTLRRTGKPLSPEEQFEQQTVHFTIGPPETSVEAPPVVTAPRVPPVPKPRTFQPGKAAERPSHRKPASDEAPPGAGASVPPPLEAPPLVPKVPPRRKKSAPAAFHLQVLQSNSQLLQGLTYNSSDSPSGHPPAAGTVFPQGDFLSTSSATSPDSDGTKAMKPEAAPLLGDYQDPFWNLLHHPKLLNNTWLSKSSDPLDSGTRSPKRDPIDPVSAGASAAKAELPPDHEHKTLGHWVTISDQEKRTALQVFDPLAKT

SEQ ID NO: 750913 - protein, 1542 aa, Homo sapiens; identical to SEQ ID NO: 750909

SEQ ID NO: 750914 - protein, 314 aa, Homo sapiens [sequence omitted]

SEQ ID NO: 750915 - protein, 1542 aa, Homo sapiens; identical to SEQ ID NO: 750909

SEQ ID NO: 750916 - protein, 1220 aa, Homo sapiens
GRAGSCRGQRALGRTWPRPPPAVGPTLMALSKGLRLLGRLGAEGDCSVLLEARGRDDCLLFEAGTVATLAPEEKEVIKGQYGKLTDAYGCLGELRLKSGGTSLSFLVLVTGCTSVGRIPDAEIYKITATDFYPLQEEAKEEERLIALKKILSSGVFYFSWPNDGSRFDLTVRTQKQGDDSSEWGNSFFWNQLLHVPLRQHQVSCCDWLLKIICGVVTIRTVYASHKQAKACLVSRVSCERTGTRFHTRGVNDDGHVSNFVETEQMIYMDDGVSSFVQIRGSVPLFWEQPGLQVGSHHLRLHRGLEANAPAFDRHMVLLKEQYGQQVVVNLLGSRGGEEVLNRAFKKLLWASCHAGDTPMINFDFHQFAKGGKLEKLETLLRPQLKLHWEDFDVFTKGENVSPRGGSLRTVPRLLLGGSVSPRFQKGTLRMNCLDCLDRTNTVQSFIALEVLHLQLKTLGLSSKPIVDRFVESFKAMWSLNGHSLSKVFTGSRALEGKAKVGKLKDGARSMSRTIQSNFFDGVKQEAIKLLLVGDVYGEEVADKGGMLLDSTALLVTPRILKAMTERQSEFTNFKRIRIAMGTWNVNGGKQFRSNVLRTAELTDWLLDSPQLSGATDSQDDSSPADIFAVGFEEMVELSAGNIVNASTTNKKMWGEQLQKAISRSHRYILLTSAQLVGVCLYIFVRPYHVPFIRDVAIDTVKTGMGGKAGNKGAVGIRFQFHSTSFCFICSHLTAGQSQVKERNEDYKEITQKLCFPMGRNVFSHDYVFWCGDFNYRIDLTYEEVFYFVKRQDWKKLLEFDQLQLQKSSGKIFKDFHEGAINFGPTYKYDVGSAAYDTSDKCRTPAWTDRVLWWRKKHPFDKTAGELNLLDSDLDVDTKVRHTWSPGALQYYGRAELQASDHRPVLAIVEVEVQEVDVGARERVFQEVSSFQGPLDATVVVNLQSPTLEEKNEFPEDLRTELMQTLGSYGTIVLVRINQGQMLVTFADSHSALSVLDVDGMKVKGRAVKIRPKTKDWLKGLREEIIRKRDSMAPVSPTANSCLLEENFDFTSLDYESEGDILEDDEDYLVDEFNQPGVSDSELGGGKCHLSLGNAMAACRSFQRALELDHKNAQAQQEFKNANAVMEYEKIAETDFEKRDFRKVVFCMDRALEFAPACHRFKILKAECLAMLGRYPEAQSVASDILRMDSTNADALYVRGLCLYYEDRIEKAVSFRTGSQD

SEQ ID NO: 750917 - protein, 1072 aa, Homo sapiens
GDAGSCRGQRALGRTWPRPPPAVGPTLMALSKGLRLLGRLGAEGDCSVLLEARGRDDCLLFEAGTVATLAPEEKEVIKGQYGKLTDAYGCLGELRLKSGGTSLSFLVLVTGCTSVGRIPDAEIYKITATDFYPLQEEAKEEERLIALKKILSSGVFYFSWPNDGSRFDLTVRTQKQGDDSSEWGNSFFWNQLLHVPLRQHQVSCCDWLLKIICGVVTIRTVYASHKQAKACLVSRVSCERTGTRFHTRGVNDDGHVSNFVETEQMIYMDDGVSSFVQIRGSVPLFWEQPGLQVGSHHLRLHRGLEANAPAFDRHMVLLKEQYGQQVVVNLLGSRGGEEVLNRAFKKLLWASCHAGDTPMINFDFHQFAKGGKLEKLETLLRPQLKLHWEDFDVFTKGENVSPRGGSLRTVPRLLLGGSVSPRFQKGTLRMNCLDCLDRTNTVQSFIALEVLHLQLKTLGLSSKPIVDRFVESFKAMWSLNGHSLSKVFTGSRALEGKAKVGKLKDGARSMSRTIQSNFFDGVKQEAIKLLLVGDVYGEEVADKGGMLLDSTALLVTPRILKAMTERQSEFTNFKRIRIAMGTWNVNGGKQFRSNVLRTAELTDWLLDSPQLSGATDSQDDSSPADIFAVGFEEMVELSAGNIVNASTTNKKMWGEQLQKAISRSHRYILLTSAQLVGVCLYIFVRPYHVPFIRDVAIDTVKTGMGGKAGNKGAVGIRFQFHSTSFCFICSHLTAGQSQVKERNEDYKEITQKLCFPMGRNVFSHDYVFWCGDFNYRIDLTYEEVFYFVKRQDWKKLLEFDQLQLQKSSGKIFKDFHEGAINFGPTYKYDVGSAAYDTSDKCRTPAWTDRVLWWRKKHPFDKTAGELNLLDSDLDVDTKVRHTWSPGALQYYGRAELQASDHRPVLAIVEVEVQEVDVGARERVFQEVSSFQGPLDATVVVNLQSPTLEEKNEFPEDLRTELMQTLGSYGTIVLVRINQGQMLVTFADSHSALSVLDVDGMKVKGRAVKIRPKTKDWLKGLREEIIRKRDSMAPVSPTANSCLLEENFDFTSLDYESEGGYSCSTMIDYSADL

SEQ ID NO: 750918 - protein, 634 aa, Homo sapiens
GRAGSCRGQRALGRTWPRPPPAVGPTLMALSKGLRLLGRLGAEGDCSVLLEARGRDDCLLFEAGTVATLAPEEKEVIKGQYGKLTDAYGCLGELRLKSGGTSLSFLVLVTGCTSVGRIPDAEIYKITATDFYPLQEEAKEEERLIALKKILSSGVFYFSWPNDGSRFDLTVRTQKQGDDSSEWGNSFFWNQLLHVPLRQHQVSCCDWLLKIICGVVTIRTVYASHKQAKACLVSRVSCERTGTRFHTRGVNDDGHVSNFVETEQMIYMDDGVSSFVQIRGSVPLFWEQPGLQVGSHHLRLHRGLEANAPAFDRHMVLLKEQYGQQVVVNLLGSRGGEEVLNRAFKKLLWASCHAGDTPMINFDFHQFAKGGKLEKLETLLRPQLKLHWEDFDVFTKGENVSPRGGSLRTVPRLLLGGSVSPRFQKGTLRMNCLDCLDRTNTVQSFIALEVLHLQLKTLGLSSKPIVDRFVESFKAMWSLNGHSLSKVFTGSRALEGKAKVGKLKDGARSMSRTIQSNFFDGVKQEAIKLLLVGDVYGEEVADKGGMLLDSTALLVTPRILKAMTERQSEFTNFKRIRIAMGTWNVNGGKQFRSNVLRTAELTDWLLDSPQLSGATDSQGEGSDFGGDKIQLHLT

SEQ ID NO: 750919 - protein, 193 aa, Homo sapiens
GDAGSCRGQRALGRTWPRPPPAVGPTLMALSKGLRLLGRLGAEGDCSVLLEARGRDDCLLFEAGTVATLAPEEKEVIKGQYGKLTDAYGCLGELRLKSGGTSLSFLVLVTGCTSVGRIPDAEIYKITATDFYPLQEEAKEEERLIALKKILSSGVFYFSWPNDGSRFDLTPKPSPFYITIFSDFLPILKICFG

SEQ ID NO: 750920 - protein, 72 aa, Homo sapiens
RPPVLRSVSDTLTCGTDHCTHAPPCPPDDADLVELKRELEAVGEFRHRSPSRSLSVPNRPRPPQPPQRPPPP

SEQ ID NO: 750921 - protein, 80 aa, Homo sapiens
QSQKRLSGQGFLGSIHDHGLWDQGKLKIIITSAKQRTSKTGNNKARIGARRDELPSRSGSLSPPVREIMKEEAREDSWCV

SEQ ID NO: 750922 - protein, 112 aa, Homo sapiens
PGQASRWPLQDELLPSDGISRPQMVSGRWAPPRQGWASRRPPQAQVVLKSGSPGCISRPDSGPTPGPNNVFGLSSCPAPSGPGRPTTSLSQAPQAQLRPRGGLSRLSSWALR

SEQ ID NO: 750923 - protein, 107 aa, Homo sapiens
GVAQSLCRVSLWGPPAVLCPNLATPYICPHGSGFRMGVCVCVCVCLIECSLVPSFMAPHYRASLSNPWPKGRIWPRMVLNAAQHKLVNFLKTLRDFFVIFFQLISYR

SEQ ID NO: 750924 - protein, 107 aa, Homo sapiens; identical to SEQ ID NO: 750923

SEQ ID NO: 750925 - protein, 75 aa, Homo sapiens
MEHNGSASNADKIHQNRLSSVTEDEDQDAALTIVTVLDKVASIVDSVQASQKRIEERHREMENAIKSVQIDLLKL

SEQ ID NO: 750926 - protein, 438 aa, Homo sapiens
SEPQETQALAAPSALRLRRALLARDGPPRRRRIPRSPPPPGSAALALKPGPSRAAVRPAASPPAHPGGRRAVTMLPPLPSRLGLLLLLLLCPAHVGGLWWAVGSPLVMDPTSICRKARRLAGRQAELCQAEPEVVAELARGARLGVRECQFQFRFRRWNCSSHSKAFGRILQQDIRETAFVFAITAAGASHAVTQACSMGELLQCGCQAPRGRAPPRPSGLPGTPGPPGPAGSPEGSAAWEWGGCGDDVDFGDEKSRLFMDARHKRGRGDIRALVQLHNNEAGRLAVRSHTRTECKCHGLSGSCALRTCWQKLPPFREVGARLLERFHGASRVMGTNDGKALLPAVRTLKPPGRADLLYAADSPDFCAPNRRTGSPGTRGRACNSSAPDLSGCDLLCCGRGHRQESVQLEENCLCRFHWCCVVQCHRCRVRKELSLCL

SEQ ID NO: 750927 - protein, 204 aa, Homo sapiens
DFLPLNLRSPFVCIFLSSFHLPFPILFSVHPLGPSLHPLPVHMRPPLCLPQAVRSHTRTECKCHGLSGSCALRTCWQKLPPFREVGARLLERFHGASRVMGTNDGKALLPAVRTLKPPGRADLLYAADSPDFCAPNRRTGSPGTRGRACNSSAPDLSGCDLLCCGRGHRQESVQLEENCLCRFHWCCVVQCHRCRVRKELSLCL

SEQ ID NO: 750928 - protein, 365 aa, Homo sapiens
MLPPLPSRLGLLLLLLLCPAHVGGLWWAVGSPLVMDPTSICRKARRLAGRQAELCQAEPEVVAELARGARLGVRECQFQFRFRRWNCSSHSKAFGRILQQDIRETAFVFAITAAGASHAVTQACSMGELLQCGCQAPRGRAPPRPSGLPGTPGPPGPAGSPEGSAAWEWGGCGDDVDFGDEKSRLFMDARHKRGRGDIRALVQLHNNEAGRLAVRSHTRTECKCHGLSGSCALRTCWQKLPPFREVGARLLERFHGASRVMGTNDGKALLPAVRTLKPPGRADLLYAADSPDFCAPNRRTGSPGTRGRACNSSAPDLSGCDLLCCGRGHRQESVQLEENCLCRFHWCCVVQCHRCRVRKELSLCL

SEQ ID NO: 750929 - protein, 139 aa, Homo sapiens
MDSLYGDLFWYLDYNKDGTLDIFELQEGLEDVGAIQSLEEAKKIFTTGDVNKDGKLDFEEFMKYLKDHEKKMKLAFKSLDKNNDGKIEASEIVQSLQTLGLTISEQQAELILQSAMPVVPTEGTDHVYLVNSSMSTTLQ

SEQ ID NO: 750930 - protein, 601 aa, Homo sapiens [sequence omitted]

SEQ ID NO: 750931 - protein, 458 aa, Homo sapiens
MDSLYGDLFWYLDYNKDGTLDIFELQEGLEDVGAIQSLEEAKKIFTTGDVNKDGKLDFEEFMKYLKDHEKKMKLAFKSLDKNNDGKIEASEIVQSLQTLGLTISEQQAELILQSIDVDGTMTVDWNEWRDYFLFNPVTDIEEIIRFWKHSTGIDIGDSLTIPDEFTEDEKKSGQWWRQLLAGGIAGAVSRTSTAPLDRLKIMMQVHGSKSDKMNIFGGFRQMVKEGGIRSLWRGNGTNVIKIAPETAVKFWAYEQYKKLLTEEGQKIGTFERFISGSMAGATAQTFIYPMEVMKTRLAVGKTGQYSGIYDCAKKILKHEGLGAFYKGYVPNLLGIIPYAGIDLAVYELLKSYWLDNFAKDSVNPGVMVLLGCGALSSTCGQLASYPLALVRTRMQAQAMLEGSPQLNMVGLFRRIISKEGIPGLYRGITPNFMKVLPAVGISYVVYENMKQTLGVTQK

SEQ ID NO: 750932 - protein, 116 aa, Homo sapiens
RGLLFEVGDAVEGLELTEATPGYRWQIVPNASSPFGFWSQEGQPFRARLSGFFVAPETNNYTFWIQADSQASLHFSWSEEPRTKVKVASISVGTADWFDSWEQNRDEGTWQQKTPK

SEQ ID NO: 750933 - protein, 68 aa, Homo sapiens
RKTPGAGELCMDMQSRAAHLLLLTLPVPVRVCTHPGLALLPRLEYSGAITAHCSLNLLGPSNLPTLVS

SEQ ID NO: 750934 - protein, 95 aa, Homo sapiens
MVEKGSDHSSDKSPSTPEQGVQRSFSSQSGRSGGKNSKKSQSWYNVLSPTYKQRNEDFRKLFKQLPDTERLIVDYSCALQRDILLQGRLYLSENW

SEQ ID NO: 750935 - protein, 554 aa, Homo sapiens
MDANSKDKPPETKESAMNNAGNASFILGTGKIVTPQKHAELPPNPCTPDTFKSPLNFSTVTVEQLGITPESFVRNSAGKSSSYLKKCRRRSAVGARGSPETNHLIRFIARQQNIKNARKSPLAQDSPSQGSPALYRNVNTLRERISAFQSAFHSIKENEKMTGCLEFSEAGKESEMTDLTRKEGLSACQQSGFPAVLSSKRRRISYQRDSDENLTDAEGKVIGLQIFNIDTDRACAVETSVDLSEISSKLGSTQSGFLVEESLPLSELTETSNALKVADCVVGKGSSDAVSPDTFTAEVSSDAVPDVRSPATPACRRDLPTPKTFVLRSVLKKPSVKMCLESLQEHCNNLYDDDGTHPSLISNLPNCCKEKEAEDEENFEAPAFLNMRKRKRVTFGEDLSPEVFDESLPANTPLRKGGTPVCKKDFSGLSSLLLEQSPVPEPLPQPDFDDKGENLENIEPLQVSFAVLSSPNKSSISETLSGTDTFSSSNNHEKISSPKVGRITRTSNRRNQLVSVVEESVCNLLNTEVQPCKEKKINRRKSQETKCTKRALPK

SEQ ID NO: 750936 - protein, 1184 aa, Homo sapiens
SGVPEVTRQWQVSVVLGLTAARGGPSPSPGSHSSAEGEAWERSECARTGEGGGGGVIRRVNSVPRGGVGDLNRSAGGGGGWRRLPGRAQARISAGCESRSAVGTSGSGFEERLPAAGALPGEPFRTEEPGSGRSGRRDARLPRGSGSKPVCLAGLQVRREEMDANSKDKPPETKESAMNNAGNASFILGTGKIVTPQKHAELPPNPCTPDTFKSPLNFSTVTVEQLGITPESFVRNSAGKSSSYLKKCRRRSAVGARGSPETNHLIRFIARQQNIKNARKSPLAQDSPSQGSPALYRNVNTLRERISAFQSAFHSIKENEKMTGCLEFSEAGKESEMTDLTRKEGLSACQQSGFPAVLSSKRRRISYQRDSDENLTDAEGKVIGLQIFNIDTDRACAVETSVDLSEISSKLGSTQSGFLVEESLPLSELTETSNALKVADCVVGKGSSDAVSPDTFTAEVSSDAVPDVRSPATPACRRDLPTPKTFVLRSVLKKPSVKMCLESLQEHCNNLYDDDGTHPSLISNLPNCCKEKEAEDEENFEAPAFLNMRKRKRVTFGEDLSPEVFDESLPANTPLRKGGTPVCKKDFSGLSSLLLEQSPVPEPLPQPDFDDKGENLENIEPLQVSFAVLSSPNKSSISETLSGTDTFSSSNNHEKISSPKVGRITRTSNRRNQLVSVVEESVCNLLNTEVQPCKEKKINRRKSQETKCTKRALPKKSQVLKSCRKKKGKGKKSVQKSLYGERDIASKKPLLSPIPELPEVPEMTPSIPSIRRLGSGYFSSNGKLEEVKTPKNPVKRKDLLRHDPDLHMHQGYDKYDVSEFCSYIKSSSSLGNATSDEDPNTNIMNINENKNIPKAKNKSESENEPKAGTDSPVSCASVTEERVASDSPKPALTLQQGQEFSAGGQNAENLCQFFKISPDLNIKCERKDDFLGAAEGKLQCNRLMPNSQKDCHCLGDVLIENTKESKSQSEDLGRKPMESSSVVSCRDRKDRRRSMCYSDGRSLHLEKNGNHTPSSSVGSSVEISLENSELFKDLSDAIEQTFQRRNSETKVRRSTRLQKDLENEGLVWISLPLPSTSQKAKRRTICTFDSSGFESMSPIKETVSSRQKPQMAPPVSDPENSQGPAAGSSDEPGKRRKSFCISTLANTKATSQFKGYRRRSSLNGKGESSLTALERIEHNGERKQ

SEQ ID NO: 750937 - protein, 1184 aa, Homo sapiens; identical to SEQ ID NO: 750936

SEQ ID NO: 750938 - protein, 1001 aa, Homo sapiens
MDANSKDKPPETKESAMNNAGNASFILGTGKIVTPQKHAELPPNPCTPDTFKSPLNFSTVTVEQLGITPESFVRNSAGKSSSYLKKCRRRSAVGARGSPETNHLIRFIARQQNIKNARKSPLAQDSPSQGSPALYRNVNTLRERISAFQSAFHSIKENEKMTGCLEFSEAGKESEMTDLTRKEGLSACQQSGFPAVLKSNWSPDIQIDTDRACAVETSVDLSEISSKLGSTQSGFLVEESLPLSELTETSNALKVADCVVGKGSSDAVSPDTFTAEVSSDAVPDVRSPATPACRRDLPTPKTFVLRSVLKKPSVKMCLESLQEHCNNLYDDDGTHPSLISNLPNCCKEKEAEDEENFEAPAFLNMRKRKRVTFGEDLSPEVFDESLPANTPLRKGGTPVCKKDFSGLSSLLLEQSPVPEPLPQPDFDDKGENLENIEPLQVSFAVLSSPNKSSISETLSGTDTFSSSNNHEKISSPKVGRITRTSNRRNQLVSVVEESVCNLLNTEVQPCKEKKINRRKSQETKCTKRALPKKSQVLKSCRKKKGKGKKSVQKSLYGERDIASKKPLLSPIPELPEVPEMTPSIPSIRRLGSGYFSSNGKLEEVKTPKNPVKRKDLLRHDPDLHMHQGYDKYDVSEFCSYIKSSSSLGNATSDEDPNTNIMNINENKNIPKAKNKSESENEPKAGTDSPVSCASVTEERVASDSPKPALTLQQGQEFSAGGQNAENLCQFFKISPDLNIKCERKDDFLGAAEGKLQCNRLMPNSQKDCHCLGDVLIENTKESKSQSEDLGRKPMESSSVVSCRDRKDRRRSMCYSDGRSLHLEKNGNHTPSSSVGSSVEISLENSELFKDLSDAIEQTFQRRNSETKVRRSTRLQKDLENEGLVWISLPLPSTSQKAKRRTICTFDSSGFESMSPIKETVSSRQKPQMAPPVSDPENSQGPAAGSSDEPGKRRKSFCISTLANTKATSQFKGYRRRSSLNGKGESSLTALERIEHNGERKQ

SEQ ID NO: 750939 - protein, 302 aa, Homo sapiens
RSLTTAENSCTLQQGQEFSAGGQNAENLCQFFKISPDLNIKCERKDDFLGAAEGKLQCNRLMPNSQKDCHCLGDVLIENTKESKSQSEDLGRKPMESSSVVSCRDRKDRRRSMCYSDGRSLHLEKNGNHTPSSSVGSSVEISLENSELFKDLSDAIEQTFQRRNSETKVRRSTRLQKDLENEGLVWISLPLPSTSQKAKRRTICTFDSSGFESMSPIKETVSSRQKPQMAPPVSDPENSQGPAAGSSDEPGKRRKSFCISTLANTKATSQFKGYRRRSSLNGKGESSLTALERIEHNGERKQ

SEQ ID NO: 750940 - protein, 111 aa, Homo sapiens
MIHLVKPVPWALCKSPPPQASVQNRLRFTPNPETLSWVIFLSVRNLSLLNFPLLNPLLVCVHVLNSFLARDNHGCIPQAMEPFHYEVNTIKIIFKFFSKRWDSQLCSPGWS

SEQ ID NO: 750941 - protein, 118 aa, Homo sapiens
THWRLGFEMRGHPRSWLQLLPLPGTPPWELGGRALLGALPFASGFWPRAQGYGGFQSGDSLVLAGTSPSTSSQSPLGASQPQGCHFVVGSKLWSQQRLSSTLSVPSRYPVIPHSENLG

SEQ ID NO: 750942 - protein, 98 aa, Homo sapiens
DPGPPPTTEGSFCHQNLVVQRSRHLQAGCLGRGGVEVPMYLLLSSLKWERHKHLPCTSGSPGTWRTDPRPCVGPVPFTGSLSLKLPRHLGDQPSSVWG

SEQ ID NO: 750943 - protein, 103 aa, Homo sapiens
RSSPAQHHTSASIHIQPVSSLAPERAEDGPCHSQGQRLRHPWDRKLPNARVFISPTGYDLATRSSFTLTCLSSWPSPDISLFSFHQMLETSSWSIILLHVAIL

SEQ ID NO: 750944 - protein, 117 aa, Homo sapiens
MLCCLEISCVRYLKSSLSSSKFHRSVGNSRKKFLFSLFPAYLMPVSNTGAQCLQCLCIVRVTLLHFPTNSSSPSETTSAWTLLSISLLTFWSKPFNKSLGSSKLSHIFLSSSEPSKL

SEQ ID NO: 750945 - protein, 76 aa, Homo sapiens
SFPEKPFNTLSSSNLDPQPHEEDPIPTPIPKRELGFRELWSLDEGDWDQTELGPSQNPFSNHSFIHETTTCAQRCY

SEQ ID NO: 750946 - protein, 76 aa, Homo sapiens; identical to SEQ ID NO: 750945

SEQ ID NO: 750947 - protein, 227 aa, Homo sapiens
GSLRRSRPPARSAPGPGMTAAQAAGEEAPPGVRSVKVVLVGDGGCGKTSLLMVFADGAFPESYTPTVFERYMVNLQVKGKPVHLHIWDTAGQDDYDRLRPLFYPDASVLLLCFDVTSPNSFDNIFNRWYPEVNHFCKKVPIIVVGCKTDLRKDKSLVNKLRRNGLEPVTYHRGQEMARSVGAVAYLECSARLHDNVHAVFQEAAEVALSSRGRNFWRRITQGFCVVT

SEQ ID NO: 750948 - protein, 67 aa, Homo sapiens
GLTFQLAAAMELSAEYLREKLQRYLEAEHVEVEDTTLNRCSCSFRVLVVSAKFEGKPLLQRHRFCTE

SEQ ID NO: 750949 - protein, 104 aa, Homo sapiens
MELSAEYLREKLQRYLEAEHVEVEDTTLNRCSCSFRVLVVSAKFEGKPLLQRHRLECNGTISAHHNLRLLGSSDSLVSASQVAGITGSVQSNEMCDGCKPGVFF

SEQ ID NO: 750950 - protein, 92 aa, Homo sapiens
PASSPAWGRMCTHQEATKRGSDPSRFALGLGPRPPCGPRSEDLPGDRAGPLVPGPCSPKGRAVLGILETGAPPSTLTYSPGGQLSTAAEVGG

SEQ ID NO: 750951 - protein, 116 aa, Homo sapiens
KHAHILQAVPDSLLCIKEHLQMIQRPRRILSRHTCWRLLPETLQHPSCQIQSTCEDNEDQEKSLLGHRIQLILLPTFSDWPALLSLLRQLHLLLFMFLCLGPGLILLWSWWAASAL

SEQ ID NO: 750952 - protein, 119 aa, Homo sapiens
LTHCLNPAVYAPNSLADCSVLCPCLELASLLPSIRPFLTQSIGIMAPINCTSTCYLHTLLGTYLLHNFHKHMQNMQKLIYCVFVIAEKLLKSGDQLQFPLVSCMLLSFPRTPDLWAVIH

SEQ ID NO: 750953 - protein, 37 aa, Homo sapiens
MGYLYLVSHMLLTPRVPKAKYDPNPPPAFLPVFLPSR

SEQ ID NO: 750954 - protein, 49 aa, Homo sapiens
MARLVAVCRDGEEEFPFERRQIPLYIDDTLTVSGPGRAGPAAPLAAVSP

SEQ ID NO: 750955 - protein, 519 aa, Homo sapiens
MDLVGVASPEPGTAAAWGPSKCPWAIPQNTISCSLADVMSEQLAKELQLEEEAAVFPEVAVAEGPFITGENIDTSSDLMLAQMLQMEYDREYDAQLRREEKKFNGDSKVSISFENYRKVHPYEDSDSSEDEVDWQDTRDDPYRPAKPVPTPKKGFIGKGKDITTKHDEVVCGRKNTARMENFAPEFQVGDGIGMDLKLSNHVFNALKQHAYSEERRSARLHEKKEHSTAEKAVDPKTRLLMYKMVNSGMLETITGCISTGKESVVFHAYGGSMEDEKEDSKVIPTECAIKVFKTTLNEFKNRDKYIKDDFRFKDRFSKLNPRKIIRMWAEKEMHNLARMQRAGIPCPTVVLLKKHILVMSFIGHDQVPAPKLKEVKLNSEEMKEAYYQTLHLMRQLYHECTLVHADLSEYNMLWHAGKVWLIDVSQSVEPTHPHGLEFLFRDCRNVSQFFQKGGVKEALSERELFNAVSGLNITADNEADFLAEIEALEKMNEDHVQKNGRKAASFLKDDGDPPLLYDE

SEQ ID NO: 750956 - protein, 424 aa, Homo sapiens
MDLVGVASPEPGTAAAWGPSKCPWAIPQNTISCSLADVMSEQLAKELQLEEEAAVFPEVAVAEGPFITGENIDTSSDLMLAQMLQMEYDREYDAQLRREEKKFNGDSKVSISFENYRKVHPYEDSDSSEDEVDWQDTRDDPYRPAKPVPTPKKGFIGKGKDITTKHDEVVCGRKNTARMENFAPEFQVGDGIGMDLKLSNHVFNALKQHAYSEERRSARLHEKKEHSTAEKAVDPKTRLLMYKMVNSGMLETITGCISTGKESVVFHAYGGSMEDEKEDSKVIPTECAIKVFKTTLNEFKNRDKYIKDDFRFKDRFSKLNPRKIIRMWAEKEMHNLARMQRAGIPCPTVVLLKKHILVMSFIGHDQVPAPKLKEVKLNSEEMKEAYYQTLHLMRQLYHECTLVHADLSEYNMLWHAGKVRSTFC

SEQ ID NO: 750957 - protein, 272 aa, Homo sapiens
MDLVGVASPEPGTAAAWGPSKCPWAIPQNTISCSLADVMSEQLAKELQLEEEAAVFPEVAVAEGPFITGENIDTSSDLMLAQMLQMEYDREYDAQLRREEKKFNGDSKVSISFENYRKVHPYEDSDSSEDEVDWQDTRDDPYRPAKPVPTPKKGFIGKGKDITTKHDEVVCGRKNTARMENFAPEFQVGDGIGMDLKLSNHVFNALKQHAYSEERRSARLHEKKEHSTAEKAVDPKTRLLMYKMVNSGMLETITGCISTGKESVVFHAYGGR

SEQ ID NO: 750958 - protein, 550 aa, Homo sapiens
MDLVGVASPEPGTAAAWGPSKCPWAIPQNTISCSLADVMSEQLAKELQLEEEAAVFPEVAVAEGPFITGENIDTSSDLMLAQMLQMEYDREYDAQLRREEKKFNGDSKGIITLFDNFIDVVENTHNVLLSKSSTIFASEVSISFENYRKVHPYEDSDSSEDEVDWQDTRDDPYRPAKPVPTPKKGFIGKGKDITTKHDEVVCGRKNTARMENFAPEFQVGDGIGMDLKLSNHVFNALKQHAYSEERRSARLHEKKEHSTAEKAVDPKTRLLMYKMVNSGMLETITGCISTGKESVVFHAYGGSMEDEKEDSKVIPTECAIKVFKTTLNEFKNRDKYIKDDFRFKDRFSKLNPRKIIRMWAEKEMHNLARMQRAGIPCPTVVLLKKHILVMSFIGHDQVPAPKLKEVKLNSEEMKEAYYQTLHLMRQLYHECTLVHADLSEYNMLWHAGKVWLIDVSQSVEPTHPHGLEFLFRDCRNVSQFFQKGGVKEALSERELFNAVSGLNITADNEADFLAEIEALEKMNEDHVQKNGRKAASFLKDDGDPPLLYDE

SEQ ID NO: 750959 - protein, 503 aa, Homo sapiens
MDLVGVASPEPGTAAAWGPSKCPWAIPQNTISCSLADVMSEQLAKELQLEEEAAVFPEVADLMLAQMLQMEYDREYDAQLRREEKKFNGDSKVSISFENYRKVHPYEDSDSSEDEVDWQDTRDDPYRPAKPVPTPKKGFIGKGKDITTKHDEVVCGRKNTARMENFAPEFQVGDGIGMDLKLSNHVFNALKQHAYSEERRSARLHEKKEHSTAEKAVDPKTRLLMYKMVNSGMLETITGCISTGKESVVFHAYGGSMEDEKEDSKVIPTECAIKVFKTTLNEFKNRDKYIKDDFRFKDRFSKLNPRKIIRMWAEKEMHNLARMQRAGIPCPTVVLLKKHILVMSFIGHDQVPAPKLKEVKLNSEEMKEAYYQTLHLMRQLYHECTLVHADLSEYNMLWHAGKVWLIDVSQSVEPTHPHGLEFLFRDCRNVSQFFQKGGVKEALSERELFNAVSGLNITADNEADFLAEIEALEKMNEDHVQKNGRKAASFLKDDGDPPLLYDE

SEQ ID NO: 750960 - protein, 459 aa, Homo sapiens
MLVEGKFIALNAHKRKQERSKINTLTSQLKELEKQEQTNSKASRRQEITKIRAEMKEIETQKSLQKFNESQKLIFEKSNEIDRLLARLIKNKREKDQIDTIKNDKGDITTKHDEVVCGRKNTARMENVGDGIGMDLKLSNHVFNALKQHAYSEERRSARLHEKKEHSTAEKAVDPKTRLLMYKMVNSGMLETITGCISTGKESVVFHAYGGSMEDEKEDSKVIPTECAIKVFKTTLNEFKNRDKYIKDDFRFKDRFSKLNPRKIIRMWAEKEMHNLARMQRAGIPCPTVVLLKKHILVMSFIGHDQVPAPKLKEVKLNSEEMKEAYYQTLHLMRQLYHECTLVHADLSEYNMLWHAGKVWLIDVSQSVEPTHPHGLEFLFRDCRNVSQFFQKGGVKEALSERELFNAVSGLNITADNEADFLAEIEALEKMNEDHVQKNGRKAASFLKDDGDPPLLYDE

SEQ ID NO: 750961 - protein, 170 aa, Homo sapiens
MDLVGVASPEPGTAAAWGPSKCPWAIPQNTISCSLADVMSEQLAKELQLEEEAAVFPEVAVAEGPFITGENIDTSSDLMLAQMLQMEYDREYDAQLRREEKKFNGDSKVSISFENYRKVHPYEDSDSSEDEVDWQDTRDDPYRPAKPVPTPKRLSLDKDTGIREILETTP

SEQ ID NO: 750962 - protein, 62 aa, Homo sapiens
  misc_feature (36)..(36): Xaa can be any naturally occurring amino acid
EARSSAKREKKEGGVEVWGGRNEHDNRENEKTNAVXENLLSSSLSGGESSEQRLPQGSWKHL

SEQ ID NO: 750963 - protein, 73 aa, Homo sapiens
VYSNPAPELKISCGCQPSTSGKFPSREPGLSHFGCNPSVPGFLRDIWPLGITRAFSYALHSVELSPITDKPIL

SEQ ID NO: 750964 - protein, 274 aa, Homo sapiens
AEGRRATHPRAPTRTREKSQVEGNGGASGVECGEWGIWCKLGCVKEVTKSAEARLPALIRPLSPPLCLCFGPSVLWSDIFSPSGPRAKGRGLPQAVPGFRSRNKNGQLRCGFQAFVEDMPMAGLLKGLVRQLEQFRVQQQASKMPPKGKSGSGKAGKGGAASGSDSADKKAQGPKGGGNAVKVRHILCEKHGKIMEAMEKLKSGMRFNEVAAQYSEDKARQGGDLGWMTRGSMVGPFQEAAFALPVSGMDKPVFTDPPVKTKFGYHIIMVEGRK

SEQ ID NO: 750965 - protein, 274 aa, Homo sapiens; identical to SEQ ID NO: 750964

SEQ ID NO: 750966 - protein, 274 aa, Homo sapiens; identical to SEQ ID NO: 750964

SEQ ID NO: 750967 - protein, 124 aa, Homo sapiens
DAWVDPRVAKEKVVLEKRGKVERPERSRRMGAGEERREGTDSPSPESGTDAAGGAASGSDSADKKAQGPKGGGNAVKVRHILCEKHGKIMEAMEKLKSGMRFNEVAAQYSEDKARQGVCCSYYL

SEQ ID NO: 750968 - protein, 229 aa, Homo sapiens
AEGRRATHPRAPTRTREKSQVEGNGGASGVECGEWGIWCKLGCVKEVTKSAEARLPALIRPLSPPLCLCFGPSVLWSDIFSPSGPRAKGRGLPQAVPGFRSRNKNGQLRCGFQAFVEDMPMAGLLKGLVRQLEQFRVQQQASKMPPKGKSGSGKAGKGGAASGSDSADKKAQGPKGGGNAVKVRHILCEKHGKIMEAMEKLKSGMRFNEVAAQYSEDKARQGVCCSYYL

SEQ ID NO: 750969 - protein, 229 aa, Homo sapiens; identical to SEQ ID NO: 750968

SEQ ID NO: 750970 - protein, 274 aa, Homo sapiens; identical to SEQ ID NO: 750964

SEQ ID NO: 750971 - protein, 256 aa, Homo sapiens
AEGRRATHPRAPTRTREKSQVEGNGGASGVECGEWGIWCKLGCVKEVTKSAEARLPALIRPLSPPLCLCFGPSVLWSDIFSPSGPRAKGRGLPQAVPGFRSRNKNGQLRCGFQAFVEDMPMAGLLKGLVRQLEQFRVQQQASKMPPKGKSGSGKAGKGGAASGSDSADKKAQGPKGGGNAVKVRHILCEKHGKIMEAMEKLKSGMRFNEVAAQYSEDKARQGRMQQQGTILEAESSPHQIPILLAPSSWTLQPPEP

SEQ ID NO: 750972 - protein, 107 aa, Homo sapiens
AEGRRATHPRAPTRTREKSQVEGNGGASGVECGEWGIWCKLGCVKEVTKSAEARLPALIRPLSPPLCLCFGPSVLWSDIFSPSGPRAKGRGLPQAVPASGAAIRTVN

SEQ ID NO: 750973 - protein, 229 aa, Homo sapiens; identical to SEQ ID NO: 750968

SEQ ID NO: 750974 - protein, 224 aa, Homo sapiens
AEGRRATHPRAPTRTREKSQVEGNGGASGVECGEWGIWCKLGCVKEVTKSAEARLPALIRPLSPPLCLCFGPSVLWSDIFSPSGPRAKGRGLPQAVPGFRSRNKNGQLRCGFQAFVEDMPMAGLLKGLVRQLEQFRVQQQASKMPPKGKSGSGKAGKACQLSLVLAYFVWPKIILPLWPREAERLDTLVVKCLAEFPFEVWRYDGNIHSGCVLDLSVNMEVQFK

SEQ ID NO: 750975 - protein, 107 aa, Homo sapiens; identical to SEQ ID NO: 750972

SEQ ID NO: 750976 - protein, 326 aa, Homo sapiens
AEGRRATHPRAPTRTREKSQVEGNGGASGVECGEWGIWCKLGCVKEVTKSAEARLPALIRPLSPPLCLCFGPSVLWSDIFSPSGPRAKGRGLPQAVPASGAAIRRSIEMRLSGICLDMPMAGLLKGLVRQLEQFRVQQQASKMPPKGKSGSGKAGKACQLSLVLAYFVWPKIILPLWPREAERLDTLVVKCLAEFPFEVWRYDGNIHSGCVLDLSVNMEVQFEMSTCHLFSKGGAASGSDSADKKAQGPKGGGNAVKVRHILCEKHGKIMEAMEKLKSGMRFNEVAAQYSEDKARQGIPSLQQHAGHHRDLRSTLISLVSYLQTTP

SEQ ID NO: 750977 - protein, 123 aa, Homo sapiens
ALLSQALLSALAVARSGLGPRRAQALVTGDGAELPLRESWICAPRHGKGIRTPADLALTERRWGPWKGTPPVGAKSKKKMTLISQPRAGRKGGVGVVAPCPSSPTPTVRAHSPGVTRDVNPQA

SEQ ID NO: 750978 - protein, 119 aa, Homo sapiens
ALLSQALLSALAVARSGLGPRRAQALVTGDGAELPLRESWICAPRHGKGIRTPADLALTERRWGPWKGTPPVGAKSKKKMTLISQPRAGRKGGVGVVAPCPSSPTPTSPGVTRDVNPQA

SEQ ID NO: 750979 - protein, 190 aa, Homo sapiens
NHGLPGSLRQPDPVALLMLLVDADQPEPMRSGARELALFLTPEPGAEAKEVEETIEGMLLRLEEFCSLADLIRSDTSQILEENIPVLKAKLTEMRGIYAKVDRLEAFVKMVGHHVAFLEADVLQAERDHGAFPQALRRWLGSAGLPSFRNKSPAPVPVTYELPTLYRTEDYFPVDAGEAQHHPRTCPRPL

SEQ ID NO: 750980 - protein, 137 aa, Homo sapiens
SNRNRSYENSLSSPCGRQCGGIRGARELALFLTPEPGAEAKEVEETIEGMLLRLEEFCSLADLIRSDTSQILEENIPVLKAKLTEMRGIYAKVDRLEKSPAPVPVTYELPTLYRTEDYFPVDAGEAQHHPRTCPRPL

SEQ ID NO: 750981 - protein, 181 aa, Homo sapiens
MRNRSYENLLSSPCGRQCGGIRGARELALFLTPEPGAEAKEVEETIEGMLLRLEEFCSLADLIRSDTSQILEENIPVLKAKLTEMRGIYAKVDRLEAFVKMVGHHVAFLEADVLQAERDHGAFPQALRRWLGSAGLPSFRNKSPAPVPVTYELPTLYRTEDYFPVDAGEAQHHPRTCPRPL

SEQ ID NO: 750982 - protein, 198 aa, Homo sapiens
NHGLPGSLRQPDPVALLMLLVDADQPEPMRSGARELALFLTPEPGAEAKEVEETIEGMLLRLEEFCSLADLIRSDTSQILEENIPVLKAKLTEMRGIYAKVDRLEAFVKMVGHHVAFLEADVLQAERDHGAFPQALRRWLGSAGLPSFRNVECSGTIPARCNLRLPGSSDSPASASQVAGITEVTCTGARDVRAAHTV

SEQ ID NO: 750983 - protein, 181 aa, Homo sapiens; identical to SEQ ID NO: 750981

SEQ ID NO: 750984 - protein, 142 aa, Homo sapiens
MPNSVWISEEKPKAFGRGWRGRWSQRQLPSSLKKKIQFAKGRKSVSRLWPRKCPGTAGEFRSCLVPFRVWESLVRALPPPLGLQRLGDTEPLVGISRSLPASRKPASCPKWWLLLGARSLTDQACPCAAAAAAAAVAAEPPK

SEQ ID NO: 750985 - protein, 264 aa, Homo sapiens
MSENRKPLLGFVSKLTSGTALGNSGKTHCPLCLGLFKAPRLLPCLHTVCTTCLEQLEPFSVVDIRGGDSDTSSEGSIFQELKPRSLQSQIGILCPVCDAQVDLPMGGVKALTIDHLAVNDVMLESLRGEGQGLVCDLCNDREVEKRCQTCKANLCHFCCQAHRRQKKTTYHTMVDLKDLKGYSRIGKPILCPVHPAEELRLFCEFCDRPVCQDCVVGEHREHPCDFTSNVIHKAPARWVNSTCRSTLKTRRLWYNTPHTHSHPW

SEQ ID NO: 750986 - protein, 580 aa, Homo sapiens
MSENRKPLLGFVSKLTSGTALGNSGKTHCPLCLGLFKAPRLLPCLHTVCTTCLEQLEPFSVVDIRGGDSDTSSEGSIFQELKPRSLQSQIGILCPVCDAQVDLPMGGVKALTIDHLAVNDVMLESLRGEGQGLVCDLCNDREVEKRCQTCKANLCHFCCQAHRRQKKTTYHTMVDLKDLKGYSRIGKPILCPVHPAEELRLFCEFCDRPVCQDCVVGEHREHPCDFTSNVIHKHGDSVWELLKGTQPHVEALEEALAQIHIINSALQKRVEAVAADVRTFSEGYIKAIEEHRDKLLKQLEDIRAQKENSLQLQKAQLEQLLADMRTGVEFTEHLLTSGSDLEILITKRVVVERLRKLNKVQYSTRPGVNDKIRFCPQEKAGQCRGYEIYGTINTKEVDPAKCVLQGEDLHRAREKQTASFTLLCKDAAGEIMGRGGDNVQVAVVPKDKKDSPVRTMVQDNKDGTYYISYTPKEPGVYTVWVCIKEQHVQGSPFTVTVRRKHRPHSGVFHCCTFCSSGGQKTARCACGGTMPGGYLGCGHGHKGHPGHPHWSCCGKFNEKSECTWTGGQSAPRSLLRTVAL

SEQ ID NO: 750987 - protein, 351 aa, Homo sapiens
MSENRKPLLGFVSKLTSGTALGNSGKTHCPLCLGLFKAPRLLPCLHTVCTTCLEQLEPFSVVDIRGGDSDTSSEGSIFQELKPRSLQSQIGILCPVCDAQVDLPMGGVKALTIDHLAVNDVMLESLRGEGQGLVCDLCNDREVEKRCQTCKANLCHFCCQAHRRQKKTTYHTMVDLKDLKGYSRIGKPILCPVHPAEELRLFCEFCDRPVCQDCVVGEHREHPCDFTSNVIHKHGDSVWELLKGTQPHVEALEEALAQIHGSPFTVTVRRKHRPHSGVFHCCTFCSSGGQKTARCACGGTMPGGYLGCGHGHKGHPGHPHWSCCGKFNEKSECTWTGGQSAPRSLLRTVAL

SEQ ID NO: 750988 - protein, 283 aa, Homo sapiens
MEAQGVAEGAGPGAASGVPHPAALAPAAAPTLAPASVAAAASQFTLLVMQPCAGQDEAAAPGGSVGAGKPVRYLCEGAGDGEEEAGEDEADLLDTSDPPGGGESAASLEDLEDEETHSGGEGSSGGARRRGSGGGSMSKTCTYEGCSETTSQVAKQRKPWMCKKHRNKMYKDKYKKKKSDQALNCGGTASTGSAGNVKLEESADNILSIVKQRTGSFGDRPARPTLLEQVLNQKIVTKKSRSSAIFTETATAIKSASFGAKTTAVSRNINLRLKLSKRKTLKL

SEQ ID NO: 750989 - protein, 290 aa, Homo sapiens
MEAQGVAEGAGPGAASGVPHPAALAPAAAPTLAPASVAAAASQFTLLVMQPCAGQDEAAAPGGSVGAGKPVRYLCEGAGDGEEEAGEDEADLLDTSDPPGGGESAASLEDLEDEETHSGGEGSSGGARRRGSGGGSMSKTCTYEGCSETTSQVAKQRKPWMCKKHRNKMYKDKYKKKKSDQALNCGGTASTGSAGNVKLEESADNILSIVKQRTGSFGDRPARPTLLEQVLNQKTTAIKSASFGAKTTAVSRNINVRELTKHLHGFYLIVIDEHIFLPDINGVIIYACRT

SEQ ID NO: 750990 - protein, 305 aa, Homo sapiens
MEAQGVAEGAGPGAASGVPHPAALAPAAAPTLAPASVAAAASQFTLLVMQPCAGQDEAAAPGGSVGAGKPVRYLCEGAGDGEEEAGEDEADLLDTSDPPGGGESAASLEDLEDEETHSGGEGSSGGARRRGSGGGSMSKTCTYEGCSETTSQVAKQRKPWMCKKHRNKMYKDKYKKKKSDQALNCGGTASTGSAGNVKLEESADNILSIVKQRTGSFGDRPARPTLLEQVLNQKIVTKKSRSSAIFTETATAIKSASFGAKTTAVSRNINVRELTKHLHGFYLIVIDEHIFLPDINGVIIYACRT

SEQ ID NO: 750991 - protein, 134 aa, Homo sapiens
MTLQELVHKAASCYMDRVAVCFDECNNQLPVYYTYKTVVNAASELSNFLLLHCDFQGIREIGLYCQPGIDLPSWILGILQVPAAYVPIEPDSPPSLSTHFMKKCNLKYILVEKKQINVSLDVSIVFCLYYIYFN

SEQ ID NO: 750992 - protein, 123 aa, Homo sapiens
MKKCNLKYILVEKKQINKFKSFHETLLNYDTFTVEHNDLVLFRLHWKNTEVNLMLNDGKEKYEKEKIKSISSEHVNEEKAEEHMDLRLKHCLAYVLHTSGTTGIPKIVRVPHKCIVPNIQHFR

SEQ ID NO: 750993 - protein, 94 aa, Homo sapiens
MTLQELVHKAASCYMDRVAVCFDECNNQLPVYYTYKTVVNAASELSNFLLLHCDFQGIREIGLYCQPGIDLPSWILGNSPSPGWYCPFEPDIPT

SEQ ID NO: 750994 - protein, 223 aa, Homo sapiens
MTLQELVHKAASCYMDRVAVCFDECNNQLPVYYTYKTVVNAASELSNFLLLHCDFQGIREIGLYCQPGIDLPSWILGILQVPAAYVPIEPDSPPSLSTHFMKKCNLKYILVEKKQINKFKSFHETLLNYDTFTVEHNDLVLFRLHWKNTEVNLMLNDGKEKYEKEKIKSISSEHVNEEKAEEHMDLRLKHCLAYVLHTSGTTGIPKIVRVPHKCIVPNIQHFR

SEQ ID NO: 750995 - protein, 870 aa, Homo sapiens
MDSTKEKCDSYKDDLLLRMGLNDNKAGMEGLDKEKINKIIMEATKGSRFYGNELKKEKQVNQRIENMMQQKAQITSQQLRKAQLQVDRFAMELEQSRNLSNTIVHIDMDAFYAAVEMRDNPELKDKPIAVGSMSMLSTSNYHARRFGVRAAMPGFIAKRLCPQLIIVPPNFDKYRAVSKEVKEILADYDPNFMAMSLDEAYLNITKHLEERQNWPEDKRRYFIKMGSSVENDNPGKEVNKLSEHERSISPLLFEESPSDVQPPGDPFQVNFEEQNNPQILQNSVVFGTSAQEVVKEIRFRIEQKTTLTASAGIAPNTMLAKVCSDKNKPNGQYQILPNRQAVMDFIKDLPIRKVSGIGKVTEKMLKALGIITCTELYQQRALLSLLFSETSWHYFLHISLGLGSTHLTRDGERKSMSVERTFSEINKAEEQYSLCQELCSELAQDLQKERLKGRTVTIKLKNVNFEVKTRASTVSSVVSTAEEIFAIAKELLKTEIDADFPHPLRLRLMGVRISSFPNEEDRKHQQRSIIGFLQAGNQALSATECTLEKTDKDKFVKPLEMSHKKSFFDKKRSERKWSHQDTFKCEAVNKQSFQTSQPFQVLKKKMNENLEISENSDDCQILTCPVCFRAQGCISLEALNKHVDECLDGPSISENFKMFSCSHVSATKVNKKENVPASSLCEKQDYEAHPKIKEISSVDCIALVDTIDNSSKAESIDALSNKHSKEECSSLPSKSFNIEHCHQNSSSTVSLENEDVGSFRQEYRQPYLCEVKTGQALVCPVCNVEQKTSDLTLFNVHVDVCLNKSFIQELRKDKFNPVNQPKESSRSTGSSSGVQKAVTRTKRPGLMTKYSTSKKIKPNNPKHTLDIFFK

SEQ ID NO: 750996 - protein, 154 aa, Homo sapiens
MELEQSRNLSNTIVHIDMDAFYAAVEMRDNPELKDKPIAVGSMSMLSTSNYHARRFGVRAAMPGFIAKRLCPQLIIVPPNFDKYRAVSKEVKEILADYDPNFMAMSLDEAYLNITKHLEERQNWPEDKRRYFIKMGSSVENGKQLIKTIKPRSS

SEQ ID NO: 750997 - protein, 424 aa, Homo sapiens [sequence omitted]

SEQ ID NO: 750998 - protein, 870 aa, Homo sapiens; identical to SEQ ID NO: 750995

SEQ ID NO: 750999 - protein, 780 aa, Homo sapiens
MELEQSRNLSNTIVHIDMDAFYAAVEMRDNPELKDKPIAVGSMSMLSTSNYHARRFGVRAAMPGFIAKRLCPQLIIVPPNFDKYRAVSKEVKEILADYDPNFMAMSLDEAYLNITKHLEERQNWPEDKRRYFIKMGSSVENDNPGKEVNKLSEHERSISPLLFEESPSDVQPPGDPFQVNFEEQNNPQILQNSVVFGTSAQEVVKEIRFRIEQKTTLTASAGIAPNTMLAKVCSDKNKPNGQYQILPNRQAVMDFIKDLPIRKVSGIGKVTEKMLKALGIITCTELYQQRALLSLLFSETSWHYFLHISLGLGSTHLTRDGERKSMSVERTFSEINKAEEQYSLCQELCSELAQDLQKERLKGRTVTIKLKNVNFEVKTRASTVSSVVSTAEEIFAIAKELLKTEIDADFPHPLRLRLMGVRISSFPNEEDRKHQQRSIIGFLQAGNQALSATECTLEKTDKDKFVKPLEMSHKKSFFDKKRSERKWSHQDTFKCEAVNKQSFQTSQPFQVLKKKMNENLEISENSDDCQILTCPVCFRAQGCISLEALNKHVDECLDGPSISENFKMFSCSHVSATKVNKKENVPASSLCEKQDYEAHPKIKEISSVDCIALVDTIDNSSKAESIDALSNKHSKEECSSLPSKSFNIEHCHQNSSSTVSLENEDVGSFRQEYRQPYLCEVKTGQALVCPVCNVEQKTSDLTLFNVHVDVCLNKSFIQELRKDKFNPVNQPKESSRSTGSSSGVQKAVTRTKRPGLMTKYSTSKKIKPNNPKHTLDIFFK

SEQ ID NO: 751000 - protein, 759 aa, Homo sapiens
MDSTKEKCDSYKDDLLLRMGLNDNKAGMEGLDKEKINKIIMEATKGSRFYGNELKKEKQVNQRIENMMQQKAQITSQQLRKAQLQVDRFAMELEQSRNLSNTIVHIDMDAFYAAVEMRDNPELKDKPIAVGSMSMLSTSNYHARRFGVRAAMPGFIAKRLCPQLIIVPPNFDKYRAVSKEVKEILADYDPNFMAMSLDEAYLNITKHLEERQNWPEDKRRYFIKMGSSVENDNPGKEVNKLSEHERSISPLLFEESPSDVQPPGDPFQVNFEEQNNPQILQNSVVFGTSAQEVVKEIRFRIEQKTTLTASAGIAPNTMLAKVCSDKNKPNGQYQILPNRQAVMDFIKDLPIRKVSGIGKVTEKMLKALGIITCTELYQQRALLSLLFSETSWHYFLHISLGLGSTHLTRDGERKSMSVERTFSEINKAEEQYSLCQELCSELAQDLQKERLKGRTVTIKLKNVNFEVKTRASTVSSVVSTAEEIFAIAKELLKTEIDADFPHPLRLRLMGVRISSFPNEEDRKHQQRSIIGFLQAGNQALSATECTLEKTDKDKFVKPLEMSHKKSFFDKKRSERKWSHQDTFKCEAVNKQSFQTSQPFQVLKKKMNENLEISENSDDCQILTCPVCFRAQGCISLEALNKHVDECLDGPSISENFKMFSCSHVSATKVNKKENVPASSLCEKQDYEAHPKIKEISSVDCIALVDTIDNSSKAESIDALSNKHSKEECSSLPSKSFNIEHCHQNSSSTVSLENEDVGII

SEQ ID NO: 751001 - protein, 462 aa, Homo sapiens
MDSTKEKCDSYKDDLLLRMGLNDNKAGMEGLDKEKINKIIMEATKGSRFYGNELKKEKQVNQRIENMMQQKAQITSQQLRKAQLQVDRFAMELEQSRNLSNTIVHIDMDAFYAAVEMRDNPELKDKPIAVGSMSMLSTSNYHARRFGVRAAMPGFIAKRLCPQLIIVPPNFDKYRAVSKEVKEILADYDPNFMAMSLDEAYLNITKHLEERQNWPEDKRRYFIKMGSSVENDNPGKEVNKLSEHERSISPLLFEESPSDVQPPGDPFQVNFEEQNNPQILQNSVVFGTSAQEVVKEIRFRIEQKTTLTASAGIAPNTMLAKVCSDKNKPNGQYQILPNRQAVMDFIKDLPIRKVSGIGKVTEKMLKALGIITCTELYQQRALLSLLFSETSWHYFLHISLGLGSTHLTRDGERKSMSVERTFSEINKAEEQYSLCQELCSELAQDLQKERLKKKYLPLLRNC

SEQ ID NO: 751002 - protein, 845 aa, Homo sapiens
MDSTKEKCDSYKDDLLLRMGLNDNKAGMEGLDKEKINKIIMEATKGSRFYGNELKKEKQVNQRIENMMQQKAQITSQQLRKAQLQVDRFAMELEQSRNLSNTIVHIDMDAFYAAVEMRDNPELKDKPIAVGSMSMLSTSNYHARRFGVRAAMPGFIAKRLCPQLIIVPPNFDKYRAVSKEVKEILADYDPNFMAMSLDEAYLNITKHLEERQNWPEDKRRYFIKMGSSVENDNPGKEVNKLSEHERSISPLLFEESPSDVQPPGDPFQVNFEEQNNPQILQNSVVFGTSAQEVVKEIRFRIEQKTTLTASAGIAPNTMLAKVCSDKNKPNGQYQILPNRQAVMDFIKDLPIRKVSGIGKVTEKMLKALGIITCTELYQQRALLSLLFSETSWHYFLHISLGLGSTHLTRDGERKSMSVERTFSEINKAEEQYSLCQELCSELAQDLQKERLKGRTVTIKLKNVNFEVKTRASTVSSVVSTAEEIFAIAKELLKTEIDADFPHPLRLRLMGVRISSFPNEEDRKHQQRSIIGFLQAGNQALSATECTLEKTDKDKFVKPLEMSHKKSFFDKKRSERKWSHQDTFKCEAVNKQSFQTSQPFQVLKKKMNENLEISENSDDCQILTCPVCFRAQGCISLEALNKHVDECLDGPSISENFKMFSCSHVSATKVNKKENVPASSLCEKQDYEAHPKIKEISSVDCIALVDTIDNSSKAESIDALSNKHSKEECSSLPSKSFNIEHCHQNSSSTVSLENEDVGSFRQEYRQPYLCEVKTGQALVCPVCNVEQKTSDLTLFNVHVDVCLNKSFIQELRKDKFNPVNQPKESSRSTGSSSGVQKAVTRTKRYG

SEQ ID NO: 751003 - protein, 575 aa, Homo sapiens
MDSTKEKCDSYKDDLLLRMGLNDNKAGMEGLDKEKINKIIMEATKGSRFYGNELKKEKQVNQRIENMMQQKAQITSQQLRKAQLQVDRFAMELEQSRNLSNTIVHIDMDAFYAAVEMRDNPELKDKPIAVGSMSMLSTSNYHARRFGVRAAMPGFIAKRLCPQLIIVPPNFDKYRAVSKEVKEILADYDPNFMAMSLDEAYLNITKHLEERQNWPEDKRRYFIKMGSSVENDNPGKEVNKLSEHERSISPLLFEESPSDVQPPGDPFQVNFEEQNNPQILQNSVVFGTSAQEVVKEIRFRIEQKTTLTASAGIAPNTMLAKVCSDKNKPNGQYQILPNRQAVMDFIKDLPIRKVSGIGKVTEKMLKALGIITCTELYQQRALLSLLFSETSWHYFLHISLGLGSTHLTRDGERKSMSVERTFSEINKAEEQYSLCQELCSELAQDLQKERLKGRTVTIKLKNVNFEVKTRASTVSSVVSTAEEIFAIAKELLKTEIDADFPHPLRLRLMGSDIWFPNERAGTQQGAYWVLRRKQAVALVFKKRADIGNSKGLKVRKHARGSQNRRRTKTEKPLPD

SEQ ID NO: 751004 - protein, 313 aa, Homo sapiens
MDSTKEKCDSYKDDLLLRMGLNDNKAGMEGLDKEKINKIIMEATKGSRFYGNELKKEKQVNQRIENMMQQKAQITSQQLRKAQLQVDRFAMELEQSRNLSNTIVHIDMDAFYAAVEMRDNPELKDKPIAVGSMSMLSTSNYHARRFGVRAAMPGFIAKRLCPQLIIVPPNFDKYRAVSKEVKEILADYDPNFMAMSLDEAYLNITKHLEERQNWPEDKRRYFIKMGSSVENDNPGKEVNKLSEHERSISPLLFEESPSDVQPPGDPFQVNFEEQNNPQILQNSVVFGTSAQEVVKEIRFRIEQKTTLTASAGI

SEQ ID NO: 751005 - protein, 546 aa, Homo sapiens
QAEEHLAAYSVSDSDSGKDPSMECCRRATPGTLLLFLAFLLLSSRTARSEEDRDGLWDAWGPWSECSRTCGGGASYSLRRCLSSKSCEGRNIRYRTCSNVDCPPEAGDFRAQQCSAHNDVKHHGQFYEWLPVSNDPDNPCSLKCQAKGTTLVVELAPKVLDGTRCYTESLDMCISGLCQIVGCDHQLGSTVKEDNCGVCNGDGSTCRLVRGQYKSQLSATKSDDTVVAIPYGSRHIRLVLKGPDHLYLETKTLQGTKGENSLSSTGTFLVDNSSVDFQKFPDKEILRMAGPLTADFIVKIRNSGSADSTVQFIFYQPIIHRWRETDFFPCSATCGGGYQLTSAECYDLRSNRVVADQYCHYYPENIKPKPKLQECNLDPCPASDGYKQIMPYDLYHPLPRWEATPWTACSSSCGGGIQSRAVSCVEEDIQGHVTSVEEWKCMYTPKMPIAQPCNIFDCPKWLAQEWSPCTVTCGQGLRYRVVLCIDHRGMHTGGCSPKTKPHIKEECIVPTPCYKPKEKLPVEAKLPWFKQAQELEEGAAVSEEPS

SEQ ID NO: 751006 - protein, 704 aa, Homo sapiens
QAEEHLAAYSVSDSDSGKDPSMECCRRATPGTLLLFLAFLLLSSRTARSEEDRDGLWDAWGPWSECSRTCGGGASYSLRRCLSSKSCEGRNIRYRTCSNVDCPPEAGDFRAQQCSAHNDVKHHGQFYEWLPVSNDPDNPCSLKCQAKGTTLVVELAPKVLDGTRCYTESLDMCISGLCQIVGCDHQLGSTVKEDNCGVCNGDGSTCRLVRGQYKSQLSATKSDDTVVAIPYGSRHIRLVLKGPDHLYLETKTLQGTKGENSLSSTGTFLVDNSSVDFQKFPDKEILRMAGPLTADFIVKIRNSGSADSTVQFIFYQPIIHRWRETDFFPCSATCGGGYQLTSAECYDLRSNRVVADQYCHYYPENIKPKPKLQECNLDPCPASDGYKQIMPYDLYHPLPRWEATPWTACSSSCGGGIQSRAVSCVEEDIQGHVTSVEEWKCMYTPKMPIAQPCNIFDCPKWLAQEWSPCTVTCGQGLRYRVVLCIDHRGMHTGGCSPKTKPHIKEECIVPTPCYKPKEKLPVEAKLPWFKQAQELEEGAAVSEEPSFIPEAWSACTVTCGVGTQVRIVRCQVLLSFSQSVADLPIDECEGPKPASQRACYAGPCSGEIPEFNPDETDGLFGGLQDFDELYDWEYEGFTKCSESCGGGVQEAVVSCLNKQTREPAEENLCVTSRRPPQLLKSCNLDPCPARSSIDSAWNACNVLC

SEQ ID NO: 751007 - protein, 206 aa, Homo sapiens
QAEEHLAAYSVSDSDSGKDPSMECCRRATPGTLLLFLAFLLLSSRTARSEEDRDGLWDAWGPWSECSRTCGGGASYSLRRCLSSKSCEGRNIRYRTCSNVDCPPEAGDFRAQQCSAHNDVKHHGQFYEWLPVSNDPDNPCSLKCQAKGTTLVVELAPKVLDGTRCYTESLDMCISGLCQVSADLFSFNLSRGFQCLCVNGLHSLTL

SEQ ID NO: 751008 - protein, 80 aa, Homo sapiens
MQRQQHNNSRNMKNQENMTPPEEHNHFPITNSPKMEIYKLVYNEFRTIMLRKLSKLKGTPIDYSVKSGKQFMNKTRNSKK

SEQ ID NO: 751009 - protein, 107 aa, Homo sapiens
MSDSLVVCEVDPELTEKLRKFRFRKETDNAAIIMKVDKDRQMVVLEEEFQNISPEELKMELPERQPRFVVYSYKYVHDDGRVSYPLCFIFSSPVVQKPGTTDDVCRE

SEQ ID NO: 751010 - protein, 164 aa, Homo sapiens
GIFGFGSEAWVAEKKRRVDRTIMSDSLVVCEVDPELTEKLRKFRFRKETDNAAIIMKVDKDRQMVVLEEEFQNISPEELKMELPERQPRFVVYSYKYVHDDGRVSYPLCFIFSSPVVQSREQQMMYAGSKNRLVQTAELTKVFEIRTTDDLTEAWLQEKLSFFR

SEQ ID NO: 751011 - protein, 97 aa, Homo sapiens
GIFGFGSEAWVAEKKRRVDRTIMSDSLVVCEVDPELTEKLRKFRFRKETDNAAIIMKVDKDRQMVVLEEEFQNISPEELKMELPERQPRCAKAGNNR

SEQ ID NO: 751012 - protein, 302 aa, Homo sapiens
MLVIKKGNTKDLQLSGFPVVGNLPSQPVKNGTGPSVYKGLVPKPAAPPTKPTQWKSQTKENKVGTSFPHESTFGVGNFNAFKSTAKNFSPSTNSVKECNRSNSSSPVDKLNQQPRLTKLTRMRTDKKSEFLKALKRDRVEEEHEDESRAGSEKDDDSFNLHNSNSTHQERDINRNFDENEIPQENGNASVISQQIIRSSTFPQTDVLSSSLEAEHRLLKEMGWQEDSENDETCAPLTEDEMREFQVISEQLQKNGLRKNGILKNGLICDFKFGPWKNSTFKPTTENDDTETSSSDTSDDDDV

SEQ ID NO: 751013 - protein, 473 aa, Homo sapiens
MAQHDFAPAWLNFPTPPSSTKSSLNFEKHSENFAWTENRYDVNRRRHNSSDGFDSAIGRPNGGNFGRKEKNGWRTHGRNGTENINHRGGYHGGSSRSRSSIFHAGKSQGLHENNIPDNETGRKEDKRERKQFEAEDFPSLNPEYEREPNHNKSLAAGVWEYPPNPKSRAPRMLVIKKGNTKDLQLSGFPVVGNLPSQPVKNGTGPSVYKGLVPKPAAPPTKPTQWKSQTKENKVGTSFPHESTFGVGNFNAFKSTAKNFSPSTNSVKECNRSNSSSPVDKLNQQPRLTKLTRMRTDKKSEFLKALKRDRVEEEHEDESRAGSEKDDDSFNLHNSNSTHQERDINRNFDENEIPQENGNASVISQQIIRSSTFPQTDVLSSSLEAEHRLLKEMGWQEDSENDETCAPLTEDEMREFQVISEQLQKNGLRKNGILKNGLICDFKFGPWKNSTFKPTTENDDTETSSSDTSDDDDV

SEQ ID NO: 751014 - protein, 473 aa, Homo sapiens; identical to SEQ ID NO: 751013

SEQ ID NO: 751015 - protein, 473 aa, Homo sapiens; identical to SEQ ID NO: 751013

SEQ ID NO: 751016 - protein, 473 aa, Homo sapiens; identical to SEQ ID NO: 751013

SEQ ID NO: 751017 - protein, 458 aa, Homo sapiens
MAQHDFAPAWLNFPTPPSSTKSSLNFEKHSENFAWTENRYDVNRRRHNSSDGFDSAIGRPNGGNFGRKEKNGWRTHGRNGTENINHRGGYHGGSSRSRSSIFHAGKSQGLHENNIPDNETGRKEDKRERKQFEAEDFPSLNPEYEREPNHNKSLAAGVWEYPPNPKSRAPRMLVIKKGNTKDLQLSGFPVVGNLPSQPVKNGTGPSVYKGLVPKPAAPPTKPTQWKSQTKENKVGTSFPHESTFGVGNFNAFKSTAKNFSPSTNSVKEQPRLTKLTRMRTDKKSEFLKALKRDRVEEEHEDESRAGSEKDDDSFNLHNSNSTHQERDINRNFDENEIPQENGNASVISQQIIRSSTFPQTDVLSSSLEAEHRLLKEMGWQEDSENDETCAPLTEDEMREFQVISEQLQKNGLRKNGILKNGLICDFKFGPWKNSTFKPTTENDDTETSSSDTSDDDDV

SEQ ID NO: 751018 - protein, 473 aa, Homo sapiens; identical to SEQ ID NO: 751013

SEQ ID NO: 751019 - protein, 473 aa, Homo sapiens; identical to SEQ ID NO: 751013

SEQ ID NO: 751020 - protein, 302 aa, Homo sapiens; identical to SEQ ID NO: 751012

SEQ ID NO: 751021 - protein, 367 aa, Homo sapiens
QFDGDSHTQDFPSLNPEYEREPNHNKSLAAGVWGLHAQTHTYPTKKISQAPLLEYPPNPKSRAPRMLVIKKGNTKDLQLSGFPVVGNLPSQPVKNGTGPSVYKGLVPKPAAPPTKPTQWKSQTKENKVGTSFPHESTFGVGNFNAFKSTAKNFSPSTNSVKECNRSNSSSPVDKLNQQPRLTKLTRMRTDKKSEFLKALKRDRVEEEHEDESRAGSEKDDDSFNLHNSNSTHQERDINRNFDENEIPQENGNASVISQQIIRSSTFPQTDVLSSSLEAEHRLLKEMGWQEDSENDETCAPLTEDEMREFQVISEQLQKNGLRKNGILKNGLICDFKFGPWKNSTFKPTTENDDTETSSSDTSDDDDV

SEQ ID NO: 751022 - protein, 351 aa, Homo sapiens
  misc_feature (8)..(10): Xaa can be any naturally occurring amino acid
  misc_feature (12)..(12): Xaa can be any naturally occurring amino acid
SSVILWQXXXFXAAGVWGLHAQTHTYPTKKISQAPLLEYPPNPKSRAPRMLVIKKGNTKDLQLSGFPVVGNLPSQPVKNGTGPSVYKGLVPKPAAPPTKPTQWKSQTKENKVGTSFPHESTFGVGNFNAFKSTAKNFSPSTNSVKECNRSNSSSPVDKLNQQPRLTKLTRMRTDKKSEFLKALKRDRVEEEHEDESRAGSEKDDDSFNLHNSNSTHQERDINRNFDENEIPQENGNASVISQQIIRSSTFPQTDVLSSSLEAEHRLLKEMGWQEDSENDETCAPLTEDEMREFQVISEQLQKNGLRKNGILKNGLICDFKFGPWKNSTFKPTTENDDTETSSSDTSDDDDV

SEQ ID NO: 751023 - protein, 267 aa, Homo sapiens
FFKPAATAAQSTLEIPTQWKSQTKENKVGTSFPHESTFGVGNFNAFKSTAKNFSPSTNSVKECNRSNSSSPVDKLNQQPRLTKLTRMRTDKKSEFLKALKRDRVEEEHEDESRAGSEKDDDSFNLHNSNSTHQERDINRNFDENEIPQENGNASVISQQIIRSSTFPQTDVLSSSLEAEHRLLKEMGWQEDSENDETCAPLTEDEMREFQVISEQLQKNGLRKNGILKNGLICDFKFGPWKNSTFKPTTENDDTETSSSDTSDDDDV

SEQ ID NO: 751024 - protein, 181 aa, Homo sapiens [sequence omitted]

SEQ ID NO: 751025 - protein, 493 aa, Homo sapiens
MAQHDFAPAWLNFPTPPSSTKSSLNFEKHSENFAWTENRYDVNRRRHNSSDGFDSAIGRPNGGNFGRKEKNGWRTHGRNGTENINHRGGYHGGSSRSRSSIFHAGKSQGLHENNIPDNETGRKEDKRERKQFEAEDFPSLNPEYEREPNHNKSLAAGVWGLHAQTHTYPTKKISQAPLLEYPPNPKSRAPRMLVIKKGNTKDLQLSGFPVVGNLPSQPVKNGTGPSVYKGLVPKPAAPPTKPTQWKSQTKENKVGTSFPHESTFGVGNFNAFKSTAKNFSPSTNSVKECNRSNSSSPVDKLNQQPRLTKLTRMRTDKKSEFLKALKRDRVEEEHEDESRAGSEKDDDSFNLHNSNSTHQERDINRNFDENEIPQENGNASVISQQIIRSSTFPQTDVLSSSLEAEHRLLKEMGWQEDSENDETCAPLTEDEMREFQVISEQLQKNGLRKNGILKNGLICDFKFGPWKNSTFKPTTENDDTETSSSDTSDDDDV

SEQ ID NO: 751026 - protein, 473 aa, Homo sapiens; identical to SEQ ID NO: 751013

SEQ ID NO: 751027 - protein, 473 aa, Homo sapiens; identical to SEQ ID NO: 751013

SEQ ID NO: 751028 - protein, 335 aa, Homo sapiens
MAQHDFAPAWLNFPTPPSSTKSSLNFEKHSENFAWTENRYDVNRRRHNSSDGFDSAIGRPNGGNFGRKEKNGWRTHGRNGTENINHRGGYHGGSSRSRSSIFHAGKSQGLHENNIPDNETGRKEDKRERKQFEAEDFPSLNPEYEREPNHNKSLAAGVWEYPPNPKSRAPRMLVIKKGNTKDLQLSGFPVVGNLPSQPVKNGTGPSVYKGLVPKPAAPPTKPTQWKSQTKENKVGTSFPHESTFGVGNFNAFKSTAKNFSPSTNSVKECNRSNSSSPVDKLNQQPRLTKLTRMRTDKKSEFLKALKRDRVEEEHEDESRAGSEKIVKGNGLAGRQ

SEQ ID NO: 751029 - protein, 379 aa, Homo sapiens
MILRLVLNDLFLKCEMFIPTFFQPSLNPEYEREPNHNKSLAAGVWGLHAQTHTYPTKKISQAPLLEYPPNPKSRAPRMLVIKKGNTKDLQLSGFPVVGNLPSQPVKNGTGPSVYKGLVPKPAAPPTKPTQWKSQTKENKVGTSFPHESTFGVGNFNAFKSTAKNFSPSTNSVKECNRSNSSSPVDKLNQQPRLTKLTRMRTDKKSEFLKALKRDRVEEEHEDESRAGSEKDDDSFNLHNSNSTHQERDINRNFDENEIPQENGNASVISQQIIRSSTFPQTDVLSSSLEAEHRLLKEMGWQEDSENDETCAPLTEDEMREFQVISEQLQKNGLRKNGILKNGLICDFKFGPWKNSTFKPTTENDDTETSSSDTSDDDDV

SEQ ID NO: 751030 - protein, 427 aa, Homo sapiens
MAQHDFAPAWLNFPTPPSSTKSSLNFEKHSENFAWTENRYDVNRRRHNSSDGFDSAIGRPNGGNFGRKEKNGWRTHGRNGTENINHRGGYHGGSSRSRSSIFHAGKSQGLHENNIPDNETGRKEDKRERKQFEAEDFPSLNPEYEREPNHNKSLAAGVWEYPPNPKSRAPRMLVIKKGNTKDLQLSGFPVVGNLPSQPVKNGTGPSVYKGLVPKPAAPPTKPTQWKSQTKENKVGTSFPHESTFGVGNFNAFKSTAKNFSPSTNSVKECNRSNSSSPVDKLNQQPRLTKLTRMRTDKKSEFLKALKRDRVEEEHEDESRAGSEKDDDSFNLHNSNSTHQERDINRNFDENEIPQENGNASVISQQIIRSSTFPQTDVLSSSLEAEHRLLKEMGWQEDSENDETCAPLTEDEMREFQVISEQVREPES

SEQ ID NO: 751031 - protein, 78 aa, Homo sapiens
PLCTISRDLAQNIADRVGAILGLRLVVGEGKAAKGDYSKYRKPSPGIRRGGTPRPGAPLVGQKVIELLRYEDHHLGFV

SEQ ID NO: 751032 - protein, 185 aa, Homo sapiens
MQILECVPSVHISLSRRNEDIFHQPHEDESRAGSEKDDDSFNLHNSNSTHQERDINRNFDENEIPQENGNASVISQQIIRSSTFPQTDVLSSSLEAEHRLLKEMGWQEDSENDETCAPLTEDEMREFQVISEQLQKNGLRKNGILKNGLICDFKFGPWKNSTFKPTTENDDTETSSSDTSDDDDV

SEQ ID NO: 751033 - protein, 142 aa, Homo sapiens
MHPGPEEAGSGRYGPRYITDMGAGEDDEGFEDDLDLDISFEEVKPLPATKGGNKKFLVESKKMSISNPKTISRLIPPTSASLPVTTVAPQPIPIQRKGKNGVAIMSRLFDMPCDETLCSADSFCVNDYTWGGSRCQCTLGKG

SEQ ID NO: 751034 - protein, 152 aa, Homo sapiens
MRFKTTAKDGLLLWRGDSPMRPNSDFISLGLRDGALVFSYNLGSGVASIMVNGSFNDGRWHRVKAVRDGQSGKITVDDYGARTGKSPGMMRQLNINGALYVGGMKEIALHTNRQYMRGLVGCISHFTLSTDYHISLVEDAVDGKNINTCGAK

SEQ ID NO: 751035 - protein, 202 aa, Homo sapiens
RTTYYVTSFFCSVPAIIEAIEIPQFIGRSYLTYDNPDILKRVSGSRSNVFMRFKTTAKDGLLLWRGDSPMRPNSDFISLGLRDGALVFSYNLGSGVASIMVNGSFNDGRWHRVKAVRDGQSGKITVDDYGARTGKSPGMMRQLNINGALYVGGMKEIALHTNRQYMRGLVGCISHFTLSTDYHISLVEDAVDGKNINTCGAK

SEQ ID NO: 751036 - protein, 148 aa, Homo sapiens
MRFKTTAKDGLLLWRGDSPMRPNSDFISLGLRDGALVFSYNLGSGVASIMVNGSFNDGRWHRVKAVRDGQSGKITVDDYGARTGKSPGMMRQLNINGALYVGGMKEIALHTNRQYMRGLVGCISHFTLSTDYHISLVEDAVDGKSLLF

SEQ ID NO: 751037 - protein, 164 aa, Homo sapiens
MLYRDGLNGLLQLNNGTPVTGQSQGQYSKITFRTPLYLGGAPSAYWLVRATGTNRGFQGCVQSLAVNGRRIDMRPLRPCLMLYAEAQGPGVFPLTKKKVHTDEKLRTKTGIPGWPFLLTLHELTQQNSLCRKHRTLSIEYVAAARDHTSMQIPEPVCYSSVTVL

SEQ ID NO: 751038 - protein, 152 aa, Homo sapiens; identical to SEQ ID NO: 751034

SEQ ID NO: 751039 - protein, 135 aa, Homo sapiens
MLYRDGLNGLLQLNNGTPVTGQSQGQYSKITFRTPLYLGGAPSAYWLVRATGTNRGFQGCVQSLAVNGRRIDMRPWPLGKALSGADVGECSSGICDEASCIHGGTCTAIKADSYICLCPLGFKGRHCEDGEKEAS

SEQ ID NO: 751040 - protein, 336 aa, Homo sapiens
MLYRDGLNGLLQLNNGTPVTGQSQGQYSKITFRTPLYLGGAPSAYWLVRATGTNRGFQGCVQSLAVNGRRIDMRPWPLGKALSGADVGECSSGICDEASCIHGGTCTAIKADSYICLCPLGFKGRHCEDAFTLTIPQFRESLRSYAATPWPLEPQHYLSFMEFEITFRPDSGDGVLLYSYDTGSKDFLSINLAGGHVEFRFDCGSGTGVLRSEDPLTLGNWHELRVSRTAKNGILQVDKQKIVEGMARREASHQIKWQHPTLLHWRESPTTDDGARTTRVSESLEGAPETYLMTRPPVDDFTPAEVGSAPPVSFALWHLPEQTHMDPHRPQHELQN

SEQ ID NO: 751041 - protein, 273 aa, Homo sapiens
MLYRDGLNGLLQLNNGTPVTGQSQGNAAVESVMRPRASMVAPAQQSKPTPTFASVPLGLKVDTVKMLFTLTIPQFRESLRSYAATPWPLEPQHYLSFMEFEITFRPDSGDGVLLYSYDTGSKDFLSINLAGGHVEFRFDCGSGTGVLRSEDPLTLGNWHELRVSRTAKNGILQVDKQKIVEGMARREASHQIKWQHPTLLHWRESPTTDDGARTTRVSESLEGAPETYLMTRPPVDDFTPAEVGSAPPVSFALWHLPEQTHMDPHRPQHELQN

SEQ ID NO: 751042 - protein, 102 aa, Homo sapiens
TSKNVHSVNAEQMKGKVPLKLPHCGLEEAKISAQLPYHREPYSSLPRPSQENHFFWADVVFCHGAYVLTEILLLLSWVLQNSQQAILVTYLLVARQEILVKC

SEQ ID NO: 751043 - protein, 68 aa, Homo sapiens
LSFISRGHWRDTAGGKSYAAWFQYVHSIDSCKNTASPTPSSYRTGSFCSVWFLQHGVLQHRPYAVHGS

SEQ ID NO: 751044 - protein, 75 aa, Homo sapiens
MKGETPVNSTMSIGQARKMVEQLKIEASLCRIKVSKAAADLMTYCDAHACEDPLITPVPTSENPFREKKFFCALL

SEQ ID NO: 751045 - protein, 75 aa, Homo sapiens; identical to SEQ ID NO: 751044

SEQ ID NO: 751046 - protein, 793 aa, Homo sapiens
QELKRMGIELLCLFFLFLGRNDHVQGGCALGGAETCEDCLLIGPQCAWCAQENFTHPSGVGERCDTPANLLAKGCQLNFIENPVSQVEILKNKPLSVGRQKNSSDIVQIAPQSLILKLRPGGAQTLQVHVRQTEDYPVDLYYLMDLSASMDDDLNTIKELGSRLSKEMSKLTSNFRLGFGSFVEKPVSPFVKTTPEEIANPCSSIPYFCLPTFGFKHILPLTNDAERFNEIVKNQKISANIDTPEGGFDAIMQAAVCKEKIGWRNDSLHLLVFVSDADSHFGMDSKLAGIVIPNDGLCHLDSKNEYSMSTVLEYPTIGQLIDKLVQNNVLLIFAVTQEQVHLYENYAKLIPGATVGLLQKDSGNILQLIISAYEELRSEVELEVLGDTEGLNLSFTAICNNGTLFQHQKKCSHMKVGDTASFSVTVNIPHCERRSRHIIIKPVGLGDALELLVSPECNCDCQKEVEVNSSKCHHGNGSFQCGVCACHPGHMGPRCECGEDMLSTDSCKEAPDHPSCSGRGDCYCGQCICHLSPYGNIYGPYCQCDNFSCVRHKGLLCGGNGDCDCGECVCRSGWTGEYCNCTTSTDSCVSEDGVLCSGRGDCVCGKCVCTNPGASGPTCERCPTCGDPCNSKRSCIECHLSAAGQAREECVDKCKLAGATISEEEDFSKDGSVSCSLQGENECLITFLITTDNEGKTIIHSINEKDCPKPPNIPMIMLGVSLAILLIGVVLLCIWKLLVSFHDRKEVAKFEAERSKAKWQTGTNPLYRGSTSTFKNVTYKHREKQKVDLSTDC

SEQ ID NO: 751047 - protein, 793 aa, Homo sapiens; identical to SEQ ID NO: 751046

SEQ ID NO: 751048 - protein, 793 aa, Homo sapiens; identical to SEQ ID NO: 751046

SEQ ID NO: 751049 - protein, 802 aa, Homo sapiens
MDCGPPATLQPHLTGPPGTAHHPVAVCQQESLSFAELPALKPPSPVCLDLFPVAPEELRAPGSRWSLGTPAPLQGLLWPLSPGGSDTEITSGGMRPSRAGSWPHCPGAQPPALEGPWSPRHTQPQRRASHGSEKKSAWRKMRVYQREEVPGCPEAHAVFLEPGQVVQEQALSTEEPRVELSGSTRVSLEGPERRRFSASELMTRLHSSLRLGRNSAARALISGSGTGAAREGKASGMEARSVEMSGDRVSRPAPGDSREGDWSEPRLDTQEEPPLGSRSTNERRQSRFLLNSVLYQEYSDVASARELRRQQREEEGPGDEAEGAEEGPGPPRANLSPSSSFRAQRSARGSTFSLWQDIPDVRGSGVLATLSLRDCKLQEAKFELITSEASYIHSLSVAVGHFLGSAELSECLGAQDKQWLFSKLPEVKSTSERFLQDLEQRLEADVLRFSVCDVVLDHCPAFRRVYLPYVTNQAYQERTYQRLLLENPRFPGILARLEESPVCQRLPLTSFLILPFQRITRLKMLVENILKRTAQGSEDEDMATKAFNALKELVQECNASVQSMKRTEELIHLSKKIHFEGKIFPLISQARWLVRHGELVELAPLPAAPPAKLKLSSKAVYLHLFNDCLLLSRRKELGKFAVFVHAKMAELQVRDLSLKLQGIPGHVFLLQLLHGQHMKHQFLLRARTESEKQRWISALCPSSPQEDKEVISEGEDCPQVQCVRTYKALHPDELTLEKTDILSVRTWTSDGWLEGVRLADGEKGWVPQAYVEEISSLSARLRNLRENKRVTSATSKLGEAPV

SEQ ID NO: 751050 - protein, 802 aa, Homo sapiens; identical to SEQ ID NO: 751049

SEQ ID NO: 751051 - protein, 802 aa, Homo sapiens; identical to SEQ ID NO: 751049

SEQ ID NO: 751052 - protein, 790 aa, Homo sapiens
MDCGPPATLQPHLTGPPGTAHHPVAVCQQESLSFAELPALKPPSPVCLDLFPVAPEELRAPGSRWSLGTPAPLQGLLWPLSPGGSDTEITSGGMRPSRAGSWPHCPGAQPPALEGPWSPRHTQPQRRASHGSEKKSAWRKMRVYQREEVPGCPEAHAVFLEPGQVVQEQALSTEEPRVELSGSTRVSLEGPERRRFSASELMTRLHSSLRLGRNSAARALISGSGTGAAREGKASGMEARSVEMSGDRVSRPAPGDSREGDWSEPRLDTQEEPPLGSRSTNERRQSRFLLNSVLYQEYSDVASARELRRQQREEEGPGDEAEGAEEGPGPPRANLSPSSSFRAQRSARGSTFSLWQDIPDVRGSGVLATLSLRDCKLQEAKFELITSEASYIHSLSVAVGHFLGSAELSECLGAQDKQWLFSKLPEVKSTSERFLQDLEQRLEADVLRFSVCDVVLDHCPAFRRVYLPYVTNQAYQERTYQRLLLENPRFPGILARLEESPVCQRLPLTSFLILPFQRITRLKMLVENILKRTAQGSEDEDMATKAFNALKELVQECNASVQSMKRTEELIHLSKKIHFEGKIFPLISQARWLVRHGELVELAPLPAAPPAKLKLSSKAVYLHLFNDCLLLSRRKELGKFAVFVHAKMAELQVRDLSLKLQGIPGHVFLLQLLHGQHMKHQFLLRARTESEKQRWISALCPSSPQEDKEVISEGEDCPQVQCVRTYKALHPDELTLEKTDILSVRTWTSDGWLEGVRLADGEKGWVPQAYVEEISSLSARSSVSTLQGQG

SEQ ID NO: 751053 - protein, 791 aa, Homo sapiens
MDCGPPATLQPHLTGPPGTAHHPVAVCQQESLSFAELPALKPPSPVCLDLFPVAPEELRAPGSRWSLGTPAPLQGLLWPLSPGGSDTEITSGGMRPSRAGSWPHCPGAQPPALEGPWSPRHTQPQRRASHGSEKKSAWRKMRVYQREEVPGCPEAHAVFLEPGQVVQEQALSTEEPRVELSGSTRVSLEGPERRRFSASELMTRLHSSLRLGRNSAARALISGSGTGAAREGKASGMEARSVEMSGDRVSRPAPGDSREGDWSEPRLDTQEEPPLGSRSTNERRQSRFLLNSVLYQEYSDVASARELRRQQREEEGPGDEAEGAEEGPGPPRANLSPSSSFRAQRSARGSTFSLWQDIPDVRGSGVLATLSLRDCKLQEAKFELITSEASYIHSLSVAVGHFLGSAELSECLGAQDKQWLFSKLPEVKSTSERFLQDLEQRLEADVLRFSVCDVVLDHCPAFRRVYLPYVTNQAYQERTYQRLLLENPRFPGILARLEESPVCQRLPLTSFLILPFQRITRLKMLVENILKRTAQGSEDEDMATKAFNALKELVQECNASVQSMKRTEELIHLSKKIHFEGKIFPLISQARWLVRHGELVELAPLPAAPPAKLKLSSKAVYLHLFNDCLLLSRRKEMAELQVRDLSLKLQGIPGHVFLLQLLHGQHMKHQFLLRARTESEKQRWISALCPSSPQEDKEVISEGEDCPQVQCVRTYKALHPDELTLEKTDILSVRTWTSDGWLEGVRLADGEKGWVPQAYVEEISSLSARLRNLRENKRVTSATSKLGEAPV

SEQ ID NO: 751054 - protein, 485 aa, Homo sapiens
ERLAQFPAAGRGSPGPPGARLGVGLEKGRGREVWRPGVWGCEARASEVNWSCPFDPVCALPQAKFELITSEASYIHSLSVAVGHFLGSAELSECLGAQDKQWLFSKLPEVKSTSERFLQDLEQRLEADVLRFSVCDVVLDHCPAFRRVYLPYVTNQAYQERTYQRLLLENPRFPGILARLEESPVCQRLPLTSFLILPFQRITRLKMLVENILKRTAQGSEDEDMATKAFNALKELVQECNASVQSMKRTEELIHLSKKIHFEGKIFPLISQARWLVRHGELVELAPLPAAPPAKLKLSSKAVYLHLFNDCLLLSRRKELGKFAVFVHAKMAELQVRDLSLKLQGIPGHVFLLQLLHGQHMKHQFLLRARTESEKQRWISALCPSSPQEDKEVISEGEDCPQVQCVRTYKALHPDELTLEKTDILSVRTWTSDGWLEGVRLADGEKGWVPQAYVEEISSLSARLRNLRENKRVTSATSKLGEAPV

SEQ ID NO: 751055 - protein, 442 aa, Homo sapiens
ERLAQFPAAGRGSPGPPGARLGVGLEKGRGREVWRPGVWGCEARASEVNWSCPFDPVCALPQAKFELITSEASYIHSLSVAVGHFLGSAELSECLGAQDKQWLFSKLPEVKSTSERFLQDLEQRLEADVLRFSVCDVVLDHCPAFRRVYLPYVTNQAYQERTYQRLANILKRTAQGSEDEDMATKAFNALKELVQECNASVQSMKRTEELIHLSKKIHFEGKIFPLISQARWLVRHGELVELAPLPAAPPAKLKLSSKAVYLHLFNDCLLLSRRKELGKFAVFVHAKMAELQVRDLSLKLQGIPGHVFLLQLLHGQHMKHQFLLRARTESEKQRWISALCPSSPQEDKEVISEGEDCPQVQCVRTYKALHPDELTLEKTDILSVRTWTSDGWLEGVRLADGEKGWVPQAYVEEISSLSARLRNLRENKRVTSATSKLGEAPV

SEQ ID NO: 751056 - protein, 227 aa, Homo sapiens
RTNIQVTVTGPSSPSPLAVVQPMAVNISANGFGFAICQLNVVYNVKASGSSRRRRSIQNQEAFDLDVAVKENKDDLNHVDLNVCTSFSGPGRSGMALMEVNLLSGFMVPSEAISLSETVKKVEYDHGKLNLYLDSVNETQFCVNIPAVRNFKVSNTQDASVSIVDYYEPRRQAVRSYNSEVKLSSCDLCSDVQGCRPCEDGASGSHHHSSVIFIFCFKLLYFMELWL

SEQ ID NO: 751057 - protein, 244 aa, Homo sapiens
RTNIQVTVTGPSSPSPVKFLIDTHNRLLLQTAELAVVQPMAVNISANGFGFAICQLNVVYNVKASGSSRRRRSIQNQEAFDLDVAVKENKDDLNHVDLNVCTSFSGPGRSGMALMEVNLLSGFMVPSEAISLSETVKKVEYDHGKLNLYLDSVNETQFCVNIPAVRNFKVSNTQDASVSIVDYYEPRRQAVRSYNSEVKLSSCDLCSDVQGCRPCEDGASGSHHHSSVIFIFCFKLLYFMELWL

SEQ ID NO: 751058 - protein, 175 aa, Homo sapiens
MYALVQISKHYRLGAGPLLCCRPVLPSASLMFPMGLLFLATKHSSRVPHLNKQHPCPPSGSCQEPSWEQFLTPSLTSSEPVTKSCRQSCQFYLRNISSVHSTVSSRPTALSRSPLLRSHIYGHLYSSRKSAALLVFPPPTHILAPFIPSPSTDVRSDHCIASLHSNLGNSETLSQ

SEQ ID NO: 751059 - protein, 301 aa, Homo sapiens
MLSEGYLSGLEYWNDIHWSCASYNEQVAGEKEEETNSVATLSYSSVDETQVRSLYVSCKSSGKFISSVHSRESQHSRSQRVTVLQTNPNPVFESPNLAAVEICRDASRETYLVPSSCKSICKNYNDLQIAGGQVMAINSVTTDFPSESSFEYGPLLKSSEIPLPMEDSISTQPSDFPQKPIQRYSSYWRITSIKEKSSLQMQNPISNAVLNEYLEQKVVELYKQYIMDTVFHDSSPTQILASELIMTSVDQISLQVSREKNLETSKARDIVFSRLLQLMSTEITEISTPSLHISQYSNVNP

SEQ ID NO: 751060 - protein, 67 aa, Homo sapiens
APPPHKLLTYRIRAVSCEGGLGLPWQWLLGLLAHQNVLASSQNSQTLNSTSRDSNLGALGHEPEICR

SEQ ID NO: 751061 - protein, 818 aa, Homo sapiens
MVGCGVAVLCLWVSCGAAAGQLEYSVPEETERGVAVGNLSADLRLPAAAMSSRNFRFLSSHRELYFGVDLPSGNLVVREPADREQLCRAKAACVLTYDLVLEDPLELHKIRIHVLDTNDNSPLFPAGDVQLHIPEFLTPGARFTLPNAQDDDEGSNGILSYSLSPSQHFRLDMGSRVDGSEYPELVLEKALDREQRATHLLVLTARDGGLPARSGDAQVTIIVVDTNDNAPVFERSVYRTKVPETAPNGTVLFRVQALDPDEGSNGEVQYSLSNSTQAELRHRFHVHPKSGEVQVAASLGPPETLLEAYIEARDEGVFGLASTAKLLVEVTDVNDHAPELDFLTLSNPVPEDAAPGTVIALFSVKDEDLDSNGRVICGMSSAGPFQLTASFDNYYSLLIDGPLDREQISEYQVLITASDSGSPPLSTRRTITVSVADVNDNTPNFPQPQQELFVAENNGPGASLGRVFAQDPDLGKNGLVSYELLDVISEGPSASSLLAVESSSGAITAKTSFDFEQLRGFHFQVEGRDGGIPPRSATVTINLFVVDRNDNYPVILFPLPRNGSVPVEIVPRSARTGHLVTKVVAEDADSGSNAWLSYHISRASDSSLFRISANIGELRTARLVLPTDAVKQRVVVVVRDHGDPPLSSSVTLGVLLSNSVPQLLPDFEDVWEPGGQLSAQNLYLVIALACISFLFLGCLLFFVCTKLHQSPGCCAQSCCRSTEDLRYGSKMVSNPCMTSATIDVTTVERLSQTYLYRASLGLGSDNNSLLLRGEYNAADLRNLATGVGLNLPISCIQIRNRKGDHANVNAMVSKFYGI

SEQ ID NO: 751062 - protein, 250 aa, Homo sapiens
RIARLRQEEREQEQRQALEQARKAEEVQAELMDFERDEERSANGGSESDGEENIGWSTVNLDEEKQQQDFSASSTTILDEEPIVNRGLAAALLLCQNKGLLETTVQKVARVKAPNKSLPSAVYCIEDKMAIDDKYSRREEYRGFTQDFKEKDGYKPDVKIEYVDETGRKLTPKEAFRQLSHRFHGKGSGKMKTERRMKKLDEEALLKKMSSSDTPLGTVALLQEKQKAQKTPYIVLSGSGKSMNANTITK

SEQ ID NO: 751063 - protein, 113 aa, Homo sapiens
PGIGVNQHPPCYYTPCGHRWLRPHPGPCISSHAPRPQAFRQLSHRFHGKGSGKMKTERRMKKLDEEALLKKMSSSDTPLGTVALLQEKQKAQKTPYIVLSGSGKSMNANTITK

SEQ ID NO: 751064 - protein, 816 aa, Homo sapiens
HEAGLGGSRARSGRATMGSSKKHRGEKEAAGTTAAAGTGGATEQPPRHREHKKHKHRSGGSGGSGGERRKRSRERGGERGSGRRGAEAEARSSTHGRERSQAEPSERRVKREKRDDGYEAAASSKTSSGDASSLSIEETNKLRAKLGLKPLEVNAIKKEAGTKEEPVTADVINPMALRQREELREKLAAAKEKRLLNQKLGKIKTLGEDDPWLDDTAAWIERSRQLQKEKDLAEKRAKLLEEMDQEFGVSTLVEEEFGQRRQDLYSARDLQGLTVEHAIDSFREGETMILTLKDKGVLQEEEDVLVNVNLVDKERAEKNVELRKKKPDYLPYAEDESVDDLAQQKPRSILSKYDEELEGERPHSFRLEQGGTADGLRERELEEIRAKLRLQAQSLSTVGPRLASEYLTPEEMVTFKKTKRRVKKIRKKEKEVVVRADDLLPLGDQTQDGDFGSRLRGRGRRRVSEVEEEKEPVPQPLPSDDTRVENMDISDEEEGGAPPPGSPQVLEEDEAELELQKQLEKGRRLRQLQQLQQLRDSGEKVVEIVKKLESRQRGWEEDEDPERKGAIVFNATSEFCRTLGEIPTYGLAGNREEQEELMDFERDEERSANGGSESDGEENIGWSTVNLDEEKQQQDFSASSTTILDEEPIVNRGLAAALLLCQNKGLLETTVQKVARVKAPNKSLPSAVYCIEDKMAIDDKYSRREEYRGFTQDFKEKDGYKPDVKIEYVDETGRKLTPKEAFRQLSHRFHGKGSGKMKTERRMKKLDEEALLKKMSSSDTPLGTVALLQEKQKAQKTPYIVLSGSGKSMNANTITK

SEQ ID NO: 751065 - protein, 816 aa, Homo sapiens; identical to SEQ ID NO: 751064

SEQ ID NO: 751066 - protein, 860 aa, Homo sapiens
HEAGLGGSRARSGRATMGSSKKHRGEKEAAGTTAAAGTGGATEQPPRHREHKKHKHRSGGSGGSGGERRKRSRERGGERGSGRRGAEAEARSSTHGRERSQAEPSERRVKREKRDDGYEAAASSKTSSGDASSLSIEETNKLRAKLGLKPLEVNAIKKEAGTKEEPVTADVINPMALRQREELREKLAAAKEKRLLNQKLGKIKTLGEDDPWLDDTAAWIERSRQLQKEKDLAEKRAKLLEEMDQEFGVSTLVEEEFGQRRQDLYSARDLQGLTVEHAIDSFREGETMILTLKDKGVLQEEEDVLVNVNLVDKERAEKNVELRKKKPDYLPYAEDESVDDLAQARPGQAGWRGLRWRMSGMGALRRWWLSGFSGASLGPNLYLLPVQQKPRSILSKYDEELEGERPHSFRLEQGGTADGLRERELEEIRAKLRLQAQSLSTVGPRLASEYLTPEEMVTFKKTKRRVKKIRKKEKEVVVRADDLLPLGDQTQDGDFGSRLRGRGRRRVSEVEEEKEPVPQPLPSDDTRVENMDISDEEEGGAPPPGSPQVLEEDEAELELQKQLEKGRRLRQLQQLQQLRDSGEKVVEIVKKLESRQRGWEEDEDPERKGAIVFNATSEFCRTLGEIPTYGLAGNREEQEELMDFERDEERSANGGSESDGEENIGWSTVNLDEEKQQQDFSASSTTILDEEPIVNRGLAAALLLCQNKGLLETTVQKVARVKAPNKSLPSAVYCIEDKMAIDDKYSRREEYRGFTQDFKEKDGYKPDVKIEYVDETGRKLTPKEAFRQLSHRFHGKGSGKMKTERRMKKLDEEALLKKMSSSDTPLGTVALLQEKQKAQKTPYIVLSGSGKSMNANTITK

SEQ ID NO: 751067 - protein, 655 aa, Homo sapiens
MKVSIGFDRPICTWGCRVITLQAELAQDFVNSRHFEEKLGKIKTLGEDDPWLDDTAAWIERSRQLQKEKDLAEKRAKLLEEMDQEFGVSTLVEEEFGQRRQDLYSARDLQGLTVEHAIDSFREGETMILTLKDKGVLQEEEDVLVNVNLVDKERAEKNVELRKKKPDYLPYAEDESVDDLAQQKPRSILSKYDEELEGERPHSFRLEQGGTADGLRERELEEIRAKLRLQAQSLSTVGPRLASEYLTPEEMVTFKKTKRRVKKIRKKEKEVVVRADDLLPLGDQTQDGDFGSRLRGRGRRRVSEVEEEKEPVPQPLPSDDTRVENMDISDEEEGGAPPPGSPQVLEEDEAELELQKQLEKGRRLRQLQQLQQLRDSGEKVVEIVKKLESRQRGWEEDEDPERKGAIVFNATSEFCRTLGEIPTYGLAGNREEQEELMDFERDEERSANGGSESDGEENIGWSTVNLDEEKQQQDFSASSTTILDEEPIVNRGLAAALLLCQNKGLLETTVQKVARVKAPNKSLPSAVYCIEDKMAIDDKYSRREEYRGFTQDFKEKDGYKPDVKIEYVDETGRKLTPKEAFRQLSHRFHGKGSGKMKTERRMKKLDEEALLKKMSSSDTPLGTVALLQEKQKAQKTPYIVLSGSGKSMNANTITK

SEQ ID NO: 751068 - protein, 759 aa, Homo sapiens
HEAGLGGSRARSGRATMGSSKKHRGEKEAAGTTAAAGTGGATEQPPRHREHKKHKHRSGGSGGSGGERRKRSRERGGERGSGRRGAEAEARSSTHGRERSQAEPSERRVKREKRDDGYEAAASSKTSSGDASSLSIEETNKLRAKLGLKPLEVNAIKKEAGTKEEPVTADVINPMALRQREELREKLAAAKEKRLLNQKLGKIKTLGEDDPWLDDTAAWIERSRQLQKEKDLAEKRAKLLEEMDQEFGVSTLVEEEFGQRRQDLYSARDLQGLTVEHAIDSFREGETMILTLKDKGVLQEEEDVLVNVNLVDKERAEKNVELRKKKPDYLPYAEDESVDDLAQQKPRSILSKYDEELEGERPHSFRLEQGGTADGLRERELEEIRAKLRLQAQSLSTVGPRLASEYLTPEEMVTFKKTKRRVKKIRKKEKEVVVRADDLLPLGDQTQDGDFGSRLRGRGRRRVSEVEEEKEPVPQPLPSDDTRVENMDISDEEEGGAPPPGSPQVLEEDEAELELQKQLEKGRRLRQLQQLQQLRDSGEKVVEIVKKLESRQRGWEEDEDPERKGAIVFNATSEFCRTLGEIPTYGLAGNREEQEELMDFERDEERSANGGSESDGEENIGWSTVNLDEEKQQQDFSASSTTILDEEPIVNRGLAAALLLCQNKGLLETTVQKVARVKAPNKSLPSAVYCIEDKMAAMSARTVMTTGRAFAQCFKEKDGCTYDVKIDSLDETGRKLSFKLALRAICRTACMIKGWRVLY

SEQ ID NO: 751069 - protein, 816 aa, Homo sapiens; identical to SEQ ID NO: 751064

SEQ ID NO: 751070 - protein, 816 aa, Homo sapiens; identical to SEQ ID NO: 751064

SEQ ID NO: 751071 - protein, 816 aa, Homo sapiens; identical to SEQ ID NO: 751064

SEQ ID NO: 751072 - protein, 410 aa, Homo sapiens
TRGSTHVTFKKTKRRVKKIRKKEKEVVVRADDLLPLGDQTQDGDFGSRLRGRGRRRVSEVEEEKEPVPQPLPSDDTRVENMDISDEEEGGAPPPGSPQVLEEDEAELELQKQLEKGRRLRQLQQLQQLRDSGEKVVEIVKKLESRQRGWEEDEDPERKGAIVFNATSEFCRTLGEIPTYGLAGNREEQEELMDFERDEERSANGGSESDGEENIGWSTVNLDEEKQQQDFSASSTTILDEEPIVNRGLAAALLLCQNKGLLETTVQKVARVKAPNKSLPSAVYCIEDKMAIDDKYSRREEYRGFTQDFKEKDGYKPDVKIEYVDETGRKLTPKEAFRQLSHRFHGKGSGKMKTERRMKKLDEEALLKKMSSSDTPLGTVALLQEKQKAQKTPYIVLSGSGKSMNANTITK

SEQ ID NO: 751073 - protein, 350 aa, Homo sapiens
MWAVRVRADSRGSVVMGREGAKGNGDSVEGERLEDMGAKEEEDEAELELQKQLEKGRRLRQLQQLQQLRDSGEKVVEIVKKLESRQRGWEEDEDPERKGAIVFNATSEFCRTLGEIPTYGLAGNREEQEELMDFERDEERSANGGSESDGEENIGWSTVNLDEEKQQQDFSASSTTILDEEPIVNRGLAAALLLCQNKGLLETTVQKVARVKAPNKSLPSAVYCIEDKMAIDDKYSRREEYRGFTQDFKEKDGYKPDVKIEYVDETGRKLTPKEAFRQLSHRFHGKGSGKMKTERRMKKLDEEALLKKMSSSDTPLGTVALLQEKQKAQKTPYIVLSGSGKSMNANTITK

SEQ ID NO: 751074 - protein, 179 aa, Homo sapiens
SPATDWVFSVPLSVSTGALQEGATPVLRGVQGLWPDVQLGLDQAPVRPQCVCRARDPRLCLSESAKIPGQVTAELPRVLCTPRLTLQLSSSNAGDRNQLCVCEPLPHLLGDGTVLLQDMQTAAGSRDSEATLPHSPTMPSSGMRRKHPFICARNPQAADKIHALLIQMLQSHPVLRAVL

SEQ ID NO: 751075 - protein, 513 aa, Homo sapiens [sequence omitted]

SEQ ID NO: 751076 - protein, 229 aa, Homo sapiens
MAASRNGFEAVEAEGSAGCRGSSGMEVVLPLDPAVPAPLCPHGPTLLFVKVTQGKEETRRFYACSACRDRKDCNFFQWEDEKLSGARLAAREAHNRRCQPPLSRTQCVERYLKFIELPLTQRKFCQTCQQLLLPDDWGQHSEHQVLGNVSITQLRRPSQLLYPLENKKTNAQYLFADRSCQFLVDLLSALGFRRVLCVGTPRLHELIKLTASGDKKSNIKSLLLDIDFR

SEQ ID NO: 751077 - protein, 502 aa, Homo sapiens [sequence omitted]

SEQ ID NO: 751078 - protein, 339 aa, Homo sapiens
MAASRNGFEAVEAEGSAGCRGSSGMEVVLPLDPAVPAPLCPHGPTLLFVKVTQGKEETRRFYACSACRDRKDCNFFQWEDEKLSGARLAAREAHNRRCQPPLSRTQCVERYLKFIELPLTQRKFCQTCQQLLLPDDWGQHSEHQVLGNVSITQLRRPSQLLYPLENKKTNAQYLFADRSCQFLVDLLSALGFRRVLCVGTPRLHELIKLTASGDKKSNIKSLLLDIDFRYSQFYMEDSFCHYNMFNHHFFDGKTALEVCRAFLQEDKGEGIIMVTDPPFGGLVEPLAITFKKLIAMWKEGQSQDDSHKELPIFWIFPYFFESRICQFFPSFQMLDYQGI

SEQ ID NO: 751079 - protein, 305 aa, Homo sapiens
MAASRNGFEAVEAEGSAGCRGSSGMEVVLPLDPAVPAPLCPHGPTLLFVKVTQGKEETRRFYACSACRDRKDCNFFQWEDEKLSGARLAAREAHNRRCQPPLSRTQCVERYLKFIELPLTQRKFCQTCQQLLLPDDWGQHSEHQVLGNVSITQLRRPSQLLYPLENKKTNAQYLFADRSCQFLVDLLSALGFRRVLCVGTPRLHELIKLTASGDKKSNIKSLLLDIDFRYSQFYMEDSFCHYNMFNHHFFDGKTALEVCRAFLQEDKGEGIIMVTDPPFGGLVEPLAITFKKLIAMWKEGQSQGV

SEQ ID NO: 751080 - protein, 437 aa, Homo sapiens
MAASRNGFEAVEAEGSAGCRGSSGMEVVLPLDPAVPAPLCPHGPTLLFVKVTQGKEETRRFYACSACRDRKDCNFFQWEDEKLSGARLAAREAHNRRCQPPLSRTQCVERYLKFIELPLTQRKFCQTCQQLLLPDDWGQHSEHQVLGNVSITQLRRPSQLLYPLENKKTNAQYLFADRSCQFLVDLLSALGFRRVLCVGTPRLHELIKLTASGDKKSNIKSLLLDIDFRYSQFYMEDSFCHYNMFNHHFFDGKTALEVCRAFLQEDKGEGIIMVTDPPFGGLVEPLAITFKKLIAMWKEGQSQDDSHKELPIFWIFPYFFESRICQFFPSFQMLDYQVDYDNHALYKHGKTGRKQSPVRIFTNIPPNKIILPTEEGYRFCSPCQRYVSLENQHCEHCNSCTSKDGRKWNHCFLCKKCVKPSWIHCSICNHCAVPDHS

SEQ ID NO: 751081 - protein, 502 aa, Homo sapiens [sequence omitted]

SEQ ID NO: 751082 - protein, 117 aa, Homo sapiens
EKYFSGQNPFNDLKSPFHPASAYLSSCILVPAHSFFILMPLLAVFAQVFSLSGAFFLTNHLLITPILSFKCCHYYHFLGGAFLDCLFQIPWVFFFSLTKATFEQIPLGMLQLPKNPI

SEQ ID NO: 751083 - protein, 59 aa, Homo sapiens
MALNVLTFSSVIFLLGALPSFPPFALQDLQAVVLLQLENGQIKLVPENRACGGYGRAQD

SEQ ID NO: 751084 - protein, 298 aa, Homo sapiens
AASAAGAAGRGPGSTGRAERARRQRGHVRGPSSRAGLPRAALSIHKFSACSAATGRRSQPRAPRSRPPPARRPWAARPGAEGPPPQFRMQPTATMATAATTTTTTTATVALTTSWDNATGRPTAEPDPILDNYVLLVVVMSLFVGGTLVVLSGVLLLCKRCWDVHQRLNRAMEEAEKTTTTYLDNGTHPAQDPDFRGEDPECQDAETERFLSTSSTGRRVSFNEAALFEQSRKTQDKGRRYTLTEGDFHHLKNARLTHLHLPPLKIVTIHECDSGEASSATTPHPATSPKATLAIFQV

SEQ ID NO: 751085 - protein, 415 aa, Homo sapiens
PPALSTGETSTSRSRDPGARAQPLHPPWRAGSGRSPSTQPWPGGPCQGVAELLGVGVAPHPRDGADRASGVLLEPAAPPWRPHSSECLPCPALSSRAWRYLAGQAAPAVCSCDGYRRTLRGPGLLPRHGDGRWRSRESPRGPLGRAKPGGGCLRLCYLSMSHCPLCGLLLLQGRPSLSAVAPAGEVGLAGADQASSPQGPPPQFRMQPTATMATAATTTTTTTATVALTTSWDNATGRPTAEPDPILDNYVLLVVVMSLFVGGTLVVLSGVLLLCKRCWDVHQRLNRAMEEAEKTTTTYLDNGTHPAQDPDFRGEDPECQDAETERFLSTSSTGRRVSFNEAALFEQSRKTQDKGRRYTLTEGDFHHLKNARLTHLHLPPLKIVTIHECDSGEASSATTPHPATSPKATLAIFQV

SEQ ID NO: 751086 - protein, 138 aa, Homo sapiens
MLSKVHPCWPHQSSVLREIQPEWRVADDKTLKIRDVSSGKCLKTLKGHSNYVFCCNFNPQSSLTVSGSFDESVRIWVVKTGKCHKTVAHSDPVSAIHFNRDGFLIVSSSYDGLCHIWDTASGQCLKTLTDDDNPWCLS

SEQ ID NO: 751087 - protein, 104 aa, Homo sapiens
IDGKFEKTISGHKLGISDVAWSSDSNLFVSASDDKTLKIRDVSSGKCLKTLKGHSNYVFCCNFNPQSSLTVSGSFDESVRIWVVKTGKCHKTASSLRSSLGHSF

SEQ ID NO: 751088 - protein, 212 aa, Homo sapiens
MDPVVLSYMDSLLRQSDVSLLDPPSWLNDHIIGFAFEYFANSQFHDCSDHVSFISPEVTQFIKCTSNPAEIAMFLEPLDLPNKRVVFLAINDNSNQAAGGTHWSLLVYLQDKNSFFHYDSHSRSNSVHAKQVAEKLEAFLGRKGDKLAFVEEKAPAQQNSYDCGMYVICNTEALCQNFFRQQTESLLQLLTPAYITKKRGEWKDLIATLAKK

SEQ ID NO: 751089 - protein, 212 aa, Homo sapiens; identical to SEQ ID NO: 751088

SEQ ID NO: 751090 - protein, 212 aa, Homo sapiens; identical to SEQ ID NO: 751088

SEQ ID NO: 751091 - protein, 188 aa, Homo sapiens
APSWLRIVREAASWAARVTDKTASRMEHYRKAGSVELPAPSPMPQLPPDTLEMRVRDGSKIRNLLGLALGRLEGGSARHVVFSGSGRAAGKAVSCAEIVKRRVPGLHQLTKLRFLQTEDSWVPASPDTGLDPLTVRRHVPAVWVLLSRDPLDPNECGYQPPGAPPGLGSMPSSSCGPRSRRRARDTRS

SEQ ID NO: 751092 - protein, 163 aa, Homo sapiens
MEHYRKAGSVELPAPSPMPQLPPDTLEMRVRDGSKIRNLLGLALGRLEGGSARHVVFSGSGRAAGKAVSCAEIVKRRVPGLHQLTKLRFLQTEDSWVPASPDTGLDPLTVRRHVPAVWVLLSRDPLDPNECGYQPPGAPPGLGSMPSSSCGPRSRRRARDTRS

SEQ ID NO: 751093 - protein, 163 aa, Homo sapiens; identical to SEQ ID NO: 751092

SEQ ID NO: 751094 - protein, 116 aa, Homo sapiens
MVFRHVGPAGLELLTSGDPPALASQSAGITGGSHRARPQWTDSGQCQPHLSLELLQSVTGPARSWSPLAGYPGWVGQESGQGWLLISGMKLAAPPLVWGSRIPGPAWRCYPCASRP

SEQ ID NO: 751095 - protein, 497 aa, Homo sapiens
PRSLWEAAPRLRRLVVTEEDGGARPEALGKIAPRTPAELGARADQELVTALMCDLRRPAAGGMMDLAYVCEWEKWSKSTHCPSVPLACAWSCRNLIAFTMDLRSDDQDLTRMIHILDTEHPWDLHSIPSEHHEAITCLEWDQSGSRLLSADADGQIKCWSMADHLANSWESSVGSLVEGDPIVALSWLHNGVKLALHVEKSGASSFGEKFSRVKFSPSLTLFGGKPMEGWIAVTVSGLVTVSLLKPSGQVLTSTESLCRLRGAWPGDIAFTGGGNIVVATADGSSASPVQFYKVCVSVVSEKCRIDTEILPSLFMRCTTDLNRKDKFPAITHLKFLARDMSEQVLLCASSQTSSIVECWSLRKEGLPVNNIFQQISPVVGDKQPTILKWRILSATNDLDRVSAVALPKLPISLTNTDLKVASDTQFYPGLGLALASTRSVHIVPGLTADMGASKVAAEAGFSGLKPAGPRPKVGLGVWRGWPVVVASLARGGGLPGG

SEQ ID NO: 751096 - protein, 403 aa, Homo sapiens
TSLALVGIDSHGKLSVLRLSPSMGHPLEVGLALRHLLFLLEYCMVTGYDWWDILLHVQPSMVQSLVEKLHEEYTRQTAALQQVLSTRILAMKASLCKLSPCTVTRVCDYHTKLFLIAISSTLKSLLRPHFLNTPDKSPGDRLTEICTKITDVDIDKVMINLKTEEFVLDMNTLQALQQLLQWVGDFVLYLLASLPNQGSLLRPGHSFLRDGTSLGMLRELMVVIRIWGLLKPSCLPVYTATSDTQDSMSLLFRLLTKLWICCRDEGPASEPDEALVDECCLLPSQLLIPSLDWLPASDGLVSRLQPKQPLRLQFGRAPTLPGSAATLQLDGLARAPGQPKIDHLRRLHLGACPTEECKACTRCGCVTMLKSPNRTTAVKQWEQRWIKNCLCGGLWWRVPLSYP

SEQ ID NO: 751097 - protein, 373 aa, Homo sapiens
PRSLWEAAPRLRRLVVTEEDGGARPEALGKIAPRTPAELGARADQDLASCPQVLSTRILAMKASLCKLSPCTVTRVCDYHTKLFLIAISSTLKSLLRPHFLNTPDKSPGDRLTEICTKITDVDIDKVMINLKTEEFVLDMNTLQALQQLLQWVGDFVLYLLASLPNQGSLLRPGHSFLRDGTSLGMLRELMVVIRIWGLLKPSCLPVYTATSDTQDSMSLLFRLLTKLWICCRDEGPASEPDEALVDECCLLPSQLLIPSLDWLPASDGLVSRLQPKQPLRLQFGRAPTLPGSAATLQLDGLARAPGQPKIDHLRRLHLGACPTEECKACTRCGCVTMLKSPNRTTAVKQWEQRWIKNCLCGGLWWRVPLSYP

SEQ ID NO: 751098 - protein, 403 aa, Homo sapiens; identical to SEQ ID NO: 751096

SEQ ID NO: 751099 - protein, 351 aa, Homo sapiens
TSLALVGIDSHGKLSVLRLSPSMGHPLEVGLALRHLLFLLEYCMVTGYDWWDILLHVQPSMVQSLVEKLHEEYTRQTAALQQVLSTRILAMKASLCKLSPCTVTRVCDYHTKLFLIAISSTLKSLLRPHFLNTPDKSPGDRLTEICTKITDVDIDKVMINLKTEEFVLDMNTLQALQQLLQWVGDFVLYLLASLPNQGSLLRPGHSFLRDGTSLGMLRELMVVIRIWGLLKPSCLPVYTATSDTQDSMSLLFRACCPASCLSPAWTGCQPATAWLAACSPSSPFVCSLAGRPRCLAVLPPCSSTASPGPQASPRSTTCGGCTLALAPRRNARPAPGAAVSPCSSRPTEPRR

SEQ ID NO: 751100 - protein, 428 aa, Homo sapiens
PRSLWEAAPRLRRLVVTEEDGGARPEALGKIAPRTPAELGARADQELVTALMCDLRRPAAGGMMDLAYVCEWEKWSKSTHCPSVPLACAWSCRNLIAFTMDLRSDDQDLTRMIHILDTEHPWDLHSIPSEHHEAITCLEWDQSGSRLLSADADGQIKCWSMADHLANSWESSVGSLVEGDPIVALSWLHNGVKLALHVEKSGASSFGEKFSRVKFSPSPVQFYKVCVSVVSEKCRIDTEILPSLFMRCTTDLNRKDKFPAITHLKFLARDMSEQVLLCASSQTSSIVECWSLRKEGLPVNNIFQQISPVVGDKQPTILKWRILSATNDLDRVSAVALPKLPISLTNTDLKVASDTQFYPGLGLALASTTERHIVPGLTADMGASKVAAEAGFSGLKPAGPRPKVGLGVWRGWPVVVASLARGGGLPGG

SEQ ID NO: 751101 - protein, 334 aa, Homo sapiens
PRSLWEAAPRLRRLVVTEEDGGARPEALGKIAPRTPAELGARADQELVTALMCDLRRPAAGGMMDLAYVCEWEKWSKSTHCPSVPLACAWSCRNLIAFTMDLRSDDQDLTRMIHILDTEHPWDLHSIPSEHHEAITCLEWDQSGSRLLSADADGQIKCWSMADHLANSWESSVGSLVEGDPIVALSWLHNGVKLALHVEKSGASSFGEKFSRVKFSPSLTLFGGKPMEGWIAVTVSGLVTVSLLKPSGQVLTSTESLCRLRGAWPGDIAFTGGGNIVVATADGSSASPVQFYKVCVSVVSEKCRIDRTQQAGGWDGVAIVRVASVQASASQCVV

SEQ ID NO: 751102 - protein, 344 aa, Homo sapiens
GTLADPSEVLHEEYTRQTAALQQVLSTRILAMKASLCKLSPCTVTRVCDYHTKLFLIAISSTLKSLLRPHFLNTPDKSPGDRLTEICTKITDVDIDKVMINLKTEEFVLDMNTLQALQQLLQWVGDFVLYLLASLPNQGSLLRPGHSFLRDGTSLGMLRELMVVIRIWGLLKPSCLPVYTATSDTQDSMSLLFRLLTKLWICCRDEGPASEPDEALVDECCLLPSQLLIPSLDWLPASDGLVSRLQPKQPLRLQFGRAPTLPGSAATLQLDGLARAPGQPKIDHLRRLHLGACPTEECKACTRCGCVTMLKSPNRTTAVKQWEQRWIKNCLCGGLWWRVPLSYP

SEQ ID NO: 751103 - protein, 422 aa, Homo sapiens
TSLALVGIDSHGKLSVLRLSPSMGHPLEVGLALRHLLFLLEYCMVTGYDWWDILLHVQPSMVQSLVEKLHEEYTRQTAALQQVLSTRILAMKASLCKLSPCTVTRVCDYHTKLFLIAISSTLKSLLRPHFLNTPDKSPGDRLTEICTKITDVDIDKVMINLKTEEFVLDMNTLQALQQLLQWVGDFVLYLLASLPNQGSLLRPGHSFLRDGTSLGMLRELMVVIRIWGLLKPSCLPVYTATSDTQDSMSLLFRLLTKLWICFPSTGPCSVWVLLGWQPLPGRDEGPASEPDEALVDECCLLPSQLLIPSLDWLPASDGLVSRLQPKQPLRLQFGRAPTLPGSAATLQLDGLARAPGQPKIDHLRRLHLGACPTEECKACTRCGCVTMLKSPNRTTAVKQWEQRWIKNCLCGGLWWRVPLSYP

SEQ ID NO: 751104 - protein, 138 aa, Homo sapiens
MQGLHQVRLCHHAQVAQQNHGGEAVGAALDQELPVRWALVAGAPQLPLSPAAPQLLLSYPSAAPEPGCCKSHRSPWTLLGAVNLSPPCRAVEGRGPDACVTSRASEEAPAFVQLGPQSTHHSPRTPRSLDHLHPEDRP

SEQ ID NO: 751105 - protein, 848 aa, Homo sapiens
MEGSPSLRRMTVMREKGRRQAVRGPAFMFNDRGTSLTAEEERFLDAAEYGNIPVVRKMLEESKTLNVNCVDYMGQNALQLAVGNEHLEVTELLLKKENLARIGDALLLAISKGYVRIVEAILNHPGFAASKRLTLSPCEQELQDDDFYAYDEDGTRFSPDITPIILAAHCQKYEVVHMLLMKGARIERPHDYFCKCGDCMEKQRHDSFSHSRSRINAYKGLASPAYLSLSSEDPVLTALELSNELAKLANIEKEFKNDYRKLSMQCKDFVVGVLDLCRDSEEVEAILNGDLESAEPLEVHRHKASLSRVKLAIKYEVKKFVAHPNCQQQLLTIWYENLSGLREQTIAIKCLVVLVVALGLPFLAIGYWIAPCSRLGKILRSPFMKFVAHAASFIIFLGLLVFNASDRFEGITTLPNITVTDYPKQIFRVKTTQFTWTEMLIMVWVLGMMWSECKELWLEGPREYILQLWNVLDFGMLSIFIAAFTARFLAFLQATKAQQYVDSYVQESDLSEVTLPPEIQYFTYARDKWLPSDPQIISEGLYAIAVVLSFSRIAYILPANESFGPLQISLGRTVKDIFKFMVLFIMVFFAFMIGMFILYSYYLGAKVNAAFTTVEESFKTLFWSIFGLSEVTSVVLKYDHKFIENIGYVLYGIYNVTMVVVLLNMLIAMINSSYQEIEDDSDVEWKFARSKLWLSYFDDGKTLPPPFSLVPSPKSFVYFIMRIVNFPKCRRRRLQKDIEMGMGNSKSRLNLFTQSNSRVFESHSFNSILNQPTRYQQIMKRLIKRYVLKAQVDKENDEVNEGELKEIKQDISSLRYELLEDKSQATEELAILIHKLSEKLNPSMLRCE

SEQ ID NO: 751106 - protein, 902 aa, Homo sapiens
RECSWNIVEADCMNCKLLLINLEPSEPEYWISHVLTRDKFKLEKDKILKCFSRSMEGSPSLRRMTVMREKGRRQAVRGPAFMFNDRGTSLTAEEERFLDAAEYGNIPVVRKMLEESKTLNVNCVDYMGQNALQLAVGNEHLEVTELLLKKENLARIGDALLLAISKGYVRIVEAILNHPGFAASKRLTLSPCEQELQDDDFYAYDEDGTRFSPDITPIILAAHCQKYEVVHMLLMKGARIERPHDYFCKCGDCMEKQRHDSFSHSRSRINAYKGLASPAYLSLSSEDPVLTALELSNELAKLANIEKEFKNDYRKLSMQCKDFVVGVLDLCRDSEEVEAILNGDLESAEPLEVHRHKASLSRVKLAIKYEVKKFVAHPNCQQQLLTIWYENLSGLREQTIAIKCLVVLVVALGLPFLAIGYWIAPCSRLGKILRSPFMKFVAHAASFIIFLGLLVFNASDRFEGITTLPNITVTDYPKQIFRVKTTQFTWTEMLIMVWVLGMMWSECKELWLEGPREYILQLWNVLDFGMLSIFIAAFTARFLAFLQATKAQQYVDSYVQESDLSEVTLPPEIQYFTYARDKWLPSDPQIISEGLYAIAVVLSFSRIAYILPANESFGPLQISLGRTVKDIFKFMVLFIMVFFAFMIGMFILYSYYLGAKVNAAFTTVEESFKTLFWSIFGLSEVTSVVLKYDHKFIENIGYVLYGIYNVTMVVVLLNMLIAMINSSYQEIEDDSDVEWKFARSKLWLSYFDDGKTLPPPFSLVPSPKSFVYFIMRIVNFPKCRRRRLQKDIEMGMGNSKSRLNLFTQSNSRVFESHSFNSILNQPTRYQQIMKRLIKRYVLKAQVDKENDEVNEGELKEIKQDISSLRYELLEDKSQATEELAILIHKLSEKLNPSMLRCE

SEQ ID NO: 751107 - protein, 110 aa, Homo sapiens
QEDKVRLKEFRSGTIHQSLKPEMTLLFWGVRGKEKEKVSRALGVAWMPGSQKWPFLAPVTKPGGKLPACSLHPHPPKNASSRLRWPYPESQNVGSNPGPECLLKSPGPRF

SEQ ID NO: 751108 - protein, 118 aa, Homo sapiens
AWALLGLVCSVSHGQHKLSLRTPLPCPFSSPIASASTRPRWAPQLLFTTAAPTPAPSSPPVPVPCYYGLDCVPKKAAPVNVTCECDKVLREALMQYDCCPQKKGKFGSRHVQRVDTAK

SEQ ID NO: 751109 - protein, 172 aa, Homo sapiens
MLLRWCSLPRLGSLCKTSPFLEMMMPSKPGPGPDLAGTHLASGSEVPGDRVPCEGRLPEATPAHLPYSRPPAGVRLGHRERTGLGGNGRLAGRLSSRSLLPRGLQEEPGSTGGQWFTFPFFLPFFCPLSCPQPESQDHPNWTGSREGGVVARSVPDSTGNQLFSKTAPTRAS

SEQ ID NO: 751110 - protein, 213 aa, Homo sapiens
MASLFKKKTVDDVIKEQNRELRGTQRAIIRDRAALEKQEKQLELEIKKMAKIGNKEACKVLAKQLVHLRKQKTRTFAVSSKVTSMSTQTKVMNSQMKMAGAMSTTAKTMQAVNKKMDPQKTLQTMQNFQKENMKMEMTEEMINDTLDDIFDGSDDEEESQDIVNQVLDEIGIEISGKMAKAPSAARSLPSASTSKATISDEEIERQLKALGVD

SEQ ID NO: 751111 - protein, 213 aa, Homo sapiens; identical to SEQ ID NO: 751110

SEQ ID NO: 751112 - protein, 84 aa, Homo sapiens
DAETTLLISTATVNDTLDDIFDGSDDEEESQDIVNQVLDEIGIEISGKMAKAPSAARSLPSASTSKATISDEEIERQLKALGVD

SEQ ID NO: 751113 - protein, 213 aa, Homo sapiens; identical to SEQ ID NO: 751110

SEQ ID NO: 751114 - protein, 316 aa, Homo sapiens
QDHQYLYEEISVILATLVLVLALVVFVRTGVLILLIVVLVLTSVVPVREEVVAISTVVLMVASAVLVREGVTEMGTVAIVLTVVLLVGEGIVVLGTVLLVLASAVFVGEGVVVIDVIKEQNRELRGTQRAIIRDRAALEKQEKQLELEIKKMAKIGNKEACKVLAKQLVHLRKQKTRTFAVSSKVTSMSTQTKVMNSQMKMAGAMSTTAKTMQAVNKKMDPQKTLQTMQNFQKENMKMEMTEEMINDTLDDIFDGSDDEEESQDIVNQVLDEIGIEISGKMAKAPSAARSLPSASTSKATISDEEIERQLKALGVD

SEQ ID NO: 751115 - protein, 213 aa, Homo sapiens; identical to SEQ ID NO: 751110

SEQ ID NO: 751116 - protein, 213 aa, Homo sapiens; identical to SEQ ID NO: 751110

SEQ ID NO: 751117 - protein, 213 aa, Homo sapiens; identical to SEQ ID NO: 751110

SEQ ID NO: 751118 - protein, 172 aa, Homo sapiens
MELEIKKMAKIGNKEACKVLAKQLVHLRKQKTRTFAVSSKVTSMSTQTKVMNSQMKMAGAMSTTAKTMQAVNKKMDPQKTLQTMQNFQKENMKMEMTEEMINDTLDDIFDGSDDEEESQDIVNQVLDEIGIEISGKMAKAPSAARSLPSASTSKATISDEEIERQLKALGVD

SEQ ID NO: 751119 - protein, 105 aa, Homo sapiens
MQAVNKKMDPQKTLQTMQNFQKENMKMEMTEEMINDTLDDIFDGSDDEEESQDIVNQVLDEIGIEISGKMAKAPSAARSLPSASTSKATISDEEIERQLKALGVD

SEQ ID NO: 751120 - protein, 953 aa, Homo sapiens
MALVFQFGQPVRAQPLPGLCHGKLIRTNACDVCNSTDLPEVEIISLLEEQLPHYKLRADTIYGYDHDDWLHTPLISPDANIDLTTEQIEETLKYFLLCAERVGQMTKTYNDIDAVTRLLEEKERDLELAARIGQSLLKKNKTLTERNELLEEQVEHIREEVSQLRHELSMKDELLQFYTSAAEESEPESVCSTPLKRNESSSSVQNYFHLDSLQKKLKDLEEENVVLRSEASQLKTETITYEEKEQQLVNDCVKELRDANVQIASISEELAKKTEDAARQQEEITHLLSQIVDLQKKAKACAVENEELVQHLGAAKDAQRQLTAELRELEDKYAECMEMLHEAQEELKNLRNKTMPNTTSRRYHSLGLFPMDSLAAEIEGTMRKELQLEEAESPDITHQKRVFETVRNINQVVKQRSLTPSPMNIPGSNQSSAMNSLLSSCVSTPRSSFYGSDIGNVVLDNKTNSIILETEAADLGNDERSKKPGTPGTPGSHDLETALRRLSLRRENYLSERRFFEEEQERKLQELAEKGELRSGSLTPTESIMSLGTHSRFSEFTGFSGMSFSSRSYLPEKLQIVKPLEGSATLHHWQQLAQPHLGGILDPRPGVVTKGFRTLDVDLDEVYCLNDFEEDDTGDHISLPRLATSTPVQHPETSAHHPGKCMSQTNSTFTFTTCRILHPSDELTRVTPSLNSAPTPACGSTSHLKSTPVATPCTPRRLSLAESFTNTRESTTTMSTSLGLVWLLKERGISAAVYDPQSWDRAGRGSLLHSYTPKMAVIPSTPPNSPMQTPTSSPPSFEFKCTSPPYDNFLASKPASSILREVREKNVRSSESQTDVSVSNLNLVDKVRRFGVAKVVNSGRAHVPTLTEEQGPLLCGPPGPAPALVPRGLVPEGLPLRCPTVTSAIGGLQLNSGIRRNRSFPTMVGSSMQMKAPVTLTSGILMGAKLSKQTSLR

SEQ ID NO: 751121 - protein, 688 aa, Homo sapiens [sequence omitted]

SEQ ID NO: 751122 - protein, 152 aa, Homo sapiens
MSSVPVPEIDQVTCAPSSSRSLTPLRFLLIGDGPLSHLLPSDRKYHIRPLQVLSAVFGRRTHHGSVISGLEEDDSFLFNGGWSHGTRCSLFLRSAGGRTERSSILQGTRLMPGALRHLLLDGGPPASSSSSFLSVRVLFFFNNGLADASGRF

SEQ ID NO: 751123 - protein, 152 aa, Homo sapiens; identical to SEQ ID NO: 751122

SEQ ID NO: 751124 - protein, 895 aa, Homo sapiens
MSLRDKGGEEECFEYDCQDEERKPTHRQHDTQDLLEEVLCAERVGQMTKTYNDIDAVTRLLEEKERDLELAARIGQSLLKKNKTLTERNELLEEQVEHIREEVSQLRHELSMKDELLQFYTSAAEESEPESVCSTPLKRNESSSSVQNYFHLDSLQKKLKDLEEENVVLRSEASQLKTETITYEEKEQQLVNDCVKELRDANVQIASISEELAKKTEDAARQQEEITHLLSQIVDLQKKAKACAVENEELVQHLGAAKDAQRQLTAELRELEDKYAECMEMLHEAQEELKNLRNKTMPNTTSRRYHSLGLFPMDSLAAEIEGTMRKELQLEEAESPDITHQKRVFETVRNINQVVKQRSLTPSPMNIPGSNQSSAMNSLLSSCVSTPRSSFYGSDIGNVVLDNKTNSIILETEAADLGNDERSKKPGTPGTPGSHDLETALRRLSLRRENYLSERRFFEEEQERKLQELAEKGELRSGSLTPTESIMSLGTHSRFSEFTGFSGMSFSSRSYLPEKLQIVKPLEGSATLHHWQQLAQPHLGGILDPRPGVVTKGFRTLDVDLDEVYCLNDFEEDDTGDHISLPRLATSTPVQHPETSAHHPGKCMSQTNSTFTFTTCRILHPSDELTRVTPSLNSAPTPACGSTSHLKSTPVATPCTPRRLSLAESFTNTRESTTTMSTSLGLVWLLKERGISAAVYDPQSWDRAGRGSLLHSYTPKMAVIPSTPPNSPMQTPTSSPPSFEFKCTSPPYDNFLASKPASSILREVREKNVRSSESQTDVSVSNLNLVDKVRRFGVAKVVNSGRAHVPTLTEEQGPLLCGPPGPAPALVPRGLVPEGLPLRCPTVTSAIGGLQLNSGIRRNRSFPTMVGSSMQMKAPVTLTSGILMGAKLSKQTSLR

SEQ ID NO: 751125 - protein, 688 aa, Homo sapiens [sequence omitted]

SEQ ID NO: 751126 - protein, 895 aa, Homo sapiens; identical to SEQ ID NO: 751124

SEQ ID NO: 751127 - protein, 615 aa, Homo sapiens
MLHEAQEELKNLRNKTMPNTTSRRYHSLGLFPMDSLAAEIEGTMRKELQLEEAESPDITHQKRVFETVRNINQVVKQRSLTPSPMNIPGSNQSSAMNSLLSSCVSTPRSSFYGSDIGNVVLDNKTNSIILETEAADLGNDERSKKPGTPGTPGSHDLETALRRLSLRRENYLSERRFFEEEQERKLQELAEKGELRSGSLTPTESIMSLGTHSRFSEFTGFSGMSFSSRSYLPEKLQIVKPLEGSATLHHWQQLAQPHLGGILDPRPGVVTKGFRTLDVDLDEVYCLNDFEEDDTGDHISLPRLATSTPVQHPETSAHHPGKCMSQTNSTFTFTTCRILHPSDELTRVTPSLNSAPTPACGSTSHLKSTPVATPCTPRRLSLAESFTNTRESTTTMSTSLGLVWLLKERGISAAVYDPQSWDRAGRGSLLHSYTPKMAVIPSTPPNSPMQTPTSSPPSFEFKCTSPPYDNFLASKPASSILREVREKNVRSSESQTDVSVSNLNLVDKVRRFGVAKVVNSGRAHVPTLTEEQGPLLCGPPGPAPALVPRGLVPEGLPLRCPTVTSAIGGLQLNSGIRRNRSFPTMVGSSMQMKAPVTLTSGILMGAKLSKQTSLR

SEQ ID NO: 751128 - protein, 380 aa, Homo sapiens
RNLVWIGSEAGIWCSADQCSKLWLFLRTRLQSRTFAFHLPRPDPVNKVAHHFLHLLSDMLDFNFYCGCTWMQGICFVPPNLAHHPGKCMSQTNSTFTFTTCRILHPSDELTRVTPSLNSAPTPACGSTSHLKSTPVATPCTPRRLSLAESFTNTRESTTTMSTSLGLVWLLKERGISAAVYDPQSWDRAGRGSLLHSYTPKMAVIPSTPPNSPMQTPTSSPPSFEFKCTSPPYDNFLASKPASSILREVREKNVRSSESQTDVSVSNLNLVDKVRRFGVAKVVNSGRAHVPTLTEEQGPLLCGPPGPAPALVPRGLVPEGLPLRCPTVTSAIGGLQLNSGIRRNRSFPTMVGSSMQMKAPVTLTSGILMGAKLSKQTSLR

SEQ ID NO: 751129 - protein, 464 aa, Homo sapiens
MVLETALRRLSLRRENYLSERRFFEEEQERKLQELAEKGELRSGSLTPTESIMSLGTHSRFSEFTGFSGMSFSSRSYLPEKLQIVKPLEGSATLHHWQQLAQPHLGGILDPRPGVVTKGFRTLDVDLDEVYCLNDFEEDDTGREVQQLLAVSGDMRRAHGSRRPGAHHPGKCMSQTNSTFTFTTCRILHPSDELTRVTPSLNSAPTPACGSTSHLKSTPVATPCTPRRLSLAESFTNTRESTTTMSTSLGLVWLLKERGISAAVYDPQSWDRAGRGSLLHSYTPKMAVIPSTPPNSPMQTPTSSPPSFEFKCTSPPYDNFLASKPASSILREVREKNVRSSESQTDVSVSNLNLVDKVRRFGVAKVVNSGRAHVPTLTEEQGPLLCGPPGPAPALVPRGLVPEGLPLRCPTVTSAIGGLQLNSGIRRNRSFPTMVGSSMQMKAPVTLTSGILMGAKLSKQTSLR

SEQ ID NO: 751130 - protein, 409 aa, Homo sapiens
MSLGTHSRFSEFTGFSGMSFSSRSYLPEKLQIVKPLEGSATLHHWQQLAQPHLGGILDPRPGVVTKGFRTLDVDLDEVYCLNDFEEDDTGDHISLPRLATSTPVQHPETSAHHPGKCMSQTNSTFTFTTCRILHPSDELTRVTPSLNSAPTPACGSTSHLKSTPVATPCTPRRLSLAESFTNTRESTTTMSTSLGLVWLLKERGISAAVYDPQSWDRAGRGSLLHSYTPKMAVIPSTPPNSPMQTPTSSPPSFEFKCTSPPYDNFLASKPASSILREVREKNVRSSESQTDVSVSNLNLVDKVRRFGVAKVVNSGRAHVPTLTEEQGPLLCGPPGPAPALVPRGLVPEGLPLRCPTVTSAIGGLQLNSGIRRNRSFPTMVGSSMQMKAPVTLTSGILMGAKLSKQTSLR

SEQ ID NO: 751131 - protein, 895 aa, Homo sapiens; identical to SEQ ID NO: 751124

SEQ ID NO: 751132 - protein, 155 aa, Homo sapiens
SVPKCALFYIYTLEKEKPAAVLSHFCHQHQCPSGRQVVVQKHDAWLIFVAKGVGLMLIGMLPYSLTGRIEGEFWKCKEAPLSASSRSCTEGLKLIKSTKNLPWRIEREKGPIMRTDILATLLKINTDIFLACSLCTQTCGKFILATLFDEGHEHL

SEQ ID NO: 751133 - protein, 653 aa, Homo sapiens
MSLRDKGGEEECFEYDCQDEERKPTHRQHDTQDLLEEVLCAERVGQMTKTYNDIDAVTRLLEEKERDLELAARIGQSLLKKNKTLTERNELLEEQVEHIREEVSQLRHELSMKDELLQFYTSAAEESEPESVCSTPLKRNESSSSVQNYFHLDSLQKKLKDLEEENVVLRSEASQLKTETITYEEKEQQLVNDCVKELRDANVQIASISEELAKKTEDAARQQEEITHLLSQIVDLQKKAKACAVENEELVQHLGAAKDAQRQLTAELRELEDKYAECMEMLHEAQEELKNLRNKTMPNTTSRRYHSLGLFPMDSLAAEIEGTMRKELQLEEAESPDITHQKRVFETVRNINQVVKQRSLTPSPMNIPGSNQSSAMNSLLSSCVSTPRSSFYGSDIGNVVLDNKTNSIILETEAADLGNDERSKKPGTPGTPGSHDLETALRRLSLRRENYLSERRFFEEEQERKLQELAEKGELRSGSLTPTESIMSLGTHSRFSEFTGFSGMSFSSRSYLPEKLQIVKPLEGSATLHHWQQLAQPHLGGILDPRPGVVTKGFRTLDVDLDEVYCLNDFEEDDTGDHISLPRLATSTPVQHPETSGERSQARVTVSGSRSYPSRPQASPEEMQEPPAATEEEEEEHKARGPSAPFGSFPLGR

SEQ ID NO: 751134 - protein, 309 aa, Homo sapiens
TLRLYEEDDTAHHPGKCMSQTNSTFTFTTCRILHPSDELTRVTPSLNSAPTPACGSTSHLKSTPVATPCTPRRLSLAESFTNTRESTTTMSTSLGLVWLLKERGISAAVYDPQSWDRAGRGSLLHSYTPKMAVIPSTPPNSPMQTPTSSPPSFEFKCTSPPYDNFLASKPASSILREVREKNVRSSESQTDVSVSNLNLVDKVRRFGVAKVVNSGRAHVPTLTEEQGPLLCGPPGPAPALVPRGLVPEGLPLRCPTVTSAIGGLQLNSGIRRNRSFPTMVGSSMQMKAPVTLTSGILMGAKLSKQTSLR

SEQ ID NO: 751135 - protein, 895 aa, Homo sapiens; identical to SEQ ID NO: 751124

SEQ ID NO: 751136 - protein, 895 aa, Homo sapiens; identical to SEQ ID NO: 751124

SEQ ID NO: 751137 - protein, 30 aa, Homo sapiens
KLQPKGVTSIGQFPDKGRILSHQNLKIIEH

SEQ ID NO: 751138 - protein, 182 aa, Homo sapiens
MWPPDPDPDPDPEPAGGSRPGPAVPGLRALLPARAFLCSLKGRLLLAESGLSFITFICYVASSASAFLTAPLLEFLLALYFLFADAMQLNDKWQGLCWPMMDFLRCVTAALIYFAISITAIAKYSDGASKAAGVFGFFATIVFATDFYLIFNDVAKFLKQGDSADETTAHKTEEENSDSDSD

SEQ ID NO: 751139 - protein, 227 aa, Homo sapiens
RGGGGCAPARASVACPPSAQPGFPLPSGREKRGARPSPGPTAAAAMWPPDPDPDPDPEPAGGSRPGPAVPGLRALLPARAFLCSLKGRLLLAESGLSFITFICYVASSASAFLTAPLLEFLLALYFLFADAMQLNDKWQGLCWPMMDFLRCVTAALIYFAISITAIAKYSDGASKAAGVFGFFATIVFATDFYLIFNDVAKFLKQGDSADETTAHKTEEENSDSDSD

SEQ ID NO: 751140 - protein, 182 aa, Homo sapiens; identical to SEQ ID NO: 751138

SEQ ID NO: 751141 - protein, 268 aa, Homo sapiens
RGGGGCAPARASVACPPSAQPGFPLPSGREKRGARPSPGPTAAAAMWPPDPDPDPDPEPAGGSRPGPAVPGLRALLPARAFLCSLKGRLLLAESGLSFITFICYVASSASAFLTAPLLEFLLALYFLFADAMQLNDKWQGLCWPMMDFLRCVTAALIYFAISITAIAKYSDGASKAAGGSVPDTRAVCPSRSEMGREVGQQPPGAGSQPCDASHPPCPQVFGFFATIVFATDFYLIFNDVAKFLKQGDSADETTAHKTEEENSDSDSD

SEQ ID NO: 751142 - protein, 227 aa, Homo sapiens; identical to SEQ ID NO: 751139

SEQ ID NO: 751143 - protein, 134 aa, Homo sapiens
GLVLAHDGEDRGPRREGCPAQSGQMRSPESCTWALILSLVCWSLQLVRTGWRDPASDHPSSTTQQPCDLKWAVVPLEQVCEAGNPERGLWPPGGAGAPHRAYRNELPPQEFKPFPRGQDRLTEDLQGLPRLQPS

SEQ ID NO: 751144 - protein, 227 aa, Homo sapiens; identical to SEQ ID NO: 751139

SEQ ID NO: 751145 - protein, 180 aa, Homo sapiens
EENSGPQEKERAWVAEPTSRPGSLLFRRLGSRIPDTRTGRKLDRRQRGLSFITFICYVASSASAFLTAPLLEFLLALYFLFADAMQLNDKWQGLCWPMMDFLRCVTAALIYFAISITAIAKYSDGASKAAGVFGFFATIVFATDFYLIFNDVAKFLKQGDSADETTAHKTEEENSDSDSD

SEQ ID NO: 751146 - protein, 150 aa, Homo sapiens
MWPPDPDPDPDPEPAGGSRPGPAVPGLRALLPARAFLCSLKGRLLLAESGLSFITFICYVASSASAFLTAPLLEFLLALYFLFADAMQLNDKWQGLCWPMMVFGFFATIVFATDFYLIFNDVAKFLKQGDSADETTAHKTEEENSDSDSD

SEQ ID NO: 751147 - protein, 137 aa, Homo sapiens
MQLNDKWQGLCWPMMDFLRCVTAALIYFAISITAIAKYSDGASKAAGGSVPDTRAVCPSRSEMGREVGQQPPGAGSQPCDASHPPCPQVFGFFATIVFATDFYLIFNDVAKFLKQGDSADETTAHKTEEENSDSDSD

SEQ ID NO: 751148 - protein, 295 aa, Homo sapiens
MEVAVPQVSPLSAPPPPTCPTLPSLSSSHHPSGQGSFLWCLPKSSEEGCLECRLQEHSEVSGFLLECDSSVQGALQKHLALYRIRRKVTVEPHPELRVWAVLPSSPEACGAASLQERAGAAAILIRDPRTARMGWRLLTQDEGPALVPGGRLGDLWDYHQHRYLQGVPEGVRDLPPGVALPLESNLAFMNGVSFTKGCYIGQELTARTHHMGVIRKRLFPVRFLDPLPTSGITPGATVLTASGQTVGKFRAGQGNVGLALLWSEKIKGPLHIRASEGAQVALAASVPDWWPTVSK

SEQ ID NO: 751149 - protein, 406 aa, Homo sapiens
SPRPSRPAPQFCIHKRPRCVPKKTKKNPFAAAGAPPAARAGYAHFLNVQGRTLYDVILYGLQEHSEAVWRWRLRAAPRCRLAHSSCSPGGDPTAGAAWACFRLDGRTLLRVRGPDAAPFLLGLLTNELPLPSPAAAGAPPAARAGYAHFLNVQGRTLYDVILYGLQEHSEVSGFLLECDSSVQGALQKHLALYRIRRKVTVEPHPELRVWAVLPSSPEACGAASLQERAGAAAILIRDPRTARMGWRLLTQDEGPALVPGGRLGDLWDYHQHRYLQGVPEGVRDLPPGVALPLESNLAFMNGVSFTKGCYIGQELTARTHHMGVIRKRLFPVRFLDPLPTSGITPGATVLTASGQTVGKFRAGQGNVGLALLWSEKIKGPLHIRASEGAQVALAASVPDWWPTVSK

SEQ ID NO: 751150 - protein, 356 aa, Homo sapiens
MATAALLRGATPGRGGPVWRWRLRAAPRCRLAHSSCSPGGDPTAGAAWACFRLDGRTLLRVRGPDAAPFLLGLLTNELPLPSPAAAGAPPAARAGYAHFLNVQGRTLYDVILYGLQEHSEVSGFLLECDSSVQGALQKHLALYRIRRKVTVEPHPELRVWAVLPSSPEACGAASLQERAGAAAILIRDPRTARMGWRLLTQDEGPALVPGGRLGDLWDYHQHRYLQGVPEGVRDLPPGVALPLESNLAFMNGVSFTKGCYIGQELTARTHHMGVIRKRLFPVRFLDPLPTSGITPGATVLTASGQTVGKFRAGQGNVGLALLWSEKIKGPLHIRASEGAQVALAASVPDWWPTVSK

SEQ ID NO: 751151 - protein, 183 aa, Homo sapiens
MREYKVVVLGSGGVGKSALTVQFVTGTFIEKYDPTIEDFYRKEIEVDSSPSVLEILDTAGTEQFASMRDLYIKNGQGFILVYSLVNQQSFQDIKPMRDQIVRVKRYEKVPLILVGNKVDLEPEREVMSSEGRALAQEWGCPFMETSAKSKSMVDELFAEIVRQMNYSSLPEKQDQCCTTCVVQ

SEQ ID NO: 751152 - protein, 117 aa, Homo sapiens
MRDLYIKNGQGFILVYSLVNQQSFQDIKPMRDQIVRVKRYEKVPLILVGNKVDLEPEREVMSSEGRALAQEWGCPFMETSAKSKSMVDELFAEIVRQMNYSSLPEKQDQCCTTCVVQ

SEQ ID NO: 751153 - protein, 183 aa, Homo sapiens; identical to SEQ ID NO: 751151

SEQ ID NO: 751154 - protein, 183 aa, Homo sapiens; identical to SEQ ID NO: 751151

SEQ ID NO: 751155 - protein, 192 aa, Homo sapiens
SGKPFRVCAWWGWGWGWGWGWGVGEKKKRWVRLESLRPPPDGPRLFPRGEQQRWGSGETEEPAGGHGLGVTEPPRRPGGCGRRGRTTPAGAGAQKPARAAVTGTEPSGLSRLGCASRKRGPWAPLCEGRGRSAGQPRAAGSSDVRLAAGSPRRSPTLFPPRGHAASSHNLSRAFPRLRPPPHAPCSGCSSYR

SEQ ID NO: 751156 - protein, 183 aa, Homo sapiens; identical to SEQ ID NO: 751151

SEQ ID NO: 751157 - protein, 183 aa, Homo sapiens; identical to SEQ ID NO: 751151

SEQ ID NO: 751158 - protein, 183 aa, Homo sapiens; identical to SEQ ID NO: 751151

SEQ ID NO: 751159 - protein, 195 aa, Homo sapiens
SVAFSCNGLHHITNCTRSHPFKKVQTQENFHSTLMKKIEISGTCLSFHLLFGLEIRMRRIVFAGVILFRLLGVILFRLLGVILFGRLGDLGTCQTKPGQYWKEEVHIQDVGGLICRACNLSLPFHGCLLDLGTCQAEPGQYCKEEVHIQGGIQWYSVKGCTKNTSECFKSTLVKRILQLHELVTTHCCNHSLCNF

SEQ ID NO: 751160 - protein, 109 aa, Homo sapiens
QDPHRGSFFKSPGFLPPPTCPLVFPLRLLVIPVRGAVLPQQVLHQERGPAKLELGKPRHRSCHTQAPGPPTVHRLSRELRVTAKSSERRVCLSFGLAKLEGTLESKSNP

SEQ ID NO: 751161 - protein, 216 aa, Homo sapiens
MTLTERLREKISRAFYNHGLLCASYPIPIILFTGFCILACCYPLLKLPLPGTGPVEFTTPVKDYSPPPVDSDRKQGEPTEQPEWYVGAPVAYVQQIFVKSSVFPWHKNLLAVDVFRSPLSRAFQLVEEIRNHVLRDSSGIRSLEELCLQVTDLLPGLRKLRNLLPEHGCLLLSPGNFWQNDWERFHADPDIIGTIHQHEPKTRCRAPMGLSGEQFS

SEQ ID NO: 751162 - protein, 102 aa, Homo sapiens
MTLTERLREKISRAFYNHGLLCASYPIPIILFTGFCILACCYPLLKLPLPGTGPVEFTTPVKDYSPPPVDSDRKQGEPTEQPEWVGTRHVPEASTERWVETG

SEQ ID NO: 751163 - protein, 734 aa, Homo sapiens
MKNMATELGIILIGYFTLVPAIQEFCLFAVVGLVSDFFLQMLFFTTVLSIDIRRMELADLNKRLPPEACLPSAKPVGQPTRYERQLAVRPSTPHTITLQPSSFRNLRLPKRLRVVYFLARTRLAQRLIMAGTVVWIGILVYTDPAGLRNYLAAQVTEQSPLGEGALAPMPVPSGMLPPSHPDPAFSIFPPDAPKLPENQTSPGESPERGGPAEVVHDSPVPEVTWGPEDEELWRKLSFRHWPTLFSYYNITLAKRYISLLPVIPVTLRLNPREALEGRHPQDGRSAWPPPGPIPAGHWEAGPKGPGGVQAHGDVTLYKVAALGLATGIVLVLLLLCLYRVLCPRNYGQLGGGPGRRRRGELPCDDYGYAPPETEIVPLVLRGHLMDIECLASDGMLLVSCCLAGHICVWDAQTGDCLTRIPRPGQRRDSGVGSGLEAQESWERLSDGGKAGPEEPGDSPPLRHRPRGPPPPSLFGDQPDLTCLIDTNFSAQPRSSQPTQPEPRHRAVCGRSRDSPGYDFSCLVQRVYQEEGLAAVCTPALRPPSPGPVLSQAPEDEGGSPEKGSPSLAWAPSAEGSIWSLELQGNLIVVGRSSGRLEVWDAIEGVLCCSSEEVSSGITALVFLDKRIVAARLNGSLDFFSLETHTALSPLQFRGTPGRGSSPASPVYSSSDTVACHLTHTVPCAHQKTHHSPESRCWALGDWEPRPHTESVPSGGLVLPLHPSGPLRGHHDRVH

SEQ ID NO: 751164 - protein, 760 aa, Homo sapiens
MSQSGHVLPCALLLPSAGLSSESWSIMKNMATELGIILIGYFTLVPAIQEFCLFAVVGLVSDFFLQMLFFTTVLSIDIRRMELADLNKRLPPEACLPSAKPVGQPTRYERQLAVRPSTPHTITLQPSSFRNLRLPKRLRVVYFLARTRLAQRLIMAGTVVWIGILVYTDPAGLRNYLAAQVTEQSPLGEGALAPMPVPSGMLPPSHPDPAFSIFPPDAPKLPENQTSPGESPERGGPAEVVHDSPVPEVTWGPEDEELWRKLSFRHWPTLFSYYNITLAKRYISLLPVIPVTLRLNPREALEGRHPQDGRSAWPPPGPIPAGHWEAGPKGPGGVQAHGDVTLYKVAALGLATGIVLVLLLLCLYRVLCPRNYGQLGGGPGRRRRGELPCDDYGYAPPETEIVPLVLRGHLMDIECLASDGMLLVSCCLAGHICVWDAQTGDCLTRIPRPGQRRDSGVGSGLEAQESWERLSDGGKAGPEEPGDSPPLRHRPRGPPPPSLFGDQPDLTCLIDTNFSAQPRSSQPTQPEPRHRAVCGRSRDSPGYDFSCLVQRVYQEEGLAAVCTPALRPPSPGPVLSQAPEDEGGSPEKGSPSLAWAPSAEGSIWSLELQGNLIVVGRSSGRLEVWDAIEGVLCCSSEEVSSGITALVFLDKRIVAARLNGSLDFFSLETHTALSPLQFRGTPGRGSSPASPVYSSSDTVACHLTHTVPCAHQKTHHSPESRCWALGDWEPRPHTESVPSGGLVLPLHPSGPLRGHHDRVH

SEQ ID NO: 751165 - protein, 1107 aa, Homo sapiens
MTLTERLREKISRAFYNHGLLCASYPIPIILFTGFCILACCYPLLKLPLPGTGPVEFTTPVKDYSPPPVDSDRKQGEPTEQPEWYVGAPVAYVQQIFVKSSVFPWHKNLLAVDVFRSPLSRAFQLVEEIRNHVLRDSSGIRSLEELCLQVTDLLPGLRKLRNLLPEHGCLLLSPGNFWQNDWERFHADPDIIGTIHQHEPKTLQTSATLKDLLFGVPGKYSGVSLYTRKRMVSYTITLVFQHYHAKFLGSLRARLMLLHPSPNCSLRAESLVHVHFKEEIGVAELIPLVTTYIILFAYIYFSTRKIDMVKSKWGLALAAVVTVLSSLLMSVGLCTLFGLTPTLNGGEIFPYLVVVIGLENVLVLTKSVVSTPVDLEVKLRIAQGLSSESWSIMKNMATELGIILIGYFTLVPAIQEFCLFAVVGLVSDFFLQMLFFTTVLSIDIRRMELADLNKRLPPEACLPSAKPVGQPTRYERQLAVRPSTPHTITLQPSSFRNLRLPKRLRVVYFLARTRLAQRLIMAGTVVWIGILVYTDPAGLRNYLAAQVTEQSPLGEGALAPMPVPSGMLPPSHPDPAFSIFPPDAPKLPENQTSPGESPERGGPAEVVHDSPVPEVTWGPEDEELWRKLSFRHWPTLFSYYNITLAKRYISLLPVIPVTLRLNPREALEGRHPQDGRSAWPPPGPIPAGHWEAGPKGPGGVQAHGDVTLYKVAALGLATGIVLVLLLLCLYRVLCPRNYGQLGGGPGRRRRGELPCDDYGYAPPETEIVPLVLRGHLMDIECLASDGMLLVSCCLAGHICVWDAQTGDCLTRIPRPGQRRDSGVGSGLEAQESWERLSDGGKAGPEEPGDSPPLRHRPRGPPPPSLFGDQPDLTCLIDTNFSAQPRSSQPTQPEPRHRAVCGRSRDSPGYDFSCLVQRVYQEEGLAAVCTPALRPPSPGPVLSQAPEDEGGSPEKGSPSLAWAPSAEGSIWSLELQGNLIVVGRSSGRLEVWDAIEGVLCCSSEEVSSGITALVFLDKRIVAARLNGSLDFFSLETHTALSPLQFRGTPGRGSSPASPVYSSSDTVACHLTHTVPCAHQKTHHSVPSGGLVLPLHPSGPLRGHHDRVH

SEQ ID NO: 751166 - protein, 888 aa, Homo sapiens
MTLTERLREKISRAFYNHGLLCASYPIPIILFTGFCILACCYPLLKLPLPGTGPVEFTTPVKDYSPPPVDSDRKQGEPTEQPEWYVGAPVAYVQQIFVKSSVFPWHKNLLAVDVFRSPLSRAFQLVEEIRNHVLRDSSGIRSLEELCLQVTDLLPGLRKLRNLLPEHGCLLLSPGNFWQNDWERFHADPDIIGTIHQHEPKTLQTSATLKDLLFGVPGKYSGVSLYTRKRMVSYTITLVFQHYHAKFLGSLRARLMLLHPSPNCSLRAESLVHVHFKEEIGVAELIPLVTTYIILFAYIYFSTRKIDMVKSKWGLALAAVVTVLSSLLMSVGLCTLFGLTPTLNGGEIFPYLVVVIGLENVLVLTKSVVSTPVDLEVKLRIAQGLSSESWSIMKNMATELGIILIGYFTLVPAIQEFCLFAVVGLVSDFFLQMLFFTTVLSIDIRRMELADLNKRLPPEACLPSAKPVGQPTRYERQLAVRPSTPHTITLQPSSFRNLRLPKRLRVVYFLARTRLAQRLIMAGTVVWIGILVYTDPAGLRNYLAAQVTEQSPLGEGALAPMPVPSGMLPPSHPDPAFSIFPPDAPKLPENQTSPGESPERGGPAEVVHDSPVPEVTWGPEDEELWRKLSFRHWPTLFSYYNITLAKRYISLLPVIPVTLRLNPREALEGRHPQDGRSAWPPPGPIPAGHWEAGPKGPGGVQAHGDVTLYKVAALGLATGIVLVLLLLCLYRVLCPRNYGQLGGGPGRRRRGELPCDDYGYAPPETEIVPLVLRGHLMDIECLASDGMLLVSCCLAGHICVWDAQTGDCLTRIPRPGQRRDSGVGSGLEAQESWERLSDGGKAGPEEPGDSPPLRHRPQCRGFHLELGAAGQPHRGGAEQRPAGGVGRH

SEQ ID NO: 751167 - protein, 149 aa, Homo sapiens [sequence omitted]

SEQ ID NO: 751168 - protein, 1126 aa, Homo sapiens
MTLTERLREKISRAFYNHGLLCASYPIPIILFTGFCILACCYPLLKLPLPGTGPVEFTTPVKDYSPPPVDSDRKQGEPTEQPEWYVGAPVAYVQQIFVKSSVFPWHKNLLAVDVFRSPLSRAFQLVEEIRNHVLRDSSGIRSLEELCLQVTDLLPGLRKLRNLLPEHGCLLLSPGNFWQNDWERFHADPDIIGTIHQHEPKTLQTSATLKDLLFGVPGKYSGVSLYTRKRMVSYTITLVFQHYHAKFLGSLRARLMLLHPSPNCSLRAESLVHVHFKEEIGVAELIPLVTTYIILFAYIYFSTRKIDMVKSKWGLALAAVVTVLSSLLMSVGLCTLFGLTPTLNGGEIFPYLVVVIGLENVLVLTKSVVSTPVDLEVKLRIAQGLSSESWSIMKNMATELGIILIGYFTLVPAIQEFCLFAVVGLVSDFFLQMLFFTTVLSIDIRRMELADLNKRLPPEACLPSAKPVGQPTRYERQLAVRPSTPHTITLQPSSFRNLRLPKRLRVVYFLARTRLAQRLIMAGTVVWIGILVYTDPAGLRNYLAAQVTEQSPLGEGALAPMPVPSGMLPPSHPDPAFSIFPPDAPKLPENQTSPGESPERGGPAEVVHDSPVPEVTWGPEDEELWRKLSFRHWPTLFSYYNITLAKRYISLLPVIPVTLRLNPREALEGRHPQDGRSAWPPPGPIPAGHWEAGPKGPGGVQAHGDVTLYKVAALGLATGIVLVLLLLCLYRVLCPRNYGQLGGGPGRRRRGELPCDDYGYAPPETEIVPLVLRGHLMDIECLASDGMLLVSCCLAGHICVWDAQTGDCLTRIPRPGQRRDSGVGSGLEAQESWERLSDGGKAGPEEPGDSPPLRHRPRGPPPPSLFGDQPDLTCLIDTNFSAQPRSSQPTQPEPRHRAVCGRSRDSPGYDFSCLVQRVYQEEGLAAVCTPALRPPSPGPVLSQAPEDEGGSPEKGSPSLAWAPSAEGSIWSLELQGNLIVVGRSSGRLEVWDAIEGVLCCSSEEVSSGITALVFLDKRIVAARLNGSLDFFSLETHTALSPLQFRGTPGRGSSPASPVYSSSDTVACHLTHTVPCAHQKTHHSPESRCWALGDWEPRPHTESVPSGGLVLPLHPSGPLRGHHDRVH

SEQ ID NO: 751169 - protein, 149 aa, Homo sapiens [sequence omitted]

SEQ ID NO: 751170 - protein, 149 aa, Homo sapiens [sequence omitted]

SEQ ID NO: 751171 - protein, 93 aa, Homo sapiens
MSQSGHVLPCALLLPSAGLSSESWSIMKNMATELGIILIGYFTLVPAIQREGPKACHLDEHGSNCCAPQLCSHGQGAPLFSTGILASEVGPLC

SEQ ID NO: 751172 - protein, 1126 aa, Homo sapiens; identical to SEQ ID NO: 751168

SEQ ID NO: 751173 - protein, 871 aa, Homo sapiens
MLLHPSPNCSLRAESLVHVHFKEEIGVAELIPLVTTYIILFAYIYFSTRKIDMVKSKWGLALAAVVTVLSSLLMSVGLCTLFGLTPTLNGGEIFPYLVVVIGLENVLVLTKSVVSTPVDLEVKLRIAQGLSSESWSIMKNMATELGIILIGYFTLVPAIQEFCLFAVVGLVSDFFLQMLFFTTVLSIDIRRMELADLNKRLPPEACLPSAKPVGQPTRYERQLAVRPSTPHTITLQPSSFRNLRLPKRLRVVYFLARTRLAQRLIMAGTVVWIGILVYTDPAGLRNYLAAQVTEQSPLGEGALAPMPVPSGMLPPSHPDPAFSIFPPDAPKLPENQTSPGESPERGGPAEVVHDSPVPEVTWGPEDEELWRKLSFRHWPTLFSYYNITLAKRYISLLPVIPVTLRLNPREALEGRHPQDGRSAWPPPGPIPAGHWEAGPKGPGGVQAHGDVTLYKVAALGLATGIVLVLLLLCLYRVLCPRNYGQLGGGPGRRRRGELPCDDYGYAPPETEIVPLVLRGHLMDIECLASDGMLLVSCCLAGHICVWDAQTGDCLTRIPRPGQRRDSGVGSGLEAQESWERLSDGGKAGPEEPGDSPPLRHRPRGPPPPSLFGDQPDLTCLIDTNFSAQPRSSQPTQPEPRHRAVCGRSRDSPGYDFSCLVQRVYQEEGLAAVCTPALRPPSPGPVLSQAPEDEGGSPEKGSPSLAWAPSAEGSIWSLELQGNLIVVGRSSGRLEVWDAIEGVLCCSSEEVSSGITALVFLDKRIVAARLNGSLDFFSLETHTALSPLQFRGTPGRGSSPASPVYSSSDTVACHLTHTVPCAHQKTHHSPESRCWALGDWEPRPHTESVPSGGLVLPLHPSGPLRGHHDRVH

SEQ ID NO: 751174 - protein, 753 aa, Homo sapiens
MTLTERLREKISRAFYNHGLLCASYPIPIILIGYFTLVPAIQEFCLFAVVGLVSDFFLQMLFFTTVLSIDIRRMELADLNKRLPPEACLPSAKPVGQPTRYERQLAVRPSTPHTITLQPSSFRNLRLPKRLRVVYFLARTRLAQRLIMAGTVVWIGILVYTDPAGLRNYLAAQVTEQSPLGEGALAPMPVPSGMLPPSHPDPAFSIFPPDAPKLPENQTSPGESPERGGPAEVVHDSPVPEVTWGPEDEELWRKLSFRHWPTLFSYYNITLAKRYISLLPVIPVTLRLNPREALEGRHPQDGRSAWPPPGPIPAGHWEAGPKGPGGVQAHGDVTLYKVAALGLATGIVLVLLLLCLYRVLCPRNYGQLGGGPGRRRRGELPCDDYGYAPPETEIVPLVLRGHLMDIECLASDGMLLVSCCLAGHICVWDAQTGDCLTRIPRPGQRRDSGVGSGLEAQESWERLSDGGKAGPEEPGDSPPLRHRPRGPPPPSLFGDQPDLTCLIDTNFSAQPRSSQPTQPEPRHRAVCGRSRDSPGYDFSCLVQRVYQEEGLAAVCTPALRPPSPGPVLSQAPEDEGGSPEKGSPSLAWAPSAEGSIWSLELQGNLIVVGRSSGRLEVWDAIEGVLCCSSEEVSSGITALVFLDKRIVAARLNGSLDFFSLETHTALSPLQFRGTPGRGSSPASPVYSSSDTVACHLTHTVPCAHQKTHHSPESRCWALGDWEPRPHTESVPSGGLVLPLHPSGPLRGHHDRVH

SEQ ID NO: 751175 - protein, 1080 aa, Homo sapiens
MTLTERLREKISRAFYNHGLLCASYPIPIILFTGFCILACCYPLLKLPLPGTGPVEFTTPVKDYSPPPVDSDRKQGEPTEQPEWYVGAPVAYVQQIFVKSSVFPWHKNLLAVDVFRSPLSRAFQLVEEIRNHVLRDSSGIRSLEELCLQVTDLLPGLRKLRNLLPEHGCLLLSPGNFWQNDWERFHADPDIIGTIHQHEPKTLQTSATLKDLLFGVPGKYSGVSLYTRKRMVSYTITLVFQHYHAKFLGSLRARLMLLHPSPNCSLRAESLVHVHFKEEIGVAELIPLVTTYIILFAYIYFSTRKIDMVKSKWGLALAAVVTVLSSLLMSVGLCTLFGLTPTLNGGEIFPYLVVVIGLENVLVLTKSVVSTPVDLEVKLRIAQGLSSESWSIMKNMATELGIILIGYFTLVPAIQEFCLFAVVGLVSDFFLQMLFFTTVLSIDIRRMELADLNKRLPPEACLPSAKPVGQPTRYERQLAVRPSTPHTITLQPSSFRNLRLPKRLRVVYFLARTRLAQRLIMAGTVVWIGILVYTDPAGLRNYLAAQVTEQSPLGEGALAPMPVPSGMLPPSHPDPAFSIFPPDAPKLPENQTSPGESPERGGPAEVVHDSPVPEVTWGPEDEELWRKLSFRHWPTLFSYYNITLAKRYISLLPVIPVTLRLNPREALEGRHPQDGRSAWPPPGPIPAGALGSRTQGPRWGAGPWRRHAVQDYGYAPPETEIVPLVLRGHLMDIECLASDGMLLVSCCLAGHICVWDAQTGDCLTRIPRPGQRRDSGVGSGLEAQESWERLSDGGKAGPEEPGDSPPLRHRPRGPPPPSLFGDQPDLTCLIDTNFSAQPRSSQPTQPEPRHRAVCGRSRDSPGYDFSCLVQRVYQEEGLAAVCTPALRPPSPGPVLSQAPEDEGGSPEKGSPSLAWAPSAEGSIWSLELQGNLIVVGRSSGRLEVWDAIEGVLCCSSEEVSSGITALVFLDKRIVAARLNGSLDFFSLETHTALSPLQFRGTPGRGSSPASPVYSSSDTVACHLTHTVPCAHQKTHHSPESRCWALGDWEPRPHTESVPSGGLVLPLHPSGPLRGHHDRVH

SEQ ID NO: 751176 - protein, 734 aa, Homo sapiens; identical to SEQ ID NO: 751163

SEQ ID NO: 751177 - protein, 1126 aa, Homo sapiens; identical to SEQ ID NO: 751168

SEQ ID NO: 751178 - protein, 418 aa, Homo sapiens
MTLTERLREKISRAFYNHGLLCASYPIPIILFTGFCILACCYPLLKLPLPGTGPVEFTTPVKDYSPPPVDSDRKQGEPTEQPEWRDFPLPCGGYWVRECVGAHQVCGLNPGRPGGEAADRPRPKQRELVHHEEHGHGAGHHPHRLLHPSARHPAPSLFGDQPDLTCLIDTNFSAQPRSSQPTQPEPRHRAVCGRSRDSPGYDFSCLVQRVYQEEGLAAVCTPALRPPSPGPVLSQAPEDEGGSPEKGSPSLAWAPSAEGSIWSLELQGNLIVVGRSSGRLEVWDAIEGVLCCSSEEVSSGITALVFLDKRIVAARLNGSLDFFSLETHTALSPLQFRGTPGRGSSPASPVYSSSDTVACHLTHTVPCAHQKTHHSPESRCWALGDWEPRPHTESVPSGGLVLPLHPSGPLRGHHDRVH

SEQ ID NO: 751179 - protein, 1107 aa, Homo sapiens; identical to SEQ ID NO: 751165

SEQ ID NO: 751180 - protein, 109 aa, Homo sapiens
MTLTERLREKISRAFYNHGLLCASYPIPIILFTGFCILACCYPLLKLPLPGTGPVEFTTPVKDYSPPPVDSDRKQGEPTEQPEWYVGAPVAYVQQIFVKSSPRPAEAGG

SEQ ID NO: 751181 - protein, 111 aa, Homo sapiens [sequence omitted]

SEQ ID NO: 751182 - protein, 109 aa, Homo sapiens
MGSVFGGLQGPAFLTSSTCRGPGIIHAAGRGSSHKQNTAPLLEPMAQVVRGGRCGGSPGAAGPSPCERCCQPEGGEGREPREYLEDACPRHEAPSGPHRPHAQVPQVPV

SEQ ID NO: 751183 - protein, 119 aa, Homo sapiens
  misc_feature (10)..(10): Xaa can be any naturally occurring amino acid
AYFDSIFIRXKAQANRPSSNSQAAPVLLPGPGRPRPPRAFSRGLLLLLAPGEPLIARGPPPLWDVRLCCPWAGSTRLWCLGLGLLEEEAVLSARVWLQVTGLVMLTVALKDALLAHPEA

SEQ ID NO: 751184 - protein, 213 aa, Homo sapiens
  misc_feature (11)..(11): Xaa can be any naturally occurring amino acid
PHTSIAFLYEXRPRPIGRARIRRLPQSSCQALGAHARHGLSAAGCSCSSPRGCDSLTQIQCGQLQSRRAQIHQQIDKELQMRTGAENLYRATSNNRVRETVALELSYVNSNLQLLKEELEELSGGVDPGRHGSEAVTVPMIPLGLKETKELDWSTPLKELISVHFGEDGASYEAEIRELEACGRPCGPPAGMSRAWSCSQPITTSCASWMRAS

SEQ ID NO: 751185 - protein, 171 aa, Homo sapiens
EKSCCSSFPALEEEGRRGKFGGKLCNFLFYFHSNSAESRMDVLFVAIFAVPLILGQEYEDEERLGEDEYYQVVYYYTVTPSYDDFSADFTIDYSIFESEDRLNRLDKDITEAIETTISLETARADHPKPVTVKPVTTEPQSPDLNDAVSSLRSPIPLLLSCAFVQVGMYFM

SEQ ID NO: 751186 - protein, 117 aa, Homo sapiens
MKLIKTIKVYREDEYYQVVYYYTVTPSYDDFSADFTIDYSIFESEDRLNRLDKDITEAIETTISLETARADHPKPVTVKPVTTEPQSPDLNDAVSSLRSPIPLLLSCAFVQVGMYFM

SEQ ID NO: 751187 - protein, 132 aa, Homo sapiens
MDVLFVAIFAVPLILGQEYEDEERLGEDEYYQVVYYYTVTPSYDDFSADFTIDYSIFESEDRLNRLDKDITEAIETTISLETARADHPKPVTVKPVTTEPQSPDLNDAVSSLRSPIPLLLSCAFVQVGMYFM

SEQ ID NO: 751188 - protein, 102 aa, Homo sapiens [sequence omitted]

SEQ ID NO: 751189 - protein, 171 aa, Homo sapiens; identical to SEQ ID NO: 751185

SEQ ID NO: 751190 - protein, 106 aa, Homo sapiens
APLHSGLGSKSETLSPKKKRRSDIFIKINLDGQVWWLMPVIPALWEAKGGRSLEAKSSRPAWPIWQNPVSTKNTKISWVWWCMPIIPATREAEAGGFLEPRKSKLQ

SEQ ID NO: 751191 - protein, 119 aa, Homo sapiens [sequence omitted]

SEQ ID NO: 751192 - protein, 83 aa, Homo sapiens
MFYLTLESYLVLSHLHGSIAYFTNYTIKSRSSYLHLKICTENVAVNMFKKVYLKQKSKEVYLNQSKKSHFQMAIKHVLHRISA

SEQ ID NO: 751193 - protein, 305 aa, Homo sapiens
DAHLLWENSPLVYTYEPTGLVTFTRQSLEDFPEWKRCEKPLTRLHVTYEGTIEENGRGMLQVDFANHFVGGGVTSAGLVQEEIRFLINPELIISRLFTEVLDHNECLIIQCQRWLWIPHSVCCCLAPEPTCRGVSIPAGEVLRRSYTKGIKVLVSTVRFSQQYSLCSTIFLDDSTAIQHYLTMTIISVTLEIPHHITQRDADRSLSIPDEQLHSFAVSTVHIMKKRNGGGSLNNYSSSIPSTPSTSQEDPQFSVPPTANTPTPVCKRSMRWSNLFTSEKGSDPDKERKAPENHADTIGSGRAIPH

SEQ ID NO: 751194 - protein, 106 aa, Homo sapiens
LTGMLEQETAWPVSFLLARTSLPSAAWTVCTELWRNSTLGVLENFRNKLIKRIHRGSPAGSSAPVSIGKAMRAEGSAECPWPQSFWILQSVICWASNSARVKGAGG

SEQ ID NO: 751195 - protein, 179 aa, Homo sapiens
RQLKKGGKQASASYDSEEEEEGLPMSYDEKRQLSLDINRLPGEKLGRVVHIIQSREPSLRDSNPDEIEIDFETLKPTTLRELERYVKSCLQKKQRKPFSASGKKQAAKSKEELAQEKKKELEKRLQDVSGQLSSSKKPARKEKPGSAPSGGPSRLSSSSSSESGSSSSSGSSSDSSDSE

SEQ ID NO: 751196 - protein, 179 aa, Homo sapiens; identical to SEQ ID NO: 751195

SEQ ID NO: 751197 - protein, 514 aa, Homo sapiens
MAVWLAQWLGPLLLVSLWGLLAPASLLRRLGEHIQQFQESSAQGLGLSLGPGAAALPKVGWLEQLLDPFNVSDRRSFLQRYWVNDQHWVGQDGPIFLHLGGEGSLGPGSVMRGHPAALAPAWGALVISLEHRFYGLSIPAGGLEMAQLRFLSSRLALADVVSARLALSRLFNISSSSPWICFGGSYAGSLAAWARLKFPHLIFASVASSAPVRAVLDFSEYNDVVSRSLMSTAIGGSLECRAAVSVAFAEVERRLRSGGAAQAALRTELSACGPLGRAENQAELLGALQALVGGVVQYDGQTGAPLSVRQLCGLLLGGGGNRSHSTPYCGLRRAVQIVLHSLGQKCLSFSRAETVAQLRSTEPQLSGVGDRQWLYQTCTEFGFYVTCENPRCPFSQLPALPSQLDLCEQVFGLSALSVAQAVAQTNSYYGGQTPGANKVLFVNGDTDPWHVLSVTQALGSSESTLLIRTGSHCLDMAPERPSDSPSLRLGRQNIFQQLQTWLKLAKESQIKGEV

SEQ ID NO: 751198 - protein, 102 aa, Homo sapiens
REKRPRMPGKRRPEKGETCNVAGSKEGRSSGEYAGFGRRRELTKRRGTRKRGAPQRGRGLGRDNPIRRGHRPLACAKCNTGFRILRINSSYPHWLPLLGHGT

SEQ ID NO: 751199 - protein, 203 aa, Homo sapiens [sequence omitted]

SEQ ID NO: 751200 - protein, 449 aa, Homo sapiens
MAVWLAQWLGPLLLVSLWGLLAPASLLRRLGEHIQQFQESSAQGLGLSLGPGAAALPKVGWLEQLLDPFNVSDRRSFLQRYWVNDQHWVGQDGPIFLHLGGEGSLGPGSVMRGHPAALAPAWGALVISLEHRFYGLSIPAGGLEMAQLRFLSSRLALADVVSARLALSRLFNISSSSPWICFGGSYAGSLAAWARLKFPHLIFASVASSAPVRAVLDFSEYNDVRMAGSRCGTGRGPSGRSPLTLPDTFLCGRPQVVSRSLMSTAIGGSLEIVLHSLGQKCLSFSRAETVAQLRSTEPQLSGVGDRQWLYQTCTEFGFYVTCENPRCPFSQLPALPSQLDLCEQVFGLSALSVAQAVAQTNSYYGGQTPGANKVLFVNGDTDPWHVLSVTQALGSSESTLLIRTGSHCLDMAPERPSDSPSLRLGRQNIFQQLQTWLKLAKESQIKGEV

SEQ ID NO: 751201 - protein, 481 aa, Homo sapiens
MAVWLAQWLGPLLLVSLWGLLAPASLLRRLGEHIQQFQESSAQGLGLSLGPGAAALPKVGWLEQLLDPFNVSDRRSFLQRYWVNDQHWVGQDGPIFLHLGGEGSLGPGSVMRGHPAALAPAWGALVISLEHRFYGLSIPAGGLEMAQLRFLSSRLALADVVSARLALSRLFNISSSSPWICFGGSYAGSLAAWARLKFPHLIFASVASSAPVRAVLDFSEYNDVRMAGSRCGTGRGPSGRSPLTLPDTFLCGRPQVVSRSLMSTAIGGSLECRAAVSVAFAEVERRLRSGGAAQAALRTELSACGPLGRAENQAELLGALQALVGGVVQYDGQTGAPLSVRQLCGLLLGGGGNRSHSTPYCGLRRAVQIVLHSLGQKCLSFSRAETVAQLRSTEPQLSGVGDRQWLYQTCTEFGFWDTDPWHVLSVTQALGSSESTLLIRTGSHCLDMAPERPSDSPSLRLGRQNIFQQLQTWLKLAKGEV

SEQ ID NO: 751202 - protein, 342 aa, Homo sapiens
MAVWLAQWLGPLLLVSLWGLLAPASLLRRLGEHIQQFQESSAQGLGLSLGPGAAALPKVGWLEQLLDPFNVSDRRSFLQRYWVNDQHWVGQDGPIFLHLGGEGSLGPGSVMRGHPAALAPAWGALVISLEHRFYGLSIPAGGLEMAQLRFLSSRLALADVVSARLALSRLFNISSSSPWICFGGSYAGSLAAWARLKFPHLIFASVASSAPVRAVLDFSEYNDVRMAGSRCGTGRGPSGRSPLTLPDTFLCGPPTGGIPKPNEHRDRRVPGGDTDPWHVLSVTQALGSSESTLLIRTGSHCLDMAPERPSDSPSLRLGRQNIFQQLQTWLKLAKESQIKGEV

SEQ ID NO: 751203 - protein, 79 aa, Homo sapiens
  misc_feature (21)..(21): Xaa can be any naturally occurring amino acid
RGEAKTRIGGLEGKDLEAKEXALGSSESTLLIRTGSHCLDMAPERPSDSPSLRLGRQNIFQQLQTWLKLAKESQIKGEV

SEQ ID NO: 751204 - protein, 78 aa, Homo sapiens
REKRPRMPGKRRPEKGETCNVAGSKEGRSSGEYAGFGRRRELTKRRGTRKRGAPQRGRGLGRDNPIRRLSCTAWARSV

SEQ ID NO: 751205 - protein, 203 aa, Homo sapiens [sequence omitted]

SEQ ID NO: 751206 - protein, 389 aa, Homo sapiens
MAVWLAQWLGPLLLVSLWGLLAPASLLRRLGEHIQQFQESSAQGLGLSLGPGAAALPKVGWLEQLLDPFNVSDRRSFLQRYWVNDQHWVGQDGPIFLHLGGEGSLGPGSVMRGHPAALAPAWGALVISLEHRFYGLSIPAGGLEMAQLRFLSSRLALADVVSARLALSRLFNISSSSPWICFGGSYAGSLAAWARLKFPHLIFASVASSAPVRAVLDFSEYNDVRMAGSRCGTGRGPSGRSPLTLPDTFLCGRPQVVSRSLMSTAIGGSLEIVLHSLGQKCLSFSRAETVAQLRSTEPQLSGVGDRQWLYQTCTEFGFWDTDPWHVLSVTQALGSSESTLLIRTGSHCLDMAPERPSDSPSLRLGRQNIFQQLQTWLKLAKESQIKGEV

SEQ ID NO: 751207 - protein, 106 aa, Homo sapiens
MYPALGSRAISGTTRFQRMEKFPENTCLGGETRERDWTVLYHGTETMKSETANGRDCCIVTEKLMDELNSKLDTTETLDPCVEDDSITNWRVPGSLSHHLKQKGQE

SEQ ID NO: 751208 - protein, 32 aa, Homo sapiens
MYPRGFYLFNVQPDEVLSHVNNFIKNMALHPK

SEQ ID NO: 751209 - protein, 35 aa, Homo sapiens
MLPRELRTAKLRSAQGSDRDQRGQLQGSPQAPNWP

SEQ ID NO: 751210 - protein, 86 aa, Homo sapiens
MKGILRIDLQHQEDMADCKEMCLTEQSPTICSSAGPIQRTPGSLRAREPHCILITITNAHPDDQDRKKGQSRPGTVAHACNPSTLG

SEQ ID NO: 751211 - protein, 68 aa, Homo sapiens
GIKDALDQALLKDPGQRFLTRLCPASNKATEEPRLADEHRLRGSHIRRQKQTCWCCPLRSVQMPLEEG

SEQ ID NO: 751212 - protein, 120 aa, Homo sapiens
MRVAGKTGEMCRGLSRGGRRLRQLHILDRQERFPIILLSRVSCVSVQTDTAVYLQAAMKLRATENTCTMVSGRSLFPQPKTDSFAGHLFSTARTLPLSVERGRGSAYGARRSDSAVNTLG

SEQ ID NO: 751213 - protein, 120 aa, Homo sapiens; identical to SEQ ID NO: 751212

SEQ ID NO: 751214 - protein, 128 aa, Homo sapiens
AGYSWGCGQRFDHETNSDDACTYHPGVPVFHDALKGWSCYKRRTTDFSDFLSIVHCTKGRHNSEKPPEPVKPEVKTTEKKEISELKPKFQEHIIQAPKPVEAIKRPSPDEPMTNLELKISASPKQALD

SEQ ID NO: 751215 - protein, 110 aa, Homo sapiens
FVPETQGPFGVCTQGISWSVNCKNHGKSIVPALDSTVPHSAAEGRPPTPCTSWVRRCPTLLLLALHGLHPLPNLSSQLEMQKSPIFCVGLAGSCQTGLLFSHLQVLLSNV

SEQ ID NO: 751216 - protein, 70 aa, Homo sapiens
GYVYMSTLGYVYMRTVGYVYVGTLGFTYRDTHILGCVYLGGSVCMDVCLHEHHMCVYVGARVSASMLVKL

SEQ ID NO: 751217 - protein, 139 aa, Homo sapiens
KYSEQSKETNGSEPLGVFPTQGTPVASLDLEQEQLTIKALKELGERQVEKSTSAQRDAELPSEEVLKQTFTFAPESWPQRSYDILERNVKNGSDLGISQKPITIRETTRVDAVSSLSKTELVKKHVLARLLTDFSGNHL

SEQ ID NO: 751218 - protein, 79 aa, Homo sapiens
SGECAGQSQPGEWEGQLSVHGVPSGDREELLRTSDSNKPGLRAQKCESNPKNSQSKCPLLFLGPPDDPGLFTDEEMEAS

SEQ ID NO: 751219 - protein, 106 aa, Homo sapiens
MPRWPEWFFSNSFVDSRTYSFLMETLCFSHFLSQHTCYFPTEYTHCSYPCTVTHTGRTGMDADGILTQPHLEEIIVSKMWGHKGWHCGLQWFTDETAKMRQDHQMQ

SEQ ID NO: 751220 - protein, 106 aa, Homo sapiens
VLSSHTCQACHPLQDEAWCPWLALSTSHNIVSLVAPSYGLLNPHSPERHSQPPRLKPHGSSGFVQFLNPAWSPACSLPVTSASHPLLSLPSREPFEATFPFLSHSP

SEQ ID NO: 751221 - protein, 109 aa, Homo sapiens
MGSLFRSETMCLAQLFLQSGTAYECLSALGEKGLVQFRDVSVARETRAAPALLAPPIPRIAGALPRGAPRKGAPRPHCPDGEDDTPAQLAKASRSAGLTPGSPAVCVVG

SEQ ID NO: 751222 - protein, 856 aa, Homo sapiens
MGSLFRSETMCLAQLFLQSGTAYECLSALGEKGLVQFRDLNQNVSSFQRKFVGEVKRCEELERILVYLVQEINRADIPLPEGEASPPAPPLKQVLEMQEQLQKLEVELREVTKNKEKLRKNLLELIEYTHMLRVTKTFVKRNVEFEPTYEEFPSLESDSLLDYSCMQRLGAKLGFVSGLINQGKVEAFEKMLWRVCKGYTIVSYAELDESLEDPETGEVIKWYVFLISFWGEQIGHKVKKICDCYHCHVYPYPNTAEERREIQEGLNTRIQDLYTVLHKTEDYLRQVLCKAAESVYSRVIQVKKMKAIYHMLNMCSFDVTNKCLIAEVWCPEADLQDLRRALEEGSRESGATIPSFMNIIPTKETPPTRIRTNKFTEGFQNIVDAYGVGSYREVNPALFTIITFPFLFAVMFGDFGHGFVMFLFALLLVLNENHPRLNQSQEIMRMFFNGRYILLLMGLFSVYTGLIYNDCFSKSVNLFGSGWNVSAMYSSSHPPAEHKKMVLWNDSVVRHNSILQLDPSIPGVFRGPYPLGIDPIWNLATNRLTFLNSFKMKMSVILGIIHMTFGVILGIFNHLHFRKKFNIYLVSIPELLFMLCIFGYLIFMIFYKWLVFSAETSRVAPSILIEFINMFLFPASKTSGLYTGQEYVQRVLLVVTALSVPVLFLGKPLFLLWLHNGRSCFGVNRSGYTLIRKDSEEEVSLLGSQDIEEGNHQVEDGCREMACEEFNFGEILMTQVIHSIEYCLGCISNTASYLRLWALSLAHAQLSDVLWAMLMRVGLRVDTTYGVLLLLPVIALFAVLTIFILLIMEGLSAFLHAIRLHWVEFQNKFYVGAGTKFVPFSFSLLSSKFNNDDSVA

SEQ ID NO: 751223 - protein, 777 aa, Homo sapiens
MGSLFRSETMCLAQLFLQSGTAYECLSALGEKGLVQFRDLNQNVSSFQRKFVGEVKRCEELERILVYLVQEINRADIPLPEGEASPPAPPLKQVLEMQEQLQKLEVELREVTKNKEKLRKNLLELIEYTHMLRVTKTFVKRNVEFEPTYEEFPSLESDSLLDYSCMQRLGAKLGFVSGLINQGKVEAFEKMLWRVCKGYTIVSYAELDESLEDPETGEVIKWYVFLISFWGEQIGHKVKKICDCYHCHVYPYPNTAEERREIQEGLNTRIQDLYTVLHKTEDYLRQVLCKAAESVYSRVIQVKKMKAIYHMLNMCSFDVTNKCLIAEVWCPEADLQDLRRALEEGSRESGATIPSFMNIIPTKETPPTRIRTNKFTEGFQNIVDAYGVGSYREVNPALFTIITFPFLFAVMFGDFGHGFVMFLFALLLVLNENHPRLNQSQEIMRMFFNGRYILLLMGLFSVYTGLIYNDCFSKSVNLFGSGWNVSAMYSSSHPPAEHKKMVLWNDSVVRHNSILQLDPSIPGVFRGPYPLGIDPIWNLATNRLTFLNSFKMKMSVILGIIHMTFGVILGIFNHLHFRKKFNIYLVSIPELLFMLCIFGYLIFMIFYKWLVFSAETSRVAPSILIEFINMFLFPASKTSGLYTGQEYVQRVLLVVTALSVPVLFLGKPLFLLWLHNGRSCFGVNRSGYTLIRKDSEEEVSLLGSQDIEEGNHQVEDGCREMACEEFNFGEILMTQVIHSIEYCLGCISNTASYLRLWALSLAHARKFLLRPAVPNAL

SEQ ID NO: 751224 - protein, 367 aa, Homo sapiens
MGSLFRSETMCLAQLFLQSGTAYECLSALGEKGLVQFRDLNQNVSSFQRKFVGEVKRCEELERILVYLVQEINRADIPLPEGEASPPAPPLKQVLEMQEQLQKLEVELREVTKNKEKLRKNLLELIEYTHMLRVTKTFVKRNVEFEPTYEEFPSLESDSLLDYSCMQRLGAKLGFVSGLINQGKVEAFEKMLWRVCKGYTIVSYAELDESLEDPETGEVIKWYVFLISFWGEQIGHKVKKICDCYHCHVYPYPNTAEERREIQEGLNTRIQDLYTVLHKTEDYLRQVLCKAAESVYSRVIQVKKMKAIYHMLNMCSFDVTNKCLIAEVWCPEADLQDLRRALEEGSRESGATIPSLHEWSSHHSFAL

SEQ ID NO: 751225 - protein, 136 aa, Homo sapiens
MACEEFNFGEILMTQVIHSIEYCLGCISNTASYLRLWALSLAHAQLSDVLWAMLMRVGLRVDTTYGVLLLLPVIALFAVLTIFILLIMEGLSAFLHAIRLHWVEFQNKFYVGAGTKFVPFSFSLLSSKFNNDDSVA

SEQ ID NO: 751226 - protein, 150 aa, Homo sapiens
MGSLFRSETMCLAQLFLQSGTAYECLSALGEKGLVQFRDLNQNVSSFQRKFVGEVKRCEELERILVYLVQEINRADIPLPEGEASPPAPPLKQVLEMQEQLQKLEVELREVTKNKEKLRKNLLELIEYTHMLRVTKTFVKRNVEICVWPN

SEQ ID NO: 751227 - protein, 138 aa, Homo sapiens
MLCDLSQFNFGEILMTQVIHSIEYCLGCISNTASYLRLWALSLAHAQLSDVLWAMLMRVGLRVDTTYGVLLLLPVIALFAVLTIFILLIMEGLSAFLHAIRLHWVEFQNKFYVGAGTKFVPFSFSLLSSKFNNDDSVA

SEQ ID NO: 751228 - protein, 856 aa, Homo sapiens; identical to SEQ ID NO: 751222

SEQ ID NO: 751229 - protein, 442 aa, Homo sapiens
MGSLFRSETMCLAQLFLQSGTAYECLSALGEKGLVQFRDLNQNVSSFQRKFVGEVKRCEELERILVYLVQEINRADIPLPEGEASPPAPPLKQVLEMQEQLQKLEVELREVTKNKEKLRKNLLELIEYTHMLRVTKTFVKRNVEFEPTYEEFPSLESDSLLDYSCMQRLGAKLGFVSGLINQGKVEAFEKMLWRVCKGYTIVSYAELDESLEDPETGEVIKWYVFLISFWGEQIGHKVKKICDCYHCHVYPYPNTAEERREIQEGLNTRIQDLYTSVYSRVIQVKKMKAIYHMLNMCSFDVTNKCLIAEVWCPEADLQDLRRALEEGSRESGATIPSFMNIIPTKETPPTRIRTNKFTEGFQNIVDAYGVGSYREVNPALFTISHLHGFYLARHSSGRPSAPSLRDCPLLSPSLWVSPCHPPQTQLRPRDLTLPPWARRFFD

SEQ ID NO: 751230 - protein, 500 aa, Homo sapiens
MNIIPTKETPPTRIRTNKFTEGFQNIVDAYGVGSYREVNPALFTIITFPFLFAVMFGDFGHGFVMFLFALLLVLNENHPRLNQSQEIMRMFFNGRYILLLMGLFSVYTGLIYNDCFSKSVNLFGSGWNVSAMYSSSHPPAEHKKMVLWNDSVVRHNSILQLDPSIPGVFRGPYPLGIDPIWNLATNRLTFLNSFKMKMSVILGIIHMTFGVILGIFNHLHFRKKFNIYLVSIPELLFMLCIFGYLIFMIFYKWLVFSAETSRVAPSILIEFINMFLFPASKTSGLYTGQEYVQRVLLVVTALSVPVLFLGKPLFLLWLHNGRSCFGVNRSGYTLIRKDSEEEVSLLGSQDIEEGNHQVEDGCREMACEEFNFGEILMTQVIHSIEYCLGCISNTASYLRLWALSLAHAQLSDVLWAMLMRVGLRVDTTYGVLLLLPVIALFAVLTIFILLIMEGLSAFLHAIRLHWVEFQNKFYVGAGTKFVPFSFSLLSSKFNNDDSVA

SEQ ID NO: 751231 - protein, 149 aa, Homo sapiens
MGSLFRSETMCLAQLFLQSGTAYECLSALGEKGLVQFRDLNQNVSSFQRKFVGEVKRCEELERILVYLVQEINRADIPLPEGEASPPAPPLKQVLEMQEQLQKLEVELREVTKNKEKLRKNLLELIEYTHMLRVTKTFVKRNVEVLNSS

SEQ ID NO: 751232 - protein, 90 aa, Homo sapiens
MMLGSLAPDPGSRRHSGQAALRPRRYPTLWDRCRKRWLRPIFTQLLAAGLAYHTLLPIPSEPLFAAPGEHLHQCFVKESYCPPRVLAKEQ

SEQ ID NO: 751233 - protein, 36 aa, Homo sapiens
MMLGSLAPDPGSRRHSGQAALRPRRSGLPHAPPHSQ

SEQ ID NO: 751234 - protein, 60 aa, Homo sapiens
MMLGSLAPDPGSRRHSGQAALRPRRYPTLWDRCRKRWLRPIFTQLLAAGLTTKDSESWQV

SEQ ID NO: 751235 - protein, 31 aa, Homo sapiens
MMLGSLAPDPGSRRHSGQAALRPRRFNHQGL

SEQ ID NO: 751236 - protein, 31 aa, Homo sapiens; identical to SEQ ID NO: 751235

SEQ ID NO: 751237 - protein, 90 aa, Homo sapiens; identical to SEQ ID NO: 751232

SEQ ID NO: 751238 - protein, 396 aa, Homo sapiens
MLLRGVLLALQALQLAGALDLPAGSCAFEESTCGFDSVLASLPWILNEEGHYIYVDTSFGKQGEKAVLLSPDLQAEEWSCLRLVYQITTSSESLSDPSQLNLYMRFEDESFDRLLWSAKEPSDSWLIASLDLQNSSKKFKILIEGVLGQGNTASIALFEIKMTTGYCIECDFEENHLCGFVNRWNPNVNWFVGGGSIRNVHSILPQDHTFKSELGHYMYVDSVYVKHFQEVAQLISPLTTAPMAGCLSFYYQIQQGNDNVFSLYTRDVAGLYEEIWKADRPGNAAWNLAEVEFNAPYPMEVIFEVAFNGPKGGYVALDDISFSPVHCQNQTELLFTCRGSRCNLSQISGIFPSIKQGPAGPGGIKPLFRVGPLTVGFLAPGASPGSGGWPPRKVGP

SEQ ID NO: 751239 - protein, 295 aa, Homo sapiens
MSGALDVLQMKEEDVLKFLAAGTHLGGTNLDFQMEQYIYKRKSDGIYIINLKRTWEKLLLAARAIVAIENPADVSVISSRNTGQRAVLKFAAATGATPIAGRFTPGTFTNQIQAAFREPRLLVVTDPRLTTSLLTEASYVNLPTIALCNTDSPLRYVDIAIPCNNKGAHSVGLMWWMLAREVLRMRGTISREHPWEVMPDLYFYRDPEEIEKEEQAAAEKAVTKEEFQGEWTAPAPEFTATQPEVADWSEGVQVPSVPIQQFPTEDWSAQPATEDWSAAPTVQATEWVGATTDWS

SEQ ID NO: 751240 - protein, 240 aa, Homo sapiens
MGNCQAGHNLHLCLAHHPPLVCATLILLLLGLSGLGLGSFLLTHRTGLRSPDIPQDWVSFLRSFGQLTLCPRNGTVTGKWRGSHVVGLLTTLNFGDGPDRNKTRTFQATVLGSQMGLKGSSAGQLVLITARVTTERTAGTCLYFSAVPGILPSSQPPISCSEEGAGNATLSPRMGEECVSVWSHEGLVLTKLLTSEELALCGSRLLVLGSFLLLFCGLLCCVTAMCFHPRRESHWSRTRL

SEQ ID NO: 751241 - protein, 240 aa, Homo sapiens; identical to SEQ ID NO: 751240

SEQ ID NO: 751242 - protein, 240 aa, Homo sapiens; identical to SEQ ID NO: 751240

SEQ ID NO: 751243 - protein, 240 aa, Homo sapiens; identical to SEQ ID NO: 751240

SEQ ID NO: 751244 - protein, 240 aa, Homo sapiens; identical to SEQ ID NO: 751240

SEQ ID NO: 751245 - protein, 240 aa, Homo sapiens; identical to SEQ ID NO: 751240

SEQ ID NO: 751246 - protein, 240 aa, Homo sapiens; identical to SEQ ID NO: 751240

SEQ ID NO: 751247 - protein, 266 aa, Homo sapiens
VRSESRDRRLRPARGLSPEAQPPLLPMGNCQAGHNLHLCLAHHPPLVCATLILLLLGLSGLGLGSFLLTHRTGLRSPDIPQDWVSFLRSFGQLTLCPRNGTVTGKWRGSHVVGLLTTLNFGDGPDRNKTRTFQATVLGSQMGLKGSSAGQLVLITARVTTERTAGTCLYFSAVPGILPSSQPPISCSEEGAGNATLSPRMGEECVSVWSHEGLVLTKLLTSEELALCGSRLLVLGSFLLLFCGLLCCVTAMCFHPRRESHWSRTRL

SEQ ID NO: 751248 - protein, 297 aa, Homo sapiens
SSGNKLQLNETGLTTEESGGLSELRGLVPPPDFKLALEEEEVEDLRLSPEAQPPLLPMGNCQAGHNLHLCLAHHPPLVCATLILLLLGLSGLGLGSFLLTHRTGLRSPDIPQDWVSFLRSFGQLTLCPRNGTVTGKWRGSHVVGLLTTLNFGDGPDRNKTRTFQATVLGSQMGLKGSSAGQLVLITARVTTERTAGTCLYFSAVPGILPSSQPPISCSEEGAGNATLSPRMGEECVSVWSHEGLVLTKLLTSEELALCGSRLLVLGSFLLLFCGLLCCVTAMCFHPRRESHWSRTRL

SEQ ID NO: 751249 - protein, 195 aa, Homo sapiens
MGNCQAGHNLHLCLAHHPPLVCATLILLLLGLSGLGLGSFLLTHRTGLRSPDIPQDWVSFLRSFGQLTLCPRNGTVTGKWRGSHVVGLLTTLNFGDGPDRNKTRTFQATVLGSQMGLKGSSAGQLVLITARVTTERTAGTCLYFSAVPGILPSSQPPISLLVLGSFLLLFCGLLCCVTAMCFHPRRESHWSRTRL

SEQ ID NO: 751250 - protein, 159 aa, Homo sapiens
MGNCQAGHNLHLCLAHHPPLVCATLILLLLGLSGLGLGSFLLTHRTGLRSPDIPQDWVSFLRSFGQLTLCPRNGTVTGKWRGSHVVGLLTTLNFGDGPDRNKTRTFQATVLGSQMGLKGGAGSVWLQAAGLGLLPASLLWPSLLCHCYVLPPAPGVPLV

SEQ ID NO: 751251 - protein, 150 aa, Homo sapiens
CPHPVACPDPPGMKITGSPCPFSCSLDVESPLPHGGSFYSPWTGLTCPPPPLPVPLPRRSWLCVAPGCWSWAPSCFSSVAFSAVSLLCASTRAGSPTGLEPGSEGTGLVPDLFLSEVLCSSPAGAGNGVGVGVVTGVEQILGLFLKDCCF

SEQ ID NO: 751252 - protein, 240 aa, Homo sapiens; identical to SEQ ID NO: 751240

SEQ ID NO: 751253 - protein, 297 aa, Homo sapiens; identical to SEQ ID NO: 751248

SEQ ID NO: 751254 - protein, 256 aa, Homo sapiens
MGNCQAGHNLHLCLAHHPPLVCATLILLLLGLSGLGLGSFLLTHRTGLRSPDIPQDWVSFLRSFGQLTLCPRNGTVTGKWRGSHVVGLLTTLNFGDGPDRNKTRTFQATVLGSQMGLKGSSAGQLVLITARVTTERTAGTCLYFSAVPGILPSSQPPISCSEEGAGNATLSPRMGEECVSVWSHEGLVLTKLLTSEELALCGSRLLVLGSFLLLFCGLLCCVTAMCFHRREAGRSPRMGEGCDRDLEPRRPYQVMQ

SEQ ID NO: 751255 - protein, 224 aa, Homo sapiens [sequence omitted]

SEQ ID NO: 751256 - protein, 215 aa, Homo sapiens
MGNCQAGHNLHLCLAHHPPLVCATLILLLLGLSGLGLGSFLLTHRTGLRSPDIPQDWVSFLRSFGQLTLCPRNGTVTGKWRGSHVVGLLTTLNFGDGPDRNKTRTFQATVLGSQMGLKGSSAGQLVLITARVTTERTAGTCLYFSAVPGILPSSQPPISCFSSVAFSAVSLLCASTRAGSPTGLEPGSEGTGLVPDLFLRCESTSWALALSWKRF

SEQ ID NO: 751257 - protein, 161 aa, Homo sapiens
CIVTRNLWAVTYLNFGDGPDRNKTRTFQATVLGSQMGLKGSSAGQLVLITARVTTERTAGTCLYFSAVPGILPSSQPPISCSEEGAGNATLSPRMGEECVSVWSHEGLVLTKLLTSEELALCGSRLLVLGSFLLLFCGLLCCVTAMCFHPRRESHWSRTRL

SEQ ID NO: 751258 - protein, 101 aa, Homo sapiens
RRTALWDAATPLPRRPGPRAHRVWSPPGGPTGYISDLDPGRLRETLGVSAVTEPVQLPRGESCVSDLGQEAEVASSESLTSVGAEGCGDSAPGTVDLCRES

SEQ ID NO: 751259 - protein, 101 aa, Homo sapiens; identical to SEQ ID NO: 751258

SEQ ID NO: 751260 - protein, 299 aa, Homo sapiens
SDAAVRRISSAQSAPQVVLVCRVMTSFRLALIQLQISSIKSDNVTRACSFIREAATQGAKIVSLPECFNSPYGAKYFPEYAEKIPGESTQKLSEVAKECSIYLIGGSIPEEDAGKLYNTCAVFGPDGTLLAKYRKIHLFDIDVPGKITFQESKTLSPGDSFSTFDTPYCRVGLGICYDMRFAELAQIYAQRGCQLLVYPGAFNLTTGPAHWELLQRSRAVDNQVYVATASPARDDKASYVAWGHSTVVNPWGEVLAKAGTEEAIVYSDIDLKKLAEIRQQIPVFRQKRSDLYAVEMKKP

SEQ ID NO: 751261 - protein, 172 aa, Homo sapiens
SDAAVRRISSAQSAPQVVLVCRVMTSFRLALIQLQISSIKSDNVTRACSFIREAATQGAKIVSLPECFNSPYGAKYFPEYAEKIPGESTQKLSEVAKECSIYLIGGSIPEEDAGKLYNTCAVFGPDGTLLAKYRKLTAEWVWASATTCGLQSLHKSTHREAASCWYIQELLI

SEQ ID NO: 751262 - protein, 170 aa, Homo sapiens
SDAAVRRISSAQSAPQVVLVCRVMTSFRLALIQLQISSIKSDNVTRACSFIREAATQGAKIVSLPECFNSPYGAKYFPEYAEKIPGESTQKLSEVAKECSIYLIGGSIPEEDAGKLYNTCAVFGPDGTLLAKYRKIHLFDIDVPGKITFQESKTLSPGDSFSTFDTLCTR

SEQ ID NO: 751263 - protein, 246 aa, Homo sapiens
ARPRAAARVRAAGEALERRRRWLGRLSPSAPRPRRARPSLRRASAWVRDRVAGRPGALPGFQASGVAGEAQKAPGHPAAPAPAASCLTEADGRVFLHGVRGAFRLALIQLQISSIKSDNVTRACSFIREAATQGAKIVSLPECFNSPYGAKYFPEYAEKIPGESTQKLSEVAKECSIYLIGGSIPEEDAGKLYNTCAVFGPDGTLLAKYRKIHLFDIDVPGKITFQESKTLSPGDSFSTFDTLCTR

SEQ ID NO: 751264 - protein, 166 aa, Homo sapiens
GCTARDVGSRRTWCLSCRVMTSFRLALIQLQISSIKSDNVTRACSFIREAATQGAKIVSLPECFNSPYGAKYFPEYAEKIPGESTQKLSEVAKECSIYLIGGSIPEEDAGKLYNTCAVFGPDGTLLAKYRKIHLFDIDVPGKITFQESKTLSPGDSFSTFDTLCTR

SEQ ID NO: 751265 - protein, 299 aa, Homo sapiens; identical to SEQ ID NO: 751260

SEQ ID NO: 751266 - protein, 160 aa, Homo sapiens
SDAAVRRISSAQSAPQVVLVCRVMTSFRLALIQLQISSIKSDNVTRACSFIREAATQGAKIVSLPECFNSPYGAKYFPEYAEKIPGESTQKLSEVAKECSIYLIGGSIPEEDAGKLYNTCAVFGPDGTLLAKYRKIHLFDIDVPGKITFQESMYQISLPL

SEQ ID NO: 751267 - protein, 299 aa, Homo sapiens; identical to SEQ ID NO: 751260

SEQ ID NO: 751268 - protein, 121 aa, Homo sapiens
MRFAELAQIYAQRGCQLLVYPGAFNLTTGPAHWELLQRSRAVDNQVYVATASPARDDKASYVAWGHSTVVNPWGEVLAKAGTEEAIVYSDIDLKKLAEIRQQIPVFRQKRSDLYAVEMKKP

SEQ ID NO: 751269 - protein, 147 aa, Homo sapiens
SDAAVRRISSAQSAPQVVLVCRVMTSFRLALIQLQISSIKSDNVTRACSFIREAATQGAKIVSLPECFNSPYGAKYFPEYAEKIPGESTQKLSEVAKECSIYLIGGSIPEEDAGKLYNTCAVFGPDGTLLAKYRKAASCWYIQELLI

SEQ ID NO: 751270 - protein, 302 aa, Homo sapiens
SDAAVRRISSAQSAPQVVLVCRVMTSFRLALIQLQISSIKSDNVTRACSFIREAATQGAKIVSLPECFNSPYGAKYFPEYAEKIPGESTQKLSEVAKECSIYLIGGSIPEEDAGKLYNTCAVFGPDGTLLAKYRKIHLFDIDVPGKITFQESKTLSPGDSFSTFDTPYCRVGLGICYDMRFAELAQIYAQRAARLLVIYRSYKKSDKKKKTNWEVNYRERRAVDNQVYVATASPARDDKASYVAWGHSTVVNPWGEVLAKAGTEEAIVYSDIDLKKLAEIRQQIPVFRQKRSDLYAVEMKKP

SEQ ID NO: 751271 - protein, 296 aa, Homo sapiens
RLSPWGKMSRRALCLYASRDLYRLSTSQLLILQQSDNVTRACSFIREAATQGAKIVSLPECFNSPYGAKYFPEYAEKIPGESTQKLSEVAKECSIYLIGGSIPEEDAGKLYNTCAVFGPDGTLLAKYRKIHLFDIDVPGKITFQESKTLSPGDSFSTFDTPYCRVGLGICYDMRFAELAQIYAQRAARLLVIYRSYKKSDKKKKTNWEVNYRERRAVDNQVYVATASPARDDKASYVAWGHSTVVNPWGEVLAKAGTEEAIVYSDIDLKKLAEIRQQIPVFRQKRSDLYAVEMKKP

SEQ ID NO: 751272 - protein, 191 aa, Homo sapiens
ARPRAAARVRAAGEALERRRRWLGRLSPSAPRPRRARPSLRRASAWVRDRVAGRPGALPGFQASGVAGEAQKAPGHPAAPAPAASCLTEADGRVFLHGVRGAFRLALIQLQISSIKSDNVTRACSFIREAATQGAKIVSLPECFNSPYGAKYFPEYAEKIPGESTQKLSEVAKECSIYLIGGNFLPTRLYP

SEQ ID NO: 751273 - protein, 115 aa, Homo sapiens
SDAAVRRISSAQSAPQVVLVCRVMTSFRLALIQLQISSIKSDNVTRACSFIREAATQGAKIVSLPECFNSPYGAKYFPEYAEKIPGESTQKLSEVAKECSIYLIGGNFLPTRLYP

SEQ ID NO: 751274 - protein, 375 aa, Homo sapiens
ARPRAAARVRAAGEALERRRRWLGRLSPSAPRPRRARPSLRRASAWVRDRVAGRPGALPGFQASGVAGEAQKAPGHPAAPAPAASCLTEADGRVFLHGVRGAFRLALIQLQISSIKSDNVTRACSFIREAATQGAKIVSLPECFNSPYGAKYFPEYAEKIPGESTQKLSEVAKECSIYLIGGSIPEEDAGKLYNTCAVFGPDGTLLAKYRKIHLFDIDVPGKITFQESKTLSPGDSFSTFDTPYCRVGLGICYDMRFAELAQIYAQRGCQLLVYPGAFNLTTGPAHWELLQRSRAVDNQVYVATASPARDDKASYVAWGHSTVVNPWGEVLAKAGTEEAIVYSDIDLKKLAEIRQQIPVFRQKRSDLYAVEMKKP

SEQ ID NO: 751275 - protein, 121 aa, Homo sapiens; identical to SEQ ID NO: 751268

SEQ ID NO: 751276 - protein, 143 aa, Homo sapiens
MFLEKLHFKNPYCRVGLGICYDMRFAELAQIYAQRGCQLLVYPGAFNLTTGPAHWELLQRSRAVDNQVYVATASPARDDKASYVAWGHSTVVNPWGEVLAKAGTEEAIVYSDIDLKKLAEIRQQIPVFRQKRSDLYAVEMKKP

SEQ ID NO: 751277 - protein, 147 aa, Homo sapiens; identical to SEQ ID NO: 751269

SEQ ID NO: 751278 - protein, 282 aa, Homo sapiens
MDRTLESLRHIIAQVLPHRDPALVFKDLNVVSMLQEFWESKQQQKAAFPSEGVVVYESLPAPGPPFVSYVTLPGGSCFGNFQCCLSRAEARRDAAKVALINSLFNELPSRRITKEFIMESVQEAVASTSGTLDDADDPSTSVGAYHYMLESNMGKTMLEFQELMTIFQLLHWNGSLKALRETKCSRQEVISYYSQYSLDEKMRSHMALDWIMKERDSPGIVSQELRMALRQLEEARKAGQELRFYKEKKEILSLALTQICSDPDTSSPSDDQLSLTALCGYH

SEQ ID NO: 751279 - protein, 282 aa, Homo sapiens; identical to SEQ ID NO: 751278

SEQ ID NO: 751280 - protein, 188 aa, Homo sapiens
MSANEDQEMELEALRSIYEGDESFRELSPVSFQYRIGENGDPKAFLIEISWTETYPQTPPILSMNAFFNNTISSAVKQSILAKLQEAVEANLGTAMTYTLFEYAKDNKEQFMENHNPINSATSISNIISIETPNTAPSSKKKDKKEQLSKAQKRKLADKTDHKGELPRGWNWVDVVKHLSKTGSKDDE

SEQ ID NO: 751281 - protein, 188 aa, Homo sapiens; identical to SEQ ID NO: 751280

SEQ ID NO: 751282 - protein, 243 aa, Homo sapiens
SGDAALPRPHQPRLRLVAHSPLPAAGRCRGSGRAQLASASAKTVPPPQPRRERGTPGLWAAAFAFSSLLRTPSAQEAPRDRRDECQRGPGIGENGDPKAFLIEISWTETYPQTPPILSMNAFFNNTISSAVKQSILAKLQEAVEANLGTAMTYTLFEYAKDNKEQFMENHNPINSATSISNIISIETPNTAPSSKKKDKKEQLSKAQKRKLADKTDHKGELPRGWNWVDVVKHLSKTGSKDDE

SEQ ID NO: 751283 - protein, 171 aa, Homo sapiens
MSANEDQEMELEALRSIYEGDESFRELSPVSFQYRIGENGDPKAFLIEISWTETYPQTPPILSMNAFFNNTISSAVKQSILAKLQEAVEANLGTAMTYTLFEYAKDNKEQFMENHNPINSATSISNIISIETPNTAPSSKKKDKKEQLSKAQKRKLADKTDHKGELHIQRT

SEQ ID NO: 751284 - protein, 152 aa, Homo sapiens
MSHSARPKSAHLKGQEEVFTPPGDSQNNADVPTARSLHSPLHLPRGVRSQGPSPSQRHPGVPSIFFHEGPESILGFQTDLSSLQGVTTVFHSSHFIGHTVTLLIGISPEEDSREEAHLRKAEREEKPKHTEAKKSLSFRKKQQKDFCFIFRN

SEQ ID NO: 751285 - protein, 136 aa, Homo sapiens
DCSVEAMARRHCFSYWLLVCWLVVTVAEGQEEVFTPPGDSQNNADATDCQIFTLTPPPAPRSPVTRAQPITKTPRCPFHFFPRRPRIHFRFPNRPFVPSRCNHRFPFQPFYWPHRYLTYRYFPRRRLQRGSSSEES

SEQ ID NO: 751286 - protein, 91 aa, Homo sapiens
DCSVEAMARRHCFSYWLLVCWLVVTVAEGQEEVFTPPGDSQNNADATDCQIFTLTPPPAPRSPVTRAQPITKTPRYFPRRRLQRGSSSEES

SEQ ID NO: 751287 - protein, 621 aa, Homo sapiens
TGGHSAGQPRAERSASATDAAWWPDSKWDRRTRSLACQGKLMENRALDPGTRDSYGATSHLPNKGALAKVKNNFKDLMSKLTEGQYVLCRWTDGLYYLGKIKRVSSSKQSCLVTFEDNSKYWVLWKDIQHAGVPGEEPKCNICLGKTSGPLNEILICGKCGLGYHQQCHIPIAGSADQPLLTPWFCRRCIFALAVRKGGALKKGAIARTLQAVKMVLSYQPEELEWDSPHRTNQQQCYCYCGGPGEWYLRMLQCYRCRQWFHEACTQCLNEPMMFGDRFYLFFCSVCNQGPEYIERLPLRWVDVVHLALYNLGVQSKKKYFDFEEILAFVNHHWELLQLGKLTSTPVTDRGPHLLNALNSYKSRFLCGKEIKKKKCIFRLRIRVPPNPPGKLLPDKGLLPNENSASSELRKRGKSKPGLLPHEFQQQKRRVYRRKRSKFLLEDAIPSSDFTSAWSTNHHLASIFDFTLDEIQSLKSASSGQTFFSDVDSTDAASTSGSASTSLSYDSRWTVGSRKRKLAAKAYMPLRAKRWAAELDGRCPSDSSAEGASVPERPDEGIDSHTFESISEDDSSLSHLKSSITNYFGAAGRLACGEKYQVLARRVTPEGKVQYLVEWEGTTPY

SEQ ID NO: 751288 - protein, 174 aa, Homo sapiens [sequence omitted]

SEQ ID NO: 751289 - protein, 621 aa, Homo sapiens; identical to SEQ ID NO: 751287

SEQ ID NO: 751290 - protein, 621 aa, Homo sapiens; identical to SEQ ID NO: 751287

SEQ ID NO: 751291 - protein, 621 aa, Homo sapiens; identical to SEQ ID NO: 751287

SEQ ID NO: 751292 - protein, 621 aa, Homo sapiens; identical to SEQ ID NO: 751287

SEQ ID NO: 751293 - protein, 621 aa, Homo sapiens; identical to SEQ ID NO: 751287

SEQ ID NO: 751294 - protein, 621 aa, Homo sapiens; identical to SEQ ID NO: 751287

SEQ ID NO: 751295 - protein, 110 aa, Homo sapiens
MQCCLHAVASPTATCRSALTGVEVEVGRGRRASLPWCLASFCSALSTAFSVESETLRVTGAWLRSPCRITVTSGTQTPVWAALPSRLAQPPHHSSLPPPGTKASEATAQL

SEQ ID NO: 751296 - protein, 110 aa, Homo sapiens; identical to SEQ ID NO: 751295

SEQ ID NO: 751297 - protein, 110 aa, Homo sapiens; identical to SEQ ID NO: 751295

SEQ ID NO: 751298 - protein, 214 aa, Homo sapiens
MDDSETGFNLKVVLVSFKQCLDEKEEVLLDPYIASWKGLVRFLNSLGTIFSFISKDVVSKLRIMERLRGGPQSEHYRSLQAMVAHELSNRLVDLERRSHHPESGCRTVLRLHRALHWLQLFLEGLRTSPEDARTSALCADSYNASLAAYHPWVVRRAVTVAFCTLPTREVFLEAMNVGPPEQAVQMLGEALPFIQRVYNVSQKLYAEHSLLDLP

SEQ ID NO: 751299 - protein, 214 aa, Homo sapiens; identical to SEQ ID NO: 751298

SEQ ID NO: 751300 - protein, 282 aa, Homo sapiens
MCREIWTGCSDDFDVGSVWGGCGPKEAEGTAPLACGVHLRTRVKSQVPGCGGSILSPFCQPMCPHLRPVPGTPCLPRWAALSPGDSVPSMPWLAETLNSSLGTVGLSPPLLPCLPLSVPGRLGAGQPEAETKAPHRRAQEVPALGTASSVAPARHQFPEGRSRPPPAAAVGLHSPAQPKAPRSWDSATPSEMLCPFSPVPLDAPSPQCSGDPWGTEQEGLDPVAQPKATRQPQPAQPPSSAWGLATGSSQWTPAPRGGRGTAPTAQQTCELPECNLCDVFQR

SEQ ID NO: 751301 - protein, 135 aa, Homo sapiens
AQKRPTLSVRNKTPQPRPPLHPACLQRLPEALRRALPAGPALEAGSQGRTGFPAADLGCGGQGRESRGRAFWALREQEILCRPAKGYQTATTSPATIQCLGPGHWLFTVDPSTSGWQRDGPHGPADMRASRVQSM

SEQ ID NO: 751302 - protein, 214 aa, Homo sapiens; identical to SEQ ID NO: 751298

SEQ ID NO: 751303 - protein, 151 aa, Homo sapiens
MERLRGGPQSEHYRSLQAMVAHELSNRLVDLERRSHHPESGCRTVLRLHRALHWLQLFLEGLRTSPEDARTSALCADSYNASLAAYHPWVVRRAVTVAFCTLPTREVFLEAMNVGPPEQAVQMLGEALPFIQRVYNVSQKLYAEHSLLDLP

SEQ ID NO: 751304 - protein, 214 aa, Homo sapiens; identical to SEQ ID NO: 751298

SEQ ID NO: 751305 - protein, 214 aa, Homo sapiens; identical to SEQ ID NO: 751298

SEQ ID NO: 751306 - protein, 214 aa, Homo sapiens; identical to SEQ ID NO: 751298

SEQ ID NO: 751307 - protein, 360 aa, Homo sapiens
  misc_feature (168)..(168): Xaa can be any naturally occurring amino acid
GPVSPRLSKKRFLGRQPGNREIRSGGPLLSWKPSVRNAQDCDRRKAGEPAPERSARPLRRFRESRPPSSPQASPVWRILNTAVPLVLGASVQVVDGCKSQEGKGSGAWGTGATAKVAPDKHTAKPLLQPMSGARIPSEPNGLKCHKGPGRVVKGVLCHLRPSIVAKPXGSRINLHGRSSTCGTTVDRVTQGRGTSPCERHPGDSVPSMPWLAETLNSSLGTVGLSPPLLPCLPLSVPGRLGAGQPEAETKAPHRRAQEVPALGTASSVAPARNRRVWTLWPSQRLPDSHNQPSHHPVPGAWPLALHSGPQHLGVAEGRPPRPSRHASFQSAIYVMSSNVNKSHSLPGGRRWGATPSTHTT

SEQ ID NO: 751308 - protein, 313 aa, Homo sapiens
MVTVVIKVNRECVRGLWAGQQQELVFLRNRNPERGSIQNAKQALRNMINSSCDQPLGYPIYVSPLTTSLAGSHPQLRALWGGPISLGAIAHWLLRTWERLHKGCGAGCNSGGNVDDSDCSGGGGLTSLSNNPPVAHPTPENTAGNGDQPLPPGPGWGPRSSLSGSGDGRPPPLLQWPPPRLPGPPPASPIPTEGPRTSRPPGPGLLSSEGPSGKWSLGGRKGLGGSDGEPASGSPKGGTPKSQAPLDLSLSLSLSLSPDVSTEASPPRASQDIPCLDSSAPESGTPMGALGDWPAPIEERESPAAQPLLEHQY

SEQ ID NO: 751309 - protein, 620 aa, Homo sapiens
VEAITEGVEEDEGCCCCEPGHLPRVLSFNAAFGQRWLAWEVTASKYVLEGYSISDNNAASMLQVFDLRKILITYYVKSIIYYVSRSPKLEVWLSHEGITAALRPVRVPGYADSDPTFSLSVDEDYDLRLSGLSLPSFCAVHLEWIQYCASRRSQPVDQDWNSPLVTLCFGLCVLGRRALGTASHSMSASLEPFLYGLHALFKGDFRITSPRDEWVFADMDLLHRVVAPGVRMALKLHQDHFTSPDEYEEPAALYDAIAANEERLVISHEGDQHGAAPSSATRPPCWLRHVLDDASDEYKIIMLNRRHLSFRVIKVNRECVRGLWAGQQQELVFLRNRNPERGSIQNAKQALRNMINSSCDQPLGYPIYVSPLTTSLAGSHPQLRALWGGPISLGAIAHWLLRTWERLHKGCGAGCNSGGNVDDSDCSGGGGLTSLSNNPPVAHPTPENTAGNGDQPLPPGPGWGPRSSLSGSGDGRPPPLLQWPPPRLPGPPPASPIPTEGPRTSRPPGPGLLSSEGPSGKWSLGGRKGLGGSDGEPASGSPKGGTPKSQAPLDLSLSLSLSLSPDVSTEASPPRASQDIPCLDSSAPESGTPMGALGDWPAPIEERESPAAQPLLEHQY

SEQ ID NO: 751310 - protein, 157 aa, Homo sapiens
DTGVFAVVNSHSLSLLGKLTISAAFNIVYIYTSELYPTVIRNVGLGTCSMFSRVGGIIAPFIPSLKYVQWSLPFIVFGATGLTSGLLSLLLPETLNSPLLETFSDLQVYSYRRLGEEALSLQALDPQQCVDKESSLGSESEEEEEFYDADEETQMIK

SEQ ID NO: 751311 - protein, 157 aa, Homo sapiens; identical to SEQ ID NO: 751310

SEQ ID NO: 751312 - protein, 157 aa, Homo sapiens; identical to SEQ ID NO: 751310

SEQ ID NO: 751313 - protein, 157 aa, Homo sapiens; identical to SEQ ID NO: 751310

SEQ ID NO: 751314 - protein, 419 aa, Homo sapiens
MTGLQPVWIIIIFNYRSLSALSAYHTGLIAPMKIRTEAPGNLRLYSGSPTRSEKEQVSISSFYYKERKSRRWKSKREGSDSGNRQIKAAGKVIIQDIACLLPVHKSLGELYILNVNDIQETCQKNAASALLVGRKDLVQVWSLATVATDLCLGPKSDPDLETPWARHPFGRQLLESLLAHYCRLRDVQTLAMLCSVFEAQSRPQGLPNPFGPFPNRSSNLVVSHSRYPSFTSSGSCSSMSDPGLNTGGWNIAGREAEHLSSPWGESSPEELRFGSLTYSDPRERERDQHDKNKRLLDPANTQQFDDFKKCYGEILYRWGLREKRAEVLKFVSCPPDPHKGIEFGVYCSHCRSEVRGTQCAICKGFTFQCAICHVAVRGSSNFCLTCGHGGHTSHMMEWFRTQEVCPTGCGCHCLLESTF

SEQ ID NO: 751315 - protein, 107 aa, Homo sapiens
SCTTRKYDQELQPVWIIIIFNYRSLSALSAYHTGLIAPMKIRTEAPGNLRLYSGSPTRSEKEQVSISSFYYKERVSARAAAFDSYPFSWILVPHLLPGAAARLVITL

SEQ ID NO: 751316 - protein, 134 aa, Homo sapiens
MSVDCLGQHAVLSGRRFLYIVNLDAPFEGHRKISRQSKWDIGAVQWNPHDSFAHYFAASSNQRVDLYKWKDGSGEVGTTLQGHTRVISDLDWAVFEPDLLVTSSVDTYIYIWDIKDTRKPTCRTVLLSPGCLPG

SEQ ID NO: 751317 - protein, 974 aa, Homo sapiens
MAARWSSENVVVEFRDSQATAMSVDCLGQHAVLSGRRFLYIVNLDAPFEGHRKISRQSKWDIGAVQWNPHDSFAHYFAASSNQRVDLYKWKDGSGEVGTTLQGHTRVISDLDWAVFEPDLLVTSSVDTYIYIWDIKDTRKPTVALSAVAGASQVKWNKKNANCLATSHDGDVRIWDKRKPSTAVEYLAAHLSKIHGLDWHPDSEHILATSSQDNSVKFWDYRQPRKYLNILPCQVPVWKARYTPFSNGLVTVMVPQLRRENSLLLWNVFDLNTPVHTFVGHDDVVLEFQWRKQKEGSKDYQLVTWSRDQTLRMWRVDSQMQRLCANDILDGVDEFIESISLLPEPEKTLHTEDTDHQHTASHGEEEALKEDPPRNLLEERKSDQLGLPQTLQQEFSLINVQIRNVNVEMDAADRSCTVSVHCSNHRVKMLVKFPAQYPNNAAPSFQFINPTTITSTMKAKLLKILKDTALQKVKRGQSCLEPCLRQLVSCLESFVNQEDSASSNPFALPNSVTPPLPTFARVTTAYGSYQDANIPFPRTSGARFCGAGYLVYFTRPMTMHRAVSPTEPTPRSLSALSAYHTGLIAPMKIRTEAPGNLRLYSGSPTRSEKEQVSISSFYYKERKSRRWKSKREGSDSGNRQIKAAGKVIIQDIACLLPVHKSLGELYILNVNDIQETCQKNAASALLVGRKDLVQVWSLATVATDLCLGPKSDPDLETPWARHPFGRQLLESLLAHYCRLRDVQTLAMLCSVFEAQSRPQGLPNPFGPFPNRSSNLVVSHSRYPSFTSSGSCSSMSDPGLNTGGWNIAGREAEHLSSPWGESSPEELRFGSLTYSDPRERERDQHDKNKRLLDPANTQQFDDFKKCYGEILYRWGLREKRAEVLKFVSCPPDPHKGIEFGVYCSHCRSEVRGTQCAICKGFTFQCAICHVAVRGSSNFCLTCGHGGHTSHMMEWFRTQEVCPTGCGCHCLLESTF

SEQ ID NO: 751318 - protein, 993 aa, Homo sapiens
MAARWSSENVVVEFRDSQATAMSVDCLGQHAVLSGRRFLYIVNLDAPFEGHRKISRQSKWDIGAVQWNPHDSFAHYFAASSNQRVDLYKWKDGSGEVGTTLQGHTRVISDLDWAVFEPDLLVTSSVDTYIYIWDIKDTRKPTVALSAVAGASQVKWNKKNANCLATSHDGDVRIWDKRKPSTAVEYLAAHLSKIHGLDWHPDSEHILATSSQDNSVKFWDYRQPRKYLNILPCQVPVWKARYTPFSNGLVTVMVPQLRRENSLLLWNVFDLNTPVHTFVGHDDVVLEFQWRKQKEGSKDYQLVTWSRDQTLRMWRVDSQMQRLCANDILDGVDEFIESISLLPEPEKTLHTEDTDHQHTASHGEEEALKEDPPRNLLEERKSDQLGLPQTLQQEFSLINVQIRNVNVEMDAADRSCTVSVHCSNHRVKMLVKFPAQYPNNAAPSFQFINPTTITSTMKAKLLKILKDTALQKVKRGQSCLEPCLRQLVSCLESFVNQEDSASSNPFALPNSVTPPLPTFARVTTAYGSYQDANIPFPRTSGARFCGAGYLVYFTRPMTMHRAVSPTEPTPRSLSALSAYHTGLIAPMKIRTEAPGNLRLYSGSPTRSEKEQVSISSFYYKERMSPRSARRRWSIQAINDFPKSRRWKSKREGSDSGNRQIKAAGKVIIQDIACLLPVHKSLGELYILNVNDIQETCQKNAASALLVGRKDLVQVWSLATVATDLCLGPKSDPDLETPWARHPFGRQLLESLLAHYCRLRDVQTLAMLCSVFEAQSRPQGLPNPFGPFPNRSSNLVVSHSRYPSFTSSGSCSSMSDPGLNTGGWNIAGREAEHLSSPWGESSPEELRFGSLTYSDPRERERDQHDKNKRLLDPANTQQFDDFKKCYGEILYRWGLREKRAEVLKFVSCPPDPHKGIEFGVYCSHCRSEVRGTQCAICKGFTFQCAICHVAVRGSSNFCLTCGHGGHTSHMMEWFRTQEVCPTGCGCHCLLESTF

SEQ ID NO: 751319 - protein, 982 aa, Homo sapiens
MAARWSSENVVVEFRDSQATAMSVDCLGQHAVLSGRRFLYIVNLDAPFEGHRKISRQSKWDIGAVQWNPHDSFAHYFAASSNQRVDLYKWKDGSGEVGTTLQGHTRVISDLDWAVFEPDLLVTSSVDTYIYIWDIKDTRKPTVALSAVAGASQVKWNKKNANCLATSHDGDVRIWDKRKPSTAVEYLAAHLSKIHGLDWHPDSEHILATSSQDNSVKFWDYRQPRKYLNILPCQVPVWKARYTPFSNGLVTVMVPQLRRENSLLLWNVFDLNTPVHTFVGHDDVVLEFQWRKQKEGSKDYQLVTWSRDQTLRMWRVDSQMQRLCANDILDGVDEFIESISLLPEPEKTLHTEDTDHQHTASHGEEEGNCQTDVSALKEDPPRNLLEERKSDQLGLPQTLQQEFSLINVQIRNVNVEMDAADRSCTVSVHCSNHRVKMLVKFPAQYPNNAAPSFQFINPTTITSTMKAKLLKILKDTALQKVKRGQSCLEPCLRQLVSCLESFVNQEDSASSNPFALPNSVTPPLPTFARVTTAYGSYQDANIPFPRTSGARFCGAGYLVYFTRPMTMHRAVSPTEPTPRSLSALSAYHTGLIAPMKIRTEAPGNLRLYSGSPTRSEKEQVSISSFYYKERKSRRWKSKREGSDSGNRQIKAAGKVIIQDIACLLPVHKSLGELYILNVNDIQETCQKNAASALLVGRKDLVQVWSLATVATDLCLGPKSDPDLETPWARHPFGRQLLESLLAHYCRLRDVQTLAMLCSVFEAQSRPQGLPNPFGPFPNRSSNLVVSHSRYPSFTSSGSCSSMSDPGLNTGGWNIAGREAEHLSSPWGESSPEELRFGSLTYSDPRERERDQHDKNKRLLDPANTQQFDDFKKCYGEILYRWGLREKRAEVLKFVSCPPDPHKGIEFGVYCSHCRSEVRGTQCAICKGFTFQCAICHVAVRGSSNFCLTCGHGGHTSHMMEWFRTQEVCPTGCGCHCLLESTF

SEQ ID NO: 751320 - protein, 1018 aa, Homo sapiens
MAARWSSENVVVEFRDSQATAMSVDCLGQHAVLSGRRFLYIVNLDAPFEGHRKISRQSKWDIGAVQWNPHDSFAHYFAASSNQRVDLYKWKDGSGEVGTTLQGHTRVISDLDWAVFEPDLLVTSSVDTYIYIWDIKDTRKPTVALSAVAGASQVKWNKKNANCLATSHDGDVRIWDKRKPSTAVEYLAAHLSKIHGLDWHPDSEHILATSSQDNSVKFWDYRQPRKYLNILPCQVPVWKARYTPFSNGLVTVMVPQLRRENSLLLWNVFDLNTPVHTFVGHDDVVLEFQWRKQKEGSKDYQLVTWSRDQTLRMWRVDSQMQRLCANDILDGVDEFIESISLLPEPEKTLHTEDTDHQHTASHGEEEGNCQTDVSGKVPLYSIAELWQIPQTCSLFHFQKCFPTLNFSLLLALKEDPPRNLLEERKSDQLGLPQTLQQEFSLINVQIRNVNVEMDAADRSCTVSVHCSNHRVKMLVKFPAQYPNNAAPSFQFINPTTITSTMKAKLLKILKDTALQKVKRGQSCLEPCLRQLVSCLESFVNQEDSASSNPFALPNSVTPPLPTFARVTTAYGSYQDANIPFPRTSGARFCGAGYLVYFTRPMTMHRAVSPTEPTPRSLSALSAYHTGLIAPMKIRTEAPGNLRLYSGSPTRSEKEQVSISSFYYKERKSRRWKSKREGSDSGNRQIKAAGKVIIQDIACLLPVHKSLGELYILNVNDIQETCQKNAASALLVGRKDLVQVWSLATVATDLCLGPKSDPDLETPWARHPFGRQLLESLLAHYCRLRDVQTLAMLCSVFEAQSRPQGLPNPFGPFPNRSSNLVVSHSRYPSFTSSGSCSSMSDPGLNTGGWNIAGREAEHLSSPWGESSPEELRFGSLTYSDPRERERDQHDKNKRLLDPANTQQFDDFKKCYGEILYRWGLREKRAEVLKFVSCPPDPHKGIEFGVYCSHCRSEVRGTQCAICKGFTFQCAICHVAVRGSSNFCLTCGHGGHTSHMMEWFRTQEVCPTGCGCHCLLESTF

SEQ ID NO: 751321 - protein, 781 aa, Homo sapiens
RKEDQQSSPSCPPHPPFQSAQSVKFWDYRQPRKYLNILPCQVPVWKARYTPFSNGLVTVMVPQLRRENSLLLWNVFDLNTPVHTFVGHDDVVLEFQWRKQKEGSKDYQLVTWSRDQTLRMWRVDSQMQRLCANDILDGVDEFIESISLLPEPEKTLHTEDTDHQHTASHGEEEALKEDPPRNLLEERKSDQLGLPQTLQQEFSLINVQIRNVNVEMDAADRSCTVSVHCSNHRVKMLVKFPAQYPNNAAPSFQFINPTTITSTMKAKLLKILKDTALQKVKRGQSCLEPCLRQLVSCLESFVNQEDSASSNPFALPNSVTPPLPTFARVTTAYGSYQDANIPFPRTSGARFCGAGYLVYFTRPMTMHRAVSPTEPTPRSLSALSAYHTGLIAPMKIRTEAPGNLRLYSGSPTRSEKEQVSISSFYYKERKSRRWKSKREGSDSGNRQIKAAGKVIIQDIACLLPVHKSLGELYILNVNDIQETCQKNAASALLVGRKDLVQVWSLATVATDLCLGPKSDPDLETPWARHPFGRQLLESLLAHYCRLRDVQTLAMLCSVFEAQSRPQGLPNPFGPFPNRSSNLVVSHSRYPSFTSSGSCSSMSDPGLNTGGWNIAGREAEHLSSPWGESSPEELRFGSLTYSDPRERERDQHDKNKRLLDPANTQQFDDFKKCYGEILYRWGLREKRAEVLKFVSCPPDPHKGIEFGVYCSHCRSEVRGTQCAICKGFTFQCAICHVAVRGSSNFCLTCGHGGHTSHMMEWFRTQEVCPTGCGCHCLLESTF

SEQ ID NO: 751322 - protein, 662 aa, Homo sapiens
MWRVDSQMQRLCANDILDGVDEFIESISLLPEPEKTLHTEDTDHQHTASHGEEEALKEDPPRNLLEERKSDQLGLPQTLQQEFSLINVQIRNVNVEMDAADRSCTVSVHCSNHRVKMLVKFPAQYPNNAAPSFQFINPTTITSTMKAKLLKILKDTALQKVKRGQSCLEPCLRQLVSCLESFVNQEDSASSNPFALPNSVTPPLPTFARVTTAYGSYQDANIPFPRTSGARFCGAGYLVYFTRPMTMHRAVSPTEPTPRSLSALSAYHTGLIAPMKIRTEAPGNLRLYSGSPTRSEKEQVSISSFYYKERKSRRWKSKREGSDSGNRQIKAAGKVIIQDIACLLPVHKSLGELYILNVNDIQETCQKNAASALLVGRKDLVQVWSLATVATDLCLGPKSDPDLETPWARHPFGRQLLESLLAHYCRLRDVQTLAMLCSVFEAQSRPQGLPNPFGPFPNRSSNLVVSHSRYPSFTSSGSCSSMSDPGLNTGGWNIAGREAEHLSSPWGESSPEELRFGSLTYSDPRERERDQHDKNKRLLDPANTQQFDDFKKCYGEILYRWGLREKRAEVLKFVSCPPDPHKGIEFGVYCSHCRSEVRGTQCAICKGFTFQCAICHVAVRGSSNFCLTCGHGGHTSHMMEWFRTQEVCPTGCGCHCLLESTF

SEQ ID NO: 751323 - protein, 416 aa, Homo sapiens
MHRAVSPTEPTPRSLSALSAYHTGLIAPMKIRTEAPGNLRLYSGSPTRSEKEQVSISSFYYKERKSRRWKSKREGSDSGNRQIKAAGKVIIQDIACLLPVHKSLGELYILNVNDIQETCQKNAASALLVGRKDLVQVWSLATVATDLCLGPKSDPDLETPWARHPFGRQLLESLLAHYCRLRDVQTLAMLCSVFEAQSRPQGLPNPFGPFPNRSSNLVVSHSRYPSFTSSGSCSSMSDPGLNTGGWNIAGREAEHLSSPWGESSPEELRFGSLTYSDPRERERDQHDKNKRLLDPANTQQFDDFKKCYGEILYRWGLREKRAEVLKFVSCPPDPHKGIEFGVYCSHCRSEVRGTQCAICKGFTFQCAICHVAVRGSSNFCLTCGHGGHTSHMMEWFRTQEVCPTGCGCHCLLESTF

SEQ ID NO: 751324 - protein, 113 aa, Homo sapiens
WVTLEYPRPPRWGLREKRAEVLKFVSCPPDPHKGIEFGVYCSHCRSEVRGTQCAICKGFTFQCAICHVAVRGSSNFCLTCGHGGHTSHMMEWFRTQEVCPTGCGCHCLLESTF

SEQ ID NO: 751325 - protein, 371 aa, Homo sapiens
MAARWSSENVVVEFRDSQATAMSVDCLGQHAVLSGRRFLYIVNLDAPFEGHRKISRQSKWDIGAVQWNPHDSFAHYFAASSNQRVDLYKWKDGSGEVGTTLQGHTRVISDLDWAVFEPDLLVTSSVDTYIYIWDIKDTRKPTVALSAVAGASQVKWNKKNANCLATSHDGDVRIWDKRKPSTAVEYLAAHLSKIHGLDWHPDSEHILATSSQDNSVKFWDYRQPRKYLNILPCQVPVWKARYTPFSNGLVTVMVPQLRRENSLLLWNVFDLNTPVHTFVGHDDVVLEFQWRKQKEGSKDYQLVTWSRDQTLRMWRVDSQMQRLCANDILDGVDEFIESISLLPEPEKTLHTEDTDHQHTASHGEEEGNLSN

SEQ ID NO: 751326 - protein, 267 aa, Homo sapiens
MAARWSSENVVVEFRDSQATAMSVDCLGQHAVLSGRRFLYIVNLDAPFEGHRKISRQSKWDIGAVQWNPHDSFAHYFAASSNQRVDLYKWKDGSGEVGTTLQGHTRVISDLDWAVFEPDLLVTSSVDTYIYIWDIKDTRKPTVALSAVAGASQVKWNKKNANCLATSHDGDVRIWDKRKPSTAVEYLAAHLSKIHGLDWHPDSEHILATSSQDNSVKFWDYRQPRKYLNILPCQFINPTTITSTMKAKLLKVGVWVPKFSLLFCIIV

SEQ ID NO: 751327 - protein, 310 aa, Homo sapiens
MAARWSSENVVVEFRDSQATAMSVDCLGQHAVLSGRRFLYIVNLDAPFEGHRKISRQSKWDIGAVQWNPHDSFAHYFAASSNQRVDLYKWKDGSGEVGTTLQGHTRVISDLDWAVFEPDLLVTSSVDTYIYIWDIKDTRKPTVALSAVAGASQVKWNKKNANCLATSHDGDVRIWDKRKPSTAVEYLAAHLSKIHGLDWHPDSEHILATSSQDNSVKFWDYRQPRKYLNILPCQVPVWKARYTPFSNGLVTVMVPQLRRENSLLLWNVFDLNTPVHTFVGHDDVVLEFQWRKQKEGEWERPAAHFPSELW

SEQ ID NO: 751328 - protein, 167 aa, Homo sapiens
MWRVDSQMQRLCANDILDGVDEFIESISLLPEPEKTLHTEDTDHQHTASHGEEEALKEDPPRNLLEERKSDQLGLPQTLQQEFSLINVQIRNVNVEMDAADRSCTVSVHCSNHRVKMLVKFPAQYPNNAAPSFQFINPTTITSTMKAKLLKVGVWVPKFSLLFCIIV

SEQ ID NO: 751329 - protein, 571 aa, Homo sapiens
MAARWSSENVVVEFRDSQATAMSVDCLGQHAVLSGRRFLYIVNLDAPFEGHRKISRQSKWDIGAVQWNPHDSFAHYFAASSNQRVDLYKWKDGSGEVGTTLQGHTRVISDLDWAVFEPDLLVTSSVDTYIYIWDIKDTRKPTVALSAVAGASQVKWNKKNANCLATSHDGDVRIWDKRKPSTAVEYLAAHLSKIHGLDWHPDSEHILATSSQDNSVKFWDYRQPRKYLNILPCQVPVWKARYTPFSNGLVTVMVPQLRRENSLLLWNVFDLNTPVHTFVGHDDVVLEFQWRKQKEGSKDYQLVTWSRDQTLRMWRVDSQMQRLCANDILDGVDEFIESISLLPEPEKTLHTEDTDHQHTASHGEEEALKEDPPRNLLEERKSDQLGLPQTLQQEFSLINVQIRNVNVEMDAADRSCTVSVHCSNHRVKMLVKFPAQYPNNAAPSFQFINPTTITSTMKAKLLKILKDTALQKVKRGQSCLEPCLRQLVSCLESFVNQEDSASSNPFALPNSVTPPLPTFARVTTAYGSYQDANIPFPRTSGARFCGAGYLVYFTRPMTMHRAVSPTEPTPR

SEQ ID NO: 751330 - protein, 132 aa, Homo sapiens
MGKGDPKKPRGKMSSYAFFVQTCREEHKKKHPDASVNFSEFSKKCSERWKTMSAKEKGKFEDMAKADKARYEREMKTYIPPKGETKKKFKDPNAPKRPPSAFFLFCSEYRPKIKGEHPGLSIGDVAKKLGEM

SEQ ID NO: 751331 - protein, 974 aa, Homo sapiens; identical to SEQ ID NO: 751317

SEQ ID NO: 751332 - protein, 886 aa, Homo sapiens
MAARWSSENVVVEFRDSQATAMSVDCLGQHAVLSGRRFLYIVNLDAPFEGHRKISRQSKWDIGAVQWNPHDSFAHYFAASSNQRVDLYKWKDGSGEVGTTLQGHTRVISDLDWAVFEPDLLVTSSVDTYIYIWDIKDTRKPTVALSAVAGASQVKWNKKNANCLATSHDGDVRIWDKRKPSTAVEYLAAHLSKIHGLDWHPDSEHILATSSQDNSVKFWDYRQPRKYLNILPCQVPVWKARYTPFSNGLVTVMVPQLRRENSLLLWNVFDLNTPVHTFVGHDDVVLEFQWRKQKEGSKDYQLVTWSRDQTLRMWRVDSQMQRLCANDILDGVDEFIESISLLPEPEKTLHTEDTDHQHTASHGEEEALKEDPPRNLLEERKSDQLGLPQTLQQEFSLINVQIRNVNVEMDAADRSCTVSVHCSNHRVKMLVKFPAQYPNNAAPSFQFINPTTITSTMKAKLLKILKDTALQKVKRGQSCLEPCLRQLVSCLESFVNQEDSASSNPFALPNSVTPPLPTFARVTTAYGSYQDANIPFPRTSGARFCGAGYLVYFTRPMTMHRAVSPTEPTPRSLSALSAYHTGLIAPMKIRTEAPGNLRLYSGSPTRSEKEQVSISSFYYKERKSRRWKSKREGSDSGNRQIKAAGKVIIQDIACLLPVHKSLGELYILNVNDIQETCQKNAASALLVGRKDLVQPSFTSSGSCSSMSDPGLNTGGWNIAGREAEHLSSPWGESSPEELRFGSLTYSDPRERERDQHDKNKRLLDPANTQQFDDFKKCYGEILYRWGLREKRAEVLKFVSCPPDPHKGIEFGVYCSHCRSEVRGTQCAICKGFTFQCAICHVAVRGSSNFCLTCGHGGHTSHMMEWFRTQEVCPTGCGCHCLLESTF

SEQ ID NO: 751333 - protein, 228 aa, Homo sapiens
MLCSVFEAQSRPQGLPNPFGPFPNRSSNLVVSHSRYPSFTSSGSCSSMSDPGLNTGGWNIAGREAEHLSSPWGESSPEELRFGSLTYSDPRERERDQHDKNKRLLDPANTQQFDDFKKCYGEILYRWGLREKRAEVLKFVSCPPDPHKGIEFGVYCSHCRSEVRGTQCAICKGFTFQCAICHVAVRGSSNFCLTCGHGGHTSHMMEWFRTQEVCPTGCGCHCLLESTF

SEQ ID NO: 751334 - protein, 479 aa, Homo sapiens
MAARWSSENVVVEFRDSQATAMSVDCLGQHAVLSGRRFLYIVNLDAPFEGHRKISRQSKWDIGAVQWNPHDSFAHYFAASSNQRVDLYKWKDGSGEVGTTLQGHTRVISDLDWAVFEPDLLVTSSVDTYIYIWDIKDTRKPTVALSAVAGASQVKWNKKNANCLATSHDGDVRIWDKRKPSTAVEYLAAHLSKIHGLDWHPDSEHILATSSQDNSVKFWDYRQPRKYLNILPCQVPVWKARYTPFSNGLVTVMVPQLRRENSLLLWNVFDLNTPVHTFVGHDDVVLEFQWRKQKEGSKDYQLVTWSRDQTLRMWRVDSQMQRLCANDILDGVDEFIESISLLPEPEKTLHTEDTDHQHTASHGEEEALKEDPPRNLLEERKSDQLGLPQTLQQEFSLINVQIRNVNVEMDAADRSCTVSVHCSNHRVKMLVKFPAQYPNNAAPSFQFINPTTITSTMKAKLLKVGVWVPKFSLLFCIIV

SEQ ID NO: 751335 - protein, 829 aa, Homo sapiens
MAARWSSENVVVEFRDSQATAMSVDCLGQHAVLSGRRFLYIVNLDAPFEGHRKISRQSKWDIGAVQWNPHDSFAHYFAASSNQRVDLYKWKDGSGEVGTTLQGHTRVISDLDWAVFEPDLLVTSSVDTYIYIWDIKDTRKPTVALSAVAGASQVKWNKKNANCLATSHDGDVRIWDKRKPSTAVEYLAAHLSKIHGLDWHPDSEHILATSSQDNSVKFWDYRQPRKYLNILPCQVPVWKARYTPFSNGLVTVMVPQLRRENSLLLWNVFDLNTPVHTFVGHDDVVLEFQWRKQKEGSKDYQLVTWSRDQTLRMWRVDSQMQRLCANDILDGVDEFIESISLLPEPEKTLHTEDTDHQHTASHGEEEALKEDPPRNLLEERKSDQLGLPQTLQQEFSLINVQIRNVNVEMDAADRSCTVSVHCSNHRVKMLVKFPAQYPNNAAPSFQFINPTTITSTMKAKLLKILKDTALQKVKRGQSCLEPCLRQLVSCLESFVNQEDSASSNPFALPNSVTPPLPTFARVTTAYGSYQDANIPFPRTSGARFCGAGYLVYFTRPMTMHRAVSPTEPTPRSLSALSAYHTGLIAPMKIRTEAPGNLRLYSGSPTRSEKEQVSISSFYYKERKSRRWKSKREGSDSGNRQIKAAGKVIIQDIACLLPVHKSLGELYILNVNDIQETCQKNAASALLVGRKDLVQVWSLATVATDLCLGPKSDPDLETPWARHPFGRQLLESLLAHYCRLRDVQTLAMLCSVFEAQSRPQGLPNPFGPFPNRSSNLVVSHSRYPSFTSSGSCSSMSDPGLNTGGWNIGLYGNDLAHAGFLVLPELCICNL

SEQ ID NO: 751336 - protein, 977 aa, Homo sapiens
MPPRPAYLLLEMGFHHVVQAGLELYDIKLFTRLGLPKCWDYRHEPLHLANFISKEVKKLKAFSGDVSKLSLADSFLYGLIQVPNYSLRIEAMVLKKEFLPSCSSLYTDITVLRTAIKELMSCEELHSILHLVLQAGNIMNAGGYAGNAVGFKLSSLLKLADTKANKPGMNLLHFVAQEAQKKDTILLNFSEKLHHVQKTARLSLENTEAELHLLFVRTKSLKENIQRDGELCQQMEDFLQFAIEKLRELECWKQELQDEAYTLIDFFCEDKKTMKLDECFQIFRDFCTKFNKAVKDNHDREAQELRQLQRLKEQEQKQRSWATGELGAFGRSSSENDVELLTKKGAEGLLPFLHPRPISPSSPSYRPPNTRRSRLSLGPSADRELLTFLESSTGSPEEPNKFHSLPRSSPRQARPTIACLEPAEVRHQDSSFAHKPQASGGQEEAPNPPSAQAHQLAAAQPENHASAFPRARRQGVSVLRKRYSEPVSLGSAQSPPLSPLALGIKEHELVTGLAQFNLQGSQGMEETSQLTLSDFSPMELESVGHRGPQSLSASSSSLTPMGRDALGSLSPALEDGKAAPDEPGSAALGSVGSSDPENKDPRPLFCISDTTDCSLTLDCSEGTDSRPRGGDPEEGGEGDGSMSSGVGEMGDSQVSSNPTSSPPGEAPAPVSVDSEPSCKGGLPRDKPTKRKDVVAPKRGSLKEASPGASKPGSARRSQGAVAKSVRTLTASENESMRKVMPITKSSRGAGWRRPELSSRGPSQNPPSSTDTVWSRQNSVRRASTGAEEQRLPRGSSGSSSTRPGRDVPLQPRGSFKKPSAKPLRNLPRQKPEENKTCRAHSEGPESPKEEPKTPSVPSVPHELPRVPSFARNTVASSSRSMRTDLPPVAKAPGITRTVSQRQLRVKGDPEDAAPKDSSTLRRASSARAPKKRPESAEGPSANTEAPLKARGAGERASLRRKDSSRTTLGRILNPLRK

SEQ ID NO: 751337 - protein, 408 aa, Homo sapiens
VPEWFGTGLLERTPGSAALGSVGSSDPENKDPRPLFCISDTTDCSLTLDCSEGTDSRPRGGDPEEGGEGDGSMSSGVGEMGDSQVSSNPTSSPPGEAPAPVSVDSEPSCKGGLPRDKPTKRKDVVAPKRGSLKEASPGASKPGSARRSQGAVAKSVRTLTASENESMRKVMPITKSSRGAGWRRPELSSRGPSQNPPSSTDTVWSRQNSVRRASTGAEEQRLPRGSSGSSSTRPGRDVPLQPRGSFKKPSAKPLRNLPRQKPEENKTCRAHSEGPESPKEEPKTPSVPSVPHELPRVPSFARNTVASSSRSMRTDLPPVAKAPGITRTVSQRQLRVKGDPEDAAPKDSSTLRRASSARAPKKRPESAEGPSANTEAPLKARGAGERASLRRKDSSRTTLGRILNPLRK

SEQ ID NO: 751338 - protein, 977 aa, Homo sapiens; identical to SEQ ID NO: 751336

SEQ ID NO: 751339 - protein, 1130 aa, Homo sapiens
ENGNIATAPGFMIGQTPPPAPPPPPPPPPPSPPCSCSREECPSSPPPPPPPPLPGEPPIPPPPPGLPPTTHMNGYSHLGKKKRMRSFFWKTIPEEQVRGKTNIWTLAARQEHHYQIDTKTIEELFGQQEDTTKSSLPRRGRTLNSSFREAREEITILDAKRSMNIGIFLKQFKKSPRSIVEDIHQGKSEHYGSETLREFLKFLPESEEVKKLKAFSGDVSKLSLADSFLYGLIQVPNYSLRIEAMVLKKEFLPSCSSLYTDITVLRTAIKELMSCEELHSILHLVLQAGNIMNAGGYAGNAVGFKLSSLLKLADTKANKPGMNLLHFVAQEAQKKDTILLNFSEKLHHVQKTARLSLENTEAELHLLFVRTKSLKENIQRDGELCQQMEDFLQFAIEKLRELECWKQELQDEAYTLIDFFCEDKKTMKLDECFQIFRDFCTKFNKAVKDNHDREAQELRQLQRLKEQEQKQRSWATGELGAFGRSSSENDVELLTKKGAEGLLPFLHPRPISPSSPSYRPPNTRRSRLSLGPSADRELLTFLESSTGSPEEPNKFHSLPRSSPRQARPTIACLEPAEVRHQDSSFAHKPQASGGQEEAPNPPSAQAHQLAAAQPENHASAFPRARRQGVSVLRKRYSEPVSLGSAQSPPLSPLALGIKEHELVTGLAQFNLQGSQGMEETSQLTLSDFSPMELESVGHRGPQSLSASSSSLTPMGRDALGSLSPALEDGKAAPDEPGSAALGSVGSSDPENKDPRPLFCISDTTDCSLTLDCSEGTDSRPRGGDPEEGGEGDGSMSSGVGEMGDSQVSSNPTSSPPGEAPAPVSVDSEPSCKGGLPRDKPTKRKDVVAPKRGSLKEASPGASKPGSARRSQGAVAKSVRTLTASENESMRKVMPITKSSRGAGWRRPELSSRGPSQNPPSSTDTVWSRQNSVRRASTGAEEQRLPRGSSGSSSTRPGRDVPLQPRGSFKKPSAKPLRNLPRQKPEENKTCRAHSEGPESPKEEPKTPSVPSVPHELPRVPSFARNTVASSSRSMRTDLPPVAKAPGITRTVSQRQLRVKGDPEDAAPKDSSTLRRASSARAPKKRPESAEGPSANTEAPLKARGAGERASLRRKDSSRTTLGRILNPLRK

SEQ ID NO: 751340 - protein, 977 aa, Homo sapiens; identical to SEQ ID NO: 751336

SEQ ID NO: 751341 - protein, 41 aa, Homo sapiens
MSCSTVLLVINSISCCISSGSYLFFSQFSYMHELINIVLKT

SEQ ID NO: 751342 - protein, 110 aa, Homo sapiens
MGGLSLGPALIRVTSEKLCRAQHELHFQAATYLCLLRSIRKHVALHQEFHGKGERSVEESAGLVGLKLPHQPGGKGWEPGTWRISLDAAFIGELNNFYQYVFIIKFFLSL

SEQ ID NO: 751343 - protein, 70 aa, Homo sapiens
SDHYRSFHTDKLGEYKQPLPPLHPAVSDPRSPPSQKSPHDSKSPLDHRSPLERSLEQKNNPDYNWNVRKT

SEQ ID NO: 751344 - protein, 119 aa, Homo sapiens
LNAHTHTHKYTCTHTCAYTHQDGYTPHCQFLSQSCGEKLGQRWRQTALSHAGLGVGAFLSIPGKTAQDLPCRRPGVSCNRQATDQHIKVKAALGSTPGSSETQAPSELSDEEERPKLPG

SEQ ID NO: 751345 - protein, 261 aa, Homo sapiens
RSEVTVMSDHRKRSCCEREEKTSKNFEELVSDSELHQDQPDILGRSPASEAACSKVPDTNVSLEDVSEVAPEKPITTENPKLPSTVSPNVFNETEFSLNVTTSAYLESLHGKNVKHIDDSSPEDLIAAFTETRDKGIVDSERNAFKAISEKMTDFKTTPPVEVLHENESGGSEIKDIGSKYSEQSKETNGSEPLGVFPTQGTPVASLDLEQEQLTIKALKELGERQVEKSTSAQRDAELPSEEVLKQTFTFAPESWATEII

SEQ ID NO: 751346 - protein, 194 aa, Homo sapiens
MEAAPSRFMFLLFLLTCELAAEVAAEVEKSSDGPGAAQEPTWLTDVPAAMEFIAATEVAVIGFFQDLEIPAVPILHSMVQKFPGVSFGISTDSEVLTHYNITGNTICLFRLVDNEQLNLEDEDIESIDATKLSRFIEINSLHMVTEYNPVTVIGLFNSVIQIHLLLIMNKASPEYEENMHRYQKAAKLFQGKLQ

SEQ ID NO: 751347 - protein, 258 aa, Homo sapiens
MEAAPSRFMFLLFLLTCELAAEVAAEVEKSSDGPGAAQEPTWLTDVPAAMEFIAATEVAVIGFFQDLEIPAVPILHSMVQKFPGVSFGISTDSEVLTHYNITGNTICLFRLVDNEQLNLEDEDIESIDATKLSRFIEINSLHMVTEYNPVTVIGLFNSVIQIHLLLIMNKASPEYEENMHRYQKAAKLFQGKILFILVDSGMKENGKVISFFKLKESQLPALAIYQTLDDEWDTLPTAEVSVEHVQNFCDGFLSGKLL

SEQ ID NO: 751348 - protein, 273 aa, Homo sapiens
MEAAPSRFMFLLFLLTCELAAEVAAEVEKSSDGPGAAQEPTWLTDVPAAMEFIAATEVAVIGFFQDLEIPAVPILHSMVQKFPGVSFGISTDSEVLTHYNITGNTICLFRLVDNEQLNLEDEDIESIDATKLSRFIEINSLHMVTEYNPVTVIGLFNSVIQIHLLLIMNKASPEYEENMHRYQKAAKLFQGKILFILVDSGMKENGKVISFFKLKESQLPALAIYQTLDDEWDTLPTAEVSVEHVQNFCDGFLSGKLLKENRESEGKTPKVEL

SEQ ID NO: 751349 - protein, 172 aa, Homo sapiens
MKETCQLEIQVDNEQLNLEDEDIESIDATKLSRFIEINSLHMVTEYNPVTVIGLFNSVIQIHLLLIMNKASPEYEENMHRYQKAAKLFQGKILFILVDSGMKENGKVISFFKLKESQLPALAIYQTLDDEWDTLPTAEVSVEHVQNFCDGFLSGKLLKENRESEGKTPKVEL

SEQ ID NO: 751350 - protein, 130 aa, Homo sapiens
MEAAPSRFMFLLFLLTCELAAEVAAEVEKSSDGPGAAQEPTWLTDVPAAMEFIAATEVAVIGFFQDLEIPAVPILHSMVQKFPGVSFGISTDSEVLTHYNITGNTICLFRLVSWVGSLSFLPDFHWVVDS

SEQ ID NO: 751351 - protein, 78 aa, Homo sapiens
MGGHNKETHNTNRAEEAANQAKHTTPQHNSNAQHEAKTHNNNAAKEGRATTHNTARREEKSETTARNNSRRHNTAGEE

SEQ ID NO: 751352 - protein, 95 aa, Homo sapiens
AALPWRHGPAAAGPALGAPQCVAPLPASPRPATSGASRELDARSSKAALGAPSGPGADAWRRLREPAPFQAPLAPVSQMETLKPQQAASPAPPSD

SEQ ID NO: 751353 - protein, 95 aa, Homo sapiens; identical to SEQ ID NO: 751352

SEQ ID NO: 751354 - protein, 95 aa, Homo sapiens; identical to SEQ ID NO: 751352

SEQ ID NO: 751355 - protein, 74 aa, Homo sapiens
MGSEVTLQRWQDVCSRASLCRGQGVWATHKELALSRLGCRKTPSAWGGQGPMSVLKEAGLDEKGHSLARSVTVP

SEQ ID NO: 751356 - protein, 102 aa, Homo sapiens
HMCVLEARKRDVCSNRVQKKEARAQMLAPLSKGPGKAQGMGLGLPPLLPRPAMELMPLPGNSQKAHGEPSSLAGLPSPAPQEPSPGGSSVCGALEWAVFTHT

SEQ ID NO: 751357 - protein, 107 aa, Homo sapiens
MLLSLILYFAFLRRGLTLLPRLEYSGTITAHCRLYLLGSGDPPKLSLPGSCGSRRTTVYRDRVSLCCPGWSGLIVLGSSLPECWDYRHGSPHQARIYILSYQNDHHL

SEQ ID NO: 751358 - protein, 78 aa, Homo sapiens
MGGHNKETHNTNRAEEAANQAKHTTPQHNSNAQHEAKTHNNNAAKEGRATTHNTRTAEEKSETTARNNSRRHNTAGEE

SEQ ID NO: 751359 - protein, 124 aa, Homo sapiens
MLRCRLPPLPGRLTSPLLTARSFLCSSTFGERRDLNKRWGWIPRVGQNSRCPESWPGQMRAGRATGAPSSLRLGPPCPFLRALDPSLQAQWSRPWWQNHPPGCDASSLSIPHSCTRKSCGRAPL

SEQ ID NO: 751360 - protein, 116 aa, Homo sapiens
GRHHSLLLQTPPSPLHPCQFDPLPVFGLCSILCSSLSSAWNILILSPGPSLLVEKTTDFKASWPSSVERCLPVCVGMGWAPRDGSTPDETHSPPLGWALLPSTPQDHTWDPTLSAR

SEQ ID NO: 751361 - protein, 400 aa, Homo sapiens
PGSPSLPPEPLCARCPTKEGAAPRRPGFWGSLETQAATVWRGRHGHFSCRVRLSRGAARYSRRGQGKPGVTISAARLVFKVLSAGPLTHPAGRSRRLPRGHRLKPLSIALSLCLQCPSSVISRPRLSPGPSLSAPPYPKLAPPPVAELRPPSRRRRGTLAVALGAFFLGSQDPYEWELPGSRTASCITWRGERGGVKRSTRKVEGRGQGGDPGGCAFCYLLPTACRRDANKLMKLSVLPHRSLLAPYTVLCCPPDSEKPRLSPEPSERRPQAPAKKLRKPRTIYSSLQLQHLNQRFQHTQYLALPERAQLAAQLGLTQTQVKIWFQNKRSKYKKLLKQNSGGQEGDFPGRTFSVSPCSPPLPSLWDLPKAGTLPTSGYGNSFGAWYQHHSSDVLASPQMM

SEQ ID NO: 751362 - protein, 339 aa, Homo sapiens
KRAGPPSGPGNRTRWRGGGPHGFRGGGESHGGAPPRNPFPRRAFSAERGSERHFLRDLKCGGCWLGGPSGPTPEAWKRELAAGADYVPGHGPSARALATMTSLPCPLPGRDASKAVFPDLAPVPSVAAAYPLGLSPTTAASPNLSYSRPYGHLLSYPYTEPANPGDSYLSCQQPAALSQPLCGPAEHPQELEADSEKPRLSPEPSERRPQAPAKKLRKPRTIYSSLQLQHLNQRFQHTQYLALPERAQLAAQLGLTQTQVKIWFQNKRSKYKKLLKQNSGGQEGDFPGRTFSVSPCSPPLPSLWDLPKAGTLPTSGYGNSFGAWYQHHSSDVLASPQMM

SEQ ID NO: 751363 - protein, 346 aa, Homo sapiens
PGSPSLPPEPLCARCPTKEGAAPRRPGFWGSLETQAATVWRGRHGHFSCRVRLSRGAARYSRRGQGKPGVTISAARLVFKVLSAGPLTHPAGRSRRLPRGHRLKPLSIALSLCLQCPSSVISRPRLSPGPSLSAPPYPKLAPPPVAELRPPSRRRRGTLAVALGAFFLGSQDPYEWELPGSRTASCITWRGERGGVKRSTRKVEGRGQGGDPGGCAFCYLLPTACRRDANKLMKLSVLPHRSLLAPYTVLCCPPDSEKPRLSPEPSERRPQAPAKKLRKPRTIYSSLQLQHLNQRFQHTQYLALPERAQLAAQLGLTQTQVGPVSSFPISHLPWFSGNSSPSPSCE

SEQ ID NO: 751364 - protein, 347 aa, Homo sapiens
PGSPSLPPEPLCARCPTKEGAAPRRPGFWGSLETQAATVWRGRHGHFSCRVRLSRGAARYSRRGQGKPGVTISAARLVFKVLSAGPLTHPAGRSRRLPRGHRLKPLSIALSLCLQCPSSVISRPRLSPGPSLSAPPYPKLAPPPVAELRPPSRRRRGTLAVALGAFFLGSQDPYEWELPGTELRLVSPGAVNVGVETLHAEDSEKPRLSPEPSERRPQAPAKKLRKPRTIYSSLQLQHLNQRFQHTQYLALPERAQLAAQLGLTQTQVKIWFQNKRSKYKKLLKQNSGGQEGDFPGRTFSVSPCSPPLPSLWDLPKAGTLPTSGYGNSFGAWYQHHSSDVLASPQMM

SEQ ID NO: 751365 - protein, 246 aa, Homo sapiens [sequence omitted]

SEQ ID NO: 751366 - protein, 229 aa, Homo sapiens
MGNASFGSKEQKLLKRLRLLPALLILRAFKPHRKIRDYRVVVVGTAGVGKSTLLHKWASGNFRHEYLPTIENTYCQLLGCSHGVLSLHITDSKSGDGNRALQRHVIARGHAFVLVYSVTKKETLEELKAFYELICKIKGNNLHKFPIVLVGNKSDDTHREVALNDGATCAMEWNCAFMEISAKTDVNVQELFHMLLNYKKKPTTGLQEPEKKSQMPNTTEKLLDKCIIM

SEQ ID NO: 751367 - protein, 229 aa, Homo sapiens; identical to SEQ ID NO: 751366

SEQ ID NO: 751368 - protein, 328 aa, Homo sapiens
GLCVGPAPHSWFLTTYCASGIYACYPHSLRPRTPLLCASRNIKPRRSELLGCPVGCRGSLSEQRICLLGCLVRASEKGVSCCQLSVGELVHVSPLRIPTMGNASFGSKEQKLLKRLRLLPALLILRAFKPHRKIRDYRVVVVGTAGVGKSTLLHKWASGNFRHEYLPTIENTYCQLLGCSHGVLSLHITDSKSGDGNRALQRHVIARGHAFVLVYSVTKKETLEELKAFYELICKIKGNNLHKFPIVLVGNKSDDTHREVALNDGATCAMEWNCAFMEISAKTDVNVQELFHMLLNYKKKPTTGLQEPEKKSQMPNTTEKLLDKCIIM

SEQ ID NO: 751369 - protein, 229 aa, Homo sapiens
GKETMLYAKPPPTINGIKGLQRKERLKPAHIHLQQLTCFSITCSSTMSYSCCLPSLGCRTSCSSRPCVPPSCHGYTLPGACNIPANVSNCNWFCEGSFNGSEKETMQFLNDRLASYLEKVRQLERDNAELEKLIQERSQQQEPLLCPSYQSYFKTIEELQQKILCAKAENARLVVNIDNAKLASDDFRSKYQTEQSLRLLVESDINSIRRILDELTLCKSDLESQVDSL

SEQ ID NO: 751370 - protein, 440 aa, Homo sapiens
GKETMLYAKPPPTINGIKGLQRKERLKPAHIHLQQLTCFSITCSSTMSYSCCLPSLGCRTSCSSRPCVPPSCHGYTLPGACNIPANVSNCNWFCEGSFNGSEKETMQFLNDRLASYLEKVRQLERDNAELEKLIQERSQQQEPLLCPSYQSYFKTIEELQQKILCAKAENARLVVNIDNAKLASDDFRSKYQTEQSLRLLVESDINSIRRILDELTLCKSDLESQVESLREELICLKKNHEEEVNTLRSQLGDRLNVEVDTAPTVDLNQVLNETRSQYEALVEINRREVEQWFATQTEELNKQVVSSSEQLQSCQAEIIELRRTVNALEIELQAQHNLRDSLENTLTESEAHYSSQLSQVQSLITNVESQLAEIRCDLERQNQEYQVLLDVRARLECEINTYRSLLESEDCKLPCNPCATTNASGNSCGPCGTSQKGCCN

SEQ ID NO: 751371 - protein, 117 aa, Homo sapiens
MASSVFSRSVTVSRRGLGVPGPHPWATLSPRRPPRGRGGFRMGSLPEAFLCQGGSVDARGAQKGAAPTGTGRGGRTPPPASPTGHCPGPTSASAPPAGRTPRATARPPPPTRPRWIP

SEQ ID NO: 751372 - protein, 103 aa, Homo sapiens
VLSYGLLIPKQYLFPKKVHFILESFCICYAVSHSGARSGTEVNSSWMNQRVLESNAVLTEPPADCLSRSCFSVLVNLLKYPDSLPLVSSFLLYPGCDLIIRLP

SEQ ID NO: 751373 - protein, 114 aa, Homo sapiens
MPGKRGLGWWWARLPLCLLLSLYGPWMPSSLGKPKGHPHMNSIRIDGDITLGGLFPVHGRGSEGKPCGELKKEKGIHRLEAMLFALDRINNDPDLLPNITLGARILDTCSRDTH

SEQ ID NO: 751374 - protein, 46 aa, Homo sapiens
MEYYAAIKNDEFMSFVGTWMKLETIILSKLSQGQKTEHRMFSLIGG

SEQ ID NO: 751375 - protein, 677 aa, Homo sapiens
GQRGRHGGRRRRRRRPASPPAGLALAPRSPSASPEPREGETLSPSMQREEGFNTKMADGPDEYDTEAGCVPLLHPEEIKPQSHYNHGYGEPLGRKTHIDDYSTWDIVKATQYGIYERCRELVEAGYDVRQPDKENVTLLHWAAINNRIDLVKYYISKGAIVDQLGGDLNSTPLHWATRQGHLSMVVQLMKYGADPSLIDGEGCSCIHLAAQFGHTSIVAYLIAKGQDVDMMDQNGMTPLMWAAYRTHSVDPTRLLLTFNVSVNLGDKYHKNTALHWAVLAGNTTVISLLLEAGANVDAQNIKGESALDLAKQRKNVWMINHLQEARQAKGYDNPSFLRKLKADKEFRQKVMLGTPFLVIWLVGFIADLNIDSWLIKGLMYGGVWATVQFLSKSFFDHSMHSALPLGIYLATKFWMYVTWFFWFWNDLNFLFIHLPFLANSVALFYNFGKSWKSDPGIIKATEEQKKKTIVELAETGSLDLSIFCSTCLIRKPVRSKHCGVCNRCIAKFDHHCPWVGNCVGAGNHRYFMGYLFFLLFMICWMIYGCISYWGLHCETTYTKDGFWTYITQIATCSPWMFWMFLNSVFHFMWVAVLLMCQMYQISCLGITTNERMNARRYKHFKVTTTSIESPFNHGCVRNIIDFFEFRCCGLFRPVIVDWTRQYTIEYDQISGSGYQLV

SEQ ID NO: 751376 - protein, 661 aa, Homo sapiens
GQRGRHGGRRRRRRRPASPPAGLALAPRSPSASPEPREGETLSPSMQREEGFNTKMADGPDEYDTEAGCVPLLHPEEIKPQSHYNHGYGEPLGRKTHIDDYSTWDIVKATQYGIYERCRELVEAGYDVRQPDKENVTLLHWAAINNRIDLVKYYISKGAIVDQLGGDLNSTPLHWATRQGHLSMVVQLMKYGADPSLIDGEGCSCIHLAAQFGHTSIVAYLIAKGQDVDMMDQNGMTPLMWAAYRTHSGDKYHKNTALHWAVLAGNTTVISLLLEAGANVDAQNIKGESALDLAKQRKNVWMINHLQEARQAKGYDNPSFLRKLKADKEFRQKVMLGTPFLVIWLVGFIADLNIDSWLIKGLMYGGVWATVQFLSKSFFDHSMHSALPLGIYLATKFWMYVTWFFWFWNDLNFLFIHLPFLANSVALFYNFGKSWKSDPGIIKATEEQKKKTIVELAETGSLDLSIFCSTCLIRKPVRSKHCGVCNRCIAKFDHHCPWVGNCVGAGNHRYFMGYLFFLLFMICWMIYGCISYWGLHCETTYTKDGFWTYITQIATCSPWMFWMFLNSVFHFMWVAVLLMCQMYQISCLGITTNERMNARRYKHFKVTTTSIESPFNHGCVRNIIDFFEFRCCGLFRPVIVDWTRQYTIEYDQISGSGYQLV

SEQ ID NO: 751377 - protein, 311 aa, Homo sapiens
GQRGRHGGRRRRRRRPASPPAGLALAPRSPSASPEPREGETLSPSMQREEGFNTKMADGPDEYDTEAGCVPLLHPEEIKPQSHYNHGYGEPLGRKTHIDDYSTWDIVKATQYGIYERCRELVEAGYDVRQPDKENVTLLHWAAINNRIDLVKYYISKGAIVDQLGGDLNSTPLHWATRQGHLSMVVQLMKYGADPSLIDGEGCSCIHLAAQFGHTSIVAYLIAKGQDVDMMDQNGMTPLMWAAYRTHSVDPTRLLLTFNVSVNLGDKYHKNTALHWAVLAGNTTVISLLLEAGANVDAQNIKAILRCHMAL

SEQ ID NO: 751378 - protein, 659 aa, Homo sapiens
GQRGRHGGRRRRRRRPASPPAGLALAPRSPSASPEPREGETLSPSMQREEGFNTKMADGPDEYDTEAGCVPLLHPEEIKPQSHYNHGYGEPLGRKTHIDDYSTWDIVKATQYGIYERCRELVEAGYDVRQPDKEYYISKGAIVDQLGGDLNSTPLHWATRQGHLSMVVQLMKYGADPSLIDGEGCSCIHLAAQFGHTSIVAYLIAKGQDVDMMDQNGMTPLMWAAYRTHSVDPTRLLLTFNVSVNLGDKYHKNTALHWAVLAGNTTVISLLLEAGANVDAQNIKGESALDLAKQRKNVWMINHLQEARQAKGYDNPSFLRKLKADKEFRQKVMLGTPFLVIWLVGFIADLNIDSWLIKGLMYGGVWATVQFLSKSFFDHSMHSALPLGIYLATKFWMYVTWFFWFWNDLNFLFIHLPFLANSVALFYNFGKSWKSDPGIIKATEEQKKKTIVELAETGSLDLSIFCSTCLIRKPVRSKHCGVCNRCIAKFDHHCPWVGNCVGAGNHRYFMGYLFFLLFMICWMIYGCISYWGLHCETTYTKDGFWTYITQIATCSPWMFWMFLNSVFHFMWVAVLLMCQMYQISCLGITTNERMNARRYKHFKVTTTSIESPFNHGCVRNIIDFFEFRCCGLFRPVIVDWTRQYTIEYDQISGSGYQLV

SEQ ID NO: 751379 - protein, 642 aa, Homo sapiens
DRGGVTGAGEEGGGGPRRLRRGSRSPRARPPPRPSPGRVKRFLPACSGRRDLTPRWRTARMSTIPKRAVCPFSTQRYGIYERCRELVEAGYDVRQPDKENVTLLHWAAINNRIDLVKYYISKGAIVDQLGGDLNSTPLHWATRQGHLSMVVQLMKYGADPSLIDGEGCSCIHLAAQFGHTSIVAYLIAKGQDVDMMDQNGMTPLMWAAYRTHSVDPTRLLLTFNVSVNLGDKYHKNTALHWAVLAGNTTVISLLLEAGANVDAQNIKGESALDLAKQRKNVWMINHLQEARQAKGYDNPSFLRKLKADKEFRQKVMLGTPFLVIWLVGFIADLNIDSWLIKGLMYGGVWATVQFLSKSFFDHSMHSALPLGIYLATKFWMYVTWFFWFWNDLNFLFIHLPFLANSVALFYNFGKSWKSDPGIIKATEEQKKKTIVELAETGSLDLSIFCSTCLIRKPVRSKHCGVCNRCIAKFDHHCPWVGNCVGAGNHRYFMGYLFFLLFMICWMIYGCISYWGLHCETTYTKDGFWTYITQIATCSPWMFWMFLNSVFHFMWVAVLLMCQMYQISCLGITTNERMNARRYKHFKVTTTSIESPFNHGCVRNIIDFFEFRCCGLFRPVIVDWTRQYTIEYDQISGSGYQLV

SEQ ID NO: 751380 - protein, 1151 aa, Homo sapiens
AREEGGGSHSLLPRVGSELPGRMPLPDGARTPGGVCREARGGGYTNRTFEFDDGQCAPRRPCAGDGALLDTAGFKMSDLDSEVLPLPPRYRFRDLLLGDPSFQNDDRVQVEFYVNENTFKERLKLFFIKNQRSSLRIRLFNFSLKLLTCLLYIVRVLLDDPALGIGCWGCPKQNYSFNDSSSEINWAPILWVERKMTLWAIQVIVAIISFLETMLLIYLSYKGNIWEQIFRVSFVLEMINTLPFIITIFWPPLRNLFIPVFLNCWLAKHALENMINDFHRAILRTQSAMFNQVLILFCTLLCLVFTGTCGIQHLERAGENLSLLTSFYFCIVTFSTVGYGDVTPKIWPSQLLVVIMICVALVVLPLQFEELVYLWMERQKSGGNYSRHRAQTEKHVVLCVSSLKIDLLMDFLNEFYAHPRLQDYYVVILCPTEMDVQVRRVLQIPLWSQRVIYLQGSALKDQDLMRAKMDNGEACFILSSRNEVDRTAADHQTILRAWAVKDFAPNCPLYVQILKPENKFHVKFADHVVCEEECKYAMLALNCICPATSTLITLLVHTSRGQEGQESPEQWQRMYGRCSGNEVYHIRMGDSKFFREYEGKSFTYAAFHAHKKYGVCLIGLKREDNKSILLNPGPRHILAASDTCFYINITKEENSAFIFKQEEKRKKRAFSGQGLHEGPARLPVHSIIASMGTVAMDLQGTEHRPTQSGGGGGGSKLALPTENGSGSRRPSIAPVLELADSSALLPCDLLSDQSEDEVTPSDDEGLSVVEYVKGYPPNSPYIGSSPTLCHLLPVKAPFCCLRLDKGCKHNSYEDAKAYGFKNKLIIVSAETAGNGLYNFIVPLRAYYRSRKELNPIVLLLDNKPDHHFLEAICCFPMVYYMEGSVDNLDSLLQCGIIYADNLVVVDKESTMSAEEDYMADAKTIVNVQTMFRLFPSLSITTELTHPSNMRFMQFRAKDSYSLALSKLEKRERENGSNLAFMFRLPFAAGRVFSISMLDTLLYQSFVKDYMITITRLLLGLDTTPGSGYLCAMKITEGDLWIRTYGRLFQKLCSSSAEIPIGIYRTESHVFSTSEPHDLRAQSQISVNVEDCEDTREVKGPWGSRAGTGGSSQGRHTGGGDPAEHPLLRRKSLQWARRLSRKAPKQAGRAAA

SEQ ID NO: 751381 - protein, 488 aa, Homo sapiens [sequence omitted]

SEQ ID NO: 751382 - protein, 599 aa, Homo sapiens
RRSRAHIRERRAEVALVWPEPLGEIVRRGEGVMSSRLGAVPATSGPTTFKQQRSTRIVGAKNSRTQCSIKDNSFQYTIPHDDSLSGSSSASSCEPVSDFPASFRKSTYWMKMRRIKPAATSHVEGSGGVSAKGKRKPRQEEDEDYREFPQKKHKLYGRKQRPKTQPNPKSQARRIRKEPPVYAAGSLEEQWYLEIVDKGSVSCPTCQAVGRKTIEGLKKHMENCKQEMFTCHHCGKQLRSLAGMKYHVMANHNSLPILKAGDEIDEPSERERLRTVLKRLGKLRCMRESCSSSFTSIMGYLYHVRKCGKGAAELEKMTLKCHHCGKPYRSKAGLAYHLRSEHGPISFFPESGQPECLKEMNLESKSGGRVQRRSAKIAVYHLQELASAELAKEWPKRKVLQDLVPDDRKLKYTRPGLPTFSQEVLHKWKTDIKKYHRIQCPNQGCEAVYSSVSGLKAHLGSCTLGNFVAGKYKCLLCQKEFVSESGVKYHINSVHAEDWFVVNPTTTKSFEKLMKIKQRQQEEEKRRQQHRSRRSLRRRQQPGIELPETELSLRVGKDQRRNNEELVVSASCKEPEQEPVPAQFQKVKPPKTNHKRGRK

SEQ ID NO: 751383 - protein, 487 aa, Homo sapiens
CHRCHRDPSHVEGSGGVSAKGKRKPRQEEDEDYREFPQKKHKLYGRKQRPKTQPNPKSQARRIRKEPPVYAAGSLEEQWYLEIVDKGSVSCPTCQAVGRKTIEGLKKHMENCKQEMFTCHHCGKQLRSLAGMKYHVMANHNSLPILKAGDEIDEPSERERLRTVLKRLGKLRCMRESCSSSFTSIMGYLYHVRKCGKGAAELEKMTLKCHHCGKPYRSKAGLAYHLRSEHGPISFFPESGQPECLKEMNLESKSGGRVQRRSAKIAVYHLQELASAELAKEWPKRKVLQDLVPDDRKLKYTRPGLPTFSQEVLHKWKTDIKKYHRIQCPNQGCEAVYSSVSGLKAHLGSCTLGNFVAGKYKCLLCQKEFVSESGVKYHINSVHAEDWFVVNPTTTKSFEKLMKIKQRQQEEEKRRQQHRSRRSLRRRQQPGIELPETELSLRVGKDQRRNNEELVVSASCKEPEQEPVPAQFQKVKPPKTNHKRGRK

SEQ ID NO: 751384 - protein, 488 aa, Homo sapiens [sequence omitted]

SEQ ID NO: 751385 - protein, 493 aa, Homo sapiens
  misc_feature (489)..(489): Xaa can be any naturally occurring amino acid
  misc_feature (493)..(493): Xaa can be any naturally occurring amino acid
MRRIKPAATSHVEGSGGVSAKGKRKPRQEEDEDYREFPQKKHKLYGRKQRPKTQPNPKSQARRIRKEPPVYAAGSLEEQWYLEIVDKGSVSCPTCQAVGRKTIEGLKKHMENCKQEMFTCHHCGKQLRSLAGMKYHVMANHNSLPILKAGDEIDEPSERERLRTVLKRLGKLRCMRESCSSSFTSIMGYLYHVRKCGKGAAELEKMTLKCHHCGKPYRSKAGLAYHLRSEHGPISFFPESGQPECLKEMNLESKSGGRVQRRSAKIAVYHLQELASAELAKEWPKRKVLQDLVPDDRKLKYTRPGLPTFSQEVLHKWKTDIKKYHRIQCPNQGCEAVYSSVSGLKAHLGSCTLGNFVAGKYKCLLCQKEFVSESGVKYHINSVHAEDWFVVNPTTTKSFEKLMKIKQRQQEEEKRRQQHRSRRSLRRRQQPGIELPETELSLRVGKDQRRNNEELVVSASCKEPEQEPVPAQFQKVKPPKTNHNAGEFXKKKX

SEQ ID NO: 751386 - protein, 390 aa, Homo sapiens
MRRIKPAATSHVEGSGGVSAKGKRKPRQEEDEDYREFPQKKHKLYGRKQRPKTQPNPKSQARRIRKEPPVYAAGSLEEQWYLEIVDKGSVSCPTCQAVGRKTIEGLKKHMENCKQEMFTCHHCGKQLRSLAGMKYHVMANHNSLPILKAGDEIDEPSERERLRTVLKRLGKLRCMRESCSSSFTSIMGYLYHVRKCGKGAAELEKMTLKCHHCGKPYRSKAGLAYHLRSEHGPISFFPESGQPECLKEMNLESKSGGRVQRRSAKIAVYHLQELASAELAKEWPKRKVLQDLVPDDRKLKYTRPGLPTFSQEVLHKWKTDIKKYHRIQCPNQGCEAVYSSVSGLKAHLGSCTLGNFVAGKYKCLLCQKEFVSESGVKYHINSVHAEVRFL

SEQ ID NO: 751387 - protein, 488 aa, Homo sapiens [sequence omitted]

SEQ ID NO: 751388 - protein, 588 aa, Homo sapiens
PGWYRPDEGILGEIVEAWRGSDVFHNSVLQGATSGPTAFKQQRSTRIVGANSRTQCSIKDNSFQYTIPHDDSLSGSSSASSCEPVSDFPASFRKSTYWMKMRRIKPAATSHVEGSGGVSAKGKRKPRQEEDEDYREFPQKKHKLYGRKQRPKTQPNPKSQARRIRKEPPVYAAGSLEEQWYLEIVDKGSVSCPTCQAVGRKTIEGLKKHMENCKQEMFTCHHCGKQLRSLAGMKYHVMANHNSLPILKAGDEIDEPSERERLRTVLKRLGKLRCMRESCSSSFTSIMGYLYHVRKCGKGAAELEKMTLKCHHCGKPYRSKAGLAYHLRSEHGPISFFPESGQPECLKEMNLESKSGGRVQRRSAKIAVYHLQELASAELAKEWPKRKVLQDLVPDDRKLKYTRPGLPTFSQEVLHKWKTDIKKYHRIQCPNQGCEAVYSSVSGLKAHLGSCTLGNFVAGKYKCLLCQKEFVSESGVKYHINSVHAEDWFVVNPTTTKSFEKLMKIKQRQQEEEKRRQQHRSRRSLRRRQQPGIELPETELSLRVGKDQRRNNEELVVSASCKEPEQEPVPAQFQKVKPPKTNHKRGRK

SEQ ID NO: 751389 - protein, 452 aa, Homo sapiens
MRRIKPAATSHVEGSGGVSAKGKRKPRQEEDEDYREFPQKKHKLYGRKQRPKTQPNPKSQARRIRKEPPVYAAGSLEEQWYLEIVDKGSVSCPTCQAVGRKTIEGLKKHMENCKQEMFTCHHCGKQLRSLAGMKYHVMANHNSLPILKAGDEIDEPSERERLRTVLKRLGKLRCMRESCSSSFTSIMGYLYHVRKCGKGAAELEKMTLKCHHCGKPYRSKAGLAYHLRSEHGPISFFPESGQPECLKEMNLESKSGGRVQRRSAKIAVYHLQELASAELAKEWPKRKVLQDLVPDDRKLKYTRPGLPTFSQEVLHKWKTDIKKYHRIQCPNQGCEAVYSSVSGLKAHLGSCTLGNFVAGKYKCLLCQKEFVSESGVKYHINSVHAEDWFVVNPTTTKSFEKLMKIKQRQQEEEKRRQQHRSRRSLRRRQQPGIELPETELSLRVGKDQRRTE

SEQ ID NO: 751390 - protein, 488 aa, Homo sapiens [sequence omitted]

SEQ ID NO: 751391 - protein, 109 aa, Homo sapiens
MSHNSCALPLPSTEILSLRHKATAMGWGQVASATQDCLPYPLHCLFQQYEVKIRTTQAGGAAKTLVSLALPTASIARSSSLIYILQIYPQEDRWNHSFLLNSRTLRKLT

SEQ ID NO: 751392 - protein, 141 aa, Homo sapiens
  misc_feature (3)..(3): Xaa can be any naturally occurring amino acid
RSXQNIAPGTRLGVAGMKPILLQGHERSITQIKYNREGDLLFTVAKDPIVNVWYSVNGERLGTYMGHTGAVWCVDADWDTKHVLTGSADNSCRLWDCETGKQLALLKTNSAVRTCGFDFGGNIIMFSTDKQMGYQCLCELF

SEQ ID NO: 751393 - protein, 125 aa, Homo sapiens
MKPILLQGHERSITQIKYNREGDLLFTVAKDPIVNVWYSVNGERLGTYMGHTGAVWCVDADWDTKHVLTGSADNSCRLWDCETGKQLALLKTNSAVRTCGFDFGGNIIMFSTDKQMGYQCLCELF

SEQ ID NO: 751394 - protein, 125 aa, Homo sapiens; identical to SEQ ID NO: 751393

SEQ ID NO: 751395 - protein, 125 aa, Homo sapiens; identical to SEQ ID NO: 751393

SEQ ID NO: 751396 - protein, 208 aa, Homo sapiens
KDELKKSLYAIFSQFGQILDILVSRSLKMRGQAFVIFKEVSSATNALRSMQGFPFYDKPMRIQYAKTDSDIISRCGLPRVTAGMKPILLQGHERSITQIKYNREGDLLFTVAKDPIVNVWYSVNGERLGTYMGHTGAVWCVDADWDTKHVLTGSADNSCRLWDCETGKQLALLKTNSAVRTCGFDFGGNIIMFSTDKQMGYQCLCELF

SEQ ID NO: 751397 - protein, 125 aa, Homo sapiens; identical to SEQ ID NO: 751393

SEQ ID NO: 751398 - protein, 125 aa, Homo sapiens; identical to SEQ ID NO: 751393

SEQ ID NO: 751399 - protein, 125 aa, Homo sapiens; identical to SEQ ID NO: 751393

SEQ ID NO: 751400 - protein, 84 aa, Homo sapiens
KDELKKSLYAIFSQFGQILDILVSRSLKMRGQAFVIFKEVSSATNALRSMQGFPFYDKPMRIQYAKTDSDIIHVAAFLASQPGW

SEQ ID NO: 751401 - protein, 143 aa, Homo sapiens
MARYEAWVKFGRGSLQLGMKPILLQGHERSITQIKYNREGDLLFTVAKDPIVNVWYSVNGERLGTYMGHTGAVWCVDADWDTKHVLTGSADNSCRLWDCETGKQLALLKTNSAVRTCGFDFGGNIIMFSTDKQMGYQCLCELF

SEQ ID NO: 751402 - protein, 131 aa, Homo sapiens
SSRFNRTKPILLQGHERSITQIKYNREGDLLFTVAKDPIVNVWYSVNGERLGTYMGHTGAVWCVDADWDTKHVLTGSADNSCRLWDCETGKQLALLKTNSAVRTCGFDFGGNIIMFSTDKQMGYQCLCELF

SEQ ID NO: 751403 - protein, 142 aa, Homo sapiens
  misc_feature (8)..(8): Xaa can be any naturally occurring amino acid
MLVRPGVXISSIHALRGMKPILLQGHERSITQIKYNREGDLLFTVAKDPIVNVWYSVNGERLGTYMGHTGAVWCVDADWDTKHVLTGSADNSCRLWDCETGKQLALLKTNSAVRTCGFDFGGNIIMFSTDKQMGYQCLCELF

SEQ ID NO: 751404 - protein, 125 aa, Homo sapiens; identical to SEQ ID NO: 751393

SEQ ID NO: 751405 - protein, 125 aa, Homo sapiens; identical to SEQ ID NO: 751393

SEQ ID NO: 751406 - protein, 134 aa, Homo sapiens
QARGLTKPESITARDTNERRSITQIKYNREGDLLFTVAKDPIVNVWYSVNGERLGTYMGHTGAVWCVDADWDTKHVLTGSADNSCRLWDCETGKQLALLKTNSAVRTCGFDFGGNIIMFSTDKQMGYQCLCELF

SEQ ID NO: 751407 - protein, 132 aa, Homo sapiens
MPISLRSLNYCRGLLTYITYITCCGEGTVIGSVIMSPIMGDCWKYIDWHLLKQRNRSELEICDYCPRTGDTKHVLTGSADNSCRLWDCETGKQLALLKTNSAVRTCGFDFGGNIIMFSTDKQMGYQCLCELF

SEQ ID NO: 751408 - protein, 125 aa, Homo sapiens; identical to SEQ ID NO: 751393

SEQ ID NO: 751409 - protein, 152 aa, Homo sapiens
MKPILLQGHERSITQIKYNREGDLLFTVAKDPIVNVWYSVNGERLGTYMGHTGAVWCVDADWDTKHVLTGSADNSCRLWDCETGKQLALLKTNSAVRTCGFDFGGNIIMFSTDKQMGYQCLFWRGVGELLTEATPGQINDTPSLSRGHDHVL

SEQ ID NO: 751410 - protein, 114 aa, Homo sapiens
MKPILLQGHERSITQIKYNREGDLLFTVAKDPIVNVWYSVNGERLGTYMGHTGAVWCVDADWDTKHVLTGSADNSCRLWDCETVWRGVGELLTEATPGQINDTPSLSRGHDHVL

SEQ ID NO: 751411 - protein, 169 aa, Homo sapiens
  misc_feature (8)..(8): Xaa can be any naturally occurring amino acid
MLVRPGVXISSIHALRGMKPILLQGHERSITQIKYNREGDLLFTVAKDPIVNVWYSVNGERLGTYMGHTGAVWCVDADWDTKHVLTGSADNSCRLWDCETGKQLALLKTNSAVRTCGFDFGGNIIMFSTDKQMGYQCLFWRGVGELLTEATPGQINDTPSLSRGHDHVL

SEQ ID NO: 751412 - protein, 114 aa, Homo sapiens; identical to SEQ ID NO: 751410

SEQ ID NO: 751413 - protein, 100 aa, Homo sapiens
EMKKYTLENKEEGSLSDTEADAVSGQLPDPTTNPSAGKDGPSLLVVEQVRVVDLEGSLKVVYPSKADLALPLPSDCRALTPGPPVRVCLAGFAEVSMRQC

SEQ ID NO: 751414 - protein, 93 aa, Homo sapiens
WVVGAGLPRVTAGMKPILLQGHERSITQIKYNREGDLLFTVAKDPIVNVWYSVNGERLGTYMGHTGAVWCVDADCQRNSDAKGGTKTQGVMMT

SEQ ID NO: 751415 - protein, 136 aa, Homo sapiens
RLVEPRGDIGRGKPILLQGHERSITQIKYNREGDLLFTVAKDPIVNVWYSVNGERLGTYMGHTGAVWCVDADWDTKHVLTGSADNSCRLWDCETGKQLALLKTNSAVRTCGFDFGGNIIMFSTDKQMGYQCLCELF

SEQ ID NO: 751416 - protein, 125 aa, Homo sapiens; identical to SEQ ID NO: 751393

SEQ ID NO: 751417 - protein, 125 aa, Homo sapiens; identical to SEQ ID NO: 751393

SEQ ID NO: 751418 - protein, 125 aa, Homo sapiens; identical to SEQ ID NO: 751393

SEQ ID NO: 751419 - protein, 140 aa, Homo sapiens
MRGSTHASLPRVTAGMKPILLQGHERSITQIKYNREGDLLFTVAKDPIVNVWYSVNGERLGTYMGHTGAVWCVDADWDTKHVLTGSADNSCRLWDCETGKQLALLKTNSAVRTCGFDFGGNIIMFSTDKQMGYQCLCELF

SEQ ID NO: 751420 - protein, 141 aa, Homo sapiens
MRLGTRLGVRLLAYSGMKPILLQGHERSITQIKYNREGDLLFTVAKDPIVNVWYSVNGERLGTYMGHTGAVWCVDADWDTKHVLTGSADNSCRLWDCETGKQLALLKTNSAVRTCGFDFGGNIIMFSTDKQMGYQCLCELF

SEQ ID NO: 751421 - protein, 125 aa, Homo sapiens; identical to SEQ ID NO: 751393

SEQ ID NO: 751422 - protein, 138 aa, Homo sapiens
WVVGAGLPRVTAGMKPILLQGHERSITQIKYNREGDLLFTVAKDPIVNVWYSVNGERLGTYMGHTGAVWCVDADWDTKHVLTGSADNSCRLWDCETGKQLALLKTNSAVRTCGFDFGGNIIMFSTDKQMGYQCLCELF

SEQ ID NO: 751423 - protein, 125 aa, Homo sapiens; identical to SEQ ID NO: 751393

SEQ ID NO: 751424 - protein, 125 aa, Homo sapiens; identical to SEQ ID NO: 751393

SEQ ID NO: 751425 - protein, 104 aa, Homo sapiens
DSRGLPEETVLIVNVWYSVNGERLGTYMGHTGAVWCVDADWDTKHVLTGSADNSCRLWDCETGKQLALLKTNSAVRTCGFDFGGNIIMFSTDKQMGYQCLCELF

SEQ ID NO: 751426 - protein, 115 aa, Homo sapiens
MKPILLQGHERSITQIKYNREGDLLFTVAKDPIVNVWYSVNGERLGTYMGHTGAVWCVDADSDNSCRLWDCETGKQLALLKTNSAVRTCGFDFGGNIIMFSTDKQMGYQCLCELF

SEQ ID NO: 751427 - protein, 103 aa, Homo sapiens
RAARVTAGMKPILLQGHERSITQIKYNREGDLLFTVAKDPIVNVWYSVNGERLGTYMGHTGAVWCVDADWDTKHVLTGSADNSCRLWDCETDNNEPYMKIPCK

SEQ ID NO: 751428 - protein, 127 aa, Homo sapiens
WVVGAGLPRVTAGMKPILLQGHERSITQIKYNREGDLLFTVAKDPIVNVWYSVNGERLGTYMGHTGAVWCVDADWDTKHVLTGSADNSCRLWDCETVWRGVGELLTEATPGQINDTPSLSRGHDHVL

SEQ ID NO: 751429 - protein, 127 aa, Homo sapiens; identical to SEQ ID NO: 751428

SEQ ID NO: 751430 - protein, 103 aa, Homo sapiens; identical to SEQ ID NO: 751427

SEQ ID NO: 751431 - protein, 634 aa, Homo sapiens
MESPTKEIEEFESNSLKYLQPEQIEKIWLRLRGLRKYKKTSQRLRSLVKQLERGEASVVDLKKNLEYAATVLESVYIDETRRLLDTEDELSDIQSDAVPSEVRDWLASTFTRQMGMMLRRSDEKPRFKSIVHAVQAGIFVERMYRRTSNMVGLSYPPAVIEALKDVDKWSFDVFSLNEASGDHALKFIFYELLTRYDLISRFKIPISALVSFVEALEVGYSKHKNPYHNLMHAADVTQTVHYLLYKTGVANWLTELEIFAIIFSAAIHDYEHTGTTNNFHIQTRSDPAILYNDRSVLENHHLSAAYRLLQDDEEMNILINLSKDDWREFRTLVIEMVMATDMSCHFQQIKAMKTALQQPEAIEKPKALSLMLHTADISHPAKAWDLHHRWTMSLLEEFFRQGDREAELGLPFSPLCDRKSTMVAQSQVGFIDFIVEPTFTVLTDMTEKIVSPLIDETSQTGGTGQRRSSLNSISSSDAKRSGVKTSGSEGSAPINNSVISVDYKSFKATWTEVVHINRERWRAKVPKEEKAKKEAEEKARLAAEEQQKEMEAKSQAEEGASGKAEKKTSGETKNQVNGTRANKSDNPRGKNSKAEKSSGEQQQNGDFKDGKNKTDKKDHSNIGNDSKKTDDSQE

SEQ ID NO: 751432 - protein, 709 aa, Homo sapiens
MESPTKEIEEFESNSLKYLQPEQIEKIWLRLRGLRKYKKTSQRLRSLVKQLERGEASVVDLKKNLEYAATVLESVYIDETRRLLDTEDELSDIQSDAVPSEVRDWLASTFTRQMGMMLRRSDEKPRFKSIVHAVQAGIFVERMYRRTSNMVGLSYPPAVIEALKDVDKWSFDVFSLNEASGDHALKFIFYELLTRYDLISRFKIPISALVSFVEALEVGYSKHKNPYHNLMHAADVTQTVHYLLYKTGVANWLTELEIFAIIFSAAIHDYEHTGTTNNFHIQTRSDPAILYNDRSVLENHHLSAAYRLLQDDEEMNILINLSKDDWREFRTLVIEMVMATDMSCHFQQIKAMKTALQQPEAIEKPKALSLMLHTADISHPAKAWDLHHRWTMSLLEEFFRQGDREAELGLPFSPLCDRKSTMVAQSQVGFIDFIVEPTFTVLTDMTEKIVSPLIDETSQTGGTGQRRSSLNSISSSDAKRSGVKTSGSEGSAPINNSVISVDYKSFKATWTEVVHINRERWRAKVPKEEKAKKEAEEKARLAAEEQQKEMEAKSQAEEGASGKAEKKTSGETKNQVNGTRANKSDNPRGKNSKAEKSSGEQQQNGDFKDGKNKTDKKDHSNIGNDSKKTDGTKQRSHGSPAPSTSSTCRLTLPVIKPPLRHFKRPAYASSSYAPSVSKKTDEHPARYKMLDQRIKMKKIQNISHNWNRK

SEQ ID NO: 751433 - protein, 749 aa, Homo sapiens
MGRLRLQEVANEAGDKNARPLARFSRSKSQNCLWNSLIDGLTGNVKEKPRPTIVHDPRPPEEILADELPQLDSSEVLVKTSFRLRSLVKQLERGEASVVDLKKNLEYAATVLESVYIDETRRLLDTEDELSDIQSDAVPSEVRDWLASTFTRQMGMMLRRSDEKPRFKSIVHAVQAGIFVERMYRRTSNMVGLSYPPAVIEALKDVDKWSFDVFSLNEASGDHALKFIFYELLTRYDLISRFKIPISALVSFVEALEVGYSKHKNPYHNLMHAADVTQTVHYLLYKTGVANWLTELEIFAIIFSAAIHDYEHTGTTNNFHIQTRSDPAILYNDRSVLENHHLSAAYRLLQDDEEMNILINLSKDDWREFRTLVIEMVMATDMSCHFQQIKAMKTALQQPEAIEKPKALSLMLHTADISHPAKAWDLHHRWTMSLLEEFFRQGDREAELGLPFSPLCDRKSTMVAQSQVGFIDFIVEPTFTVLTDMTEKIVSPLIDETSQTGGTGQRRSSLNSISSSDAKRSGVKTSGSEGSAPINNSVISVDYKSFKATWTEVVHINRERWRAKVPKEEKAKKEAEEKARLAAEEQQKEMEAKSQAEEGASGKAEKKTSGETKNQVNGTRANKSDNPRGKNSKAEKSSGEQQQNGDFKDGKNKTDKKDHSNIGNDSKKTDGTKQRSHGSPAPSTSSTCRLTLPVIKPPLRHFKRPAYASSSYAPSVSKKTDEHPARYKMLDQRIKMKKIQNISHNWNRK

SEQ ID NO: 751434 - protein, 76 aa, Homo sapiens
PSVKCFGRSWWLSVYPVHSWNCDPQGEENEAQRDSADDSMSPFAFYGVTDTLLMTAMVILFFYNSSSFPAPISYQN

SEQ ID NO: 751435 - protein, 409 aa, Homo sapiens
MPLLLYTCLLWLPTSGLWTVQAMDPNAAYVNMSNHHRGLASANVDFAFSLYKHLVALSPKKNIFISPVSISMALAMLSLGTCGHTRAQLLQGLGFNLTERSETEIHQGFQHLHQLFAKSDTSLEMTMGNALFLDGSLELLESFSADIKHYYESEVLAMNFQDWATASRQINSYVKNKTQGNYSRLVSGLDSPAILVLVNYIFFKVFFKGTWTQPFDLASTREENFYVDETTVVKVPMMLQSSTISYLHDAELPCQLVQMNYVGNGTVFFILPDKGKMNTVIAALSRDTINRWSAGLTSSQVDLYIPKVTISGVYDLGDVLEEMGIADLFTNQANFSRITQDAQLKSSKVVHKAVLQLNEEGVDTAGSTGVTLNLTSKPIILRFNQPFIIMIFDHFTWSSLFLARVMNPV

SEQ ID NO: 751436 - protein, 70 aa, Homo sapiens
MLQSSTISYLHDAELPCQLVQMNYVGNGTVFFILPDKGKMNTVIAALSRDTINRWSAGLTSSQVDLPSCC

SEQ ID NO: 751437 - protein, 106 aa, Homo sapiens
HSWSQGPLLPAGRSLQSSASSRGSPGTKKASLWTIVLDAPWSSCIPGGISSKELQRRKECAIQRPRGKAACVMEAETDPASCSVPSPTHKEQVRLEGRSWRERMRK

SEQ ID NO: 751438 - protein, 387 aa, Homo sapiens
MPLLLYTCLLWLPTSGLWTVQAMDPNAAYVNMSNHHRGLASANVDFAFSLYKHLVALSPKKNIFISPVSISMALAMLSLGTCGHTRAQLLQGLGFNLTERSETEIHQGFQHLHQLFAKSDTSLEMTMGNALFLDGSLELLESFSADIKHYYESEVLAMNFQDWATASRQINSYVKNKTQGNYIFFKGTWTQPFDLASTREENFYVDETTVVKVPMMLQSSTISYLHDAELPCQLVQMNYVGNGTVFFILPDKGKMNTVIAALSRDTINRWSAGLTSSQVDLYIPKVTISGVYDLGDVLEEMGIADLFTNQANFSRITQDAQLKSSKVVHKAVLQLNEEGVDTAGSTGVTLNLTSKPIILRFNQPFIIMIFDHFTWSSLFLARVMNPV

SEQ ID NO: 751439 - protein, 369 aa, Homo sapiens
MPLLLYTCLLWLPTSGLWTVQAMDPNAAYVNMSNHHRGLASANVDFAFSLYKHLVALSPTLGTCGHTRAQLLQGLGFNLTERSETEIHQGFQHLHQLFAKSDTSLEMTMGNALFLDGSLELLESFSADIKHYYESEVLAMNFQDWATASRQINSYVKNKTQGNYIFFKGTWTQPFDLASTREENFYVDETTVVKVPMMLQSSTISYLHDAELPCQLVQMNYVGNGTVFFILPDKGKMNTVIAALSRDTINRWSAGLTSSQVDLYIPKVTISGVYDLGDVLEEMGIADLFTNQANFSRITQDAQLKSSKVVHKAVLQLNEEGVDTAGSTGVTLNLTSKPIILRFNQPFIIMIFDHFTWSSLFLARVMNPV

SEQ ID NO: 751440 - protein, 237 aa, Homo sapiens
MSRIRHRGTIVDLFSGLDSPAILVLVNYIFFKVFFKGTWTQPFDLASTREENFYVDETTVVKVPMMLQSSTISYLHDAELPCQLVQMNYVGNGTVFFILPDKGKMNTVIAALSRDTINRWSAGLTSSQVDLYIPKVTISGVYDLGDVLEEMGIADLFTNQANFSRITQDAQLKSSKVVHKAVLQLNEEGVDTAGSTGVTLNLTSKPIILRFNQPFIIMIFDHFTWSSLFLARVMNPV

SEQ ID NO: 751441 - protein, 351 aa, Homo sapiens
MPLLLYTCLLWLPTSGLWTVQAMDPNAAYVNMSNHHRGLASANVDFAFSLYKHLVALSPKKNIFISPVSISMALAMLSLGTCGHTRAQLLQGLGFNLTERSETEIHQGFQHLHQLFAKSDTSLEMTMGNALFLDGSLELLESFSADIKHYYESEVLAMNFQDWATASRQINSYVKNKTQGNYSRLVSGLDSPAILVLVNYIFFKVFFKGTWTQPFDLASTREENFYVDETTVVKVPMMLQSSTISYLHDAELPCQLVQMNYVGNGTVFFILPDKGKMNTVIAALSRDTINRWSAGLTSSQVDLYIPKVTISGVYDLGDVLEEMGIADLWSIKLCCNSMRRVWTQLAPLGSP

SEQ ID NO: 751442 - protein, 61 aa, Homo sapiens
MLQSSTISYLHDAELPCQLVQMNYVGNGTVFFILPDKGKMNTVIAALSRDTINRWSAGLTS

SEQ ID NO: 751443 - protein, 237 aa, Homo sapiens; identical to SEQ ID NO: 751440

SEQ ID NO: 751444 - protein, 172 aa, Homo sapiens
MLQSSTISYLHDAELPCQLVQMNYVGNGTVFFILPDKGKMNTVIAALSRDTINRWSAGLTSSQVDLYIPKVTISGVYDLGDVLEEMGIADLFTNQANFSRITQDAQLKSSKVVHKAVLQLNEEGVDTAGSTGVTLNLTSKPIILRFNQPFIIMIFDHFTWSSLFLARVMNPV

SEQ ID NO: 751445 - protein, 206 aa, Homo sapiens
MVQLHPRWNQLEGIAEKKRMCNSEAPWESCLCHGGRDRSCLLLCPFSYPQRASQAGGQELEGAHEEIRVWPGEEVLLSPLPGPALECLTLSAYPERQVDLYIPKVTISGVYDLGDVLEEMGIADLFTNQANFSRITQDAQLKSSKVVHKAVLQLNEEGVDTAGSTGVTLNLTSKPIILRFNQPFIIMIFDHFTWSSLFLARVMNPV

SEQ ID NO: 751446 - protein, 291 aa, Homo sapiens
PTRPVDPKTRLLMYKMVNSGMLETITGCISTGKESVVFHAYGGSMEDEKEDSKVIPTECAIKVFKTTLNEFKNRDKYIKDDFRFKDRFSKLNPRKIIRMWAEKEMHNLARMQRAGIPCPTVVLLKKHILVMSFIGHDQVPAPKLKEVKLNSEEMKEAYYQTLHLMRQLYHECTLVHADLSEYNMLWHAGKVWLIDVSQSVEPTHPHGLEFLFRDCRNVSQFFQKGGVKEALSERELFNAVSGLNITADNEADFLAEIEALEKMNEDHVQKNGRKAASFLKDDGDPPLLYDE

SEQ ID NO: 751447 - protein, 147 aa, Homo sapiens
AVLFWGREEMKEAYYQTLHLMRQLYHECTLVHADLSEYNMLWHAGKVWLIDVSQSVEPTHPHGLEFLFRDCRNVSQFFQKGGVKEALSERELFNAVSGLNITADNEADFLAEIEALEKMNEDHVQKNGRKAASFLKDDGDPPLLYDE

SEQ ID NO: 751448 - protein, 196 aa, Homo sapiens
PTRPVDPKTRLLMYKMVNSGMLETITGCISTGKESVVFHAYGGSMEDEKEDSKVIPTECAIKVFKTTLNEFKNRDKYIKDDFRFKDRFSKLNPRKIIRMWAEKEMHNLARMQRAGIPCPTVVLLKKHILVMSFIGHDQVPAPKLKEVKLNSEEMKEAYYQTLHLMRQLYHECTLVHADLSEYNMLWHAGKVRSTFC

SEQ ID NO: 751449 - protein, 362 aa, Homo sapiens
ADNANLDPVDKFSKLRPLISKLNERCMKFVPNETYFSFDEFMVPYFGRHGCKQFIRGKPIRFGYKFWCGATCLGYICWFQPYQGKNPNTKHEEYGVGASLVLQFSEALTEAHPGQYHFVFNNFFTSIALLDKLSSMGHQATGTVRKDHIDRVPLESDVALKKKERGTFDYRIDGKGNIVCRWNDNSVVTVASSGAGIHPLCLVSRYSQKLKKKIQVQQPNMIKVYNQFMGGVDRADENIDKYRASIRGKKWYSSPLLFCFELVLQNAWQLHKTYDEKPVDFLEFRRRVVCHYLETHGHPPEPGQKGRPQKRNIDSRYDGINHVIVKQGKQTRCAECHKNTTFRCEKCDVALHVKCSVEYHTE

SEQ ID NO: 751450 - protein, 362 aa, Homo sapiens; identical to SEQ ID NO: 751449

SEQ ID NO: 751451 - protein, 385 aa, Homo sapiens
AGASGSVLVGASMWVCSTLWRVRTPARQWRGLLPASGCHGPAASSYSASAEPARVRALVYGHHGDPAKVVELKNLELAAVRGSDVRVKMLAAPINPSDINMIQGNYGLLPELPAVGGNEGVAQVVAVGSNVTGLKPGDWVIPANAGLGTWRTEAVFSEEALIQVPSDIPLQSAATLGVNPCTAYRMLMDFEQLQPGDSVIQNASNSGVGQAVIQIAAALGLRTINVVRDRPDIQKLSDRLKSLGAEHVITEEELRRPEMKNFFKDMPQPRLALNCVGGKSSTELLRQLARGGTMVTYGGMAKQPVVASVSLLIFKDLKLRGFWLSQWKKDHSPDQFKELILTLCDLIRRGQLTAPACSQVPLQDYQSALEASMKPFISSKQILTM

SEQ ID NO: 751452 - protein, 81 aa, Homo sapiens
SRGVRLCVGWSEHVGLQYPVAGANPRPAVAGAAPSFWLSRTCRLLLLRIRRACPGPGACLWAPRGSSQGRRTTVLLTASSY

SEQ ID NO: 751453 - protein, 297 aa, Homo sapiens
MLAAPINPSDINMIQGNYGLLPELPAVGGNEGVAQVVAVGSNVTGLKPGDWVIPANAGLGTWRTEAVFSEEALIQVPSDIPLQSAATLGVNPCTAYRMLMDFEQLQPGDSVIQNASNSGVGQAVIQIAAALGLRTINVVRDRPDIQKLSDRLKSLGAEHVITEEELRRPEMKNFFKDMPQPRLALNCVGGKSSTELLRQLARGGTMVTYGGMAKQPVVASVSLLIFKDLKLRGFWLSQWKKDHSPDQFKELILTLCDLIRRGQLTAPACSQVPLQDYQSALEASMKPFISSKQILTM

SEQ ID NO: 751454 - protein, 297 aa, Homo sapiens; identical to SEQ ID NO: 751453

SEQ ID NO: 751455 - protein, 310 aa, Homo sapiens
AAAPTSDWYVRVKMLAAPINPSDINMIQGNYGLLPELPAVGGNEGVAQVVAVGSNVTGLKPGDWVIPANAGLGTWRTEAVFSEEALIQVPSDIPLQSAATLGVNPCTAYRMLMDFEQLQPGDSVIQNASNSGVGQAVIQIAAALGLRTINVVRDRPDIQKLSDRLKSLGAEHVITEEELRRPEMKNFFKDMPQPRLALNCVGGKSSTELLRQLARGGTMVTYGGMAKQPVVASVSLLIFKDLKLRGFWLSQWKKDHSPDQFKELILTLCDLIRRGQLTAPACSQVPLQDYQSALEASMKPFISSKQILTM

SEQ ID NO: 751456 - protein, 290 aa, Homo sapiens
AGASGSVLVGASMWVCSTLWRVRTPARQWRGLLPASGCHGPAASSYSASAEPARVRALVYGHHGDPAKVVELKNLELAAVRGSDVRVKMLAAPINPSDINMIQGNYGLLPELPAVGGNEGVAQVVAVGSNVTGLKPGDWVIPANAGLGTWRTEAVFSEEALIQVPSDIPLQSAATLGVNPCTAYRMLMDFEQLQPGDSVIQNASNSGVGQAVIQIAAALGLRTINVVRDRPDIQKLSDRLKSLGAEHVITEEELRRPEMKNFFKDMPQPRLALNCVGGKSSTELLRQLAF

SEQ ID NO: 751457 - protein, 466 aa, Homo sapiens
AGASGSVLVGASMWVCSTLWRVRTPARQWRGLLPASGCHGPAASSYSASAEPARVRALVYGHHGDPAKVVELKNLELAAVRGSDVRVKMLAAPINPSDINMIQGNYGLLPELPAVGGNEGVAQVVAVGSNVTGLKPGDWVIPANAGLGTWRTEAVFSEEALIQVPSDIPLQSAATLGVNPCTAYRMLMDFEQLQPGDSVIQNASNSGVGQAVIQIAAALGLRTINVVRDRPDIQKLSDRLKSLGAEHVITEEELRRPEMKNFFKIRKLRLRKEEMLNQNHIVYKGSRESELASVSPNSKPLNLPEPPPHKCLDMPQPRLALNCVGGKSSTELLRQLARGGTMVTYGGMAKQPVVASVSLLIFKDLKLRGFWLSQWKKDHSPDQFRADPHKVDLIRRRQVKACCPVPAEQAGLELISLNSRISQESKLVEEGGWGERPGHAKGQPHERNRAGKERANKNAAHGETTS

SEQ ID NO: 751458 - protein, 215 aa, Homo sapiens
AGASGSVLVGASMWVCSTLWRVRTPARQWRGLLPASGCHGPAASSYSASAEPARVRALVYGHHGDPAKVVELKNLELAAVRGSDVRVKMLAAPINPSDINMIQGNYGLLPELPAVGGNEGVAQVVAVGSNVTGLKPGDWVIPANAGLGTWRTEAVFSEEALIQVPSDIPLQSAATLGVNPCTAYRMLMDFEQLQPGDSVIQNASNSGVGQAVIQP

SEQ ID NO: 751459 - protein, 385 aa, Homo sapiens; identical to SEQ ID NO: 751451

SEQ ID NO: 751460 - protein, 270 aa, Homo sapiens
AGASGSVLVGASMWVCSTLWRVRTPARQWRGLLPASGCHGPAASSYSASAEPARVRALVYGHHGDPAKVVELKNLELAAVRGSDVRVKMLAAPINPSDINMIQGNYGLLPELPAVGGNEGVAQVVAVGSIKNVRGPGEARRLVTSQGQKIWAFWGIFYRGGNNPLCVGAGGENPPVNGALGSGFSTNSGSAGDTNGRREKRAHTLWVISPPEKGFFPPRESGVVEANFFRHRFSFFSHQHTATILAGRRNSHTKSSHPVRSKYTPSQSTQ

SEQ ID NO: 751461 - protein, 297 aa, Homo sapiens; identical to SEQ ID NO: 751453

SEQ ID NO: 751462 - protein, 297 aa, Homo sapiens; identical to SEQ ID NO: 751453

SEQ ID NO: 751463 - protein, 289 aa, Homo sapiens
AGASGSVLVGASMWVCSTLWRVRTPARQWRGLLPASGCHGPAASSYSASAEPARVRALVYGHHGDPAKVVELKNLELAAVRGSDVRVKMLAAPINPSDINMIQGNYGLLPELPAVGGNEGVAQVVAVGSNVTGLKPGDWVIPANAGLGTWRTEAVFSEEALIQVPSDIPLQSAATLGVNPCTAYRMLMDFEQLQPGDSVIQNASNSGVGQAVIQIAAALGLRTINVVRDRPDIQKLSDRLKSLGAEHVITEEELRRPEMKNFFKDMPQPRLALNCVGGKSSTELLRQLA

SEQ ID NO: 751464 - protein, 234 aa, Homo sapiens
MLAAPINPSDINMIQGNYGLLPELPAVGGNEGVAQVVAVGSNVTGLKPGDWVIPANAGLGTWRTEAVFSEEALIQVPSDIPLQSAATLGVNPCTAYRMLMDFEQLQPGDSVIQNASNSGVGQAVIQIAAALGLRTINVVRDRPDIQKLSDRLKSLGAEHVITEEELRRPEMKNFFKDMPQPRLALNCVGGKSSTELLRQLARGGTMVTYGGMAKQPVVASVVSWVQREACLEPG

SEQ ID NO: 751465 - protein, 366 aa, Homo sapiens
MAGPRVEVDGSIMEGGGQILRVSTALSCLLGLPLRVQKIRAGRSTPGLRPQHLSGLEMIRDLCDGQLEGAEIGSTEITFTPEKIKGGIHTADTKTAGSVCLLMQVSMPCVLFAASPSELHLKGGTNAEMAPQIDYTVMVFKPIVEKFGFIFNCDIKTRGYYPKGGGEVIVRMSPVKQLNPINLTERGCVTKIYGRAFVAGVLPFKVAKDMAAAAVRCIRKEIRDLYVNIQPVQEPKDQAFGNGNGIIIIAETSTGCLFAGSSLGKRGVNADKVGIEAAEMLLANLRHGGTVDEYLQDQLIVFMALANGVSRIKTGPVTLHTQTAIHFAEQIAKAKFIVKKSEDEEDAAKDTYIIECQGIGMTNPNL

SEQ ID NO: 751466 - protein, 366 aa, Homo sapiens
MAGPRVEVDGSIMEGGGQILRVSTALSCLLGLPLRVQKIRAGRSTPGLRPQHLSGLEMIRDLCDGQLEGAEIGSTEITFTPEKIKGGIHTADTKTAGSVCLLMQVSMPCVLFAASPSELHLKGGTNAEMAPQIDYTVMVFKPIVEKFGFIFNCDIKTRGYYPKGGGEVIVRMSPVKQLNPINLTERGCVTKIYGRAFVAGVLPFKVAKDMAAAAVRCIRKEIRDLYVNIQPVQEPKDQAFGNGNGIIIMAETSMGWWEAGSSLGKRGVNADKVGIEAAEMLLANLRHGGTVDEYLQDQLIVFMALANGVSRIKTGPVTLHTQTAIHFAEQIAKAKFIVKKSEDEEDAAKDTYIIECQGIGMTNPNL

SEQ ID NO: 751467 - protein, 309 aa, Homo sapiens
MIRDLCDGQLEGAEIGSTEITFTPEKIKGGIHTADTKTAGSVCLLMQVSMPCVLFAASPSELHLKGGTNAEMAPQIDYTVMVFKPIVEKFGFIFNCDIKTRGYYPKGGGEVIVRMSPVKQLNPINLTERGCVTKIYGRAFVAGVLPFKVAKDMAAAAVRCIRKEIRDLYVNIQPVQEPKDQAFGNGNGIIIIAETSTGCLFAGSSLGKRGVNADKVGIEAAEMLLANLRHGGTVDEYLQDQLIVFMALANGVSRIKTGPVTLHTQTAIHFAEQIAKAKFIVKKSEDEEDAAKDTYIIECQGIGMTNPNL

SEQ ID NO: 751468 - protein, 379 aa, Homo sapiens
MAGPRVEVDGSIMEGGGQILRVSTALSCLLGLPLRVQKIRAGRSTPGLSSGGWKSKIKVLTRPQHLSGLEMIRDLCDGQLEGAEIGSTEITFTPEKIKGGIHTADTKTAGSVCLLMQVSMPCVLFAASPSELHLKGGTNAEMAPQIDYTVMVFKPIVEKFGFIFNCDIKTRGYYPKGGGEVIVRMSPVKQLNPINLTERGCVTKIYGRAFVAGVLPFKVAKDMAAAAVRCIRKEIRDLYVNIQPVQEPKDQAFGNGNGIIIIAETSTGCLFAGSSLGKRGVNADKVGIEAAEMLLANLRHGGTVDEYLQDQLIVFMALANGVSRIKTGPVTLHTQTAIHFAEQIAKAKFIVKKSEDEEDAAKDTYIIECQGIGMTNPNL

SEQ ID NO: 751469 - protein, 366 aa, Homo sapiens; identical to SEQ ID NO: 751465

SEQ ID NO: 751470 - protein, 158 aa, Homo sapiens
MAGPRVEVDGSIMEGGGQILRVSTALSCLLGLPLRVQKIRAGRSTPGLRPQHLSGLEMIRDLCDGQLEGAEIGSTEITFTPEKIKGGIHTADTKTAGSVCLLMQVSMPCVLFAASPSELHLKGGTNAEMAPQIDYTVMVFKPIVEKFGFIFNCDIKTR

SEQ ID NO: 751471 - protein, 570 aa, Homo sapiens
MLLLLSDQLLLTALRKPNPQAMAALFLSAPPQAEVTFEDVAVYLSREEWGRLGPAQRGLYRDVMLETYGNLVSLGVGPAGPKPGVISQLERGDEPWVLDVQGTSGKEHLRVNSPALGTRTEYKELTSQETFGEEDPQGSEPVEACDHISKSEGSLEKLVEQRGPRAVTLTNGESSRESGGNLRLLSRPVPDQRPHKCDICEQSFEQRSYLNNHKRVHRSKKTNTVRNSGEIFSANLVVKEDQKIPTGKKLHYCSYCGKTFRYSANLVKHQRLHTEEKPYKCDECGKAFSQSCEFINHRRMHSGEIPYRCDECGKTFTRRPNLMKHQRIHTGEKPYKCGECGKHFSAYSSLIYHQRIHTGEKPYKCNDCGKAFSDGSILIRHRRTHTGEKPFECKECGKGFTQSSNLIQHQRIHTGEKPYKCNECEKAFIQKTKLVEHQRSHTGEKPYECNDCGKVFSQSTHLIQHQRIHTGEKPYKCSECGKAFHNSSRLIHHQRLHHGEKPYRCSDCKKAFSQSTVPTCVSISGFTSGRTSPCNSGAVSEGRVQLSTSCMRPRHLTLPFMYYPHDVFTE

SEQ ID NO: 751472 - protein, 530 aa, Homo sapiens
MLLLLSDQLLLTALRKPNPQAMAALFLSAPPQAEVTFEDVAVYLSREEWGRLGPAQRGLYRDVMLETYGNLVSLALGTRTEYKELTSQETFGEEDPQGSEPVEACDHISKSEGSLEKLVEQRGPRAVTLTNGESSRESGGNLRLLSRPVPDQRPHKCDICEQSFEQRSYLNNHKRVHRSKKTNTVRNSGEIFSANLVVKEDQKIPTGKKLHYCSYCGKTFRYSANLVKHQRLHTEEKPYKCDECGKAFSQSCEFINHRRMHSGEIPYRCDECGKTFTRRPNLMKHQRIHTGEKPYKCGECGKHFSAYSSLIYHQRIHTGEKPYKCNDCGKAFSDGSILIRHRRTHTGEKPFECKECGKGFTQSSNLIQHQRIHTGEKPYKCNECEKAFIQKTKLVEHQRSHTGEKPYECNDCGKVFSQSTHLIQHQRIHTGEKPYKCSECGKAFHNSSRLIHHQRLHHGEKPYRCSDCKKAFSQSTVPTCVSISGFTSGRTSPCNSGAVSEGRVQLSTSCMRPRHLTLPFMYYPHDVFTE

SEQ ID NO: 751473 - protein, 560 aa, Homo sapiens
MLLLLSDQLLLTALRKPNPQAMAALFLSAPPQAEVTFEDVAVYLSREEWGRLGPAQRGLYRDVMLETYGNLVSLGVGPAGPKPGVISQLERGDEPWVLDVQGTSGKEHLRVNSPALGTRTEYKELTSQETFGEEDPQGSEPVEACDHISKSEGSLEKLVEQRGPRAVTLTNGESSRESGGNLRLLSRPVPDQRPHKCDICEQSFEQRSYLNNHKRVHRSKKTNTVRNSGEIFSANLVVKEDQKIPTGKKLHYCSYCGKTFRYSANLVKHQRLHTEEKPYKCDECGKAFSQSCEFINHRRMHSGEIPYRCDECGKTFTRRPNLMKHQRIHTGEKPYKCGECGKHFSAYSSLIYHQRIHTGEKPYKCNDCGKAFSDGSILIRHRRTHTGEKPFECKECGKGFTQSSNLIQHQRIHTGEKPYKCNECEKAFIQKTKLVEHQRSHTGEKPYECNDCGKVFSQSTHLIQHQRIHTGEKPYKCSECGKAFHNSSRLIHHQRLHHGEKPYRCSDCKKAFSQSTYLIQHRRIHTGEKPYKCSECGKAFRHSSNMCQHQRIHLREDFSM

SEQ ID NO: 751474 - protein, 560 aa, Homo sapiens; identical to SEQ ID NO: 751473

SEQ ID NO: 751475 - protein, 570 aa, Homo sapiens; identical to SEQ ID NO: 751471

SEQ ID NO: 751476 - protein, 204 aa, Homo sapiens
MAAAEAVHHIHLQNFSRSLLETLNGQRLGGHFCDVTVRIREASLRAHRCVLAAGSPFFQDKLLLGHSEIRVPPVVPAQTVRQLVEFLYSGSLVVAQGEALQVLTAASVLRIQTVIDECTQIIARARAPGTSAPQCPWPIACCTRRPTSGSLVDDLVVQCGHGGHTCLVLSVPRGHPGVTLLERGALYACAEALGVLLDGTGALL

SEQ ID NO: 751477 - protein, 394 aa, Homo sapiens
MAAAEAVHHIHLQNFSRSLLETLNGQRLGGHFCDVTVRIREASLRAHRCVLAAGSPFFQDKLLLGHSEIRVPPVVPAQTVRQLVEFLYSGSLVVAQGEALQVLTAASVLRIQTVIDECTQIIARARAPGTSAPTPLPTPVPPPLAPAQLRHRLRHLLAARPPGHPGAAHSRKQRQPARLQLPAPPTPAKAEGPDADPSLSAAPDDRGDEDDEESDDETDGEDGEGGGPGEGQAPPSFPDCAAGFLTAAADSACEEPPAPTGLADYSGAGRDFLRGAGSAEDVFPDSYVSTWHDEDGAVPEGCPTETPVQPDCILSGSRPPGVKTPGPPVALFPFHLGAPGPPAPPPSAPSGPAPAPPPAFYPTLQPEAAPSTQLGEVPAPSVVRPLLRTGLFPA

SEQ ID NO: 751478 - protein, 394 aa, Homo sapiens; identical to SEQ ID NO: 751477

SEQ ID NO: 751479 - protein, 511 aa, Homo sapiens
MAAAEAVHHIHLQNFSRSLLETLNGQRLGGHFCDVTVRIREASLRAHRCVLAAGSPFFQDKLLLGHSEIRVPPVVPAQTVRQLVEFLYSGSLVVAQGEALQVLTAASVLRIQTVIDECTQIIARARAPGTSAPTPLPTPVPPPLAPAQLRHRLRHLLAARPPGHPGAAHSRKQRQPARLQLPAPPTPAKAEGPDADPSLSAAPDDRGDEDDEESDDETDGEDGEGGGPGEGQAPPSFPDCAAGFLTAAADSACEEPPAPTGLADYSGAGRDFLRGAGSAEDVFPDSYVSTWHDEDGAVPEGCPTETPVQPDCILSGSRPPGVKTPGPPVALFPFHLGAPGPPAPPPSAPSGPAPAPPPAFYPTLQPEAAPSTQLGEVPAPSAAPTTAPSGTPARTPGAEPPTYECSHCRKTFSSRKNYTKHMFIHSGEKPHQCAVCWRSFSLRDYLLKHMVTHTGVRAFQCAVCAKRFTQKSSLNVHMRTHRPERAPCPACGKVFSHRALLERHLAAHPAP

SEQ ID NO: 751480 - protein, 133 aa, Homo sapiens
MAAAEAVHHIHLQNFSRSLLETLNGQRLGGHFCDVTVRIREASLRAHRCVLAAGSPFFQDKLLLGHSEIRVPPVVPAQTVRQLVEFLYSGSLVVAQGEALQVLTAASVLRIQTVIDECTQIIARARAPGTSAL

SEQ ID NO: 751481 - protein, 511 aa, Homo sapiens; identical to SEQ ID NO: 751479

SEQ ID NO: 751482 - protein, 511 aa, Homo sapiens; identical to SEQ ID NO: 751479

SEQ ID NO: 751483 - protein, 485 aa, Homo sapiens
MAAAEAVHHIHLQNFSRSLLETLNGQRLGGHFCDVTVRIREASLRAHRCVLAAGSPFFQDKLLLGHSEIRVPPVVPAQTVRQLVEFLYSGSLVVAQGEALQVLTAASVLRIQTVIDECTQIIARARAPGTSAPTPLPTPVPPPLAPAQLRHRLRHLLAARPPGHPGAAHSRKQRQPARLQLPAPPTPAKAEGPDADPSLSAAPDDRGDEDDEESDDETDGEDGEGGGPGEGQAPPSFPDCAAGFLTAAADSACEEPPAPTGLADYSGAGRDFLRGAGSAEDVFPDSYVSTWHDEDGAVPEGCPTETPVQPDCILSGSRPPGVKTPGPPVALFPFHLGAPGPPAPPPSAPSGPAPAPPPAFYPTLQPEAAPSTQLGEVPAPSAAPTTAPSGTPARTPGAEPPTYECSHCRKTFSSRKNYTKHMFIHSGEKPHQCAVCWRSFSLRDYLLKHMVTHTGVRAFQCAVCAKRFTQKCAWVRTQAHFWGVV

SEQ ID NO: 751484 - protein, 61 aa, Homo sapiens
GVGWGRGAVESDLRSRPALSSAGEKPHQCAVCWRSFSLRDYLLKHMVTHTGVRAFQCAVCA

SEQ ID NO: 751485 - protein, 1493 aa, Homo sapiens
MPNEGIPHSSQTQEQDCLQSQPVSNNEEMAIKQESGGDGEVEEYLSFRSVGDGLSTSAVGCASAAPRRGPALLHIDRHQIQAVEPSAQALELQGLGVDVYDQDVLEQGVLQQVDNAIHEASRASQLVDVEKEYRSVLDDLTSCTTSLRQINKIIEQLSPQAATSRDINRKLDSVKRQKYNKEQQLKKITAKQKHLQAILGGAEVKIELDHASLEEDAEPGPSSLGSMLMPVQETAWEELIRTGQMTPFGTQIPQKQEKKPRKIMLNEASGFEKYLADQAKLSFERKKQGCNKRAARKAPAPVTPPAPVQNKNKPNKKARVLSKKEERLKKHIKKLQKRALQFQGKVGLPKARRPWESDMRPEAEGDSEGEESEYFPTEEEEEEEDDEVEGAEADLSGDGTDYELKPLPKGGKRQKKVPVQEIDDDFFPSSGEEAEAASVGEGGGGGRKVGRYRDDGDEDYYKQRLRRWNKLRLQDKEKRLKLEDDSEESDAEFDEGFKVPGFLFKKLFKYQQTGVRWLWELHCQQAGGILGDEMGLGKTIQIIAFLAGLSYSKIRTRGSNYRFEGLGPTVIVCPTTVMHQWVKEFHTWWPPFRVAILHETGSYTHKKEKLIRDVAHCHGILITSYSYIRLMQDDISRYDWHYVILDEGHKIRNPNAAVTLACKQFRTPHRIILSGSPMQNNLRELWSLFDFIFPGKLGTLPVFMEQFSVPITMGGYSNASPVQVKTAYKCACVLRDTINPYLLRRMKSDVKMSLSLPDKNEQVLFCRLTDEQHKVYQNFVDSKEVYRILNGEMQIFSGLIALRKICNHPDLFSGGPKNLKGLPDDELEEDQFGYWKRSGKMIVVESLLKIWHKQGQRVLLFSQSRQMLDILEVFLRAQKYTYLKMDGTTTIASRQPLITRYNEDTSIFVFLLTTRVGGLGVNLTGANRVVIYDPDWNPSTDTQARERAWRIGQKKQVTVYRLLTAGTIEEKIYHRQIFKQFLTNRVLKDPKQRRFFKSNDLYELFTLTSPDASQSTETSAIFAGTGSDVQTPKCHLKRRIQPAFGADHDVPKRKKFPASNISVNDATSSEEKSEAKGAEVNAVTSNRSDPLKDDPHMSSNVTSNDRLGEETNAVSGPEELSVISGNGECSNSSGTGKTSMPSGDESIDEKLGLSYKRERPSQAQTEAFWENKQMENNFYKHKSKTKHHSVAEEETLEKHLRPKQKPKNSKHCRDAKFEGTRIPHLVKKRRYQKQDSENKSEAKEQSNDDYVLEKLFKKSVGVHSVMKHDAIMDGASPDYVLVEAEANRVAQDALKALRLSRQRCLGAVSGVPTWTGHRGISGAPAGKKSRFGKKRNSNFSVQHPSSTSPTEKCQDGIMKKEGKDNVPEHFSGRAEDADSSSGPLASSSLLAKMRARNHLILPERLESESGHLQEASALLPTTEHDDLLVEMRNFIAFQAHTDGQASTREILQEFESKLSASQSCVFRELLRNLCTFHRTSGGEGIWKLKPEYC

SEQ ID NO: 751486 - protein, 1430 aa, Homo sapiens
MPNEGIPHSSQTQEQDCLQSQPVSNNEEMAIKQESGGDGEVEEYLSFRSVGDGLSTSAVGCASAAPRRGPALLHIDRHQIQAVEPSAQALELQGLGVDVYDQDVLEQGVLQQVDNAIHEASRASQLVDVEKEYRSVLDDLTSCTTSLRQINKIIEQLSPQAATSRDINRKLDSVKRQKYNKEQQLKKITAKQKHLQAILGGAEVKIELDHASLEEDAEPGPSSLGSMLMPVQETAWEELIRTGQMTPFGTQIPQKQEKKPRKIMLNEASGFEKYLADQAKLSFERKKQGCNKRAARKAPAPVTPPAPVQNKNKPNKKARVLSKKEERLKKHIKKLQKRALQFQGKVGLPKARRPWESDMRPEAEGDSEGEESEYFPTEEEEEEEDDEVEGAEADLSGDGTDYELKPLPKGGKRQKKVPVQEIDDDFFPSSGEEAEAASVGEGGGGGRKVGRYRDDGDEDYYKQRLRRWNKLRLQDKEKRLKLEDDSEESDAEFDEGFKVPGFLFKKLFKYQQTGVRWLWELHCQQAGGILGDEMGLGKTIQIIAFLAGLSYSKIRTRGSNYRRNYIRDVAHCHGILITSYSYIRLMQDDISRYDWHYVILDEGHKIRNPNAAVTLACKQFRTPHRIILSGSPMQNNLRELWSLFDFIFPGKLGTLPVFMEQFSVPITMGGYSNASPVQVKTAYKCACVLRDTINPYLLRRMKSDVKMSLSLPDKNEQVLFCRLTDEQHKVYQNFVDSKEVYRILNGEMQIFSGLIALRKICNHPDLFSGGPKNLKGLPDDELEEDQFGYWKRSGKMIVVESLLKIWHKQGQRVLLFSQSRQMLDILEVFLRAQKYTYLKMDGTTTIASRQPLITRYNEDTSIFVFLLTTRVGGLGVNLTGANRVVIYDPDWNPSTDTQARERAWRIGQKKQVTVYRLLTAGTIEEKIYHRQIFKQFLTNRVLKDPKQRRFFKSNDLYELFTLTSPDASQSTETSAIFAGTGSDVQTPKCHLKRRIQPAFGADHDVPKRKKFPASNISVNDATSSEEKSEAKGAEVNAVTSNRSDPLKDDPHMSSNVTSNDRLGEETNAVSGPEELSVISGNGECSNSSGTGKTSMPSGDESIDENWENKQMENNFYKHKSKTKHHSVAEEETLEKHLRPKQKPKNSKHCRDAKFEGTRIPHLVKKRRYQKQDSENKSEAKEQSNDDYVLEKLFKKSVGVHSVMKHDAIMDGASPDYVLVEAEANRVAQDALKALRLSRQRCLGAVSGVPTWTGHRGISGAPAGKKSRFGKKRNSNFSVQHPSSTSPTEKCQDGIMKKEGKDNVPEHFSGRAEDADSSSGPLASSSLLAKMRARNHLILPERLESESGHLQEASALLPTTEHDDLLVEMRNFIAFQAHTDGQASTREILQEFESKLSASQSCVFRELLRNLCTFHRTSGGEGIWKLKPEYC

SEQ ID NO: 751487 - protein, 1293 aa, Homo sapiens
MPNEGIPHSSQTQEQDCLQSQPVSNNEEMAIKQESGGDGEVEEYLSFRSVGDGLSTSAVGCASAAPRRGPALLHIDRHQIQAVEPSAQALELQGLGVDVYDQDVLEQGVLQQVDNAIHEASRASQLVDVEKEYRSVLDDLTSCTTSLRQINKIIEQLSPQAATSRDINRKLDSVKRQKYNKEQQLKKITAKQKHLQAILGGAEVKIELDHASLEEDAEPGPSSLGSMLMPVQETAWEELIRTGQMTPFGTQIPQKQEKKPRKIMLNEASGFEKYLADQAKLSFERKKQGCNKRAARKAPAPVTPPAPVQNKNKPNKKARVLSKKEERLKKHIKKLQKRALQFQGKVGLPKARRPWESDMRPEAEGDSEGEESEYFPTEEEEEEEDDEVEGAEADLSGDGTDYELKPLPKGGKRQKKVPVQEIDDDFFPSSGEEAEAASVGEGGGGGRKVGRYRDDGDEDYYKQRLRRWNKLRLQDKEKRLKLEDDSEESDAEFDEGFKVPGFLFKKLFKYQQTGVRWLWELHCQQAGGILGDEMGLGKTIQIIAFLAGLSYSKIRTRGSNYRRNYIRDVAHCHGILITSYSYIRLMQDDISRYDWHYVILDEGHKIRNPNAAVTLACKQFRTPHRIILSGSPMQNNLRELWSLFDFIFPGKLGTLPVFMEQFSVPITMGGYSNASPVQVKTAYKCACVLRDTINPYLLRRMKSDVKMSLSLPDKNEQVLFCRLTDEQHKVYQNFVDSKEVYRILNGEMQIFSGLIALRKICNHPDLFSGGPKNLKGLPDDELEEDQFGYWKRSGKMIVVESLLKIWHKQGQRVLLFSQSRQMLDILEVFLRAQKYTYLKMDGTTTIASRQPLITRYNEDTSIFVFLLTTRVGGLGVNLTGANRVVIYDPDWNPSTDTQARERAWRIGQKKQVTVYRLLTAGTIEEKIYHRQIFKQFLTNRVLKDPKQRRFFKSNDLYELFTLTSPDASQSTETSAIFAGTGSDVQTPKCHLKRRIQPAFGADHDVPKRKKFPASNISVNDATSSEEKSEAKGAEVNAVTSNRSDPLKDDPHMSSNVTSNDRLGEETNAVSGPEELSVISGNGECSNSSGTGKTSMPSGDESIDENWENKQMENNFYKHKSKTKHHSVAEEETLEKHLRPKQKPKNSKHCRDAKFEGTRIPHLVKKRRYQKQDSENKSEAKEQSNDDYVLEKLFKKSVGVHSVMKHDAIMDGASPDYVLVEAEANRVAQDALKALRLSRQRCLGAVSGVPTWTGHRGISGAPAGKKSRFGKKRNSNFSVQHPSSTSPTEKCQVI

SEQ ID NO: 751488 - protein, 694 aa, Homo sapiens
MPNEGIPHSSQTQEQDCLQSQPVSNNEEMAIKQESGGDGEVEEYLSFRSVGDGLSTSAVGCASAAPRRGPALLHIDRHQIQAVEPSAQALELQGLGVDVYDQDVLEQGVLQQVDNAIHEASRASQLVDVEKEYRSVLDDLTSCTTSLRQINKIIEQLSPQAATSRDINRKLDSVKRQKYNKEQQLKKITAKQKHLQAILGGAEVKIELDHASLEEDAEPGPSSLGSMLMPVQETAWEELIRTGQMTPFGTQIPQKQEKKPRKIMLNEASGFEKYLADQAKLSFERKKQGCNKRAARKAPAPVTPPAPVQNKNKPNKKARVLSKKEERLKKHIKKLQKRALQFQGKVGLPKARRPWESDMRPEAEGDSEGEESEYFPTEEEEEEEDDEVEGAEADLSGDGTDYELKPLPKGGKRQKKVPVQEIDDDFFPSSGEEAEAASVGEGGGGGRKVGRYRDDGDEDYYKQRLSPKMPRTLSLHEITDLLETDDSIEASAIVIQPPENATAPVSDEESGDEEGGTINNLPGSLLHTAAYLIQDGSDAESDSDDPSYAPKDDSPDEVPSTFTVQQPPPSRRRKMTKILCKWKKADLTVQPVAGRVTAPPNDFFTVMRTPTEILELFLDDEVIELIVKYSNLYACSKGVHLGLTSSEFKCFLGIIFLSGYVSVPRRRMFWEQRTDVHNVLVSAAMRRDRFETIF

SEQ ID NO: 751489 - protein, 277 aa, Homo sapiens
CLTHSESLPAAPRVTDTQDSENKSEAKEQSNDDYVLEKLFKKSVGVHSVMKHDAIMDGASPDYVLVEAEANRVAQDALKALRLSRQRCLGAVSGVPTWTGHRGISGAPAGKKSRFGKKRNSNFSVQHPSSTSPTEKCQDGIMKKEGKDNVPEHFSGRAEDADSSSGPLASSSLLAKMRARNHLILPERLESESGHLQEASALLPTTEHDDLLVEMRNFIAFQAHTDGQASTREILQEFESKLSASQSCVFRELLRNLCTFHRTSGGEGIWKLKPEYC

SEQ ID NO: 751490 - protein, 43 aa, Homo sapiens
MPGCAGRHALGGPGRGRNIPPRVPAGPGGRRRLLAPPWRPPPL

SEQ ID NO: 751491 - protein, 138 aa, Homo sapiens
SRNPGGPGVTDVEEGLRPSGALGYEYSGDVRSARVNALLPALCRCSHLSSLSLSDNPISSACLLSLLEHTMGLMELKQVLYPIPVDCCIYLHGVCRGPMNEDKLCQLQAEIQKQLQAMQQADMQWSPSTVFAYAAGAV

SEQ ID NO: 751492 - protein, 111 aa, Homo sapiens
LQPSALFDIDWAGATVTPRPGCGGPLSHTPRQGVRRGQMSITETKPWLWRPFLPSQGLGSMCSELHFRKAAAARDTLSTAGDLWGCAAFMVSVGFLFSPSFVLAAVSEADG

SEQ ID NO: 751493 - protein, 582 aa, Homo sapiens
MKLLKLTGFIFFLFFLTESLTLPTQPRDIENFNSTQKFIEDNIEYITIIAFAQYVQEATFEEMEKLVKDMVEYKDRCMADKTLPECSKLPNNVLQEKICAMEGLPQKHNFSHCCSKVDAQRRLCFFYNKKSDVGFLPPFPTLDPEEKCQAYESNRESLLNHFLYEVARRNPFVFAPTLLTVAVHFEEVAKSCCEEQNKVNCLQTRAIPVTQYLKAFSSYQKHVCGALLKFGTKVVHFIYIAILSQKFPKIEFKELISLVEDVSSNYDGCCEGDVVQCIRDTSKVMNHICSKQDSISSKIKECCEKKIPERGQCIINSNKDDRPKDLSLREGKFTEQFTFEYSRRHPDLSIPELLRIVQIYKDLLRNCCNTENPPGCYRYAEDKFNETTEKSLKMVQQECKHFQNLGKDGLKYHYLIRLTKIAPQLSTEELVSLGEKMVTAFTTCCTLSEEFACVDNLADLVFGELCGVNENRTINPAVDHCCKTNFAFRRPCFESLKADKTYVPPPFSQDLFTFHADMCQSQNEELQRKTDRFLVNLVKLKHELTDEELQSLFTNFANVVDKCCKAESPEVCFNEESPKIGN

SEQ ID NO: 751494 - protein, 353 aa, Homo sapiens
MKLLKLTGFIFFLFFLTESLTLPTQPRDIENFNSTQKFIEDNIEYITIIAFAQYVQEATFEEMEKLVKDMVEYKDRCMADKTLPECSKLPNNVLQEKICAMEGLPQKHNFSHCCSKVDAQRRLCFFYNKKSDVGFLPPFPTLDPEEKCQAYESNRESLLNHFLYEVARRNPFVFAPTLLTVAVHFEEVAKSCCEEQNKVNCLQTRAIPVTQYLKAFSSYQKHVCGALLKFGTKVVHFIYIAILSQKFPKIEFKELISLVEDVSSNYDGCCEGDVVQCIRDTSKVMNHICSKQDSISSKIKECCEKKIPERGQCIINSNKDDRPKDLSLREGKFTDSLLLNTQGDIQTCLYQSF

SEQ ID NO: 751495 - protein, 599 aa, Homo sapiens
MKLLKLTGFIFFLFFLTESLTLPTQPRDIENFNSTQKFIEDNIEYITIIAFAQYVQEATFEEMEKLVKDMVEYKDRCMADKTLPECSKLPNNVLQEKICAMEGLPQKHNFSHCCSKVDAQRRLCFFYNKKSDVGFLPPFPTLDPEEKCQAYESNRESLLNHFLYEVARRNPFVFAPTLLTVAVHFEEVAKSCCEEQNKVNCLQTRAIPVTQYLKAFSSYQKHVCGALLKFGTKVVHFIYIAILSQKFPKIEFKELISLVEDVSSNYDGCCEGDVVQCIRDTSKVMNHICSKQDSISSKIKECCEKKIPERGQCIINSNKDDRPKDLSLREGKFTDSENVCQERDADPDTFFAKFTFEYSRRHPDLSIPELLRIVQIYKDLLRNCCNTENPPGCYRYAEDKFNETTEKSLKMVQQECKHFQNLGKDGLKYHYLIRLTKIAPQLSTEELVSLGEKMVTAFTTCCTLSEEFACVDNLADLVFGELCGVNENRTINPAVDHCCKTNFAFRRPCFESLKADKTYVPPPFSQDLFTFHADMCQSQNEELQRKTDRFLVNLVKLKHELTDEELQSLFTNFANVVDKCCKAESPEVCFNEESPKIGN

SEQ ID NO: 751496 - protein, 189 aa, Homo sapiens
MVQQECKHFQNLGKDGLKYHYLIRLTKIAPQLSTEELVSLGEKMVTAFTTCCTLSEEFACVDNLADLVFGELCGVNENRTINPAVDHCCKTNFAFRRPCFESLKADKTYVPPPFSQDLFTFHADMCQSQNEELQRKTDRFLVNLVKLKHELTDEELQSLFTNFANVVDKCCKAESPEVCFNEESPKIGN

SEQ ID NO: 751497 - protein, 599 aa, Homo sapiens; identical to SEQ ID NO: 751495

SEQ ID NO: 751498 - protein, 481 aa, Homo sapiens
MEGLPRFFYNKKSDVGFLPPFPTLDPEEKCQAYESNRESLLNHFLYEVARRNPFVFAPTLLTVAVHFEEVAKSCCEEQNKVNCLQTRAIPVTQYLKAFSSYQKHVCGALLKFGTKVVHFIYIAILSQKFPKIEFKELISLVEDVSSNYDGCCEGDVVQCIRDTSKVMNHICSKQDSISSKIKECCEKKIPERGQCIINSNKDDRPKDLSLREGKFTDSENVCQERDADPDTFFAKFTFEYSRRHPDLSIPELLRIVQIYKDLLRNCCNTENPPGCYRYAEDKFNETTEKSLKMVQQECKHFQNLGKDGLKYHYLIRLTKIAPQLSTEELVSLGEKMVTAFTTCCTLSEEFACVDNLADLVFGELCGVNENRTINPAVDHCCKTNFAFRRPCFESLKADKTYVPPPFSQDLFTFHADMCQSQNEELQRKTDRFLVNLVKLKHELTDEELQSLFTNFANVVDKCCKAESPEVCFNEESPKIGN

SEQ ID NO: 751499 - protein, 353 aa, Homo sapiens; identical to SEQ ID NO: 751494

SEQ ID NO: 751500 - protein, 195 aa, Homo sapiens
MKLLKLTGFIFFLFFLTESLTLPTQPRDIENFNSTQKFIEDNIEYITIIAFAQYVQEATFEEMEKLVKDMVEYKDRCMADKTLPECSKLPNNVLQEKICAMEGLPQKHNFSHCCSKVDAQRRLCFFYNKKSDVGFLPPFPTLDPEEKCQAYESNRESLLNHFLYEVARRNPFVFAPTLLTVAVHFEEVASTRPRI

SEQ ID NO: 751501 - protein, 104 aa, Homo sapiens
WSKLLNDLFPFSYRKLDNEDLHPGQEQRKDLSKSYYIFNYLKYAFLYKGGRVIATGLLHELDDCNRRISVARCDAVIGSPGTTLELRLAERYPVRTRDILRPAV

SEQ ID NO: 751502 - protein, 556 aa, Homo sapiens
  misc_feature (516)..(516): Xaa can be any naturally occurring amino acid
LFWQTHGEVERRIVSQLLTLMDGLKQRAHVIVMAATNRPNSIDPALRRFGRFDREVDIGIPDATGRLEILQIHTKNMKLADDVDLEQVANETHGHVGADLAALCSEAALQAIRKKMDLIDLEDETIDAEVMNSLAVTMDDFRWALSQSNPSALRETVVEVPQVTWEDIGGLEDVKRELQELVQYPVEHPDKFLKFGMTPSKGVLFYGPPGCGKTLLAKAIANECQANFISIKGPELLTMWFGESEANVREIFDKARQAAPCVLFFDELDSIAKARGGNIGDGGGAADRVINQILTEMDGMSTKKNVFIIGATNRADIIDPAILRPGRLDQLIYIPLPDEKSRVAILKANLRKSPVARNVDLEFLVKWTNGFSGADLTEICQRACKLAIRESSRVRLGRTREADKPISHGVEEDDPVPEIRRDPLEEAMRWAAVLSVTLTFRSMTCLARPFSRVGALAASDSLQGTRVELAPVRAVEAAQVAVYTQKTMMMTCMAKWWWPACSELACLDLVPWGWGXLPRRGTRGAPTACSILQSEQFSYSLTLDRGFLLKKYKTKA

SEQ ID NO: 751503 - protein, 397 aa, Homo sapiens
  misc_feature (357)..(357): Xaa can be any naturally occurring amino acid
NVSTRLVLIGGLEDVKRELQELVQYPVEHPDKFLKFGMTPSKGVLFYGPPGCGKTLLAKAIANECQANFISIKGPELLTMWFGESEANVREIFDKARQAAPCVLFFDELDSIAKARGGNIGDGGGAADRVINQILTEMDGMSTKKNVFIIGATNRADIIDPAILRPGRLDQLIYIPLPDEKSRVAILKANLRKSPVARNVDLEFLVKWTNGFSGADLTEICQRACKLAIRESSRVRLGRTREADKPISHGVEEDDPVPEIRRDPLEEAMRWAAVLSVTLTFRSMTCLARPFSRVGALAASDSLQGTRVELAPVRAVEAAQVAVYTQKTMMMTCMAKWWWPACSELACLDLVPWGWGXLPRRGTRGAPTACSILQSEQFSYSLTLDRGFLLKKYKTKA

SEQ ID NO: 751504 - protein, 220 aa, Homo sapiens
MHAHTCACWGREWRMRGRRKVGGTDFLCIVPLFQVCEIIESPLFLKLNPMTKHTDLPVSVFESVIDIINGEATMLFAELTYTLATEEAERIGVDHVARMTATGSGENSTVAEHLIAQHSAIKMLHSRVKLILEYVKASEAGEVPFNHEILREAYALCHCLPVLSTDKFKTDFYDQCNDVGLMAYLGTITKTCNTMNQFVNKFNVLYDRQGIGRRMRGLFF

SEQ ID NO: 751505 - protein, 340 aa, Homo sapiens
RKGAGPRLAGAGKMAAAAAAAAATNGTGGSSGMEVDAAVVPSVMACGVTGSVSVALHPLVILNISDHWIRMRSQEGRPVQVIGALIGKQEGRNIEVMNSFELLSHTVEEKIIIDKEYYYTKEEQFKQVFKELEFLGWYTTGGPPDPSDIHVHKQVCEIIESPLFLKLNPMTKHTDLPVSVFESVIDIINGEATMLFAELTYTLATEEAERIGVDHVARMTATGSGENSTVAEHLIAQHSAIKMLHSRVKLILEYVKASEAGEVPFNHEILREAYALCHCLPVLSTDKFKTDFYDQCNDVGLMAYLGTITKTCNTMNQFVNKFNVLYDRQGIGRRMRGLFF

SEQ ID NO: 751506 - protein, 155 aa, Homo sapiens
MTKHTDATMLFAELTYTLATEEAERIGVDHVARMTATGSGENSTVAEHLIAQHSAIKMLHSRVKLILEYVKASEAGEVPFNHEILREAYALCHCLPVLSTDKFKTDFYDQCNDVGLMAYLGTITKTCNTMNQFVNKFNVLYDRQGIGRRMRGLFF

SEQ ID NO: 751507 - protein, 157 aa, Homo sapiens
PTRPRTRGATMLFAELTYTLATEEAERIGVDHVARMTATGSGENSTVAEHLIAQHSAIKMLHSRVKLILEYVKASEAGEVPFNHEILREAYALCHCLPVLSTDKFKTDFYDQCNDVGLMAYLGTITKTCNTMNQFVNKFNVLYDRQGIGRRMRGLFF

SEQ ID NO: 751508 - protein, 137 aa, Homo sapiens
RKGAGPRLAGAGKMAAAAAAAAATNGTGGSSGMEVDAAVVPSVMACGVTGSVSVALHPLVILNISDHWIRMRSQEGRPVQVIGALIGKQEGRNIEVMNSFELLSHTVEEKIIIDKEYYYTKEEQCESGIDVGKRSGS

SEQ ID NO: 751509 - protein, 118 aa, Homo sapiens
RKGAGPRLAGAGKMAAAAAAAAATNGTGGSSGMEVDAAVVPSVMACGVTGSVSVALHPLVILNISDHWIRMRSQEGRPVQVQDDLVALELAKHVRARKIIDGECNIRLHVCVVPPPGA

SEQ ID NO: 751510 - protein, 340 aa, Homo sapiens; identical to SEQ ID NO: 751505

SEQ ID NO: 751511 - protein, 340 aa, Homo sapiens; identical to SEQ ID NO: 751505

SEQ ID NO: 751512 - protein, 340 aa, Homo sapiens; identical to SEQ ID NO: 751505

SEQ ID NO: 751513 - protein, 340 aa, Homo sapiens; identical to SEQ ID NO: 751505

SEQ ID NO: 751514 - protein, 340 aa, Homo sapiens; identical to SEQ ID NO: 751505

SEQ ID NO: 751515 - protein, 340 aa, Homo sapiens; identical to SEQ ID NO: 751505

SEQ ID NO: 751516 - protein, 340 aa, Homo sapiens; identical to SEQ ID NO: 751505

SEQ ID NO: 751517 - protein, 340 aa, Homo sapiens; identical to SEQ ID NO: 751505

SEQ ID NO: 751518 - protein, 396 aa, Homo sapiens
RKGAGPRLAGAGKMAAAAAAAAATNGTGGSSGMEVDAAVVPSVMACGVTGSVSVALHPLVILNISDHWIRMRSQEGRPVQVIGALIGKQEGRNIEVMNSFELLSHTVEEKIIIDKEYYYTKEEQFKQVFKELEFLGWYTTGGPPDPSDIHVHKQVCEIIESPLFLKLNPMTKHTDLPVSVFESVIDIINGEATMLFAELTYTLATEEAERIGVDHVARMTATGSGENSTVAEHLIAQHSAIKMLHSRVKLILEYVKASEAGEVPFNHEILREAYALCHCLPVLSTDKFKTDFYDQCNDVGLMAYLGTITKTCNTMNQFVNKFNVLYDRQGIGRQLSQRGGHYTSLRETAVINKRGAAPEHPCWWLCPLLGTTLVGQLGCSSRLILALLRSPSDALQ

SEQ ID NO: 751519 - protein, 311 aa, Homo sapiens
  misc_feature (4)..(4): Xaa can be any naturally occurring amino acid
SLAXGVDAAVVPSVMACGVTGSVSVALHPLVILNISDHWIRMRSQEGRPVQVIGALIGKQEGRNIEVMNSFELLSHTVEEKIIIDKEYYYTKEEQFKQVFKELEFLGWYTTGGPPDPSDIHVHKQVCEIIESPLFLKLNPMTKHTDLPVSVFESVIDIINGEATMLFAELTYTLATEEAERIGVDHVARMTATGSGENSTVAEHLIAQHSAIKMLHSRVKLILEYVKASEAGEVPFNHEILREAYALCHCLPVLSTDKFKTDFYDQCNDVGLMAYLGTITKTCNTMNQFVNKFNVLYDRQGIGRRMRGLFF

SEQ ID NO: 751520 - protein, 231 aa, Homo sapiens
MIIIDKEYYYTKEEQFKQVFKELEFLGWYTTGGPPDPSDIHVHKQVCEIIESPLFLKLNPMTKHTDLPVSVFESVIDIINGEATMLFAELTYTLATEEAERIGVDHVARMTATGSGENSTVAEHLIAQHSAIKMLHSRVKLILEYVKASEAGEVPFNHEILREAYALCHCLPVLSTDKFKTDFYDQCNDVGLMAYLGTITKTCNTMNQFVNKFNVLYDRQGIGRRMRGLFF

SEQ ID NO: 751521 - protein, 231 aa, Homo sapiens
MLTSFKEYYYTKEEQFKQVFKELEFLGWYTTGGPPDPSDIHVHKQVCEIIESPLFLKLNPMTKHTDLPVSVFESVIDIINGEATMLFAELTYTLATEEAERIGVDHVARMTATGSGENSTVAEHLIAQHSAIKMLHSRVKLILEYVKASEAGEVPFNHEILREAYALCHCLPVLSTDKFKTDFYDQCNDVGLMAYLGTITKTCNTMNQFVNKFNVLYDRQGIGRRMRGLFF

SEQ ID NO: 751522 - protein, 179 aa, Homo sapiens
MLAYSVQVSPSPSQLPVSVFESVIDIINGEATMLFAELTYTLATEEAERIGVDHVARMTATGSGENSTVAEHLIAQHSAIKMLHSRVKLILEYVKASEAGEVPFNHEILREAYALCHCLPVLSTDKFKTDFYDQCNDVGLMAYLGTITKTCNTMNQFVNKFNVLYDRQGIGRRMRGLFF

SEQ ID NO: 751523 - protein, 147 aa, Homo sapiens
MLFAELTYTLATEEAERIGVDHVARMTATGSGENSTVAEHLIAQHSAIKMLHSRVKLILEYVKASEAGEVPFNHEILREAYALCHCLPVLSTDKFKTDFYDQCNDVGLMAYLGTITKTCNTMNQFVNKFNVLYDRQGIGRRMRGLFF

SEQ ID NO: 751524 - protein, 171 aa, Homo sapiens
MTKHTDLPVSVFESVIDIINGEATMLFAELTYTLATEEAERIGVDHVARMTATGSGENSTVAEHLIAQHSAIKMLHSRVKLILEYVKASEAGEVPFNHEILREAYALCHCLPVLSTDKFKTDFYDQCNDVGLMAYLGTITKTCNTMNQFVNKFNVLYDRQGIGRRMRGLFF

SEQ ID NO: 751525 - protein, 179 aa, Homo sapiens
NQPVTQKQLYQAHRLPVSVFESVIDIINGEATMLFAELTYTLATEEAERIGVDHVARMTATGSGENSTVAEHLIAQHSAIKMLHSRVKLILEYVKASEAGEVPFNHEILREAYALCHCLPVLSTDKFKTDFYDQCNDVGLMAYLGTITKTCNTMNQFVNKFNVLYDRQGIGRRMRGLFF

SEQ ID NO: 751526 - protein, 137 aa, Homo sapiens
DHTRGLMAISQTASAQKQRLACHRLVLLRVLSGQHSAIKMLHSRVKLILEYVKASEAGEVPFNHEILREAYALCHCLPVLSTDKFKTDFYDQCNDVGLMAYLGTITKTCNTMNQFVNKFNVLYDRQGIGRRMRGLFF

SEQ ID NO: 751527 - protein, 221 aa, Homo sapiens
RKGAGPRLAGAGKMAAAAAAAAATNGTGGSSGMEVDAAVVPSVMACGVTGSVSVALHPLVILNISDHWIRMRSQEGRPVQVIGALIGKQEGRNIEVMNSFELLSHTVEEKIIIDKEYYYTKEEQFKQVFKELEFLGWYTTGGPPDPSDIHVHKQVCEIIESPLFLKLERSPLIMRSCGRPMLCVTVSRCSAQTSSRQIFMINATTWGSWPTSAPSPKRATP

SEQ ID NO: 751528 - protein, 340 aa, Homo sapiens; identical to SEQ ID NO: 751505

SEQ ID NO: 751529 - protein, 203 aa, Homo sapiens
EGGGAEAGGRGENGGGGGGGCSYERDRRKQRDGGGCSSSPQRDGLRSDWECFRRSPSPCHSQHLRPLDPHALPGGAACAGVSVGHRLQSLLLAHLPQAVVFSPSSTGANSPSPKSSFPQYMVPTDLRPSGHRSFFTLTFSMSFSFPVIGALIGKQEGRNIEVMNSFELLSHTVEEKIIIDKEYYYTKEEQCESGIDVGKRSGS

SEQ ID NO: 751530 - protein, 340 aa, Homo sapiens; identical to SEQ ID NO: 751505

SEQ ID NO: 751531 - protein, 340 aa, Homo sapiens; identical to SEQ ID NO: 751505

SEQ ID NO: 751532 - protein, 340 aa, Homo sapiens; identical to SEQ ID NO: 751505

SEQ ID NO: 751533 - protein, 340 aa, Homo sapiens; identical to SEQ ID NO: 751505

SEQ ID NO: 751534 - protein, 323 aa, Homo sapiens
MGQYEAGCIIRHRGGMEVVAAVVPSVMACGVTGSVSVALHPLVILNISDHWIRMRSQEGRPVQVIGALIGKQEGRNIEVMNSFELLSHTVEEKIIIDKEYYYTKEEQFKQVFKELEFLGWYTTGGPPDPSDIHVHKQVCEIIESPLFLKLNPMTKHTDLPVSVFESVIDIINGEATMLFAELTYTLATEEAERIGVDHVARMTATGSGENSTVAEHLIAQHSAIKMLHSRVKLILEYVKASEAGEVPFNHEILREAYALCHCLPVLSTDKFKTDFYDQCNDVGLMAYLGTITKTCNTMNQFVNKFNVLYDRQGIGRRMRGLFF

SEQ ID NO: 751535 - protein, 269 aa, Homo sapiens
PPDGVGSVEVIGALIGKQEGRNIEVMNSFELLSHTVEEKIIIDKEYYYTKEEQFKQVFKELEFLGWYTTGGPPDPSDIHVHKQVCEIIESPLFLKLNPMTKHTDLPVSVFESVIDIINGEATMLFAELTYTLATEEAERIGVDHVARMTATGSGENSTVAEHLIAQHSAIKMLHSRVKLILEYVKASEAGEVPFNHEILREAYALCHCLPVLSTDKFKTDFYDQCNDVGLMAYLGTITKTCNTMNQFVNKFNVLYDRQGIGRRMRGLFF

SEQ ID NO: 751536 - protein, 230 aa, Homo sapiens
ANSLVIRDCEKEEQFKQVFKELEFLGWYTTGGPPDPSDIHVHKQVCEIIESPLFLKLNPMTKHTDLPVSVFESVIDIINGEATMLFAELTYTLATEEAERIGVDHVARMTATGSGENSTVAEHLIAQHSAIKMLHSRVKLILEYVKASEAGEVPFNHEILREAYALCHCLPVLSTDKFKTDFYDQCNDVGLMAYLGTITKTCNTMNQFVNKFNVLYDRQGIGRRMRGLFF

SEQ ID NO: 751537 - protein, 370 aa, Homo sapiens
RKGAGPRLAGAGKMAAAAAAAAATNGTGGSSGMEVDAAVVPSVMACGVTGSVSVALHPLVILNISDHWIRMRSQEGRPVQVIGALIGKQEGRNIEVMNSFELLSHTVEEKIIIDKEYYYTKEEQFKQVFKELEFLGWYTTGGPPDPSDIHVHKQVCEIIESPLFLKLNPMTKHTDLPVSVFESVIDIINGEVIPYTFNPQILLLASFLLLILPLWVTLPCEATMLFAELTYTLATEEAERIGVDHVARMTATGSGENSTVAEHLIAQHSAIKMLHSRVKLILEYVKASEAGEVPFNHEILREAYALCHCLPVLSTDKFKTDFYDQCNDVGLMAYLGTITKTCNTMNQFVNKFNVLYDRQGIGRRMRGLFF

SEQ ID NO: 751538 - protein, 324 aa, Homo sapiens
RKGAGPRLAGAGKMAAAAAAAAATNGTGGSSGMEVDAAVVPSVMACGVTGSVSVALHPLVILNISDHWIRMRSQEGRPVQVIGALIGKQEGRNIEVMNSFELLSHTVEEKIIIDKEYYYTKEEQFKQVFKELEFLGWYTTGGPPDPSDIHVHKQVCEIIESPLFLKLNPMTKHTDATMLFAELTYTLATEEAERIGVDHVARMTATGSGENSTVAEHLIAQHSAIKMLHSRVKLILEYVKASEAGEVPFNHEILREAYALCHCLPVLSTDKFKTDFYDQCNDVGLMAYLGTITKTCNTMNQFVNKFNVLYDRQGIGRRMRGLFF

SEQ ID NO: 751539 - protein, 275 aa, Homo sapiens
RKGAGPRLAGAGKMAAAAAAAAATNGTGGSSGMEVDAAVVPSVMACGVTGSVSVALHPLVILNISDHWIRMRSQEGRPVQVIGALIGKQEGRNIEVMNSFELLSHTVEEKIIIDKEYYYTKEEQFKQVFKELEFLGWYTTGGPPDPSDIHVHKQVCEIIESPLFLKLNPMTKHTDLPVSVFESVIDIINGEATMLFAELTYTLATEEAERIGVDHVARMTATGSGENSTVAEHLIAQHSAIKMLHSRVKLILEYVKASEAGTCPATWPDTYLNTQ

SEQ ID NO: 751540 - protein, 289 aa, Homo sapiens
FKLLLLGVIIFLVNEEQFKQVFKELEFLGWYTTGGPPDPSDIHVHKQVCEIIESPLFLKLNPMTKHTDLPVSVFESVIDIINGEATMLFAELTYTLATEEAERIGVDHVARMTATGSGENSTVAEHLIAQHSAIKMLHSRVKLILEYVKASEAGEVPFNHEILREAYALCHCLPVLSTDKFKTDFYDQCNDVGLMAYLGTITKTCNTMNQFVNKFNVLYDRQGIGRQLSQRGGHYTSLRETAVINKRGAAPEHPCWWLCPLLGTTLVGQLGCSSRLILALLRSPSDALQ

SEQ ID NO: 751541 - protein, 124 aa, Homo sapiens
EVAVRWWLWLRPSQRLFTHIPVAWSGKTQAVWGWDSCSSPSSVYVYIFHVISPMWCLLGYCTKYRLTQGSHSACPKREPSRSHFAFLTAPWKSHSICHIPLVEAGGKVTLGTREHRPHVSIEEC

SEQ ID NO: 751542 - protein, 75 aa, Homo sapiens
VVPLSLDPDQKIEIETDEENECRNPRWTLTAGNMEETYFHLFLSISIKDHKRPSRDFQNPNNDTMMRKGRLREGK

SEQ ID NO: 751543 - protein, 691 aa, Homo sapiens
PCQLAQALSPRRAFPRELKEKGQRMSSQPAGNQTSPGATEDYSYGSWYIDEPQGGEELQPEGEVPSCHTSIPPGLYHACLASLSILVLLLLAMLVRRRQLWPDCVRGRPGLPSPVDFLAGDRPRAVPAAVFMVLLSSLCLLLPDEDALPFLTLASAPSQDGKTEAPRGAWKILGLFYYAALYYPLAACATAGHTAAHLLGSTLSWAHLGVQVWQRAECPQVPKIYKYYSLLASLPLLLGLGFLSLWYPVQLVRSFSRRTGAGSKGLQSSYSEEYLRNLLCRKKLGSSYHTSKHGFLSWARVCLRHCIYTPQPGFHLPLKLVLSATLTGTAIYQVALLLLVGVVPTIQKVRAGVTTDVSYLLAGFGIVLSEDKQEVVELVKHHLWALEVCYISALVLSCLLTFLVLMRSLVTHRTNLRALHRGAALDLSPLHRSPHPSRQAIFCWMSFSAYQTAFICLGLLVQQIIFFLGTTALAFLVLMPVLHGRNLLLFRSLESSWPFWLTLALAVILQNMAAHWVFLETHDGHPQLTNRRVLYAATFLLFPLNVLVGAMVATWRVLLSALYNAIHLGQMDLSLLPPRAATLDPGYYTYRNFLKIEVSQSHPAMTAFCSLLLQAQSLLPRTMAAPQDSLRPGEEDEGMQLLQTKDSMAKGARPGASRGRARWGLAYTLLHNPTLQVFRKTALLGANGAQP

SEQ ID NO: 751544 - protein, 658 aa, Homo sapiens
MSSQPAGNQTSPGATEDYSYGSWYIDEPQGGEELQPEGEVPSCHTSIPPGLYHACLASLSILVLLLLAMLVRRRQLWPDCVRGRPGLPRPRAVPAAVFMVLLSSLCLLLPDEDALPFLTLASAPSQDGKTEAPRGAWKILGLFYYAALYYPLAACATAGHTAAHLLGSTLSWAHLGVQVWQRAECPQVPKIYKYYSLLASLPLLLGLGFLSLWYPVQLVRSFSRRTGAGSKGLQSSYSEEYLRNLLCRKKLGSSYHTSKHGFLSWARVCLRHCIYTPQPGFHLPLKLVLSATLTGTAIYQVALLLLVGVVPTIQKVRAGVTTDVSYLLAGFGIVLSEDKQEVVELVKHHLWALEVCYISALVLSCLLTFLVLMRSLVTHRTNLRALHRGAALDLSPLHRSPHPSRQAIFCWMSFSAYQTAFICLGLLVQQIIFFLGTTALAFLVLMPVLHGRNLLLFRSLESSWPFWLTLALAVILQNMAAHWVFLETHDGHPQLTNRRVLYAATFLLFPLNVLVGAMVATWRVLLSALYNAIHLGQMDLSLLPPRAATLDPGYYTYRNFLKIEVSQSHPAMTAFCSLLLQAQSLLPRTMAAPQDSLRPGEEDEGMQLLQTKDSMAKGARPGASRGRARWGLAYTLLHNPTLQVFRKTALLGANGAQP

SEQ ID NO: 751545 - protein, 159 aa, Homo sapiens
MSSQPAGNQTSPGATEDYSYGSWYIDEPQGGEELQPEGEVPSCHTSIPPGLYHACLASLSILVLLLLAMLVRRRQLWPDCVRGRPGLPSPVDFLAGDRPRAVPAAVFMVLLSSLCLLLPDEDALPFLTLASAPSQDGKTEAPRGNLPKITELRLVRAWI

SEQ ID NO: 751546 - protein, 72 aa, Homo sapiens
RYSSAPRYSSAPGHTAAHLLGSTLSWAHLGVQVWQRAECPQVPKMNSEVPMNSEVPDEYEVPMNSEVPMYTK

SEQ ID NO: 751547 - protein, 667 aa, Homo sapiens
MSSQPAGNQTSPGATEDYSYGSWYIDEPQGGEELQPEGEVPSCHTSIPPGLYHACLASLSILVLLLLAMLVRRRQLWPDCVRGRPGLPSPVDFLAGDRPRAVPAAVFMVLLSSLCLLLPDEDALPFLTLASAPSQDGKTEAPRGAWKILGLFYYAALYYPLAACATAGHTAAHLLGSTLSWAHLGVQVWQRAECPQVPKIYKYYSLLASLPLLLGLGFLSLWYPVQLVRSFSRRTGAGSKGLQSSYSEEYLRNLLCRKKLGSSYHTSKHGFLSWARVCLRHCIYTPQPGFHLPLKLVLSATLTGTAIYQVALLLLVGVVPTIQKVRAGVTTDVSYLLAGFGIVLSEDKQEVVELVKHHLWALEVCYISALVLSCLLTFLVLMRSLVTHRTNLRALHRGAALDLSPLHRSPHPSRQAIFCWMSFSAYQTAFICLGLLVQQIIFFLGTTALAFLVLMPVLHGRNLLLFRSLESSWPFWLTLALAVILQNMAAHWVFLETHDGHPQLTNRRVLYAATFLLFPLNVLVGAMVATWRVLLSALYNAIHLGQMDLSLLPPRAATLDPGYYTYRNFLKIEVSQSHPAMTAFCSLLLQAQSLLPRTMAAPQDSLRPGEEDEGMQLLQTKDSMAKGARPGASRGRARWGLAYTLLHNPTLQVFRKTALLGANGAQP

SEQ ID NO: 751548 - protein, 286 aa, Homo sapiens
MRSLVTHRTNLRALHRGAALDLSPLHRSPHPSRQAIFCWMSFSAYQTAFICLGLLVQQIIFFLGTTALAFLVLMPVLHGRNLLLFRSLESSWPFWLTLALAVILQNMAAHWVFLETHDGHPQLTNRRVLYAATFLLFPLNVLVGAMVATWRVLLSALYNAIHLGQMDLSLLPPRAATLDPGYYTYRNFLKIEVSQSHPAMTAFCSLLLQAQSLLPRTMAAPQDSLRPGEEDEGMQLLQTKDSMAKGARPGASRGRARWGLAYTLLHNPTLQVFRKTALLGANGAQP

SEQ ID NO: 751549 - protein, 249 aa, Homo sapiens
LRLGAGRVLIGRGLLGLLVQQIIFFLGTTALAFLVLMPVLHGRNLLLFRSLESSWPFWLTLALAVILQNMAAHWVFLETHDGHPQLTNRRVLYAATFLLFPLNVLVGAMVATWRVLLSALYNAIHLGQMDLSLLPPRAATLDPGYYTYRNFLKIEVSQSHPAMTAFCSLLLQAQSLLPRTMAAPQDSLRPGEEDEGMQLLQTKDSMAKGARPGASRGRARWGLAYTLLHNPTLQVFRKTALLGANGAQP

SEQ ID NO: 751550 - protein, 512 aa, Homo sapiens
PCQLAQALSPRRAFPRELKEKGQRMSSQPAGNQTSPGATEDYSYGSWYIDEPQGGEELQPEGEVPSCHTSIPPGLYHACLASLSILVLLLLAMLVRRRQLWPDCVRGRPGLPSPVDFLAGDRPRAVPAAVFMVLLSSLCLLLPDEDALPFLTLASAPSQDGKTEAPRGAWKILGLFYYAALYYPLAACATAGHTAAHLLGSTLSWAHLGVQVWQRAECPQVPKIYKYYSLLASLPLLLGLGFLSLWYPVQLVRSFSRRTGAGSKGLQSSYSEEYLRNLLCRKKLGSSYHTSKHGFLSWARVCLRHCIYTPQPGFHLPLKLVLSATLTGTAIYQVALLLLVGVVPTIQKVRAGVTTDVSYLLAGFGIVLSEDKQEVVELVKHHLWALEVCYISALVLSCLLTFLVLMRSLVTHRTNLRALHRGAALDLSPLHRSPHPSRQAIFCWMSFSAYQTAFICLGEPPLPATPSLGLGLPSDTGLSWGEECSASTALRVCLGMLWGSSKKEGPPCLPCP

SEQ ID NO: 751551 - protein, 145 aa, Homo sapiens
GLAGCLLSDSQKVRLSQGCSCYRQRTPWPRELGPGPAAAGLAGVWPTRCCTTQPCRSSARRPCWVPMVPSPEGREGQPTCPSVLRHVPAYHPPPSPALLPASHQPCSQQVLRITVVGWRSVCTGSLRRALLHPLGYGRASRGSGE

SEQ ID NO: 751552 - protein, 272 aa, Homo sapiens
RLGRAWCEVGRGVALLLLVGVVPTIQKVRAGVTTDVSYLLAGFGIVLSEDKQEVVELVKHHLWALEVCYISALVLSCLLTFLVLMRSLVTHRTNLRALHRGAALDLSPLHRSPHPSRQAIFCWMSFSAYQTAFICLGLLVQQIIFFLGTTALAFLVLMPVLHGRNLLLFRSLESSWPFWLTLALAVILQNMAAHWVFLETHDGHPQLTNRRVLYAATFLLFPLNVLVGAMVATWRVLLSALYNAIHLGQMDLSLLPPRAATLDPVIKPEILK

SEQ ID NO: 751553 - protein, 667 aa, Homo sapiens; identical to SEQ ID NO: 751547

SEQ ID NO: 751554 - protein, 667 aa, Homo sapiens; identical to SEQ ID NO: 751547

SEQ ID NO: 751555 - protein, 728 aa, Homo sapiens
MSSQPAGNQTSPGATEDYSYGSWYIDEPQGGEELQPEGEVPSCHTSIPPGLYHACLASLSILVLLLLAMLVRRRQLWPDCVRGRPGLPSPVDFLAGDRPRAVPAAVFMVLLSSLCLLLPDEDALPFLTLASAPSQDGKTEAPRGNLPKITELRLVRAWIEPSVLAQLNVLKGLEAGDRREAWVGSLQAPCLPLQHGSLCLFHLPGAWKILGLFYYAALYYPLAACATAGHTAAHLLGSTLSWAHLGVQVWQRAECPQVPKIYKYYSLLASLPLLLGLGFLSLWYPVQLVRSFSRRTGAGSKGLQSSYSEEYLRNLLCRKKLGSSYHTSKHGFLSWARVCLRHCIYTPQPGFHLPLKLVLSATLTGTAIYQVALLLLVGVVPTIQKVRAGVTTDVSYLLAGFGIVLSEDKQEVVELVKHHLWALEVCYISALVLSCLLTFLVLMRSLVTHRTNLRALHRGAALDLSPLHRSPHPSRQAIFCWMSFSAYQTAFICLGLLVQQIIFFLGTTALAFLVLMPVLHGRNLLLFRSLESSWPFWLTLALAVILQNMAAHWVFLETHDGHPQLTNRRVLYAATFLLFPLNVLVGAMVATWRVLLSALYNAIHLGQMDLSLLPPRAATLDPGYYTYRNFLKIEVSQSHPAMTAFCSLLLQAQSLLPRTMAAPQDSLRPGEEDEGMQLLQTKDSMAKGARPGASRGRARWGLAYTLLHNPTLQVFRKTALLGANGAQP

SEQ ID NO: 751556 - protein, 103 aa, Homo sapiens
RYQTPPLHNIQAKNYKNIWLSSQHHTSHAASRSSGSLWLGGGLSALGASGGLCSTHLAMGEPAGVLEKKTGGLGPWSRSQLSQGSHIQASPYPGSAISLEGPR

SEQ ID NO: 751557 - protein, 334 aa, Homo sapiens
MSSQPAGNQTSPGATEDYSYGSWYIDEPQGGEELQPEGEVPSCHTSIPPGLYHACLASLSILVLLLLAMLVRRRQLWPDCVRGRPGLPSPVDFLAGDRPRAVPAAVFMVLLSSLCLLLPDEDALPFLTLASAPSQDGKTEAPRGAWKILGLFYYAALYYPLAACATAGHTAAHLLGSTLSWAHLGVQVWQRAECPQVPKIYKYYSLLASLPLLLGLGFLSLWYPVQLVRSFSRRTGAGSKGAEQYSEEYPREPPLTGTGGEEVTQLQEWLLAGALRWLRTCVYIPTTESTSREAGVHLTRQERRYNRGHSRGGASPTQEGGEPRRCSLAQRRSE

SEQ ID NO: 751558 - protein, 187 aa, Homo sapiens
GRGSREHGRAPGLPPSPSCSARVLGRPEPLRGASLSLDPAAKAESVRLSPGPRLERSLAASKGAGVWKPGLGQIPFAVVSVIAGTEFPSSGEKGRRSRPSRCPEWGGETLRVGARGPGARAEAAGAQGVPLSPSPPSPLPGLSTVSVGARQGAHVPREENGAGGWARTAAVLAELLARGLCASVYPS

SEQ ID NO: 751559 - protein, 430 aa, Homo sapiens
MSGVRPPIMNGPLHPRPLVALLDGRDCTVEMPILKDVATVAFCDAQSTQEIHEKVLNEAVGALMYHTITLTREDLEKFKALRIIVRIGSGFDNIDIKSAGDLGIAVCNVPAASVEETADSTLCHILNLYRRATWLHQALREGTRVQSVEQIREVASGAARIRGETLGIIGLGRVGQAVALRAKAFGFNVLFYDPYLSDGVERALGLQRVSTLQDLLFHSDCVTLHCGLNEHNHHLINDFTVKQMRQGAFLVNTARGGLVDEKALAQALKEGRIRGAALDVHESEPFSFSQGPLKDAPNLICTPHAAWYSEQASIEMREEAAREIRRAITGRIPDSLKNCVNKDHLTAATHWASMDPAVVHPELNGAAYSRYPPGVVGVAPTGIPAAVEGIVPSAMSLSHGLPPVAHPPHAPSPGQTVKPEADRDHASDQL

SEQ ID NO: 751560 - protein, 430 aa, Homo sapiens; identical to SEQ ID NO: 751559

SEQ ID NO: 751561 - protein, 430 aa, Homo sapiens; identical to SEQ ID NO: 751559

SEQ ID NO: 751562 - protein, 430 aa, Homo sapiens; identical to SEQ ID NO: 751559

SEQ ID NO: 751563 - protein, 416 aa, Homo sapiens
MSGVRPPIMNGPCTVEMPILKDVATVAFCDAQSTQEIHEKVLNEAVGALMYHTITLTREDLEKFKALRIIVRIGSGFDNIDIKSAGDLGIAVCNVPAASVEETADSTLCHILNLYRRATWLHQALREGTRVQSVEQIREVASGAARIRGETLGIIGLGRVGQAVALRAKAFGFNVLFYDPYLSDGVERALGLQRVSTLQDLLFHSDCVTLHCGLNEHNHHLINDFTVKQMRQGAFLVNTARGGLVDEKALAQALKEGRIRGAALDVHESEPFSFSQGPLKDAPNLICTPHAAWYSEQASIEMREEAAREIRRAITGRIPDSLKNCVNKDHLTAATHWASMDPAVVHPELNGAAYSRYPPGVVGVAPTGIPAAVEGIVPSAMSLSHGLPPVAHPPHAPSPGQTVKPEADRDHASDQL

SEQ ID NO: 751564 - protein, 430 aa, Homo sapiens; identical to SEQ ID NO: 751559

SEQ ID NO: 751565 - protein, 414 aa, Homo sapiens
PPHAPGSRRRSAPEWSGPAAARASRWAARTCSTRACRLVLNEAVGALMYHTITLTREDLEKFKALRIIVRIGSGFDNIDIKSAGDLGIAVCNVPAASVEETADSTLCHILNLYRRATWLHQALREGTRVQSVEQIREVASGAARIRGETLGIIGLGRVGQAVALRAKAFGFNVLFYDPYLSDGVERALGLQRVSTLQDLLFHSDCVTLHCGLNEHNHHLINDFTVKQMRQGAFLVNTARGGLVDEKALAQALKEGRIRGAALDVHESEPFSFSQGPLKDAPNLICTPHAAWYSEQASIEMREEAAREIRRAITGRIPDSLKNCVNKDHLTAATHWASMDPAVVHPELNGAAYSRYPPGVVGVAPTGIPAAVEGIVPSAMSLSHGLPPVAHPPHAPSPGQTVKPEADRDHASDQL

SEQ ID NO: 751566 - protein, 430 aa, Homo sapiens; identical to SEQ ID NO: 751559

SEQ ID NO: 751567 - protein, 430 aa, Homo sapiens; identical to SEQ ID NO: 751559

SEQ ID NO: 751568 - protein, 430 aa, Homo sapiens; identical to SEQ ID NO: 751559

SEQ ID NO: 751569 - protein, 297 aa, Homo sapiens
MSGVRPPIMNGPLHPRPLVALLDGRDCTVEMPILKDVATVAFCDAQSTQEIHEKVLNEAVGALMYHTITLTREDLEKFKALRIIVRIGSGFDNIDIKSAGDLGIAVCNVPAASVEETADSTLCHILNLYRRATWLHQALREGTRVQSVEQIREVASGAARIRGETLGIIGLGRVGQAVALRAKAFGFNVLFYDPYLSDGVERALGLQRVSTLQDLLFHSDCVTLHCGLNEHNHHLINDFTVKQMRQGAFLVNTARGGLVDEKALAQALKEGRIRGAALDVHESEPFSSWPNRQARGG

SEQ ID NO: 751570 - protein, 430 aa, Homo sapiens; identical to SEQ ID NO: 751559

SEQ ID NO: 751571 - protein, 205 aa, Homo sapiens
QQNQQSASVQTGHFTVKQMRQGAFLVNTARGGLVDEKALAQALKEGRIRGAALDVHESEPFSFSQGPLKDAPNLICTPHAAWYSEQASIEMREEAAREIRRAITGRIPDSLKNCVNKDHLTAATHWASMDPAVVHPELNGAAYSRYPPGVVGVAPTGIPAAVEGIVPSAMSLSHGLPPVAHPPHAPSPGQTVKPEADRDHASDQL

SEQ ID NO: 751572 - protein, 192 aa, Homo sapiens
QPACRAEQGRGVCGSQAGPPTGGSSAQPPPLRTQPQHSGCTDHACAVPSFSQGPLKDAPNLICTPHAAWYSEQASIEMREEAAREIRRAITGRIPDSLKNCVNKDHLTAATHWASMDPAVVHPELNGAAYSRYPPGVVGVAPTGIPAAVEGIVPSAMSLSHGLPPVAHPPHAPSPGQTVKPEADRDHASDQL

SEQ ID NO: 751573 - protein, 115 aa, Homo sapiens
MREEAAREIRRAITGRIPDSLKNCVNKDHLTAATHWASMDPAVVHPELNGAAYSRYPPGVVGVAPTGIPAAVEGIVPSAMSLSHGLPPVAHPPHAPSPGQTVKPEADRDHASDQL

SEQ ID NO: 751574 - protein, 109 aa, Homo sapiens
CSFLLHLPGRIPDSLKNCVNKDHLTAATHWASMDPAVVHPELNGAAYSRYPPGVVGVAPTGIPAAVEGIVPSAMSLSHGLPPVAHPPHAPSPGQTVKPEADRDHASDQL

SEQ ID NO: 751575 - protein, 199 aa, Homo sapiens
GRPTRRARGGAARRSGRGPRPLAPLDGQLALAQQGPAACKTLTPTQASVIAADQKPEHFGSMGLPIAGTLRAWWAWPPLASQLLWKVSSPAPCPCPTACPLWPTRPTPLLLAKPSSPRRIETTPVTSCSPGGALQPRRLGRGPGNPRTRVCGGGICVVALALQRLVRAVRRREGAALGLVSLVVVRPVGALPCVLRVPR

SEQ ID NO: 751576 - protein, 107 aa, Homo sapiens
  misc_feature (26)..(26): Xaa can be any naturally occurring amino acid
MPIKVGLTQGVFPSPERCKNDGPIEXVNTTHYSGPNWGTGVPRPRRLGRGPGNPRTRVCGGGICVVALALQRLVRAVRRREGAALGLVSLVVVRPVGALPCVLRVPR

SEQ ID NO: 751577 - protein, 321 aa, Homo sapiens
MSGVRPPIMNGPLHPRPLVALLDGRDCTVEMPILKDVATVAFCDAQSTQEIHEKVLNEAVGALMYHTITLTREDLEKFKALRIIVRIGSGFDNIDIKSAGDLGIAVCNVPAASVEETADSTLCHILNLYRRATWLHQALREGTRVQSVEQIREVASGAARIRGETLGIIGLGRVGQAVALRAKAFGFNVLFYDPYLSDGVERALGLQRVSTLQDLLFHSDCVTLHCGLNEHNHHLINDFTVKQMRQGAFLVNTARGGLVDEKALAQALKEGRIRGAALDVHESEPFSFSQAGGRSSGRRRGRPTRRARGGAARRSGRGPRP

SEQ ID NO: 751578 - protein, 273 aa, Homo sapiens
MSGVRPPIMNGPLHPRPLVALLDGRDCTVEMPILKDVATVAFCDAQSTQEIHEKVLNEAVGALMYHTITLTREDLEKFKALRIIVRIGSGFDNIDIKSAGDLGIAVCNVPAASVEETADSTLCHILNLYRRATWLHQALREGTRVQSVEQIREVASGAARIRGETLGIIGLGASAAAPRLCPSLCLALPLFSCAQEERPGAGWGCCRCRSQPRTGLSAHRHQGPGVPGVCPTCTDVTAHVGLTQAHTDNVHGCHSTHSLTQTSQHVGLMGTCR

SEQ ID NO: 751579 - protein, 101 aa, Homo sapiens
TGGRAFPQFPCPQHTPCALRPLVLGHWGHLDAARACGGGRSPGGLFPGVGLGATGARPRAWHCNLRVSALRVCGRSRGPWLSAGPRVQVGPRQQSRVWQMQ

SEQ ID NO: 751580 - protein, 76 aa, Homo sapiens
PGRLQVGLTDGPSPSRYPPGVVGVAPTGIPAAVEGIVPSAMSLSHGLPPVAHPPHAPSPGQTVKPEADRDHASDQL

SEQ ID NO: 751581 - protein, 466 aa, Homo sapiens
AAPRAGLAAAQRAGVVGARGRSRLSMGSSHLLNKGLPLGVRPPIMNGPLHPRPLVALLDGRDCTVEMPILKDVATVAFCDAQSTQEIHEKVLNEAVGALMYHTITLTREDLEKFKALRIIVRIGSGFDNIDIKSAGDLGIAVCNVPAASVEETADSTLCHILNLYRRATWLHQALREGTRVQSVEQIREVASGAARIRGETLGIIGLGRVGQAVALRAKAFGFNVLFYDPYLSDGVERALGLQRVSTLQDLLFHSDCVTLHCGLNEHNHHLINDFTVKQMRQGAFLVNTARGGLVDEKALAQALKEGRIRGAALDVHESEPFSFSQGPLKDAPNLICTPHAAWYSEQASIEMREEAAREIRRAITGRIPDSLKNCVNKDHLTAATHWASMDPAVVHPELNGAAYSRYPPGVVGVAPTGIPAAVEGIVPSAMSLSHGLPPVAHPPHAPSPGQTVKPEADRDHASDQL

SEQ ID NO: 751582 - protein, 466 aa, Homo sapiens; identical to SEQ ID NO: 751581

SEQ ID NO: 751583 - protein, 430 aa, Homo sapiens; identical to SEQ ID NO: 751559

SEQ ID NO: 751584 - protein, 179 aa, Homo sapiens
SGLCLRCQQPGARSQEQSASMNLGVSMLRILFLLDVGGAQVLATGKTPGAEIDFKYALIGTAVGVAISAGFLALKICMIRRHLFDDDSSDLKSTPGGLSDTIPLKKRAPRAHVLRDGPALGPLHLLFSVIGMLFARKLQASTLFSFKSLLQCHHCIMEGLFKAKPQFLQKVSCKSDHLS

SEQ ID NO: 751585 - protein, 122 aa, Homo sapiens
RLYRSQRRKMEPRAERHMNLGVSMLRILFLLDVGGAQVLATGKTPGAEIDFKYALIGTAVGVAISAGFLALKICMIRRHLFDDDSSDLKSTPGGLSDTIPLKKRAPRRNHNFSKRDAQVIEL

SEQ ID NO: 751586 - protein, 131 aa, Homo sapiens
RLYRSQRRKMEPRAERHMNLGVSMLRILFLLDVGGAQVLATGKTPGAEIDFKYALIGTAVGVAISAGFLALKICMIRRHLFDDDSSDLKSTPGGLSDTIPLKKRAPKAASLDPLFLQIPASVSPLHHGGPI

SEQ ID NO: 751587 - protein, 143 aa, Homo sapiens
MGQVACHPKKRGQPLLRPRARAAWTTGVVQEGRMRDVGGAQVLATGKTPGAEIDFKYALIGTAVGVAISAGFLALKICMIRRHLFDDDSSDLKSTPGGLSGEGCGARAWLCPTQRGTEGHSVMLATARMNPQAQSPTGCKGRQ

SEQ ID NO: 751588 - protein, 149 aa, Homo sapiens
GLSGQPWPLKFELMLCPWLQLPVVSRMNSRREDDRRGSRLRLCSLLCFLSEPGILHQAHRCCVAFWAPCQGLTLDSVFSPRLHPASAFGVGRPSRAPLVTGVRVCLGSPEAGLGRGREAAPTSSPIVSQPGSAQRAAPVMEKPLCLCRV

SEQ ID NO: 751589 - protein, 175 aa, Homo sapiens
MSPAMSDSGAPGGGQPDVFSSKSGLSSQQAATSDGQQVLLCAQIKNPPLRNSKPLRVLGQQGGERWRRNMGFLCSDCRDLGKDQPYTMSISCPLTWQGSKAQPRSYKKLRLARRGGHTCILSTGGQWQIVEPELRHLRTGEPSLKIRIPWGAVGSQQGREARPEKATIPVPGRSP

SEQ ID NO: 751590 - protein, 106 aa, Homo sapiens
STVPSKNLREGGPMGRKLRIRCWDHSCPDLPCDSVILSKGQTLLDQLEPPSRCPQPCQTLGPQAEGNQMSSAPSLASPPSKQPPLMANRCCCVPRSRIHLCGIQNR

SEQ ID NO: 751591 - protein, 199 aa, Homo sapiens
MKSGLWYFFLFCLRIKVLTGEINGSANYEMFIFHNGGVQILCKYPDIVQQFKMQLLKGGQILCDLTKTKGSGNTVSIKSLKFCHSQLSNNSVSFFLYNLDHSHANYYFCNLSIFDPPPFKVTLTGGYLHIYESQLCCQLKFWLPIGCAAFVVVCILGCILICWLTKKKYSSSVHDPNGEYMFMRAVNTAKKSRLTDVTL

SEQ ID NO: 751592 - protein, 114 aa, Homo sapiens
MKRNTILSTEKSSAQLVHPIYSSSFQGRVTLSPTPSFQLCGWGNSPHPNPPHPLEHPRAWRRWGPFRKTPCQECITPPGRRPRKTEGLRREIRQALRPGHWRGRRSRKAESGTR

SEQ ID NO: 751593 - protein, 183 aa, Homo sapiens
MEKRELKASVPKFDKIPWLSEASLVNKPLVLSLPRRYPHTSATFLTSSKKNMNLPILFQVPDVLSKARRNQCDSMLLRNQQLCSTCQEMKMVQPRTMKIPDDPKASFENCMSYRMSLHQPKFQTTPEPFHDDIPTESIHYRLPILGPRTAVFHGLLTEAYKTLKERQRSSLPRKEPIGKTTRQ

SEQ ID NO: 751594 - protein, 154 aa, Homo sapiens
MEKRELKASVPKFDKIPWLSEASLVNKPLVLSLPRRYPHTSATFLTSSKKNMNLPILFQVPDVLSKARRNQCDSMLLRNQQLCSTCQEMKMVQPRTMKIPDDPKASFENCMSYRMSLHQPKFQTTPEPFHDDIPTGSVHNIWLKTFHGDGVQTK

SEQ ID NO: 751595 - protein, 1490 aa, Homo sapiens
MAGNSLVLPIVLWGRKAPTHCISAVLLTDDGATIVTGCHDGQICLWDLSVELQINPRALLFGHTASITCLSKACASSDKQYIVSASESGEMCLWDVSDGRCIEFTKLACTHTGIQFYQFSVGNQREGRLLCHGHYPEILVVDATSLEVLYSLVSKISPDWISSMSIIRSHRTQEDTVVALSVTGILKVWIVTSEISDMQDTEPIFEEESKPIYCQNCQSISFCAFTQRSLLVVCSKYWRVFDAGDYSLLCSGPSENGQTWTGGDFVSSDKVIIWTENGQSYIYKLPASCLPASDSFRSDVGKAVENLIPPVQHILLDRKDKELLICPPVTRFFYGCREYFHKLLIQGDSSGRLNIWNISDTADKQGSEEGLAMTTSISLQEAFDKLNPCPAGIIDQLSVIPNSNEPLKVTASVYIPAHGRLVCGREDGSIVIVPATQTAIVQLLQGEHMLRRGWPPHRTLRGHRNKVTCLLYPHQVSARYDQRYLISGGVDFSVIIWDIFSGEMKHIFCVHGGEITQLLVPPENCSARVQHCICSVASDHSVGLLSLREKKCIMLASRHLFPIQVIKWRPSDDYLVVGCSDGSVYVWQMDTGALDRCVMGITAVEILNACDEAVPAAVDSLSHPAVNLKQAMTRRSLAALKNMAHHKLQTLATNLLASEASDKGNLPKYSHNSLMVQAIKTNLTDPDIHVLFFDVEALIIQLLTEEASRPNTALISPENLQKASGSSDKGGSFLTGKRAAVLFQQVKETIKENIKEHLLDDEEEDEEIMRQRREESDPEYRSSKSKPLTLLEYNLTMDTAKLFMSCLHAWGLNEVLDEVCLDRLGMLKPHCTVSFGLLSRGGHMSLMLPGYNQPACKLSHGKTEVGRKLPASEGVGKGTYGVSRAVTTQHLLSIISLANTLMSMTNATFIGDHMKKGPTRPPRPSTPDLSKARGSPPTSSNIVQGQIKQVAAPVVSARSDADHSGSDPPSAPALHTCFLVNEGWSQLAAMHCVMLPDLLGLDKFRPPLLEMLARRWQDRCLEVREAAQALLLAELRRIEQAGRKEAIDAWAPYLPQYIDHVISPGVTSEAAQTITTAPDASGPEAKVQEEEHDLVDDDITTGCLSSVPQMKKISTSYEERRKQATAIVLLGVIGAEFGAEIEPPKLLTRPRSSSQIPEGFGLTSGGSNYSLARHTCKALTFLLLQPPSPKLPPHSTIRRTAIDLIGRGFTVWEPYMDVSAVLMGLLELCADAEKQLANITMGLPLSPAADSARSARHALSLIATARPPAFITTIAKEVHRHTALAANTQSQQNMHTTTLARAKGEILRVIEILIEKMPTDVVDLLVEVMDIIMYCLEGSLVKKKGLQECFPAICRFYMVSYYERNHRIAVGARHGSVALYDIRTGKCQTIHGHKGPITAVAFAPDGRYLATYSNTDSHISFWQMNTSLLGSIGMLNSAPQLRCIKTYQVPPVQPASPGSHNALKLARLIWTSNRNVILMAHDGKEHRFMV

SEQ ID NO: 751596 - protein, 859 aa, Homo sapiens [sequence omitted]

SEQ ID NO: 751597 - protein, 1085 aa, Homo sapiens
MAGNSLVLPIVLWGRKAPTHCISAVLLTDDGATIVTGCHDGQICLWDLSVELQINPRALLFGHTASITCLSKACASSDKQYIVSASESGEMCLWDVSDGRCIEFTKLACTHTGIQFYQFSVGNQREGRLLCHGHYPEILVVDATSLEVLYSLVSKISPDWISSMSIIRSHRTQEDTVVALSVTGILKVWIVTSEISDMQDTEPIFEEESKPIYCQNCQSISFCAFTQRSLLVVCSKYWRVFDAGDYSLLCSGPSENGQTWTGGDFVSSDKVIIWTENGQSYIYKLPASCLPASDSFRSDVGKAVENLIPPVQHILLDRKDKELLICPPVTRFFYGCREYFHKLLIQGDSSGRLNIWNISDTADKQGSEEGLAMTTSISLQEAFDKLNPCPAGIIDQLSVIPNSNEPLKVTASVYIPAHGRLVCGREDGSIVIVPATQTAIVQLLQGEHMLRRGWPPHRTLRGHRNKVTCLLYPHQVSARYDQRYLISGGVDFSVIIWDIFSGEMKHIFCVHGGEITQLLVPPENCSARVQHCICSVASDHSVGLLSLREKKCIMLASRHLFPIQVIKWRPSDDYLVVGCSDGSVYVWQMDTGALDRCVMGITAVEILNACDEAVPAAVDSLSHPAVNLKQAMTRRSLAALKNMAHHKLQTLATNLLASEASDKGNLPKYSHNSLMVQAIKTNLTDPDIHVLFFDVEALIIQLLTEEASRPNTALISPENLQKASGSSDKGGSFLTGKRAAVLFQQVKETIKENIKEHLLDDEEEDEEIMRQRREESDPEYRSSKSKPLTLLEYNLTMDTAKLFMSCLHAWGLNEVLDEVCLDRLGMLKPHCTVSFGLLSRGGHMSLMLPGYNQPACKLSHGKTEVGRKLPASEGVGKGTYGVSRAVTTQHLLSIISLANTLMSMTNATFIGDHMKKGPTRPPRPSTPDLSKARGSPPTSSNIVQGQIKQGWSQLAAMHCVMLPDLLGLDKFRPPLLEMLARRWQDRCLEVREAAQALLLAELRRIEQAGRKEAIDAWAPYLPQYIDHVISPGVTSEAAQTITTAPDASGPEAKVQEEEHDLVDDDITTEAQLNAVDALIDSMSLA

SEQ ID NO: 751598 - protein, 1457 aa, Homo sapiens
MAGNSLVLPIVLWGRKAPTHCISAVLLTDDGATIVTGCHDGQICLWDLSVELQINPRALLFGHTASITCLSKACASSDKQYIVSASESGEMCLWDVSDGRCIEFTKLACTHTGIQFYQFSVGNQREGRLLCHGHYPEILVVDATSLEVLYSLVSKISPDWISSMSIIRSHRTQEDTVVALSVTGILKVWIVTSEISDMQDTEPIFEEESKPIYCQNCQSISFCAFTQRSLLVVCSKYWRVFDAGDYSLLCSGPSENGQTWTGGDFVSSDKVIIWTENGQSYIYKLPASCLPASDSFRSDVGKAVENLIPPVQHILLDRKDKELLICPPVTRFFYGCREYFHKLLIQGDSSGRLNIWNISDTADKQGSEEGLAMTTSISLQEAFDKLNPCPAGIIDQLSVIPNSNEPLKVTASVYIPAHGRLVCGREDGSIVIVPATQTAIVQLLQGEHMLRRGWPPHRTLRGHRNKVTCLLYPHQVSARYDQRYLISGGVDFSVIIWDIFSGEMKHIFCVHGGEITQLLVPPENCSARVQHCICSVASDHSVGLLSLREKKCIMLASRHLFPIQVIKWRPSDDYLVVGCSDGSVYVWQMDTGALDRCVMGITAVEILNACDEAVPAAVDSLSHPAVNLKQAMTRRSLAALKNMAHHKLQTLATNLLASEASDKGNLPKYSHNSLMVQAIKTNLTDPDIHVLFFDVEALIIQLLTEEASRPNTALISPENLQKASGSSDKGGSFLTGKRAAVLFQQVKETIKENIKEHLLDDEEEDEEIMRQRREESDPEYRSSKSKPLTLLEYNLTMDTAKLFMSCLHAWGLNEVLDEVCLDRLGMLKPHCTVSFGLLSRGGHMSLMLPGYNQPACKLSHGKTEVGRKLPASEGVGKGTYGVSRAVTTQHLLSIISLANTLMSMTNATFIGDHMKKGPTRPPRPSTPDLSKARGSPPTSSNIVQGQIKQGWSQLAAMHCVMLPDLLGLDKFRPPLLEMLARRWQDRCLEVREAAQALLLAELRRIEQAGRKEAIDAWAPYLPQYIDHVISPGVTSEAAQTITTAPDASGPEAKVQEEEHDLVDDDITTGCLSSVPQMKKISTSYEERRKQATAIVLLGVIGAEFGAEIEPPKLLTRPRSSSQIPEGFGLTSGGSNYSLARHTCKALTFLLLQPPSPKLPPHSTIRRTAIDLIGRGFTVWEPYMDVSAVLMGLLELCADAEKQLANITMGLPLSPAADSARSARHALSLIATARPPAFITTIAKEVHRHTALAANTQSQQNMHTTTLARAKGEILRVIEILIEKMPTDVVDLLVEVMDIIMYCLEGSLVKKKGLQECFPAICRFYMVSYYERNHRIAVGARHGSVALYDIRTGKCQTIHGHKGPITAVAFAPDGRYLATYSNTDSHISFWQMNTSLLGSIGMLNSAPQLRCIKTYQVPPVQPASPGSHNALKLARLIWTSNRNVILMAHDGKEHRFMV

SEQ ID NO: 751599 - protein, 1065 aa, Homo sapiens
MAGNSLVLPIVLWGRKAPTHCISAVLLTDDGATIVTGCHDGQICLWDLSVELQINPRALLFGHTASITCLSKACASSDKQYIVSASESGEMCLWDVSDGRCIEFTKLACTHTGIQFYQFSVGNQREGRLLCHGHYPEILVVDATSLEVLYSLVSKISPDWISSMSIIRSHRTQEDTVVALSVTGILKVWIVTSEISDMQDTEPIFEEESKPIYCQNCQSISFCAFTQRSLLVVCSKYWRVFDAGDYSLLCSGPSENGQTWTGGDFVSSDKVIIWTENGQSYIYKLPASCLPASDSFRSDVGKAVENLIPPVQHILLDRKDKELLICPPVTRFFYGCREYFHKLLIQGDSSGRLNIWNISDTADKQGSEEGLAMTTSISLQEAFDKLNPCPAGIIDQLSVIPNSNEPLKVTASVYIPAHGRLVCGREDGSIVIVPATQTAIVQLLQGEHMLRRGWPPHRTLRGHRNKVTCLLYPHQVSARYDQRYLISGGVDFSVIIWDIFSGEMKHIFCVHGGEITQLLVPPENCSARVQHCICSVASDHSVGLLSLREKKCIMLASRHLFPIQVIKWRPSDDYLVVGCSDGSVYVWQMDTGALDRCVMGITAVEILNACDEAVPAAVDSLSHPAVNLKQAMTRRSLAALKNMAHHKLQTLATNLLASEASDKGNLPKYSHNSLMVQAIKTNLTDPDIHVLFFDVEALIIQLLTEEASRPNTALISPENLQKASGSSDKGGSFLTGKRAAVLFQQVKETIKENIKEHLLDDEEEDEEIMRQRREESDPEYRSSKSKPLTLLEYNLTMDTAKLFMSCLHAWGLNEVLDEVCLDRLGMLKPHCTVSFGLLSRGGHMSLMLPGYNQPACKLSHGKTEVGRKLPASEGVGKGTYGVSRAVTTQHLLSIISLANTLMSMTNATFIGDHMKKGPTRPPRPSTPDLSKARGSPPTSSNIVQGQIKQGWSQLAAMHCVMLPDLLGLDKFRPPLLEMLARRWQDRCLEVREAAQALLLAELRRIEQAGRKEAIDAWAPYLPQYIDHVISRKSSHASLQSFAGICRKGTCTHKYICYYPSTKMSH

SEQ ID NO: 751600 - protein, 86 aa, Homo sapiens
  misc_feature (10)..(10): Xaa can be any naturally occurring amino acid
PGVPVSRDFXECPRQFFQKGGVKEALSERELFNAVSGLNITADNEADFLAEIEALEKMNEDHVQKNGRKAASFLKDDGDPPLLYDE

SEQ ID NO: 751601 - protein, 86 aa, Homo sapiens; identical to SEQ ID NO: 751600
  misc_feature (10)..(10): Xaa can be any naturally occurring amino acid

SEQ ID NO: 751602 - protein, 86 aa, Homo sapiens; identical to SEQ ID NO: 751600
  misc_feature (10)..(10): Xaa can be any naturally occurring amino acid

SEQ ID NO: 751603 - protein, 86 aa, Homo sapiens; identical to SEQ ID NO: 751600
  misc_feature (10)..(10): Xaa can be any naturally occurring amino acid

SEQ ID NO: 751604 - protein, 797 aa, Homo sapiens
GRGVAALRRGPGSAPGLPRGRAELRSRVGSGPLPGGAWSAAAAAAAEMMEELHSLDPRRQELLEARFTGVGVSKGPLNSESSNQSLCSVGSLSDKEVETPEKKQNDQRNRKRKAEPYETSQGKGTPRGHKISDYFEFAGGSAPGTSPGRSVPPVARSSPQHSLSNPLPRRVEQPLYGLDGSAAKEATEEQSALPTLMSVMLAKPRLDTEQLAQRGAGLCFTFVSAQQNSPSSTGSGNTEHSCSSQKQISIQHRQTQSDLTIEKISALENSKNSDLEKKEGRIDDLLRANCDLRRQIDEQQKMLEKYKERLNRCVTMSKKLLIEKSKQEKMACRDKSMQDRLRLGHFTTVRHGASFTEQWTDGYAFQNLIKQQERINSQREEIERQRKMLAKRKPPAMGQAPPATNEQKQRKSKTNGAENETLTLAEYHEQEEIFKLRLGHLKKEEAEIQAELERLERVRNLHIRELKRIHNEDNSQFKDHPTLNDRYLLLHLLGRGGFSEVYKAFDLTEQRYVAVKIHQLNKNWRDEKKENYHKHACREYRIHKELDHPRIVKLYDYFSLDTDSFCTVLEYCEGNDLDFYLKQHKLMSEKEARSIIMQIVNALKYLNEIKPPIIHYDLKPGNILLVNGTACGEIKITDFGLSKIMDDDSYNSVDGMELTSQGAGTYWYLPPECFVVGKEPPKISNKVDVWSVGVIFYQCLYGRKPFGHNQSQQDILQENTILKATEVQFPPKPVVTPEAKAFIRRCLAYRKEDRIDVQQLACDPYLLPHIRKSVSTSSPAGAAIASTSGASNNSSSN

SEQ ID NO: 751605 - protein, 160 aa, Homo sapiens
YPLSEKLLIEKSKQEKMACRDKSMQDRLRLGHFTTVRHGASFTEQWTDGYAFQNLIKQQERINSQREEIERQRKMLAKRKPPAMGQAPPATNEQKQRKSKTNGAENETLTLAEYHEQEEIFKLRLGHLKKIRLIRLRENGKKKVTKSLPFTVSGITTTTD

SEQ ID NO: 751606 - protein, 797 aa, Homo sapiens; identical to SEQ ID NO: 751604

SEQ ID NO: 751607 - protein, 143 aa, Homo sapiens
GYSNNLYFFFVPGYLPPECFVVGKEPPKISNKVDVWSVGVIFYQCLYGRKPFGHNQSQQDILQENTILKATEVQFPPKPVVTPEAKAFIRRCLAYRKEDRIDVQQLACDPYLLPHIRKSVSTSSPAGAAIASTSGASNNSSSN

SEQ ID NO: 751608 - protein, 797 aa, Homo sapiens; identical to SEQ ID NO: 751604

SEQ ID NO: 751609 - protein, 294 aa, Homo sapiens
GRGVAALRRGPGSAPGLPRGRAELRSRVGSGPLPGGAWSAAAAAAAEMMEELHSLDPRRQELLEARFTGVGVSKGPLNSESSNQSLCSVGSLSDKEVETPEKKQNDQRNRKRKAEPYETSQGKGTPRGHKISDYFEFAGGSAPGTSPGRSVPPVARSSPQHSLSNPLPRRVEQPLYGLDGSAAKEATEEQSALPTLMSVMLAKPRLDTEQLAQRGAGLCFTFVSAQQNSPSSTGSGNTEHSCSSQKQISIQHRQTQSDLTIEKISALENSKNSDLEKKEGRIDDLLRVSIKMEE

SEQ ID NO: 751610 - protein, 765 aa, Homo sapiens
GRGVAALRRGPGSAPGLPRGRAELRSRVGSGPLPGGAWSAAAAAAAEMMEELHSLDPRRQELLEARFTGVGVSKGPLNSESSNQSLCSVGSLSDKEVETPEKKQNDQRNRKRKAEPYETSQGKGTPRGHKISDYFERRVEQPLYGLDGSAAKEATEEQSALPTLMSVMLAKPRLDTEQLAQRGAGLCFTFVSAQQNSPSSTGSGNTEHSCSSQKQISIQHRQTQSDLTIEKISALENSKNSDLEKKEGRIDDLLRANCDLRRQIDEQQKMLEKYKERLNRCVTMSKKLLIEKSKQEKMACRDKSMQDRLRLGHFTTVRHGASFTEQWTDGYAFQNLIKQQERINSQREEIERQRKMLAKRKPPAMGQAPPATNEQKQRKSKTNGAENETLTLAEYHEQEEIFKLRLGHLKKEEAEIQAELERLERVRNLHIRELKRIHNEDNSQFKDHPTLNDRYLLLHLLGRGGFSEVYKAFDLTEQRYVAVKIHQLNKNWRDEKKENYHKHACREYRIHKELDHPRIVKLYDYFSLDTDSFCTVLEYCEGNDLDFYLKQHKLMSEKEARSIIMQIVNALKYLNEIKPPIIHYDLKPGNILLVNGTACGEIKITDFGLSKIMDDDSYNSVDGMELTSQGAGTYWYLPPECFVVGKEPPKISNKVDVWSVGVIFYQCLYGRKPFGHNQSQQDILQENTILKATEVQFPPKPVVTPEAKAFIRRCLAYRKEDRIDVQQLACDPYLLPHIRKSVSTSSPAGAAIASTSGASNNSSSN

SEQ ID NO: 751611 - protein, 797 aa, Homo sapiens; identical to SEQ ID NO: 751604

SEQ ID NO: 751612 - protein, 797 aa, Homo sapiens; identical to SEQ ID NO: 751604

SEQ ID NO: 751613 - protein, 68 aa, Homo sapiens
VSRGSQQMKHMAFIRRCLAYRKEDRIDVQQLACDPYLLPHIRKSVSTSSPAGAAIASTSGASNNSSSN

SEQ ID NO: 751614 - protein, 71 aa, Homo sapiens
VAHASADAWAVLLIETDSKATNCSTHTKWTNGVQQRVWNIANPNGSDETCTRCFYFLAFFPSIEHDSIDSH

SEQ ID NO: 751615 - protein, 119 aa, Homo sapiens
AGHTHFNHPSLLQGKKAKPCVGEEADSNAPDAEERGGYHSITNYHLHATQPGPFQGILDHSPLPWGAMNCRQFNPWAFADSVFSAWNALLHRGSLSRPRSKVSSPVNTCSFSIWYKQPF

SEQ ID NO: 751616 - protein, 216 aa, Homo sapiens
MSAGGDFGNPLRKFKLVFLEDGTIGLRLWDTAGQERLRSLIPRYIRDSAAAVVVYDITNVNSFQQTTKWIDDVRTERGSDVIITLVGNRTDLADKRQVSVEEGERKAKGLNVTFIETRAKTGYNVKQLFRRVAAALPGMESTQDGSREDMSDIKLEKPQEQTVSEGGCSCYSPMSSSTLPQKPPYSFIDCSVNIGLNLFPSLITFCNSSLLPVSWR

SEQ ID NO: 751617 - protein, 254 aa, Homo sapiens
MSAGGDFGNPLRKFKLVFLGEQSVAKTSLITRFRYDSFDNTYQAIIGIDFLSKTMYLEDGTIGLRLWDTAGQERLRSLIPRYIRDSAAAVVVYDITNVNSFQQTTKWIDDVRTERGSDVIITLVGNRTDLADKRQVSVEEGERKAKGLNVTFIETRAKTGYNVKQLFRRVAAALPGMESTQDGSREDMSDIKLEKPQEQTVSEGGCSCYSPMSSSTLPQKPPYSFIDCSVNIGLNLFPSLITFCNSSLLPVSWR

SEQ ID NO: 751618 - protein, 94 aa, Homo sapiens
GWPKNSLDNHLLGTPGCPSSAHSLRPPVSSVTEKRSCSGRRDMLGSTHGQAKLRQSLKLHFDHLLYQIKQNKITPCPPFHTLPSLPSHFPVLTP

SEQ ID NO: 751619 - protein, 296 aa, Homo sapiens
EGPVSPDVEPGKEETEESKKRKRKPYRPGIGGFMVRQRKSHTRTKKGPAAQAEVLSGDGQPDEVIPADLPAEGAVEQSLAEGDEKKKQQRRGRKKSKLEDMFPAYLQEAFFGKELLDLSRKALFAVGVGRPSFGLGTPKAKGDGGSERKELPTSQKGDDGPDIADEESRGLEGKADTPGPEDGGVKASPVPSDPEKPGTPGEGMLSSDLDRISTEELPKMESKDLQQLFKDVLGSEREQHLGCGTPGLEGSRTPLQRPFLQGGLPLGNLPSSSPMDSYPGLCQSPFLDSRERGGFF

SEQ ID NO: 751620 - protein, 92 aa, Homo sapiens
SACASTWSCLPHHSSQRAWLCTEARPVLTHSHAPHHSVPGSPLAGMGSRPVARAKHSLLGQVGKTSPVGASKTQAEAPPAAEAPPATEVSGW

SEQ ID NO: 751621 - protein, 330 aa, Homo sapiens
MRCCHICKLPGRVMGIRVLRLSLVVILVLLLVAGALTALLPSVKEDKMLMLRREIKSQGKSTMDSFTLIMQTYNRTDLLLKLLNHYQAVPNLHKVIVVWNNIGEKAPDELWNSLGPHPIPVIFKQQTANRMRNRLQVFPELETNAVLMVDDDTLISTPDLVFAFSVWQQFPDQIVGFVPRKHVSTSSGIYSYGSFEMQAPGSGNGDQYSMVLIGASFFNSKYLELFQRQPAAVHALIDDTQNCDDIAMNFIIAKHIGKTSGIFVKPVNMDNLEKETNSGYSGMWHRAEHALQRSYCINKLVNIYDSMPLRYSNIMISQFGFPYANYKRKI

SEQ ID NO: 751622 - protein, 338 aa, Homo sapiens
MRTWNSGGTKCCHICKLPGRVMGIRVLRLSLVVILVLLLVAGALTALLPSVKEDKMLMLRREIKSQGKSTMDSFTLIMQTYNRTDLLLKLLNHYQAVPNLHKVIVVWNNIGEKAPDELWNSLGPHPIPVIFKQQTANRMRNRLQVFPELETNAVLMVDDDTLISTPDLVFAFSVWQQFPDQIVGFVPRKHVSTSSGIYSYGSFEMQAPGSGNGDQYSMVLIGASFFNSKYLELFQRQPAAVHALIDDTQNCDDIAMNFIIAKHIGKTSGIFVKPVNMDNLEKETNSGYSGMWHRAEHALQRSYCINKLVNIYDSMPLRYSNIMISQFGFPYANYKRKI

SEQ ID NO: 751623 - protein, 317 aa, Homo sapiens [sequence omitted]

SEQ ID NO: 751624 - protein, 121 aa, Homo sapiens
RREIKSQGKSTMDSFTLIMQTYNRTDLLLKLLNHYQAVPNLHKVIVVWNNIGEKAPDELWNSLGPHPIPVIFKQQTANRMRNRLQVFPELETNGELQCSSQPGKAAAVQSWDRHVNFWPSA

SEQ ID NO: 751625 - protein, 330 aa, Homo sapiens; identical to SEQ ID NO: 751621

SEQ ID NO: 751626 - protein, 277 aa, Homo sapiens
  misc_feature (267)..(267): Xaa can be any naturally occurring amino acid
  misc_feature (277)..(277): Xaa can be any naturally occurring amino acid
MRCCHICKLPGRVMGIRVLRLSLVVILVLLLVAGALTALLPSVKEDKMLMLRREIKSQGKSTMDSFTLIMQTYNRTDLLLKLLNHYQAVPNLHKVIVVWNNIGEKAPDELWNSLGPHPIPVIFKQQTANRMRNRLQVFPELETNAVLMVDDDTLISTPDLVFAFSVWQQFPDQIVGFVPRKHVSTSSGIYSYGSFEMQAPGSGNGDQYSMVLIGASFFNSKYLELFQRQPAAVHALIDDTQNCDDIAMNFIILPKPLFGQRTSRGIXLLKALVKHWX

SEQ ID NO: 751627 - protein, 135 aa, Homo sapiens
EKNMKTQGLVRMLTFVCCFHFYSRCCHICKLPGRVMGIRVLRLSLVVILVLLLVAGALTALLPSVKEDKMLMLRREIKSQGKSTMDSFTLIMQTYNRTDLLLKLLNHYQAVPNLHKVIVVWNNIGEKAPDELWNS

SEQ ID NO: 751628 - protein, 507 aa, Homo sapiens
MSCRSYRISSGCGVTRNFSSCSAVAPKTGNRCCISAAPYRGVSCYRGLTGFGSRSLCNLGSCGPRIAVGGFRAGSCGRSFGYRSGGVCGPSPPCITTVSVNESLLTPLNLEIDPNAQCVKQEEKEQIKSLNSRFAAFIDKVRFLEQQNKLLETKWQFYQNQRCCESNLEPLFSGYIETLRREAECVEADSGRLASELNHVQEVLEGYKKKYEEEVALRATAENEFVVLKKDVDCAYLRKSDLEANVEALVEESSFLRRLYEEEIRVLQAHISDTSVIVKMDNSRDLNMDCIIAEIKAQYDDVASRSRAEAESWYRSKCEEMKATVIRHGETLRRTKEEINELNRMIQRLTAEIENAKCQRAKLEAAVAEAEQQGEAALSDARCKLAELEGALQKAKQDMACLLKEYQEVMNSKLGLDIEIATYRRLLEGEEHRLCEGVGSVNVCVSSSRGGVSCGGLSYSTTPGRQITSGPSAIGGSITVVAPDSCAPCQPRSSSFSCGSSRSVRFA

SEQ ID NO: 751629 - protein, 131 aa, Homo sapiens
LFLRQSLALSPRLECNGTISAHCNLCLPGSCNSPASASQVVRITGACHQTQLIFVFFLEMGFRHVGQADLELLTSGDLPALASPSAGITGISHCAQPPIFSISSVLLFSTFFDFTFRFPDLILILLHEFQS

SEQ ID NO: 751630 - protein, 135 aa, Homo sapiens
CKSKGCPEVRAGCPPSSPTIPKRSRHRPLEATLPPRAPVGSICRTSLRGWGRPLLFVFASKLRKSRDWPLQALQFVQVLACGPLLGQPLTFVSLVFQRRKPRVACLGASSCFSMVAKFGINCLVTGWFNDIYLCF

SEQ ID NO: 751631 - protein, 319 aa, Homo sapiens
APGAPWPRRNGDPAASPPSPAQPFRPPRMEAPASAQTPHPHEPISFGIDQILNSPDQDSAPAPRGPDGASYLGGPPGGRPGATYPSLPASFAGLGAPFEDAGSYSVNLSLAPAGVIRVPAHRPLPGAVPPPLPSALPAMPSVPTVSSLGGLNFPWMESSRRFVKDRFTAAAALTPFTVTRRIGHPYQNRTPPKRKKPRTSFSRVQICELEKRFHRQKYLASAERAALAKSLKMTDAQVKTWFQNRRTKWRRQTAEEREADRQQASRLMLQLQHDAFQKSLNDSIQPDPLCLHNSSLFALQNLQPWEEDSSKVPAVTSLV

SEQ ID NO: 751632 - protein, 250 aa, Homo sapiens
APGAPWPRRNGDPAASPPSPAQPFRPPRMEAPASAQTPHPHEPISFGIDQILNSPDQDSAPAPRGPDGASYLGGPPGGRPGATYPSLPASFAGLGAPFEDAGSYSVNLSLAPAGVIRVPAHRPLPGAVPPPLPSALPAMPSVPTVSSLGGLNFPWMESSRRFVKDRFTAAAALTPFTVTRRIGHPYQNRTPPKRKKPRTSFSRVQICELEKRFHRQKYLASAERAALAKSLKMTDAQVKTWFQNRRTKWR

SEQ ID NO: 751633 - protein, 104 aa, Homo sapiens
ATTHELGLQRASVRQELGLRRPSRGGSLARGGHGEARGGPGGHTVEVEAGPLVAVNRQEARPGEADWWSSSGPAEAAESQKQGLGRPPGGMSWAGLKEATGRQE

SEQ ID NO: 751634 - protein, 106 aa, Homo sapiens
AGLWAVPQEKKRLPAHQRVPLALHASRLSHSEPPSATPSPALSVESLSSESASQTAGAELLEPPAVPKSSSEPAVRAPVYSFHLSHYRISDRTLGPSPAPLPTSRM

SEQ ID NO: 751635 - protein, 629 aa, Homo sapiens
GRAPEAAAAWRSGDSKCGPARALPATVPAAPRLALSDLPPGPWGRLRAARGAAGPYPIRGPFPTVPPLPPCSLPPLFLGLYLLFPKSSPLLLPETGPHRLYGGGLVWTRRPEVSRRWLILSVPAAGPEAGAVYTAKPVLLRPVGGALRFPVPSHVAVVSEDDFQHSSNSTYRTTSSSLRADQEALLEKLLDRPPPGLQRPEDRFCGTYIIFFSLGIGSLLPWNFFITAKEYWMFKLRNSSSPATGEDPEGSDILNYFESYLAVASTVPSMLCLVANFLLVNRVAVHIRVLASLTVILAIFMVITALVKVDTSSWTRGFFAVTIVCMVILSGASTVFSSSIYGMTGSFPMRNSQALISGGAMGGTVSAVASLVDLAASSDVRNSALAFFLTATIFLVLCMGLYLLLSRLEYARYYMRPVLAAHVFSGEEELPQDSLSAPSVASRFIDSHTPPLRPILKKTASLGFCVTYVFFITSLIYPAVCTNIESLNKGSGSLWTTKFFIPLTTFLLYNFADLCGRQLTAWIQVPGPNSKALPGFVLLRTCLIPLFVLCNYQPRVHLKTVVFQSDVYPALLSSLLGLSNGYLSTLALLYGPKIVPRELAEATGVVMSFYVCLGLTLGSACSTLLVHLI

SEQ ID NO: 751636 - protein, 489 aa, Homo sapiens
GRAPEAAAAWRSGDMAVVSEDDFQHSSNSTYRTTSSSLRADQEALLEKLLDRPPPGLQRPEDRFCGTYIIFFSLGIGSLLPWNFFITAKEYWMFKLRNSSSPATGEDPEGSDILNYFESYLAVASTVPSMLCLVANFLLVNRVAVHIRVLASLTVILAIFMVITALVKVDTSSWTRGFFAVTIVCMVILSGASTVFSSSIYGMTGSFPMRNSQALISGGAMGGTVSAVASLVDLAASSDVRNSALAFFLTATIFLVLCMGLYLLLSRLEYARYYMRPVLAAHVFSGEEELPQDSLSAPSVASRFIDSHTPPLRPILKKTASLGFCVTYVFFITSLIYPAVCTNIESLNKGSGSLWTTKFFIPLTTFLLYNFADLCGRQLTAWIQVPGPNSKALPGFVLLRTCLIPLFVLCNYQPRVHLKTVVFQSDVYPALLSSLLGLSNGYLSTLALLYGPKIVPRELAEATGVVMSFYVCLGLTLGSACSTLLVHLI

SEQ ID NO: 751637 - protein, 489 aa, Homo sapiens; identical to SEQ ID NO: 751636

SEQ ID NO: 751638 - protein, 292 aa, Homo sapiens
GRAPEAAAAWRSGDSKCGPARALPATVPAAPRLALSDLPPGPWGRLRAARGAAGPYPIRGPFPTVPPLPPCSLPPLFLGLYLLFPKSSPLLLPETGPHRLYGGGLVWTRRPEVSRRWLILSVPAAGPEAGAVYTAKPVLLRPVGGALRFPVPSHVAVVSEDDFQHSSNSTYRTTSSSLRADQEALLEKLLDRPPPGLQRPEDRFCGTYIIFFSLGIGSLLPWNFFITAKEYWMFKLRNSSSPATGEDPEGSDILNYFESYLAVASTVPSMLCLVANFLLVNRLQSTFLCPWP

SEQ ID NO: 751639 - protein, 489 aa, Homo sapiens; identical to SEQ ID NO: 751636

SEQ ID NO: 751640 - protein, 455 aa, Homo sapiens
RAAWRTATWPLSQRTTFSTVQTPPTEPQAAVSELTRRHCLRSCWTARPLACRGPRTASVAHTSSSSAWALAVYCHGTSLSLPRSTGCSNSATPPAQPPGRTLRAQTSWVAVHIRVLASLTVILAIFMVITALVKVDTSSWTRGFFAVTIVCMVILSGASTVFSSSIYGMTGSFPMRNSQALISGGAMGGTVSAVASLVDLAASSDVRNSALAFFLTATIFLVLCMGLYLLLSRLEYARYYMRPVLAAHVFSGEEELPQDSLSAPSVASRFIDSHTPPLRPILKKTASLGFCVTYVFFITSLIYPAVCTNIESLNKGSGSLWTTKFFIPLTTFLLYNFADLCGRQLTAWIQVPGPNSKALPGFVLLRTCLIPLFVLCNYQPRVHLKTVVFQSDVYPALLSSLLGLSNGYLSTLALLYGPKIVPRELAEATGVVMSFYVCLGLTLGSACSTLLVHLI

SEQ ID NO: 751641 - protein, 489 aa, Homo sapiens; identical to SEQ ID NO: 751636

SEQ ID NO: 751642 - protein, 71 aa, Homo sapiens
LPYHLLPLFNSHEAMDQNEVKTKERKHTVSLRHVSSVKDYVNHPPPLKALDLIHTFKLSFRNGFGYTDVIR

SEQ ID NO: 751643 - protein, 330 aa, Homo sapiens
MQQQPLPGPGAPTTEPTKPPYSYIALIAMAIQSSPGQRATLSGIYRYIMGRFAFYRHNRPGWQNSIRHNLSLNECFVKVPRDDRKPGKGSYWTLDPDCHDMFEHGSFLRRRRRFTRQTGAEGTRGPAKARRGPLRATSQDPGVPNATTGRQCSFPPELPDPKGLSFGGLVGAMPASMCPATTDGRPRPPMEPKEISTPKPACPGELPVATSSSSCPAFGFPAGFSEAESFNKAPTPVLSPESGIGSSYQCRLQALNFCMGADPGLEHLLASAAPSPAPPTPPGSLRAPLPLPTDHKEPWVAGGFPVQGGSGYPLGLTPCLYRTPGMFFFE

SEQ ID NO: 751644 - protein, 330 aa, Homo sapiens; identical to SEQ ID NO: 751643

SEQ ID NO: 751645 - protein, 102 aa, Homo sapiens
MKKESKKEREKERKKGRKEGRKERKRKERKRKERRKERRKERKKEERERKEGRKERKKERQTKKERQEGRKKGKKERKRKEGKKEGGEEGRKKERKIHYSVL

SEQ ID NO: 751646 - protein, 160 aa, Homo sapiens
SVPHRFAVKEGKKERREGEEGRKKGKKERKTDKERKTGRKEERKERKKKEGRKEGRRGRRKKEGKKDSLFCPLNLSEEKYPVLCTCVKREKKRKEKKERKKEKKDRKEERKERKKERKKKRQTGRKKGKKERKGKEGRKEGRKEERRKERRFIILSSEPE

SEQ ID NO: 751647 - protein, 87 aa, Homo sapiens
NSTACGSAPRNHLHKIAPPLGTLPSGTSPRDSTPCGPASFTRDLAPRDVRGAVAPPTWSSGGVELSPLWPRPGRVLGLNPGGDLGGN

SEQ ID NO: 751648 - protein, 393 aa, Homo sapiens
MNDSCQNLPKINQQRPRSKTTAGKTGDTKSLNKEHPNQEVVDNTRLESANFGLHISRIRKDSGEENAHPRRGQIIDFQGLLTDAIKGATSELALNTFDHNPDPSERLLKPLSAFIGMNSEMRELAAVVSRYPQLFTGILSPWKGLLLYGPPGTGKTLLAKAVATECKTTFFNISASTIVSKWRGDSEKLVRVLFELARYHAPSTIFLDELESVMSQRGTASGGEHEGSLRMKTELLVQMDGLARSEDLVFVLAASNLPWELDCAMLRRLEKRILVDLPSREARQAMIYHWLPPVSKSRALELHTELEYSVLSQETEGYSGSDIKLVCREAAMRPVRKIFDALENHQSESSDLPRIQLDIVTTADFLDVLTHTKPSAKNLAQRYSDWQREFESV

SEQ ID NO: 751649 - protein, 486 aa, Homo sapiens
MRTEARRKNLLILISHYLTQEGYIDTANALEQETKLGLRRFEVCDNIDLETILMEYESYYFVKFQKYPKIVKKSSDTAENNLPQRSRGKTRRMMNDSCQNLPKINQQRPRSKTTAGKTGDTKSLNKEHPNQEVVDNTRLESANFGLHISRIRKDSGEENAHPRRGQIIDFQGLLTDAIKGATSELALNTFDHNPDPSERLLKPLSAFIGMNSEMRELAAVVSRYPQLFTGILSPWKGLLLYGPPGTGKTLLAKAVATECKTTFFNISASTIVSKWRGDSEKLVRVLFELARYHAPSTIFLDELESVMSQRGTASGGEHEGSLRMKTELLVQMDGLARSEDLVFVLAASNLPWELDCAMLRRLEKRILVDLPSREARQAMIYHWLPPVSKSRALELHTELEYSVLSQETEGYSGSDIKLVCREAAMRPVRKIFDALENHQSESSDLPRIQLDIVTTADFLDVLTHTKPSAKNLAQRYSDWQREFESV

SEQ ID NO: 751650 - protein, 532 aa, Homo sapiens
ASGSLDRPVSPVTDYFSPFSRVLAQCLMELSYQTLKFTHQAREACEMRTEARRKNLLILISHYLTQEGYIDTANALEQETKLGLRRFEVCDNIDLETILMEYESYYFVKFQKYPKIVKKSSDTAENNLPQRSRGKTRRMMNDSCQNLPKINQQRPRSKTTAGKTGDTKSLNKEHPNQEVVDNTRLESANFGLHISRIRKDSGEENAHPRRGQIIDFQGLLTDAIKGATSELALNTFDHNPDPSERLLKPLSAFIGMNSEMRELAAVVSRYPQLFTGILSPWKGLLLYGPPGTGKTLLAKAVATECKTTFFNISASTIVSKWRGDSEKLVRVLFELARYHAPSTIFLDELESVMSQRGTASGGEHEGSLRMKTELLVQMDGLARSEDLVFVLAASNLPWELDCAMLRRLEKRILVDLPSREARQAMIYHWLPPVSKSRALELHTELEYSVLSQETEGYSGSDIKLVCREAAMRPVRKIFDALENHQSESSDLPRIQLDIVTTADFLDVLTHTKPSAKNLAQRYSDWQREFESV

SEQ ID NO: 751651 - protein, 352 aa, Homo sapiens
MRTEARRKNLLILISHYLTQEGYIDTANALEQETKLGLRRFEVCDNIDLETILMEYESYYFVKFQKYPKIVKKSSDTAENNLPQRSRGKTRRMMNDSCQNLPKINQQRPRSKTTAGKTGDTKSLNKEHPNQEVVDNTRLESANFGLHISRIRKDSGEENAHPRRGQIIDFQGLLTDAIKGATSELALNTFDHNPDPSERLLKPLSAFIGMNSEMRELAAVVSRYPQLFTGILSPWKGLLLYGPPGTGKTLLAKAVATECKTTFFNISASTIVSKWRGDSEKLVRVLFELARYHAPSTIFLDELESVMSQRGTASGGEHEGSLRMKTELLVQMDGLARSEDLVFVLAASNLPW

SEQ ID NO: 751652 - protein, 154 aa, Homo sapiens
RVETTFWDFIHPTRLFKKTVWVPYKYPQLFTGILSPWKGLLLYGPPGTGKTLLAKAVATECKTTFFNISASTIVSKWRGDSEKLVRVLFELARYHAPSTIFLDELESVMSQRGTASGGEHEGSLRMKTELLVQMDGLARSEDLVFVLAASNLPW

SEQ ID NO: 751653 - protein, 433 aa, Homo sapiens
MEYESYYFVKFQKYPKIVKKSSDTAENNLPQRSRGKTRRMMNDSCQNLPKINQQRPRSKTTAGKTGDTKSLNKEHPNQEVVDNTRLESANFGLHISRIRKDSGEENAHPRRGQIIDFQGLLTDAIKGATSELALNTFDHNPDPSERLLKPLSAFIGMNSEMRELAAVVSRYPQLFTGILSPWKGLLLYGPPGTGKTLLAKAVATECKTTFFNISASTIVSKWRGDSEKLVRVLFELARYHAPSTIFLDELESVMSQRGTASGGEHEGSLRMKTELLVQMDGLARSEDLVFVLAASNLPWELDCAMLRRLEKRILVDLPSREARQAMIYHWLPPVSKSRALELHTELEYSVLSQETEGYSGSDIKLVCREAAMRPVRKIFDALENHQSESSDLPRIQLDIVTTADFLDVLTHTKPSAKNLAQRYSDWQREFESV

SEQ ID NO: 751654 - protein, 433 aa, Homo sapiens
MRTEARRKNLLILISHYLTQEGYIDTANALEQETKLGLRRFEVCDNIDLETILMEYESYYFVKFQKYPKIVKKSSDTAENNLPQRSRGKTRRMMNDSCQNLPKINQQRPRSKTTAGKTGDTKSLNKEHPNQEVVDNTRLESANFGLHISRIRKDSGEENAHPRRGQIIDFQGLLTDAIKGATSELALNTFDHNPDPSERLLKPLSAFIGMNSEMRELAAVVSRYPQLFTGILSPWKGLLLYGPPGTGKTLLAKAVATECKTTFFNISASTIVSKWRGDSEKLVRVLFELARYHAPSTIFLDELESVMSQRGTASGGEHEGSLRMKTELLVQMDGLARSEDLVFVLAASNLPCLKAIALQPGDRARLRLKKKKSVLVHFHAAGEDISKTGKKKKLTGLTVSHGWGASESWRGAKDTSYMVAARENEEDARSGNP

SEQ ID NO: 751655 - protein, 67 aa, Homo sapiens
HVSVQPQNKATGEGLMGSTEDTVAHTWLDYLLKVASVTFHSDHALPAAPSLQPTWLCGLLLIYALQD

SEQ ID NO: 751656 - protein, 422 aa, Homo sapiens
MCAPPRGAPPEHPAPTGLCRSSCAELQARVMAALRQPQVAELLAEARRAFREEFGAEPELAVSAPGRVNLIGEHTDYNQGLVLPMALELMTVLVGSPRKDGLVSLLTTSEGADEPQRLQFPLPTAQRSLEPGTPRWANYVKGVIQYYPAAPLPGFSAVVVSSVPLGGGLSSSASLEVATYTFLQQLCPDSGTIAARAQVCQQAEHSFAGMPCGIMDQFISLMGQKGHALLIDCRSLETSLVPLSDPKLAVLITNSNVRHSLASSEYPVRRRQCEEVARALGKESLREVQLEELEAARDLVSKEGFRRARHVVGEIRRTAQAAAALRRGDYRAFGRLMVESHRSLRDDYEVSCPELDQLVEAALAVPGVYGSRMTGGGFGGCTVTLLEASAAPHAMRHIQEHYGGTATFYLSQAADGAKVLCL

SEQ ID NO: 751657 - protein, 345 aa, Homo sapiens
MCAPPRGAPPEHPAPTGLCRSSCAELQARVMAALRQPQVAELLAEARRAFREEFGAEPELAVSAPGRVNLIGEHTDYNQGLVLPMALELMTVLVGSPRKDGLVSLLTTSEGADEPQRLQFPLPTAQRSLEPGTPRWANYVKGVIQYYPAAPLPGFSAVVVSSVPLGGGLSSSASLEVATYTFLQQLCPDSGTIAARAQVCQQAEHSFAGMPCGIMDQFISLMGQKGHALLIDCRSLETSLVPLSDPKLAVLITNSNVRHSLASSEYPVRRRQCEEVARALGKESLREVQLEELEAARDLVSKEGFRRARHVVGEIRRTAQAAAALRRGDYRAFGRLMVESHRSLR

SEQ ID NO: 751658 - protein, 411 aa, Homo sapiens
  misc_feature (13)..(13): Xaa can be any naturally occurring amino acid
MRKPKRWLPKQAXAWGARVMAALRQPQVAELLAEARRAFREEFGAEPELAVSAPGRVNLIGEHTDYNQGLVLPMALELMTVLVGSPRKDGLVSLLTTSEGADEPQRLQFPLPTAQRSLEPGTPRWANYVKGVIQYYPAAPLPGFSAVVVSSVPLGGGLSSSASLEVATYTFLQQLCPDSGTIAARAQVCQQAEHSFAGMPCGIMDQFISLMGQKGHALLIDCRSLETSLVPLSDPKLAVLITNSNVRHSLASSEYPVRRRQCEEVARALGKESLREVQLEELEAARDLVSKEGFRRARHVVGEIRRTAQAAAALRRGDYRAFGRLMVESHRSLRDDYEVSCPELDQLVEAALAVPGVYGSRMTGGGFGGCTVTLLEASAAPHAMRHIQEHYGGTATFYLSQAADGAKVLCL

SEQ ID NO: 751659 - protein, 574 aa, Homo sapiens
MCAPPRGAPPEHPAPTGLCRSSCAELQARVMAALRQPQVAELLAEARRAFREEFGAEPELAVSAPGRVNLIGEHTDYNQGLVLPMALELMTVLVGSPRKDGLVSLLTTSEGADEPQRLQFPLPTAQRSLEPGTPRWANYVKGVIQYYPGRGPGLSQVLTDTRSATSQPQSPFICLITVGKACRVEHPIVQMRKLMPPEGRELALGFPGPDWRSQDLNPSLFSLQSPKPGGQLEVSQQTSEGGKMEGSGSLGPAGWWLLTIETHTLETAARPLLPFPPGHLPFLCHPPRQPLLPSPVLSPAAAPLPGFSAVVVSSVPLGGGLSSSASLEVATYTFLQQLCPDSGTIAARAQVCQQAEHSFAGMPCGIMDQFISLMGQKGHALLIDCRSLETSLVPLSDPKLAVLITNSNVRHSLASSEYPVRRRQCEEVARALGKESLREVQLEELEAARDLVSKEGFRRARHVVGEIRRTAQAAAALRRGDYRAFGRLMVESHRSLRDDYEVSCPELDQLVEAALAVPGVYGSRMTGGGFGGCTVTLLEASAAPHAMRHIQEHYGGTATFYLSQAADGAKVLCL

SEQ ID NO: 751660 - protein, 433 aa, Homo sapiens
MCAPPRGAPPEHPAPTGLCRSSCAELQARVMAALRQPQVAELLAEARRAFREEFGAEPELAVSAPGRVNLIGEHTDYNQGLVLPMALELMTVLVGSPRKDGLVSLLTTSEGADEPQRLQFPLPTAQRSLEPGTPRWANYVKGVIQYYPAAPLPGFSAVVVSSVPLGGGLSSSASLEVATYTFLQQLCPALASPPHPVLQDSGTIAARAQVCQQAEHSFAGMPCGIMDQFISLMGQKGHALLIDCRSLETSLVPLSDPKLAVLITNSNVRHSLASSEYPVRRRQCEEVARALGKESLREVQLEELEAARDLVSKEGFRRARHVVGEIRRTAQAAAALRRGDYRAFGRLMVESHRSLRDDYEVSCPELDQLVEAALAVPGVYGSRMTGGGFGGCTVTLLEASAAPHAMRHIQEHYGGTATFYLSQAADGAKVLCL

SEQ ID NO: 751661 - protein, 182 aa, Homo sapiens
MCAPPRGAPPEHPAPTGLCRSSCAELQARVMAALRQPQVAELLAEARRAFREEFGAEPELAVSAPGRVNLIGEHTDYNQGLVLPMALELMTVLVGSPRKDGLVSLLTTSEGADEPQRLQFPLPTAQRSLEPGTPRWANYVKGVIQYYPAAPLPGFSAVVVSSHPWKWPRTPSSSSSVQTRAQ

SEQ ID NO: 751662 - protein, 387 aa, Homo sapiens
GVSHCARPNLSVFISTYSECQVTLLETGDQRLMTSHSCWPWGPRGSLWESQVNRVPAPLLWLCGWWWVVRHIESHQRQGRAAQKSWSCQVPLRAILTLVSAHWFFPKSRGKDTIGGAVSHPAPLAPATHHPAAGFPRELRVGAEPAEVWGRGVRARGGAGGNVRTPARGPARASRADGAVPEQLCRAAGARHGCFETAPGRGAAGRGPASLPGGVRGRARAGRVSAGPRQPHRGTHGLQPGPGAAYGEGLHGEPLARRRLSRPPRRAGLGDAGGEFFPREMWGGQLRLEHRCTEESPGQAVPHVEGRKRGSGRERVRGRLLAQARPLGAGAPRLQPGSMFPLNCEALCATQKGTLRASGHRGAPTADLGERSLLAQPVQFTEEETEA

SEQ ID NO: 751663 - protein, 345 aa, Homo sapiens; identical to SEQ ID NO: 751657

SEQ ID NO: 751664 - protein, 338 aa, Homo sapiens
MALELMTVLVGSPRKDGLVSLLTTSEGADEPQRLQFPLPTAQRSLEPGTPRWANYVKGVIQYYPAAPLPGFSAVVVSSVPLGGGLSSSASLEVATYTFLQQLCPDSGTIAARAQVCQQAEHSFAGMPCGIMDQFISLMGQKGHALLIDCRSLETSLVPLSDPKLAVLITNSNVRHSLASSEYPVRRRQCEEVARALGKESLREVQLEELEAARDLVSKEGFRRARHVVGEIRRTAQAAAALRRGDYRAFGRLMVESHRSLRDDYEVSCPELDQLVEAALAVPGVYGSRMTGGGFGGCTVTLLEASAAPHAMRHIQEHYGGTATFYLSQAADGAKVLCL

SEQ ID NO: 751665 - protein, 392 aa, Homo sapiens
MCAPPRGAPPEHPAPTGLCRSSCAELQARVMAALRQPQVAELLAEARRAFREEFGAEPELAVSAPGRVNLIGEHTDYNQGLVLPMALELMTVLVGSPRKDGLVSLLTTSEGADEPQRLQFPLPTAQRSLEPGTPRWANYVKGVIQYYPAAPLPGFSAVVVSSVPLGGGLSSSASLEVATYTFLQQLCPDSGTIAARAQVCQQAEHSFAGMPCGIMDQFISLMGQKGHALLIDCSEYPVRRRQCEEVARALGKESLREVQLEELEAARDLVSKEGFRRARHVVGEIRRTAQAAAALRRGDYRAFGRLMVESHRSLRDDYEVSCPELDQLVEAALAVPGVYGSRMTGGGFGGCTVTLLEASAAPHAMRHIQEHYGGTATFYLSQAADGAKVLCL

SEQ ID NO: 751666 - protein, 213 aa, Homo sapiens [sequence omitted]

SEQ ID NO: 751667 - protein, 710 aa, Homo sapiens
MLTTLKPFGSVSVESKMNNKAGSFFWNLRQFSTLVSTSRTMRLCCLGLCKPKIVHSNWNILNNFHNRMQSTDIIRYLFQDAFIFKSDVGFQTKGISTLTALRIERLLYAKRLFFDSKQSLVPVDKSDDELKKVNLNHEVSNEDVLTKETKPNRISSRKLSEECNSLSDVLDAFSKAPTFPSSNYFTAMWTIAKRLSDDQKRFEKRLMFSHPAFNQLCEHMMREAKIMQYKYLLFSLHAIVKLGIPQNTILVQTLLRVTQERINECDEICLSVLSTVLEAMEPCKNVHVLRTGFRILVDQQVWKIEDVFTLQVVMKCIGKDAPIALKRKLEMKALRELDRFSVLNSQHMFEVLAAMNHRSLILLDECSKVVLDNIHGCPLRIMINILQSCKDLQYHNLDLFKGLADYVAATFDIWKFRKVLFILILFENLGFRPVGLMDLFMKRIVEDPESLNMKNILSILHTYSSLNHVYKCQNKEQFVEVMASALTGYLHTISSENLLDAVYSFCLMNYFPLAPFNQLLQKDIISELLTSDDMKNAYKLHTLDTCLKLDDTVYLRDIALSLPQLPRELPSSHTNAKVAEVLSSLLGGEGHFSKDVHLPHNYHIDFEIRMDTNRNQVLPLSDVDTTSATDIQRVAVLCVSRSAYCLGSSHPRGFLAMKMRHLNAMGFHVILVNNWEMDKLEMEDAVTFLKTKIYSVEALPVAAVNVQSTQ

SEQ ID NO: 751668 - protein, 648 aa, Homo sapiens
MLTTLKPFGSVSVESKMNNKAGSFFWNLRQFSTLVSTSRTMRLCCLGLCKPKIVHSNWNILNNFHNRMQSTDIIRYLFQDAFIFKSDVGFQTKGISTLTALRIERLLYAKRLFFDSKQSLVPVDKSDDELKKVNLNHEVSNEDVLTKETKPNRISSRKLSEECNSLSDVLDAFSKAPTFPSSNYFTAMWTIAKRLSDDQKRFEKRLMFSHPAFNQLCEHMMREAKIMQYKYLLFSLHAIVKLGIPQNTILVQTLLRVTQERINECDEICLSVLSTVLEAMEPCKNVHVLRTGFRILVDQQVWKIEDVFTLQVVMKCIGKDAPIALKRKLEMKALRELDRFSVLNSQHMFEVLAAMNHRSLILLDECSKVVLDNIHGCPLRIMINILQSCKDLQYHNLDLFKGLADYVAATFDIWKFRKVLFILILFENLGFRPVGLMDLFMKRIVEDPESLNMKNILSILHTYSSLNHVYKCQNKEQFVEVMASALTGYLHTISSENLLDAVYSFCLMNYFPLAPFNQLLQKDIISELLTSDDMKNAYKLHTLDTCLKLDDTVYLRDIALSLPQLPRELPSSHTNAKVAEVLSSLLGGEGHFSKDVHLPHNYHIDFEIRMDTNRNQVLPLSDVDTTSATDIQRLLTYISFAGLSELKS

SEQ ID NO: 751669 - protein, 648 aa, Homo sapiens; identical to SEQ ID NO: 751668

SEQ ID NO: 751670 - protein, 710 aa, Homo sapiens; identical to SEQ ID NO: 751667

SEQ ID NO: 751671 - protein, 692 aa, Homo sapiens
MLTTLKPFGSVSVESKMNNKAGSFFWNLRQFSTLVSTSRTMRLCCLGLCKPKIVHSNWNILNNFHNRMQSTDIIRYLFQDAFIFKSDVGFQTKGISTLTALRIERLLYAKRLFFDSKQSLVPVDKSDDELKKVNLNHEVSNEDVLTKETKPNRISSRKLSEECNSLSDVLDAFSKAPTFPSSNYFTAMWTIAKRLSDDQKRFEREAKIMQYKYLLFSLHAIVKLGIPQNTILVQTLLRVTQERINECDEICLSVLSTVLEAMEPCKNVHVLRTGFRILVDQQVWKIEDVFTLQVVMKCIGKDAPIALKRKLEMKALRELDRFSVLNSQHMFEVLAAMNHRSLILLDECSKVVLDNIHGCPLRIMINILQSCKDLQYHNLDLFKGLADYVAATFDIWKFRKVLFILILFENLGFRPVGLMDLFMKRIVEDPESLNMKNILSILHTYSSLNHVYKCQNKEQFVEVMASALTGYLHTISSENLLDAVYSFCLMNYFPLAPFNQLLQKDIISELLTSDDMKNAYKLHTLDTCLKLDDTVYLRDIALSLPQLPRELPSSHTNAKVAEVLSSLLGGEGHFSKDVHLPHNYHIDFEIRMDTNRNQVLPLSDVDTTSATDIQRVAVLCVSRSAYCLGSSHPRGFLAMKMRHLNAMGFHVILVNNWEMDKLEMEDAVTFLKTKIYSVEALPVAAVNVQSTQ

SEQ ID NO: 751672 - protein, 552 aa, Homo sapiens
MLTTLKPFGSVSVESKMNNKAGSFFWNLRQFSTLVSTSRTMRLCCLGLCKPKIVHSNWNILNNFHNRMQSTDIIRYLFQDAFIFKSDVGFQTKGISTLTALRIERLLYAKRLFFDSKQSLVPVDKSDDELKKVNLNHEVSNEDVLTKETKPNRISSRKLSEECNSLSDVLDAFSKAPTFPSSNYFTAMWTIAKRLSDDQKRFEKRLMFSHPAFNQLCEHMMREAKIMQYKYLLFSLHAIVKLGIPQNTILVQTLLRVTQERINECDEICLSVLSTVLEAMEPCKNVHVLRTGFRILVDQQVWKIEDVFTLQVVMKCIGKDAPIALKRKLEMKALRELDRFSVLNSQHMFEVLAAMNHRSLILLDECSKVVLDNIHGCPLRIMINILQSCKDLQYHNLDLFKGLADYVAATFDIWKFRKVLFILILFENLGFRPVGLMDLFMKRIVEDPESLNMKNILSILHTYSSLNHVYKCQNKEQFVEVMASALTGYLHTISSENLLDAVYSFCLMNYFPLAPFNQLLQKDIISELLTSDDMKNAYNCHRHIQMQRWQRC

SEQ ID NO: 751673 - protein, 255 aa, Homo sapiens
LRRGQRPDRYSGERHPPPPYPQFVEVMASALTGYLHTISSENLLDAVYSFCLMNYFPLAPFNQLLQKDIISELLTSDDMKNAYKLHTLDTCLKLDDTVYLRDIALSLPQLPRELPSSHTNAKVAEVLSSLLGGEGHFSKDVHLPHNYHIDFEIRMDTNRNQVLPLSDVDTTSATDIQRVAVLCVSRSAYCLGSSHPRGFLAMKMRHLNAMGFHVILVNNWEMDKLEMEDAVTFLKTKIYSVEALPVAAVNVQSTQ

SEQ ID NO: 751674 - protein, 200 aa, Homo sapiens
PLRLGTRPGGEKDIISELLTSDDMKNAYKLHTLDTCLKLDDTVYLRDIALSLPQLPRELPSSHTNAKVAEVLSSLLGGEGHFSKDVHLPHNYHIDFEIRMDTNRNQVLPLSDVDTTSATDIQRVAVLCVSRSAYCLGSSHPRGFLAMKMRHLNAMGFHVILVNNWEMDKLEMEDAVTFLKTKIYSVEALPVAAVNVQSTQ

SEQ ID NO: 751675 - protein, 309 aa, Homo sapiens
MLTTLKPFGSVSVESKMNNKAGSFFWNLRQFSTLVSTSRTMRLCCLGLCKPKIVHSNWNILNNFHNRMQSTDIIRYLFQDAFIFKSDVGFQTKGISTLTALRIERLLYAKRLFFDSKQSLVPVDKSDDELKKVNLNHEVSNEDVLTKETKPNRISSRKLSEECNSLSDVLDAFSKAPTFPSSNYFTAMWTIAKRLSDDQKRFEKRLMFSHPAFNQLCEHMMREAKIMQYKYLLFSLHAIVKLGIPQNTILVQTLLRVTQERINECDEICLSVLSTVLEAMEPCKNVHVLRTGFRILVDQQVWKIEDVFT

SEQ ID NO: 751676 - protein, 677 aa, Homo sapiens
MLTTLKPFGSVSVESKMNNKAGSFFWNLRQFSTLVSTSRTMRLCCLGLCKPKIVHSNWNILNNFHNRMQSTDIIRYLFQDAFIFKSDVGFQTKGISTLTALRIERLLYAKRLFFDSKQSLVPVDKSDDELKKVNLNHEVSNEDVLTKETKPNRISSRKLSEECNSLSDVLDAFSKAPTFPSSNYFTAMWTIAKRLSDDQKRFEKRLMFSHPAFNQLCEHMMREAKIMQYKYLLFSLHAIVKLGIPQNTILVQTLLRVTQERINECDEICLSVLSTVLEAMEPCKNVHVLRTGFRILVDQQVWKIEDVFTLQVVMKCIGKDAPIALKRKLEMKALRELDRFSVLNSQHMFEVLAAMNHRSLILLDECSKVVLDNIHGCPLRIMINILQSCKDLQYHNLDLFKGLADYVAATFDIWKFRKVLFILILFENLGFRPVGLMDLFMKRIVEDPESLNMKNILSILHTYSSLNHVYKCQNKEQFVEVMASALTGYLHTISSENLLDAVYSFCLMNYFPLAPFNQLLQKDIISELLTSDDMKNAYKLHTLDTCLKLDDTVYLRDIALSLPQLPRELPSSHTNAKVAEVLSSLLGGEGHFSKDVHLPHNYHIDFEIRMDTNRNQVLPLSDVDTTSATDIQRVAVLCVSRSAYCLGSSHPRGFLAMKMRHLNAMGFHVILVRKKCK

SEQ ID NO: 751677 - protein, 552 aa, Homo sapiens; identical to SEQ ID NO: 751672

SEQ ID NO: 751678 - protein, 522 aa, Homo sapiens
MLTTLKPFGSVSVESKMNNKAGSFFWNLRQFSTLVSTSRTMRLCCLGLCKPKIVHSNWNILNNFHNRMQSTDIIRYLFQDAFIFKSDVGFQTKGISTLTALRIERLLYAKRLFFDSKQSLVPVDKSDDELKKVNLNHEVSNEDVLTKETKPNRISSRKLSEECNSLSDVLDAFSKAPTFPSSNYFTAMWTIAKRLSDDQKRFEKRLMFSHPAFNQLCEHMMREAKIMQYKYLLFSLHAIVKLGIPQNTILVQTLLRVTQERINECDEICLSVLSTVLEAMEPCKNVHVLRTGFRILVDQQVWKIEDVFTLQVVMKCIGKDAPIALKRKLEMKALRELDRFSVLNSQHMFEVLAAMNHRSLILLDECSKVVLDNIHGCPLRIMINILQSCKDLQYHNLDLFKGLADYVAATFDIWKFRKVLFILILFENLGFRPVGLMDLFMKRIVEDPESLNMKNILSILHTYSSLNHVYKCQNKEQFVEVMASALTGYLHTISSENLLDAVYSFCLMNYFPLACQYPKDLE

SEQ ID NO: 751679 - protein, 110 aa, Homo sapiens
NWLLNSQTFIINIFSNLETTVSGNNDQRNIDVTGTSRRSTILTGNTSYSEILSHAYQVCKIQLGQGCRRPPLMLVGEGDYGRKHALPQHCLCSSISKKRTFDTYQKTRPL

SEQ ID NO: 751680 - protein, 584 aa, Homo sapiens
MANEDCPKAADSPFSSDKHAQLILAQINKMRNGQHFCDVQLQVGQESFKAHRLVLAASSPYFAALFTGGMKESSKDVVPILGIEAGIFQILLDFIYTGIVNIGVNNVQELIIAADMLQLTEVVHLCCEFLKGQIDPLNCIGIFQFSEQIACHDLLEFSENYIHVHFLEVHSGEEFLALTKDQLIKILRSEELSIEDEYQVFLAAMQWILKDLGKRRKHVVEVLDPIRFPLLPPQRLLKYIEGVSDFNLRVALQTLLKEYCEVCKSPKENKFCSFLQTSKVRPRKKARKYLYAVGGYTRLQGGRWSDSRALSCVERFDTFSQYWTTVSSLHQARSGLGVTVLGGMVYAIGGEKDSMIFDCTECYDPVTKQWTTVASMNHPRCGLGVCVCYGAIYALGGWVGAEIGNTIERFDPDENKWEVVGNMAVSRYYFGCCEMQGLIYVIGGISNEGIELRSFEVYDPLSKRWSPLPPMGTRRAYLGVAALNDCIYSVGGWNETQDALHTVEKYSFEEEKWVEVASMKVPRAGMCVVAVNGLLYVSGGRSSSHDFLAPGTLDSVEVYNPHSDTWTEIGNMITSRCEGGVAVL

SEQ ID NO: 751681 - protein, 584 aa, Homo sapiens; identical to SEQ ID NO: 751680

SEQ ID NO: 751682 - protein, 584 aa, Homo sapiens; identical to SEQ ID NO: 751680

SEQ ID NO: 751683 - protein, 143 aa, Homo sapiens
SSHSLASGCPVFRGGEGTGARSTPLALLLDPKARPDPFIPWGAPASAIGMRSLKSLHKQVRDPPTCRSWATPRAIPRGCGRTQPPTDRRPESSEGAIPIPTSGEARTAIVASGKTQLEPNGPCPHCNCAENVSQMTQIGSYFF

SEQ ID NO: 751684 - protein, 72 aa, Homo sapiens
IGRQAQAGVEAPSLLHAPLSHGTLLTKHTLKNKITKNFKMVSIGHYTWSVESYVTTLVTYPQGPALPWFRDT

SEQ ID NO: 751685 - protein, 245 aa, Homo sapiens
MEQDRTNHVEGNRLSPFLIPSPPICQTEPLATKLQNGSPLPERAHPEVNGDTKWHSFKSYYGIPCMKGSQNSRVSPDFTQESRGYSKCLQNGGIKRTVSEPSLSGLLQIKKLKQDQKANGERRNFGVSQERNPGESSQPNVSDLSDKKESVSSVAQENAVKDFTSFSTHNCSGPENPELQILNEQEGKSANYHDKNIVLLKNKAVLMPNGATVSASSVEHTHGELLEKTLSQYYPDCVSIAVQKT

SEQ ID NO: 751686 - protein, 245 aa, Homo sapiens; identical to SEQ ID NO: 751685

SEQ ID NO: 751687 - protein, 83 aa, Homo sapiens
KTLVHTQTLFSSNGELDPWSGGGVTKDITDTLVAVTISEGAHHLDLRTKNALDPMSVLLARSLEVRHMKNWIRDFYDSAGKQH

SEQ ID NO: 751688 - protein, 83 aa, Homo sapiens; identical to SEQ ID NO: 751687

SEQ ID NO: 751689 - protein, 83 aa, Homo sapiens
AHTIFIKQSGESAVAVRSFQDPACGQLPAAAAHSQPQLTPRPSVSPGLDQSTGTILWVHPSMASFQETLDPGWGSGRLSPPCF

SEQ ID NO: 751690 - protein, 75 aa, Homo sapiens
FSVLACFQAADKDIPETGQFTKERGLIGLTVPRGGGRLTIMSEGKEEQVKSHVEGSRQRGNLCRETPIFQNHQIL

SEQ ID NO: 751691 - protein, 213 aa, Homo sapiens
PSFSGLPPWLLPDVRLVPDELLSALALSPARMDATGDCELQLPHLRLHPLCPCSPSHPASFSLWGVQRDSGKAGGSRRGFLGNLSTVISLLSCRYRVKCDGEGGYWCPFHSCAKESRWNLNLAEAATQDGFQRTFSRMAPPPLLPLPPSREGLFWVYSCLPCTTSPYLANSFVHSFIHSFIPHKSAEHLPCPRPLNTEVNETDMLPALKLLIV

SEQ ID NO: 751692 - protein, 168 aa, Homo sapiens
MPQCGPQKTQPHKQTKKKPNNKQGERTKDAPKGPKITSTQLLYKGPQERPRNNSSDETRQTITHANKANTGKENTVEKHHHTAGRQIATHTTEDNTEGKIKTQARITRGQPTAKATKQRRQRARRPAPRHYTASEKIPREAARAAHRKQATQRETRAAHTPRRETHNY

SEQ ID NO: 751693 - protein, 220 aa, Homo sapiens
MERYAGALEEVADGARQQERHYQLLSALQSLVKELPSSFQQRLSYTTLSDLALALLDGTVFEIVQGLLEIQHLTEKSLYNQRLRLQNEHRVLRQALRQKHQEAQQACRPHNLPVLQAAQQRELEAVEHRIREEQRAMDQKIVLELDRKVADQQSTLEKAGVAGFYVTTNPQELMLQMNLLELIRKLQQRGCWAGKAALGLGGPWQLPAAQCDQKGSPVPP

SEQ ID NO: 751694 - protein, 144 aa, Homo sapiens
MERYAGALEEVADGARQQERHYQLLSALQSLVKELPSSFQQRLSYTTLSDLALALLDGTVFEIVQGLLEIQHLTEKSLYNQRLRLQNEHRGARGQREEVPPPRGRRLPAALGICAARLLPWECSEEVPKINKIKGAETETAPFW

SEQ ID NO: 751695 - protein, 364 aa, Homo sapiens
IWYNYSCFIFYYTGTARVLGLLPQRLGGLPPTPATRSSPAPAQQLVWGAGRGQSGLAVPAGGWAPRGDHGRPRWGLRFQLSWPRGSRVVLSVSLRGQRGRRQTPTPLLGRDGALDPGPVGSGPRPLPLGRPVTGTVHLAGAPARSPDLSPNDSARAGGILHGPAISRRRSLASKVARGAGSSFQQRLSYTTLSDLALALLDGTVFEIVQGLLEIQHLTEKSLYNQRLRLQNEHRVLRQALRQKHQEAQQACRPHNLPVLQAAQQRELEAVEHRIREEQRAMDQKIVLELDRKVADQQSTLEKAGVAGFYVTTNPQELMLQMNLLELIRKLQQRGCWAGKAALGLGGPWQLPAAQCDQKGSPVPP

SEQ ID NO: 751696 - protein, 138 aa, Homo sapiens
MCPTSFVFMLRQALRQKHQEAQQACRPHNLPVLQAAQQRELEAVEHRIREEQRAMDQKIVLELDRKVADQQSTLEKAGVAGFYVTTNPQELMLQMNLLELIRKLQQRGCWAGKAALGLGGPWQLPAAQCDQKGSPVPP

SEQ ID NO: 751697 - protein, 260 aa, Homo sapiens
MERYAGALEEVADGARQQERHYQLLSALQSLVKELPSSFQQRLSYTTLSDLALALLDGTVFEIVQGLLEIQHLTEKSLYNQRLRLQNEHRVPRTFWNPLETCRDSGVGEMEEAGVLPSADTPLAWLLCWVVLRQALRQKHQEAQQACRPHNLPVLQAAQQRELEAVEHRIREEQRAMDQKIVLELDRKVADQQSTLEKAGVAGFYVTTNPQELMLQMNLLELIRKLQQRGCWAGKAALGLGGPWQLPAAQCDQKGSPVPP

SEQ ID NO: 751698 - protein, 151 aa, Homo sapiens
IWYNYSCFIFYYTGTARVLGLLPQRLGGLPPTPATRSSPAPAQQLVWGAGRGQSGLAVPAGGWAPRGDHGRPRWGLRFQLSWPRGSRVVLSVSLRGQRGRRQTPTPLLGRDGALDPGPVGSGPRPLPLGRPVTGTVHLAGAPARSPDLSPQ

SEQ ID NO: 751699 - protein, 70 aa, Homo sapiens
WSYRTSYLIGNGQLQMTNNPQELMLQMNLLELIRKLQQRGCWAGKAALGLGGPWQLPAAQCDQKGSPVPP

SEQ ID NO: 751700 - protein, 224 aa, Homo sapiens
VRDIPKEPRLGTSPVADGARQQERHYQLLSALQSLVKELPSSFQQRLSYTTLSDLALALLDGTVFEIVQGLLEIQHLTEKSLYNQRLRLQNEHRVLRQALRQKHQEAQQACRPHNLPVLQAAQQRELEAVEHRIREEQRAMDQKIVLELDRKVADQQSTLEKAGVAGFYVTTNPQELMLQMNLLELIRKLQQRGCWAGKAALGLGGPWQLPAAQCDQKGSPVPP

SEQ ID NO: 751701 - protein, 144 aa, Homo sapiens; identical to SEQ ID NO: 751694

SEQ ID NO: 751702 - protein, 220 aa, Homo sapiens; identical to SEQ ID NO: 751693

SEQ ID NO: 751703 - protein, 220 aa, Homo sapiens; identical to SEQ ID NO: 751693

SEQ ID NO: 751704 - protein, 138 aa, Homo sapiens
MKGLLPLAWFLACSVPAVQGGLLDLKSMIEKVTGKNALTNYGFYGCYCGWGGRGTPKDGTDWCCWAHDHCYGRLEEKGCNIRTQSYKYRFAWGVVTCEPGPFCHVNLCACDRKLVYCLKRNLRSYNPQYQYFPNILCS

SEQ ID NO: 751705 - protein, 138 aa, Homo sapiens; identical to SEQ ID NO: 751704

SEQ ID NO: 751706 - protein, 151 aa, Homo sapiens
QGSTRLGPGRSFSSPPPGLSSSSVTPIHSFKILEAKNLTPPGSMAVDTNVPTGDGEPARPGSPGSAQGSCSWEQTSRAGFEARPKRTPEMKGLLPLAWFLACSVPAVQGGLLDLKSMIEKVTGKNALTNYGFYGCYCGWGGRGTPKDGTDW

SEQ ID NO: 751707 - protein, 108 aa, Homo sapiens
MELSPRKHLSRARLQLTVGPQSSLYPGRATGGLGNHLTPGLDPTPKGKTSLPHPFVLLWFPDCQWGSTSFGSHWKLRDETEKKPKQQRSAQVWKCPQPALPFPPGRAA

SEQ ID NO: 751708 - protein, 341 aa, Homo sapiens
MEPAFGEVNQLGGVFVNGRPLPNAIRLRIVELAQLGIRPCDISRQLRVSHGCVSKILARYNETGSILPGAIGGSKPRVTTPTVVKHIRTYKQRDPGIFAWEIRDRLLADGVCDKYNVPSVSSISRILRNKIGNLAQQGHYDSYKQHQPTPQPALPYNHIYSYPSPITAAAAKVPTPPGVPAIPGSVAMPRTWPSSHSVTDILGIRSITDQVSDSSPYHSPKVEEWSSLGRNNFPAAAPHAVNGLEKGALEQEAKYGQAPNGLPAVGSFVSASSMAPYPTPAQVSPYMTYSAAPSGYVAGHGWQHAGGTSLSPHNCDIPASLAFKGMQAAREGSHSVTASAL

SEQ ID NO: 751709 - protein, 341 aa, Homo sapiens; identical to SEQ ID NO: 751708

SEQ ID NO: 751710 - protein, 176 aa, Homo sapiens
AAKVPTPPGVPAIPGSVAMPRTWPSSHSVTDILGIRSITDQGRGSEAGRVDVQRLPPHSRGGPSICSLRDTVFPPPEAFSFGNVRSLPRGCSDLINLKLMPLVSLPHTVFCLISNYQTHNIPPSPTHGSHFPPSPASRAEAASARLAHLESAAGAGLGAQPGRPEPAWGCRLQTPL

SEQ ID NO: 751711 - protein, 107 aa, Homo sapiens
PGIRVLCETLQHPGCNIRRLWLGRCGLSHECCFDISLVLSSNQKLVELDLSDNALGDFGIRLLCVGLKHLLCNLKKLWLVSCCLTSACCQDLASVLSTCHFLTRLYV

SEQ ID NO: 751712 - protein, 717 aa, Homo sapiens
MASTRCKLARYLEDLEDVDLKKFKMHLEDYPPQKGCIPLPRGQTEKADHVDLATLMIDFNGEEKAWAMAVWIFAAINRRDLYEKAKRDEPKWGSDNARVSNPTVICQEDSIEEEWMGLLEYLSRISICKMKKDYRKKYRKYVRSRFQCIEDRNARLGESVSLNKLYTRLRLIKEHRSQQEREQELLAIGKTKTCESPVSPIKMELLFDPDDEHSEPVHTVVFQGAAGIGKTILARKMMLDWASGTLYQDRFDYLFYIHCREVSLVTQRSLGDLIMSCCPDPNPPIHKIVRKPSRILFLMDGFDELQGAFDEHIGPLCTDWHKAERGDILLSSLIRKKLLPEASLLITTRPVALEKLQHLLDHPRHVEILGFSEAKRKEYFFKYFSDEAQARAAFSLIQENEVLFTMCFIPLVCWIVCTGLKQQMESGKSLAQTSKTTTAVYVFFLSSLLQPRGGSQEHGLCAHLWGLCSLAADGIWNQKILFEESDLRNHGLQKADVSAFLRMNLFQKEVDCEKFYSFIHMTFQEFFAAMYYLLEEEKEGRTNVPGSRLKLPSRDVTVLLENYGKFEKGYLIFVVRFLFGLVNQERTSYLEKKLSCKISQQIRLELLKWIEVKAKAKKLQIQPSQLELFYCLYEMQEEDFVQRAMDYFPKIEINLSTRMDHMVSSFCIENCHRVESLSLGFLHNMPKEEEEEEKEGRHLDMVQCVLPSSSHAACSHG

SEQ ID NO: 751713 - protein, 919 aa, Homo sapiens
MASTRCKLARYLEDLEDVDLKKFKMHLEDYPPQKGCIPLPRGQTEKADHVDLATLMIDFNGEEKAWAMAVWIFAAINRRDLYEKAKRDEPKWGSDNARVSNPTVICQEDSIEEEWMGLLEYLSRISICKMKKDYRKKYRKYVRSRFQCIEDRNARLGESVSLNKLYTRLRLIKEHRSQQEREQELLAIGKTKTCESPVSPIKMELLFDPDDEHSEPVHTVVFQGAAGIGKTILARKMMLDWASGTLYQDRFDYLFYIHCREVSLVTQRSLGDLIMSCCPDPNPPIHKIVRKPSRILFLMDGFDELQGAFDEHIGPLCTDWHKAERGDILLSSLIRKKLLPEASLLITTRPVALEKLQHLLDHPRHVEILGFSEAKRKEYFFKYFSDEAQARAAFSLIQENEVLFTMCFIPLVCWIVCTGLKQQMESGKSLAQTSKTTTAVYVFFLSSLLQPRGGSQEHGLCAHLWGLCSLAADGIWNQKILFEESDLRNHGLQKADVSAFLRMNLFQKEVDCEKFYSFIHMTFQEFFAAMYYLLEEEKEGRTNVPGSRLKLPSRDVTVLLENYGKFEKGYLIFVVRFLFGLVNQERTSYLEKKLSCKISQQIRLELLKWIEVKAKAKKLQIQPSQLELFYCLYEMQEEDFVQRAMDYFPKIEINLSTRMDHMVSSFCIENCHRVESLSLGFLHNMPKEEEEEEKEGRHLDMVQCVLPSSSHAACSHGLGRCGLSHECCFDISLVLSSNQKLVELDLSDNALGDFGIRLLCVGLKHLLCNLKKLWLVNSALRQSVVQLCPRYSALIRISRTFTARQHSRRQGIKLLCEGLLHPDCKLQVLELDNCNLTSHCCWDLSTLLTSSQSLRKLSLGNNDLGDLGVMMFCEVLKQQSCLLQNLGLSEMYFNYETKSALETLQEEKPELTVVFEPSW

SEQ ID NO: 751714 - protein, 717 aa, Homo sapiens; identical to SEQ ID NO: 751712

SEQ ID NO: 751715 - protein, 919 aa, Homo sapiens; identical to SEQ ID NO: 751713

SEQ ID NO: 751716 - protein, 193 aa, Homo sapiens
DAPARLPTVPFLIHLVATLLPPGTRRGQPHLQCPCRTPKLRQGREPQKAEWDSGWGGGQGRAGLFPAASKGCIKCEAPCPEDWLLYGRKCYFFSEEPRDWNTGRQYCHTHEAVLAVIQSQKELEFMFKFTRREPWIGLRRVGDEFHWVNGDPFDPDTFTIAGPGECVFVEPTRLVSTECLMTRPWVCSKMAYT

SEQ ID NO: 751717 - protein, 339 aa, Homo sapiens
MSSEMLPAFIETSNVDKKQGINEDQEESQKPRLGEGCEPISKRQMKKLIKQKQWEEQRELRKQKRKEKRKRKKLERQCQMEPNSDGHDRKRVRRDVVHSTLRLIIDCSFDHLMVLKDIKKLHKQIQRCYAENRRALHPVQFYLTSHGGQLKKNMDENDKGWVNWKDIHIKPEHYSELIKKEDLIYLTSDSPNILKELDESKAYVIGGLVDHNHHKGLTYKQASDYGINHAQLPLGNFVKMNSRKVLAVNHVFEIILEYLETRDWQEAFFTILPQRKGAVPTDKACESASHDNQSVRMEEGGSDSDSSEEEYSRNELDSPHEEKQDKENHTESTVNSLPH

SEQ ID NO: 751718 - protein, 339 aa, Homo sapiens; identical to SEQ ID NO: 751717

SEQ ID NO: 751719 - protein, 339 aa, Homo sapiens; identical to SEQ ID NO: 751717

SEQ ID NO: 751720 - protein, 186 aa, Homo sapiens [sequence omitted]

SEQ ID NO: 751721 - protein, 339 aa, Homo sapiens; identical to SEQ ID NO: 751717

SEQ ID NO: 751722 - protein, 387 aa, Homo sapiens
  misc_feature (23)..(24): Xaa can be any naturally occurring amino acid
RKKKTKNTQETKPKNPKKKTDNXXNPKKHSFKKSLPCQHFNSFQRHQIMSSEMLPAFIETSNVDKKQGINEDQEESQKPRLGEGCEPISKRQMKKLIKQKQWEEQRELRKQKRKEKRKRKKLERQCQMEPNSDGHDRKRVRRDVVHSTLRLIIDCSFDHLMVLKDIKKLHKQIQRCYAENRRALHPVQFYLTSHGGQLKKNMDENDKGWVNWKDIHIKPEHYSELIKKEDLIYLTSDSPNILKELDESKAYVIGGLVDHNHHKGLTYKQASDYGINHAQLPLGNFVKMNSRKVLAVNHVFEIILEYLETRDWQEAFFTILPQRKGAVPTDKACESASHDNQSVRMEEGGSDSDSSEEEYSRNELDSPHEEKQDKENHTESTVNSLPH

SEQ ID NO: 751723 - protein, 118 aa, Homo sapiens
MSSEMLPAFIETSNVDKKQGINEDQEESQKPRLGEGCEPISKRQMKKLIKQKQWEEQRELRKQKRKEKRKRKKLERQCQMEPNSDGHDRKRVRRDVVHSTLRLIIDCSFDHLMVLKVS

SEQ ID NO: 751724 - protein, 376 aa, Homo sapiens
MFPRPLTPLAAPNGAEPLGRALRRAPLGRARAGLGGPPLLLPSMLMFAVIVASSGLLLMIERGILAEMKPLPLHPPGREGTAWRGKAPKPGGLSLRAGDADLQVRQDVRNRTLRAVCGQPGMPRDPWDLPVGQRRTLLRHILVSDRYRFLYCYVPKVACSNWKRVMKVLAGVLDSVDVRLKMDHRSDLVFLADLRPEEIRYRLQHYFKFLFVREPLERLLSAYRNKFGEIREYQQRYGAEIVRRYRAGAGPSPAGDDVTFPEFLRYLVDEDPERMNEHWMPVYHLCQPCAVHYDFVGSYERLEADANQVLEWVRAPPHVRFPARQAWYRPASPESLHYHLCSAPRALLQDVLPKYILDFSLFAYPLPNVTKEACQQ

SEQ ID NO: 751725 - protein, 77 aa, Homo sapiens
QPGCSIPSAHIHLVLPPCPLLSPDARAPESSHACSVQPPHWLPGKGDNVSRLSECTSLCTEYSNTESFLCDDLCFAL

SEQ ID NO: 751726 - protein, 127 aa, Homo sapiens
PLSHPLQSFFSSFTPSSSVSLQPLLVISESLSTSAFLSHCLFLPLILWDSHSLNTNGRDLLCPMAQLSSAPQLCHHLPLPEGTRMALCKDSHQECQSQRLRDQRTQKGDLKNSCLGAGPGGSDFSGY

SEQ ID NO: 751727 - protein, 70 aa, Homo sapiens
MYLFLSQESSFPRNPRGSHAYLPLVIIQISPIIRASRLPYTWMYNPHTAFFIPSETYFSPKFLSPPSTDT

SEQ ID NO: 751728 - protein, 42 aa, Homo sapiens
MGMEGGKKCESSSVAESKWLGLCSQRLSEKEELLADLEEVKN

SEQ ID NO: 751729 - protein, 163 aa, Homo sapiens
MDYRKSPIVHVPMSLIIQMPELRENPFKERIVAAFSEDGEGNLTFNDFVDMFSVLCESAPRELKANYAFKIYDFNTDNFICKEDLELTLARLTKSELDEEEVVLVCDKVIEEADLDGDGKLGFADFEGSCSCLCLWVMSTTLPASPTPWNPHWCAVHRFVNSW

SEQ ID NO: 751730 - protein, 144 aa, Homo sapiens
MDYRKSPIVHVPMSLIIQMPELRENPFKERIVAAFSEDGEGNLTFNDFVDMFSVLCESAPRELKANYAFKIYDFNTDNFICKEDLELTLARLTKSELDEEEVVLVCDKVIEEADLDGDGKLGFADFEDMIAKAPDFLSTFHIRI

SEQ ID NO: 751731 - protein, 193 aa, Homo sapiens
LAPLPASRGFFPRPRTLTPCDLDSHGGTRAHTSSCCGAESPPLRVFVPASETPARPQHFRPREPRVRAGQRLPGPGRLLPGPGRAAAAEPGAPPSSRRRRSRCRSGFPSPPPRPPRASSRRAAGREGSGHRGPLPAAGLPRAAGTGRWLRVWRPLMGVGARAGERRRGGHHGEQADHLHRRAARQLPGLHLLQ

SEQ ID NO: 751732 - protein, 175 aa, Homo sapiens
GQLPGQHLLQLKKDILKLHSRFYELAPNLVPMDYRKSPIVHVPMSLIIQMPELRENPFKERIVAAFSEDGEGNLTFNDFVDMFSVLCESAPRELKANYAFKIYDFNTDNFICKEDLELTLARLTKSELDEEEVVLVCDKVIEEADLDGDGKLGFADFEDMIAKAPDFLSTFHIRI

SEQ ID NO: 751733 - protein, 192 aa, Homo sapiens
MGNKQTIFTEEQLDNYQDCTFFNKKDILKWGNRGSEGFGHSSRVTQAVHSLAPGPSCLSCTHSDCCVCFLQENPFKERIVAAFSEDGEGNLTFNDFVDMFSVLCESAPRELKANYAFKIYDFNTDNFICKEDLELTLARLTKSELDEEEVVLVCDKVIEEADLDGDGKLGFADFEDMIAKAPDFLSTFHIRI

SEQ ID NO: 751734 - protein, 206 aa, Homo sapiens
MGNKQTIFTEEQLDNYQDCTFFNKKDILKLHSRFYELAPNLVPMDYRKSPIVHVPMSLIIQMPELRENPFKERIVAAFSEDGEGNLTFNDFVDMFSVLCESAPRELKANYAFKIYDFNTDNFICKEDLELTLARLTKSELDEEEVVLVCDKVIEEADLDGDGKLGFADFEGSCSCLCLWVMSTTLPASPTPWNPHWCAVHRFVNSW

SEQ ID NO: 751735 - protein, 187 aa, Homo sapiens
MGNKQTIFTEEQLDNYQDCTFFNKKDILKLHSRFYELAPNLVPMDYRKSPIVHVPMSLIIQMPELRENPFKERIVAAFSEDGEGNLTFNDFVDMFSVLCESAPRELKANYAFKIYDFNTDNFICKEDLELTLARLTKSELDEEEVVLVCDKVIEEADLDGDGKLGFADFEDMIAKAPDFLSTFHIRI

SEQ ID NO: 751736 - protein, 144 aa, Homo sapiens; identical to SEQ ID NO: 751730

SEQ ID NO: 751737 - protein, 213 aa, Homo sapiens
MGNKQTIFTEEQLDNYQDCTFFNKKDILKLHSRFYELAPNLVPMDYRKSPIVHVPMSLIIQMPELRGSCPNANSGSVHVEESQDSAFRASSQENPFKERIVAAFSEDGEGNLTFNDFVDMFSVLCESAPRELKANYAFKIYDFNTDNFICKEDLELTLARLTKSELDEEEVVLVCDKVIEEADLDGDGKLGFADFEDMIAKAPDFLSTFHIRI

SEQ ID NO: 751738 - protein, 93 aa, Homo sapiens
PLGYPGPPGELRDGNYAFKIYDFNTDNFICKEDLELTLARLTKSELDEEEVVLVCDKVIEEADLDGDGKLGFADFEDMIAKAPDFLSTFHIRI

SEQ ID NO: 751739 - protein, 245 aa, Homo sapiens
PPVEKMAAVQVVGSWPSVQPREAPREAIPERGNGFRLLSARLCALRPDDSSSARTEIHLLFDQLISENYSEGSGVAPEDVSALLVQACRLVPLNQNHLVSKVSQLIHHLLNRLQVIVDEQHLDFLLAYTISAIHQCSSWTHREILQALAALVYCNGSKCQKYLPELLGNTGLLMKLSDLAQSDPEVRRAAVHCMANLCLSVPGQPYLEEPYQNVCFQAFLTILQSPKSSDMDDITFCMVSGLSLT

SEQ ID NO: 751740 - protein, 133 aa, Homo sapiens
PPVEKMAAVQVVGSWPSVQPREAPREAIPERGNGFRLLSARLCALRPDDSSSARTEIHLLFDQLISENYSEGSGVAPERQGLTLSSRLECSSKIIAHCDLKLLGSSHPPTSASQEAGTTYHHIQLIFLKKFFL

SEQ ID NO: 751741 - protein, 273 aa, Homo sapiens
PPVEKMAAVQVVGSWPSVQPREAPREAIPERGNGFRLLSARLCALRPDDSSSARTEIHLLFDQLISENYSEGSGVAPEDVSALLVQACRLVPLNQNHLVSKVSQLIHHLLNRLQYLPELLGNTGLLMKLSDLAQSDPEVRRAAVHCMANLCLSVPGQPYLEEPYQNVCFQAFLTILQSPKSSDMDDITFCMLLQNALKGIQSLLNGGRMKLTQTDELGALLAVLKKFMFHGLPGLNIEMPTVLYPTPLPQYDGRTPIKPQQSESSASRPTLNT

SEQ ID NO: 751742 - protein, 80 aa, Homo sapiens
AGWAGGAAAQGPRQRRGIGQSTGRQFGGSGERGPQAASGATSLGAFDVGAVGEGKGLACCLFSCSKIRCCEGAGRRTLCR

SEQ ID NO: 751743 - protein, 244 aa, Homo sapiens
MSAAAYMDFVAAQCLVSISNRAAVPEHGVAPDAERLRLPEREVTKEHGDPGDTWKDYCTLVTIAKSLLDLNKYRPIQTPSVCSDSLESPDEDMGSDSDVTTESGSSPSHSPEERQDPGSAPSPLSLLHPGVAAKGKHASEKRHKCPYSGCGKVYGKSSHLKAHYRVHTGERPFPCTWPDCLKKFSRSDELTRHYRTHTGEKQFRCPLCEKRFMRSDHLTKHARRHTEFHPSMIKRSKKALANAL

SEQ ID NO: 751744 - protein, 244 aa, Homo sapiens; identical to SEQ ID NO: 751743

SEQ ID NO: 751745 - protein, 244 aa, Homo sapiens; identical to SEQ ID NO: 751743

SEQ ID NO: 751746 - protein, 244 aa, Homo sapiens; identical to SEQ ID NO: 751743

SEQ ID NO: 751747 - protein, 244 aa, Homo sapiens; identical to SEQ ID NO: 751743

SEQ ID NO: 751748 - protein, 244 aa, Homo sapiens; identical to SEQ ID NO: 751743

SEQ ID NO: 751749 - protein, 244 aa, Homo sapiens; identical to SEQ ID NO: 751743

SEQ ID NO: 751750 - protein, 244 aa, Homo sapiens; identical to SEQ ID NO: 751743

SEQ ID NO: 751751 - protein, 244 aa, Homo sapiens; identical to SEQ ID NO: 751743

SEQ ID NO: 751752 - protein, 244 aa, Homo sapiens; identical to SEQ ID NO: 751743

SEQ ID NO: 751753 - protein, 101 aa, Homo sapiens
ARRAEAHSIFVLLTGPASLPAKDTGKGVPTSVPASLPCACVPGSHSHLACPRNQPADLISCPAPPPLALAFGVCAARPFLLSGCAGQGLSRRAAPTAGCLW

SEQ ID NO: 751754 - protein, 108 aa, Homo sapiens
PQPPTSRSGPGTPSPTTAQQVATLGAELEWSSKWLGRAKTPASLWDTTGTALQPLPAGVLLARTSKLSIHLAWAFAAPCRPGSSASTTLAPSQHAALPSSPVPLHCRK

SEQ ID NO: 751755 - protein, 84 aa, Homo sapiens
MTDNTAPRDSRQQSTLRVDQRNHGQRATRNARQRPAAPRDRARRDNQRRKRGTSRRTWERPGTEANSERRGATRTSEGRRHEAQ

SEQ ID NO: 751756 - protein, 74 aa, Homo sapiens
WSVRVLRRVGVFRPHCACRRAPGPRLSYFMAEEAKAQSGPVLRPGLCVGTGQSWAVNQGRLVSCCGVRLWETQE

SEQ ID NO: 751757 - protein, 148 aa, Homo sapiens
VGLRLRVLTSCSQLMLILMVQCMTMLLNVPLHFSTLPSGREWATPGTLHILAFVSCLSPLECKLQRNCIRSTWLRRPRASRHTRTGTRMGAQKFQDLTLERPGPGGCREVSITPASAESQERRLCHAQKPEMQLQGQREPERLTSHGR

SEQ ID NO: 751758 - protein, 73 aa, Homo sapiens
LWHIEALTNNTQKALNDSCMAISLLNNEDSRIRKTMLQNCMALDMLTAAQGGTFATIKTEFWIYILEESNDKT

SEQ ID NO: 751759 - protein, 72 aa, Homo sapiens
QKDSVHIHPDHQLHLRERAQSCPLGDGVTPLLASWEYSLGQNCNEAMPELKGVGLVGQRPSFIGTRNKSVSS

SEQ ID NO: 751760 - protein, 109 aa, Homo sapiens
EEGKAVASAPSAAHGDDAWHIRDPQAAAVASPAARAPAPAAVVTPPRLAVAPVPPAAPAARDMSNLGGRRNGPVEVRLTWTCHPHFRKTCIWFEKELKSRRYPTFTIYP

SEQ ID NO: 751761 - protein, 303 aa, Homo sapiens
  misc_feature (1)..(9): Xaa can be any naturally occurring amino acid
XXXXXXXXXKSLDKPEQFLYELSLIPNFSERVFCILFQSTFSESICSIRRKLELLQKLCETLKNGPGVMQVLGLVLAFGNYMNGGNKTRGQADGFGLDILPKLKDVKSSDNSRSLLSYIVSYYLRNFDEDAGKEQCLFPLPEPQDLFQASQMKFEDFQKDLRKLKKDLKACEVEAGKVYQVSSKEHMQPFKENMEQFIIQAKIDQEAEENSLTETHKCFLETTAYFFMKPKLGEKEVSPNAFFSIWHEFSSDFKDFWKKENKLLLQERVKEAEEVCRQKKGKSLYKIKPRHDSGIKAKISMKT

SEQ ID NO: 751762 - protein, 351 aa, Homo sapiens
MSSLHLDMKDIQHAVVNLDNSVVDLETLQALYENRAQSDELEKIEKHGRSSKDKENAKSLDKPEQFLYELSLIPNFSERVFCILFQSTFSESICSIRRKLELLQKLCETLKNGPGVMQVLGLVLAFGNYMNGGNKTRGQADGFGLDILPKLKDVKSSDNSRSLLSYIVSYYLRNFDEDAGKEQCLFPLPEPQDLFQASQMKFEDFQKDLRKLKKDLKACEVEAGKVYQVSSKEHMQPFKENMEQFIIQAKIDQEAEENSLTETHKCFLETTAYFFMKPKLGEKEVSPNAFFSIWHEFSSDFKDFWKKENKLLLQERVKEAEEVCRQKKGKSLYKIKPRHDSGIKAKISMKT

SEQ ID NO: 751763 - protein, 351 aa, Homo sapiens; identical to SEQ ID NO: 751762

SEQ ID NO: 751764 - protein, 779 aa, Homo sapiens
QGGHGGLPRAQRGRPLCGAGPWQPRPGLAANEEPSALENASGLSRGPAAAAMDIPPLAGKIAALSLSALPVSYALNHVSALSHPLWVALMSALILGLLFVAVYSLSHGEVSYDPLYAVFAVFAFTSVVDLIIALQEDSYVVGFMEFYTKEVLGGRPGSPLPHCPSESPTCPHRESHTCAQRTESSSATGMALFTTSSTWPWPAPSAEGRDTGILDSTGWVPSPGASWCSLQETFLVQEEQRKGLLQRPADLALVIYLILAGFFTLFRGLVVLDCPTDACFVYIYQYEPYLRDPVAYPKVQMLMYMFYVLPFCGLAAYALTFPGCSWLPDWALVFAGGIGQADAGIAPPAGTCPVLTGCAGSAVRVRRGRSAGAALGKMVCARAALGPGALWAAAWGVLLLTAPAGAQRGRKKVVHVLEGESGSVVVQTAPGQVVSHRGGTIVLPCRYHYEAAAHGHDGVRLKWTKVVDPLAFTDVFVALGPQHRAFGSYRGRAELQGDGPGDASLVLRNVTLQDYGRYECEVTNELEDDAGMVKLDLEGVVFPYHPRGGRYKLTFAEAQRACAEQDGILASAEQLHAAWRDGLDWCNAGWLRDGSVQYPVNRPREPCGGLGGTGSAGGGGDANGGLRNYGYRHNAEERYDAFCFTSNLPGRVFFLKPLRPVPFSGAARACAARGAAVAKVGQLFAAWKLQLLDRCTAGWLADGSARYPIVNPRARCGGRRPGVRSLGFPDATRRLFGVYCYRAPGAPDPAPGGWGWGWAGGGGWAGGARDPAAWTPLHV

SEQ ID NO: 751765 - protein, 526 aa, Homo sapiens
QGGHGGLPRAQRGRPLCGAGPWQPRPGLAANEEPSALENASGLSRGPAAAAMDIPPLAGKIAALSLSALPVSYALNHVSALSHPLWVALMSALILGLLFVAVYSLSHGEVSYDPLYAGRQLCGGLHGVLHQGGDLGDDQGAPYRTARLSLPPAPTGRAIPAHSARSLHLLLGWHCSLPPLPGHGRRHLQKVQEAGRGWPLTLGEKLHPQMGSQGRVEPEVSEEKSGRLSRAPARGGQEKVPGNVSGVGGGLALLTSTLCLGSHFCSWTEGLTVISPFNSLLSLPSWAKLKGTRSWETHGGLQALAGALRLRSDYLLVTPPSPAQEEIPEFWTLLAGFLRHEHPGVPYRKQFLVQEEQRKGLLQRPADLALVIYLILAGFFTLFRGLVVLDCPTDACFVYIYQYEPYLRDPVAYPKVQMLMYMFYVLPFCGLAAYALTFPGCSWLPDWALVFAGGIGQAQFSHMGASMHLRTPFTYRVPEDTWGCFFVCNLLYALGPHLLAYRCLQWPAFFHQPPPSDPLALHKKQH

SEQ ID NO: 751766 - protein, 914 aa, Homo sapiens
QGGHGGLPRAQRGRPLCGAGPWQPRPGLAANEEPSALENASGLSRGPAAAAMDIPPLAGKIAALSLSALPVSYALNHVSALSHPLWVALMSALILGLLFVAVYSLSHGEVSYDPLYAVFAVFAFTSVVDLIIALQEDSYVVGFMEFYTKEVLGGRPGSPLPHCPSESPTCPHRESHTCAQRTESSSATGMALFTTSSTWPWPAPSAEGAGGRERVAPDPGREVASSDGVPGQGGARSVCRRNQDASLGLQPGVARRRFQGNVSGVGGGLALLTSTLCLGSHFCSWTEGLTVISPFNSLLSLPSWAKLKGTRSWETHGGLQALAGALRLRSDYLLVTPPSPAQEEIPEFWTLLAGFLRHEHPGVPYRKQFLVQEEQRKGLLQRPADLALVIYLILAGFFTLFRGLVVLDCPTDACFVYIYQYEPYLRDPVAYPKVQMLMYMFYVLPFCGLAAYALTFPGCSWLPDWALVFAGGIGQADAGIAPPAGTCPVLTGCAGSAVRVRRGRSAGAALGKMVCARAALGPGALWAAAWGVLLLTAPAGAQRGRKKVVHVLEGESGSVVVQTAPGQVVSHRGGTIVLPCRYHYEAAAHGHDGVRLKWTKVVDPLAFTDVFVALGPQHRAFGSYRGRAELQGDGPGDASLVLRNVTLQDYGRYECEVTNELEDDAGMVKLDLEGVVFPYHPRGGRYKLTFAEAQRACAEQDGILASAEQLHAAWRDGLDWCNAGWLRDGSVQYPVNRPREPCGGLGGTGSAGGGGDANGGLRNYGYRHNAEERYDAFCFTSNLPGRVFFLKPLRPVPFSGAARACAARGAAVAKVGQLFAAWKLQLLDRCTAGWLADGSARYPIVNPRARCGGRRPGVRSLGFPDATRRLFGVYCYRAPGAPDPAPGGWGWGWAGGGGWAGGARDPAAWTPLHV

SEQ ID NO: 751767 - protein, 105 aa, Homo sapiens
MFYVLPFCGLAAYALTFPGCSWLPDWALVFAGGIGQAQFSHMGASMHLRTPFTYRVPEDTWGCFFVCNLLYALGPHLLAYRCLQWPAFFHQPPPSDPLALHKKQH

SEQ ID NO: 751768 - protein, 402 aa, Homo sapiens
QGGHGGLPRAQRGRPLCGAGPWQPRPGLAANEEPSALENASGLSRGPAAAAMDIPPLAGKIAALSLSALPVSYALNHVSALSHPLWVALMSALILGLLFVAVYSLSHGEVSYDPLYAVFAVFAFTSVVDLIIALQEDSYVVGFMEFYTKEGEPYLRTAHGVFICYWDGTVHYLLYLAMAGAICRRKRYRNFGLYWLGSFAMSILVFLTGNILGKYSSEIRPAFFLTIPYLLVPCWAGMKVFSQPRALTRCTANMVQEEQRKGLLQRPADLALVIYLILAGFFTLFRGLVVLDCPTDACFVYIYQYEPYLRDPVAYPKVQMLMYMFYVLPFCGLAAYALTFPGCSWLPDWALVFAGGIGQAQFSHMGASMHLRTPFTYRCLQWPAFFHQPPPSDPLALHKKQH

SEQ ID NO: 751769 - protein, 105 aa, Homo sapiens; identical to SEQ ID NO: 751767

SEQ ID NO: 751770 - protein, 174 aa, Homo sapiens
MRLSPSHGPPTDSRIRKRFQLSATPGRQRLPLGGSDGNWLLRLQENSQLRGQEKASQGPAPSVRILNLHPECGPIKDWSDVTEMIQDQQGRRALRPSECGDSAASRPFPDLPQADAVTCVGLEAGIHRGSSAEKGESREGWLGGGGGGSVLKKKGKREEGKRRKKVKKRITFKI

SEQ ID NO: 751771 - protein, 464 aa, Homo sapiens
TAPDRPSCLVLRPGVGLVGRARARAMDSLFVEEVAASLVREFLSRKGLKKTCVTMDQERPRSDLSINNRNDLRKVLHLEFLYKENKAKENPLKTSLELITRYFLDHFGNTANNFTQDTPIPALSVPKKNNKVPSRCSETTLVNIYDLSDEDAGWRTSLSETSKARHDNLDGDVLGNFVSSKRPPHKSKPMQTVPGETPVLTSAWEKIDKLHSEPSLDVKRMGENSRPKSGLIVRGMMSGPIASSPQDSFHRHYLRRSSPSSSSTQPQEESRKVPELFVCTQQDILASSNSSPSRTSLGQLSELTVERQKTTASSPPHLPSKRLPPWDRARPRDPSEDTPAVDGSTDMDRMPLKLYLPGGNSRMTQERLERAFKRQGSQPAPVRKNQLLPSDKVDGELGALRLEDVEDELIREEVILSPVPSVLKLQTASKPIDLSVAKEIKTLLFGSSFCCFNEEWKLQSFSFS

SEQ ID NO: 751772 - protein, 782 aa, Homo sapiens
TAPDRPSCLVLRPGVGLVGRARARAMDSLFVEEVAASLVREFLSRKGLKKTCVTMDQERPRSDLSINNRNDLRKVLHLEFLYKENKAKENPLKTSLELITRYFLDHFGNTANNFTQDTPIPALSVPKKNNKVPSRCSETTLVNIYDLSDEDAGWRTSLSETSKARHDNLDGDVLGNFVSSKRPPHKSKPMQTVPGETPVLTSAWEKIDKLHSEPSLDVKRMGENSRPKSGLIVRGMMSGPIASSPQDSFHRHYLRRSSPSSSSTQPQEESRKVPELFVCTQQDILASSNSSPSRTSLGQLSELTVERQKTTASSPPHLPSKRLPPWDRARPRDPSEDTPAVDGSTDMDRMPLKLYLPGGNSRMTQERLERAFKRQGSQPAPVRKNQLLPSDKVDGELGALRLEDVEDELIREEVILSPVPSVLKLQTASKPIDLSVAKEIKTLLFGSSFCCFNEEWKLQSFSFSNTASLKYGIVQNKGGPCGVLAAVQGCVLQKLLFEGDSKADCAQGLQPSDAHRTRCLVLALADIVWRAGGRERAVVALASRTQQFSPTGKYKADGVLETLTLHSLTCYEDLVTFLQQSIHQFEVGPYGCILLTLSAILSRSTELIRQDFDVPTSHLIGAHGYCTQELVNLLLTGKAVSNVFNDVVELDSGDGNITLLRGIAARSDIGFLSLFEHYNMCQVGCFLKTPRFPIWVVCSESHFSILFSLQPGLLRDWRTERLFDLYYYDGLANQQEQIRLTIDTTQTISEDTDNDLVPPLELCIRTKWKGASVNWNGSDPIL

SEQ ID NO: 751773 - protein, 228 aa, Homo sapiens
  misc_feature (23)..(23): Xaa can be any naturally occurring amino acid
  misc_feature (26)..(26): Xaa can be any naturally occurring amino acid
PTGIQADESKKITLTVARYETCXFLXKPSSFEVGPYGCILLTLSAILSRSTELIRQDFDVPTSHLIGAHGYCTQELVNLLLTGKAVSNVFNDVVELDSGDGNITLLRGIAARSDIGFLSLFEHYNMCQVGCFLKTPRFPIWVVCSESHFSILFSLQPGLLRDWRTERLFDLYYYDGLANQQEQIRLTIDTTQTISEDTDNDLVPPLELCIRTKWKGASVNWNGSDPIL

SEQ ID NO: 751774 - protein, 226 aa, Homo sapiens
VARNGITWSHSQLKQNVEPPEPGKGSDLFEVGPYGCILLTLSAILSRSTELIRQDFDVPTSHLIGAHGYCTQELVNLLLTGKAVSNVFNDVVELDSGDGNITLLRGIAARSDIGFLSLFEHYNMCQVGCFLKTPRFPIWVVCSESHFSILFSLQPGLLRDWRTERLFDLYYYDGLANQQEQIRLTIDTTQTISEDTDNDLVPPLELCIRTKWKGASVNWNGSDPIL

SEQ ID NO: 751775 - protein, 705 aa, Homo sapiens
TAPDRPSCLVLRPGVGLVGRARARAMDSLFVEEVAASLVREFLSRKGLKKTCVTMDQERPRSDLSINNRNDLRKVLHLEFLYKENKAKENPLKTSLELITRYFLDHFGNTANNFTQDTPIPALSVPKKNNKVPSRCSETTLVNIYDLSDEDAGWRTSLSETSKARHDNLDGDVLGNFVSSKRPPHKSKPMQTVPGETPVLTSAWEKIDKLHSEPSLDVKRMGENSRPKSGLIVRGMMSGPIASSPQDSFHRHYLRRSSPSSSSTQPQEESRKVPELFVCTQQDILASSNSSPSRTSLGQLSELTVERQKTTASSPPHLPSKRLPPWDRARPRDPSEDTPAVDGSTDMDRMPLKLYLPGGNSRMTQERLERAFKRQGSQPAPVRKNQLLPSDKVDGELGALRLEDVEDELIREEVILSPVPSVLKLQTASKPIDLSVAKEIKTLLFGSSFCCFNEEWKLQSFSFSNTASLKYGIVQNKGGPCGVLAAVQGCVLQKLLFEGDSKADCAQGLQPSDAHRTRCLVLALADIVWRAGGRERAVVALASRTQQFSPTGKYKADGVLETLTLHSLTCYEDLVTFLQQSIHQFEVGPYGCILLTLSAILSRSTELIRQDFDVPTSHLIGAHGYCTQVRGRCGAQVVLPPPLSLREGEVLLPPLAPEKDKSFLPLPTLFKQLSRAHLCWVSLSCHGDPERELSLASVSGQLYVH

SEQ ID NO: 751776 - protein, 419 aa, Homo sapiens
MWWLITRKELALGVRTSETWKNQLLPSDKVDGELGALRLEDVEDELIREEVILSPVPSVLKLQTASKPIDLSVAKEIKTLLFGSSFCCFNEEWKLQSFSFSNTASLKYGIVQNKGGPCGVLAAVQGCVLQKLLFEGDSKADCAQGLQPSDAHRTRCLVLALADIVWRAGGRERAVVALASRTQQFSPTGKYKADGVLETLTLHSLTCYEDLVTFLQQSIHQFEVGPYGCILLTLSAILSRSTELIRQDFDVPTSHLIGAHGYCTQELVNLLLTGKAVSNVFNDVVELDSGDGNITLLRGIAARSDIGFLSLFEHYNMCQVGCFLKTPRFPIWVVCSESHFSILFSLQPGLLRDWRTERLFDLYYYDGLANQQEQIRLTIDTTQTISEDTDNDLVPPLELCIRTKWKGASVNWNGSDPIL

SEQ ID NO: 751777 - protein, 282 aa, Homo sapiens
PCLIHLPASRLSDISDSPMGCSPPLLGPHRMLEFWGLRPRAAVGHLNPDDSSGTGQPFTHIQLTLHSLTCYEDLVTFLQQSIHQFEVGPYGCILLTLSAILSRSTELIRQDFDVPTSHLIGAHGYCTQELVNLLLTGKAVSNVFNDVVELDSGDGNITLLRGIAARSDIGFLSLFEHYNMCQVGCFLKTPRFPIWVVCSESHFSILFSLQPGLLRDWRTERLFDLYYYDGLANQQEQIRLTIDTTQTISEDTDNDLVPPLELCIRTKWKGASVNWNGSDPIL

SEQ ID NO: 751778 - protein, 121 aa, Homo sapiens
FVRSDAESARYQIHYGAVSDWAPPVGRRNRGDYMAIQAYHSYTAYAVRSCDQTVWHLSISDSLSSLMLQEDAAFKVLSWKQRLCPHQMLNLLSTLIFHFTFIRTTAVIAPAILCRNDLKTD

SEQ ID NO: 751779 - protein, 115 aa, Homo sapiens
FVRSDAESARYQIHYGAVSDWAPPVGRRNRGDYMAIQAYHSYTAYAVRSCDQTVWHLSISDSLSSLMLQEDAAFKVLSWKQRLCPHQMLNLLSTLIFHFTFIRTTGAVAEMSHGR

SEQ ID NO: 751780 - protein, 117 aa, Homo sapiens
FVRSDAESARYQIHYGAVSDWAPPVGRRNRGDYMAIQAYHSYTAYAVRSCDQTVWHLSISDSLSSLMLQEDAAFKVLSWKQRLCPHQMLNLLSTLIFHFTFIRTGAKNSEFIEEINV

SEQ ID NO: 751781 - protein, 118 aa, Homo sapiens
FVRSDAESARYQIHYGAVSDWAPPVGRRNRGDYMAIQAYHSYTAYAVRSCDQTVWHLSISDSLSSLMLQEDAAFKVLSWKQRLCPHQMLNLLSTLIFHFTFIRTVLQRGHPLLKNRRT

SEQ ID NO: 751782 - protein, 118 aa, Homo sapiens
FVRSDAESARYQIHYGAVSDWAPPVGRRNRGDYMAIQAYHSYTAYAVRSCDQTVWHLSISDSLSSLMLQEDAAFKVLSWKQRLCPHQMLNLLSTLIFHFTFIRTRWSSTVLARMVLIS

SEQ ID NO: 751783 - protein, 383 aa, Homo sapiens
RHLPERDDLAKKLVSAELKLDDTERRIKELSKNLELSTNSFQRQLLAERKRAYEAHDENKVLQKEVQRLYHKLKEKERELDIKNIYSNRLPKSSPNKEKELALRKNAACQSDFADLCTKGVQTMEDFKPEEYPLTPETIMCYENKWEEPGHLTLDLQSQKQDRHGEAGILNPIMEREEKFVTDEELHVVKQEVEKLEDEWEREELDKKQKEKASLLEREEKPEWETGRYQLGMYPIQNMDKLQGEEEERLKREMLLAKLNEIDRELQDSRNLKYPVLPLLPDFESKLHSPERSPKTYRFSESSERLFNGHHLQDISFSTPKGEGQNSGNVRSPASPNEFAFGSYVPSFAKTSERSNPFSQKSSFLDFQRNSMEKLSKDGVDLI

SEQ ID NO: 751784 - protein, 148 aa, Homo sapiens
NPGLHAGGTTSLKRYQSSALTVCSEPSPQSDRASLARCPKTNHRGPIQLWQFLLELLHDGARSSCIRWTGNSREFQLCDPKEVARLWGERKRKPGMNYEKLSRGLRYYYRRDIVRKSGGRKYTYRFGGRVPSLAYPDCAGGGRGAETQ

SEQ ID NO: 751785 - protein, 48 aa, Homo sapiens
MTETSPAGVLRCYEHGSSCFRLSHGQSRAQSAPELAEWTDELSLKAQK

SEQ ID NO: 751786 - protein, 465 aa, Homo sapiens
LARSAGTVRGCAGAPARLPGGSVIMSLRQRLAQLVGRLQDPQKVARFQRLCGVEAPPRRSADRREDEKAEAPLAGDPRLRGRQPGAPGGPQPPGSDRNQCPAKPDGGGAPNGVRNGLAAELGPASPRRAGALRRNSLTGEEGQLARVSNWPLYCLFCFGTELGNELFYILFFPFWIWNLDPLVGRRLVVIWVLVMYLGQCTKDIIRWPRPASPPVVKLEVFYNSEYSMPSTHAMSGTAIPISMVLLTYGRWQYPLIYGLILIPCWCSLVCLSRIYMGMHSILDIIAGFLYTILILAVFYPFVDLIDNFNQTHKYAPFIIIGLHLALGIFSFTLDTWSTSRGDTAEILGSGAGIACGSHVTYNMGLVLDPSLDTLPLAGPPITVTLFGKAILRILIGMVFVLIIRDVMKKITIPLACKIFNIPCDDIRKARQHMEVELPYRYITYGMVGFSITFFVPYIFFFIGIS

SEQ ID NO: 751787 - protein, 465 aa, Homo sapiens; identical to SEQ ID NO: 751786

SEQ ID NO: 751788 - protein, 749 aa, Homo sapiens
LAAMAWIRSTCILFFTLLFAHIAAVPIKHLPEENVHDADFGEQKDISEINLAAGLDLFQGDILLQKSRNGLRDPNTRWTFPIPYILADNLGLNAKGAILYAFEMFRLKSCVDFKPYEGESSYIIFQQFDGCWSEVGDQHVGQNISIGQGCAYKAIIEHEILHALGFYHEQSRTDRDDYVNIWWDQILSGYQHNFDTYDDSLITDLNTPYDYESLMHYQPFSFNKNASVPTITAKIPEFNSIIGQRLDFSAIDLERLNRMYNCTTTHTLLDHCTFEKANICGMIQGTRDDTDWAHQDSAQAGEVDHTLLGQCTGAGYFMQFSTSSGSAEEAALLESRILYPKRKQQCLQFFYKMTGSPSDRLVVWVRRDDSTGNVRKLVKVQTFQGDDDHNWKIAHVVLKEEQKFRYLFQGTKGDPQNSTGGIYLDDITLTETPCPTGVWTVRNFSQVLENTSKGDKLQSPRFYNSEGYGFGVTLYPNSRESSGYLRLAFHVCSGENDAILEWPVENRQVIITILDQEPDVRNRMSSSMVFTTSKSHTSPAINDTVIWDRPSRVGTYHTDCNCFRSIDLGWSGFISHQMLKRRSFLKNDDLIIFVDFEDITHLSQTEVPTKGKRLSPQGLILQGQEQQVSEEGSGKAMLEEALPVSLSQGQPSRQKRSVENTGPLEDHNWPQYFRDPCDPNPCQNDGICVNVKGMASCRCISGHAFFYTGERCQAVQVHGSVLGMVIGGTAGVIFLTFSIIAILSQRPRK

SEQ ID NO: 751789 - protein, 605 aa, Homo sapiens
MGRLLRAARLPPLLSPLLLLLVGGAFLGACVAGSDEPGPEGLTSTSLLDLLLPTGLEPLDSEEPSETMGLGAGLGAPGSGFPSEENEESRILQPPQYFWEEEEELNDSSLDLGPTADYVFPDLTEKAGSIEDTSQAQELPNLPSPLPKMNLVEPPWHMPPREEEEEEEEEEEREKEEVEKQEEEEEEELLPVNGSQEEAKPQVRDFSLTSSSQTPGATKSRHEDSGDQASSGVEVESSMGPSLLLPSVTPTTVTPGDQDSTSQEAEATVLPAAGLGVEFEAPQEASEEATAGAAGLSGQHEEVPALPSFPQTTAPSGAEHPDEDPLGSRTSASSPLAPGDMELTPSSATLGQEDLNQQLLEGQAAEAQSRIPWDSTQVICKDWSNLAGKNYIILNMTENIDCEVFRQHRGPQLLALVEEVLPRHGSGHHGAWHISLSKPSEKEQHLLMTLVGEQGVVPTQDVLSMLGDIRRSLEEIGIQNYSTTSSCQARASQVRSDYGTLFVVLVVIGAICIIIIALGLLYNCWQRRLPKLKHVSHGEELRFVENGCHDNPTLDVASDSQSEMQEKHPSLNGGGALNGPGSWGALMGGKRDPEDSDVFEEDTHL

SEQ ID NO: 751790 - protein, 563 aa, Homo sapiens
MGRLLRAARLPPLLSPLLLLLVGGAFLGACVAGSDEPGPEGLTSTSLLDLLLPTGLEPLDSEEPSETMGLGAGLGAPGSGFPSEENEESRILQPPQYFWEEEEELNDSSLDLGPTADYVFPDLTEKAGSIEDTSQAQELPNLPSPLPKMNLVEPPWHMPPREEEEEEEEEEEREKEEVEKQEEEEEEELLPVNGSQEEAKPQVRDFSLTSSSQTPGATKSRHEDSGDQASSGVEVESSMGPSLLLPSVTPTTVTPGDQDSTSQEAEATVLPAAGLGVEFEAPQEASEEATAGAAGLSGQHEEVPALPSFPQTTAPSGAEHPDEDPLGSRTSASSPLAPGDMELTPSSATLGQEDLNQQLLEGQAAEAQSRIPWDSTQVICKDWSNLAGKNYIILNMTENIDCEVFRQHRGPQLLALVEEVLPRHGSGHHGAWHISLSKPSEKEQHLLMTLVGEQGVVPTQDVLSMLGDIRRSLEEIGIQNYSTTSSCQARASQVRSDYGTLFVVLVVIGAICIIIIALGLLYNCWQRRLPKLKHVVSVGTGGAGGQLRGECPSIGVLICKGRQ

SEQ ID NO: 751791 - protein, 353 aa, Homo sapiens
GRVGMLLSTSTPDEATVLPAAGLGVEFEAPQEASEEATAGAAGLSGQHEEVPALPSFPQTTAPSGAEHPDEDPLGSRTSASSPLAPGDMELTPSSATLGQEDLNQQLLEGQAAEAQSRIPWDSTQVICKDWSNLAGKNYIILNMTENIDCEVFRQHRGPQLLALVEEVLPRHGSGHHGAWHISLSKPSEKEQHLLMTLVGEQGVVPTQDVLSMLGDIRRSLEEIGIQNYSTTSSCQARASQVRSDYGTLFVVLVVIGAICIIIIALGLLYNCWQRRLPKLKHVSHGEELRFVENGCHDNPTLDVASDSQSEMQEKHPSLNGGGALNGPGSWGALMGGKRDPEDSDVFEEDTHL

SEQ ID NO: 751792 - protein, 313 aa, Homo sapiens
MGYATGEHEEVPALPSFPQTTAPSGAEHPDEDPLGSRTSASSPLAPGDMELTPSSATLGQEDLNQQLLEGQAAEAQSRIPWDSTQVICKDWSNLAGKNYIILNMTENIDCEVFRQHRGPQLLALVEEVLPRHGSGHHGAWHISLSKPSEKEQHLLMTLVGEQGVVPTQDVLSMLGDIRRSLEEIGIQNYSTTSSCQARASQVRSDYGTLFVVLVVIGAICIIIIALGLLYNCWQRRLPKLKHVSHGEELRFVENGCHDNPTLDVASDSQSEMQEKHPSLNGGGALNGPGSWGALMGGKRDPEDSDVFEEDTHL

SEQ ID NO: 751793 - protein, 387 aa, Homo sapiens
MGRLLRAARLPPLLSPLLLLLVGGAFLGACVAGSDEPGPEGLTSTSLLDLLLPTGLEPLDSEEPSETMGLGAGLGAPGSGFPSEENEESRILQPPQYFWEEEEELNDSSLDLGPTAGALLTYRALTPSSATLGQEDLNQQLLEGQAAEAQSRIPWDSTQVICKDWSNLAGKNYIILNMTENIDCEVFRQHRGPQLLALVEEVLPRHGSGHHGAWHISLSKPSEKEQHLLMTLVGEQGVVPTQDVLSMLGDIRRSLEEIGIQNYSTTSSCQARASQVRSDYGTLFVVLVVIGAICIIIIALGLLYNCWQRRLPKLKHVSHGEELRFVENGCHDNPTLDVASDSQSEMQEKHPSLNGGGALNGPGSWGALMGGKRDPEDSDVFEEDTHL

SEQ ID NO: 751794 - protein, 158 aa, Homo sapiens
MTLVGEQGVVPTQDVLSMLGDIRRSLEEIGIQNYSTTSSCQARASQVRSDYGTLFVVLVVIGAICIIIIALGLLYNCWQRRLPKLKHVSHGEELRFVENGCHDNPTLDVASDSQSEMQEKHPSLNGGGALNGPGSWGALMGGKRDPEDSDVFEEDTHL

SEQ ID NO: 751795 - protein, 184 aa, Homo sapiens
MASKRALVILAKGAEEMETVIPVGLHPTPQAPLRVVPTQDVLSMLGDIRRSLEEIGIQNYSTTSSCQARASQVRSDYGTLFVVLVVIGAICIIIIALGLLYNCWQRRLPKLKHVSHGEELRFVENGCHDNPTLDVASDSQSEMQEKHPSLNGGGALNGPGSWGALMGGKRDPEDSDVFEEDTHL

SEQ ID NO: 751796 - protein, 141 aa, Homo sapiens [sequence omitted]

SEQ ID NO: 751797 - protein, 245 aa, Homo sapiens
MISTRVMDIKLREAAEGLGEDSTGKKKSKFKTFKKFFGKKKRKESPSSTGSSTWKQSQTRNEVIAIESGPVGYDSEDELEESRGTLGSRALSHDSIFIPESGQDATRPVRVFSQENVCDRIKALQLKIQCNVKMGPPPPPGGLPAKRGEDAGMSSEDDGLPRSPPEMSLLHDVGPGTTIKVSVVSPDHVSDSTVSARISDNSLAPVADFSYPAESSSCLDNSAAKHKLQVKPRNQRSSKMRRLSS

SEQ ID NO: 751798 - protein, 112 aa, Homo sapiens
MGPPPPPGGLPAKRGEDAGMSSEDDGLPRSPPEMSLLHDVGPGTTIKVSVVSPDHVSDSTVSARISDNSLAPVADFSYPAESSSCLDNSAAKHKLQVKPRNQRSSKMRRLSS

SEQ ID NO: 751799 - protein, 133 aa, Homo sapiens
GELSGVRPRRAERSASEAGAPAAGSWELGARRAQGRAGRGRVVSAPASSSSAADPGCLEAARPPAASPRLWAGARRAPRREQPRLAAPRGRCPSLRVSPSPGHAPVPGFNSMIVCYEYMAACLKKFTGFKMWA

SEQ ID NO: 751800 - protein, 259 aa, Homo sapiens
MISLASVQDKSELDMISTRVMDIKLREAAEGLGEDSTGKKKSKFKTFKKFFGKKKRKESPSSTGSSTWKQSQTRNEVIAIESGPVGYDSEDELEESRGTLGSRALSHDSIFIPESGQDATRPVRVFSQENVCDRIKALQLKIQCNVKMGPPPPPGGLPAKRGEDAGMSSEDDGLPRSPPEMSLLHDVGPGTTIKVSVVSPDHVSDSTVSARISDNSLAPVADFSYPAESSSCLDNSAAKHKLQVKPRNQRSSKMRRLSS

SEQ ID NO: 751801 - protein, 41 aa, Homo sapiens
MGPPPPPGGLPAKRGEDAGMSSEDDGLPRSPPEMSLLHDVG

SEQ ID NO: 751802 - protein, 184 aa, Homo sapiens
CKHIVFVQLQEGEHVFQPREPDPSICVVQDGRLEVCIQDTDGTEVVVKEVLAGDSVHSLLSILDIITGHAAPYKTVSVRAAIPSTILRLPAAAFHGVFEKYPETLVRVVQIIMVRLQRVTFLALHNYLGLTTELFNAESQAIPLVSVASVAAGKAKKQVFYGEEERLKKPPRLQESCDSGTVLH

SEQ ID NO: 751803 - protein, 152 aa, Homo sapiens
MFHENLVRVVERLAGASPSSYRCPDRGPEVSGLSSTWKPLTSVAIKPPDKTSPEAFWLHQKTDGRPVFTDAYTSSWLPPTEVASVQKFIPEHQAGGCQLLLRFRCIRKLMHLVQMSRSGSDSPGLGSGDTDDSLEQSGFSRNGRDKSQARGV

SEQ ID NO: 751804 - protein, 189 aa, Homo sapiens
GLPFPCFPPEPFLLFPPLAQGNPQATRRRGPIQEGIVPLEEPLVRVVERLAGASPSSYRCPDRGPEVSGLSSTWKPLTSVAIKPPDKTSPEAFWLHQKTDGRPVFTDAYTSSWLPPTEVASVQKFIPEHQAGGCQLLLRFRCIRKLMHLVQMSRSGSDSPGLGSGDTDDSLEQSGFSRNGRDKSQARGV

SEQ ID NO: 751805 - protein, 362 aa, Homo sapiens
SRAPAGVTPAIVPTSTWAARQAGDGGPGAMGDWGFLEKLLDQVQEHSTVVGKIWLTVLFIFRILILGLAGESVWGDEQSDFECNTAQPGCTNVCYDQAFPISHIRYWVLQFLFVSTPTLVYLGHVIYLSRREERLRQKEGELRALPAKDPQVERALAAVERQMAKISVAEDGRLRIRGALMGTYVASVLCKSVLEAGFLYGQWRLYGWTMEPVFVCQRAPCPYLVDCFVSRPTEKTIFIIFMLVVGLISLVLNLLELVHLLCRCLSRGMRARQGQDAPPTQGTSSDPYTDQVFFYLPVGQGPSSPPCPTYNGLSSSEQNWANLTTEERLASSRPPLFLDPPPQNGQKPPSRPSSSASKKQYV

SEQ ID NO: 751806 - protein, 362 aa, Homo sapiens; identical to SEQ ID NO: 751805

SEQ ID NO: 751807 - protein, 333 aa, Homo sapiens
MGDWGFLEKLLDQVQEHSTVVGKIWLTVLFIFRILILGLAGESVWGDEQSDFECNTAQPGCTNVCYDQAFPISHIRYWVLQFLFVSTPTLVYLGHVIYLSRREERLRQKEGELRALPAKDPQVERALAAVERQMAKISVAEDGRLRIRGALMGTYVASVLCKSVLEAGFLYGQWRLYGWTMEPVFVCQRAPCPYLVDCFVSRPTEKTIFIIFMLVVGLISLVLNLLELVHLLCRCLSRGMRARQGQDAPPTQGTSSDPYTDQVFFYLPVGQGPSSPPCPTYNGLSSSEQNWANLTTEERLASSRPPLFLDPPPQNGQKPPSRPSSSASKKQYV

SEQ ID NO: 751808 - protein, 162 aa, Homo sapiens
NIIIKKSKDHCTPAWATRAKLPYLVDCFVSRPTEKTIFIIFMLVVGLISLVLNLLELVHLLCRCLSRGMRARQGQDAPPTQGTSSDPYTDQVFFYLPVGQGPSSPPCPTYNGLSSSEQNWANLTTEERLASSRPPLFLDPPPQNGQKPPSRPSSSASKKQYV

SEQ ID NO: 751809 - protein, 1932 aa, Homo sapiens
SFKSVWWLRRRLRAWGPGRGARPWGRASGAAVGLGGASTWPEGGHPEPAEGQACPQARLPAMPSVCLLLLLFLAVGGALGNRPFRAFVVTDTTLTHLAVHRVTGEVFVGAVNRVFKLAPNLTELRAHVTGPVEDNARCYPPPSMRVCAHRLAPVDNINKLLLIDYAARRLVACGSIWQGICQFLRLDDLFKLGEPHHRKEHYLSGAQEPDSMAGVIVEQGQGPSKLFVGTAVDGKSEYFPTLSSRKLISDEDSADMFSLVYQDEFVSSQIKIPSDTLSLYPAFDIYYIYGFVSASFVYFLTLQLDTQQTLLDTAGEKFFTSKIVRMCAGDSEFYSYVEFPIGCSWRGVEYRLVQSAHLAKPGLLLAQALGVPADEDVLFTIFSQGQKNRASPPRQTILCLFTLSNINAHIRRRIQSCYRGEGTLALPWLLNKELPCINTPMQINGNFCGLVLNQPLGGLHVIEGLPLLADSTDGMASVAAYTYRQHSVVFIGTRSGSLKKVRVDGFQDAHLYETVPVVDGSPILRDLLFSPDHRHIYLLSEKQVSQLPVETCEQYQSCAACLGSGDPHCGWCVLRHRCCREGACLGASAPHGFAEELSKCVQVRVRPNNVSVTSPGVQLTVTLHNVPDLSAGVSCAFEAAAENEAVLLPSGELLCPSPSLQELRALTRGHGATRTVRLQLLSKETGVRFAGADFVFYNCSVLQSCMSCVGSPYPCHWCKYRHTCTSRPHECSFQEGRVHSPEGCPEILPSGDLLIPVGVMQPLTLRAKNLPQPQSGQKNYECVVRVQGRQQRVPAVRFNSSSVQCQNASYSYEGDEHGDTELDFSVVWDGDFPIDKPPSFRALLYKCWAQRPSCGLCLKADPRFNCGWCISEHRCQLRTHCPAPKTNWMHLSQKGTRCSHPRITQIHPLVGPKEGGTRVTIVGENLGLLSREVGLRVAGVRCNSIPAEYISAERIVCEMEESLVPSPPPGPVELCVGDCSADFRTQSEQVYSFVTPTFDQVSPSRGPASGGTRLTISGSSLDAGSRVTVTVRDSECQFVRRDAKAIVCISPLSTLGPSQAPITLAIDRANISSPGLIYTYTQDPTVTRLEPTWSIINGSTAITVSGTHLLTVQEPRVRAKYRGIETTNTCQVINDTAMLCKAPGIFLGRPQPRAQGEHPDEFGFLLDHVQTARSLNRSSFTYYPDPSFEPLGPSGVLDVKPGSHVVLKGKNLIPAAAGSSRLNYTVLIGGQPCSLTVSDTQLLCDSPSQTGRQPVMVLVGGLEFWLGTLHISAERALTLPAMMGLAAGGGLLLLAITAVLVAYKRKTQDADRTLKRLQLQMDNLESRVALECKEAFAELQTDINELTNHMDEVQIPFLDYRTYAVRVLFPGIEAHPVLKELDTPPNVEKALRLFGQLLHSRAFVLTFIHTLEAQSSFSMRDRGTVASLTMVALQSRLDYATGLLKQLLADLIEKNLESKNHPKLLLRRTESVAEKMLTNWFTFLLHKFLKECAGEPLFLLYCAIKQQMEKGPIDAITGEARYSLSEDKLIRQQIDYKTLTLHCVCPENEGSAQVPVKVLNCDSITQAKDKLLDTVYKGIPYSQRPKAEDMDLEWRQGRMTRIILQDEDVTTKIECDWKRLNSLAHYQVTDGSLVALVPKQVSAYNMANSFTFTRSLSRYESLLRTASSPDSLRSRAPMITPDQETGTKLWHLVKNHDHADHREGDRGSKMVSEIYLTRLLATKGTLQKFVDDLFETVFSTAHRGSALPLAIKYMFDFLDEQADQRQISDPDVRHTWKSNCLPLRFWVNVIKNPQFVFDIHKNSITDACLSVVAQTFMDSCSTSEHRLGKDSPSNKLLYAKDIPNYKSWVERYYRDIAKMASISDQDMDAYLVEQSRLHASDFSVLSALNELYFYVTKYRQEILTALDRDASCRKHKLRQKLEQIISLVSSDS
